United States Patent Application Publication US 2011/0182862 A1 - sequence listing, part 22

SEQ ID NO: 31780 - protein, 327 aa, Muscodor strobelii
  misc_feature: SGI Peptide ID NO. 570944
  misc_feature (37)..(220): Pfam Id: PF00106 Pfam Desc: short chain dehydrogenase
  misc_feature (33)..(327): NCBI GI: 46128283 Blast Desc: FG08519.1 [Gibberella zeae PH-1]
  misc_feature (33)..(325): NCBI GI: 256733493 Blast Desc: NECHADRAFT_91804 [Nectria haematococca mpVI 77-13-4]
  misc_feature (1)..(326): NCBI GI: 145608974 Blast Desc: MGG_06223 [Magnaporthe grisea 70-15] gi|145016388|gb|EDK00878.1| MGG_06223 [Magnaporthe grisea 70-15]
  misc_feature (4)..(300): NCBI GI: 156054808 Blast Desc: SS1G_06252 [Sclerotinia sclerotiorum 1980] gi|154704032|gb|EDO03771.1| SS1G_06252 [Sclerotinia sclerotiorum 1980]
  misc_feature (5)..(282): NCBI GI: 119183499 Blast Desc: CIMG_06684 [Coccidioides immitis RS]
  misc_feature (5)..(293): NCBI GI: 226287078 Blast Desc: NAD-dependent 15-hydroxyprostaglandin dehydrogenase [Paracoccidioides brasiliensis Pb18]
  misc_feature (39)..(324): NCBI GI: 169613110 Blast Desc: SNOG_09685 [Phaeosphaeria nodorum SN15] gi|160702650|gb|EAT82950.2| SNOG_09685 [Phaeosphaeria nodorum SN15]
  misc_feature (5)..(298): NCBI GI: 226277523 Blast Desc: NAD-dependent 15-hydroxyprostaglandin dehydrogenase [Paracoccidioides brasiliensis Pb01]
  misc_feature (4)..(320): NCBI GI: 145256358 Blast Desc: An19g00290 [Aspergillus niger CBS 513.88] gi|134084764|emb|CAK47352.1| protein product [Aspergillus niger]
  misc_feature (4)..(324): NCBI GI: 159126556 Blast Desc: NAD-dependent 15-hydroxyprostaglandin dehydrogenase [Aspergillus fumigatus A1163]
  misc_feature (4)..(282): SWISSPROT Homolog: EC 1.1.1.141 15-hydroxyprostaglandin dehydrogenase (NAD(+))
MSRLSVAGKFAIVTGAGSGKIIIVYSLAIPHKRLTTTTGINFAFAMLLLQKGCSVVIGDLALRPEAEKLIADYPYTQGSSTPSAIFHRTDVTSWPQLSSLFDKGLSSYGRVDIIVPGAGLFEPPFSGFWNPPKTATNPNSPSRDDANGEPGSYKQIEVNLTHPIRLSQLGIGYWTKNKIPGTLVHVSSIAGHATGIGSPLYFATKHGLHGFVRSLGSLRDSVGIRVSAIAPGSVRTPMWTEAEDKKHLTRGGQDTPIEPETIADGMLELCENPEYGNGTILECINDYTRVVPLYNADPPILRAVSMPALAESYGELVEKLKTEGLDT

SEQ ID NO: 31781 - DNA, 357 bp, Muscodor strobelii
  misc_feature: SGI EST ID NO. CUFF.75174.0
  misc_feature: Variant of the nucleotide sequence at SEQ ID NO 31779
gtcggtatcagagtgagcgcaattgcgccaggttcagtcaggactccgatgtggaccgaagccgaggataagaaacacctcacccggggagggcaagatactcccatagaaccagagacgattgccgatggtatgttagagttatgcgagaacccggaatacggaaatggcacgatcttggagtgtatcaatgattatacgagagttgtccccttatataatgctgatcccccaatattgagggcggtgagcatgccggcccttgctgagtcttatggagagctggttgagaaacttaagactgaggggttggatacgtgagtctagtgtatttgtagtcttcatagtgtggctagt

SEQ ID NO: 31782 - DNA, 1257 bp, Muscodor strobelii
  misc_feature: SGI cDNA ID NO. 570945
  misc_feature: Encodes the peptide sequence at SEQ ID NO 31783
atgtcatggtcagaggcttccgagggatcggagtctgagggcgttgagcccttcggagatttcgagtatcacgaatgcgaccccgacggcaatctcttcttgaatgtagagcaggaaggattacagcgacggtttctgttgcgctacaaatcaaaccttgagatatccttcgagacgcagcatgccaacccagtcgcactggcagtcctattcgatatcgcccatggcaacttctgcaaggtacctaatcatctttcactggacgatctacaccacgttgcagtcgcgtcagctacctatcatatgcaacaaatcttacttccatgggcttcgacttggattaagatacttgacgaagttgcaaccgaagaattcgacgcaacgacggctaacaaaagcctccgaattgcttgggtctttggatccagcaagaacttctatcgtctcgtacgagaacttgcgtatcatggagtcgagccaggcaacttcgtaaacacattcgacgtcgtcgccaagacacgagagaggtacctcaaggccttcctcgatgtcatcaatgccgaggtcaacacccttctcgactcacccagttgcgaatgtggccaagcgctttgtagtgagcaattggtcggcagcgtttttcgaaacttacgcgctattggtctgtggccaatcccagaaggcccagttagcgagtcaccagtacaactgtacccaatcctctctaacatgaagctccctgccacaggctcggatgtggcagatgaggcaaatgaggcaatagacatctgcctacgtcttgctggtattaagacaggatgtcttgtcggtctcgacagtagtgcagaagatgccagcaatgtcaacaacgagcttgcggtcgatgagcgcccaaagactcccgatcccaaccgacctagatcccacgatggcaacaagtatctcgagggaaatgtgcccatgacacctatctcgcctctgtttaggatcagcactgcaacccaagaggaggagtacagtgataatgacgatgatgttgttcaagagaacacccgtgtcgtagaggagagtgttaatgaagacactcgttccagcgccgacgataatgactcggagatcctgtatgtgcgaccacggaaaagaaagcgtaaacgaagacccgagcccgacggcaagttcgtgccagatagcaatgacgagtgggacagtgatgggccgaggaagcaacagaagacagtacctccgaataagacttga

SEQ ID NO: 31783 - protein, 418 aa, Muscodor strobelii
  misc_feature: SGI Peptide ID NO. 570945
  misc_feature (64)..(270): NCBI GI: 261353831 Blast Desc: conserved [Verticillium albo-atrum VaMs.102]
  misc_feature (33)..(250): NCBI GI: 256721128 Blast Desc: [Nectria haematococca mpVI 77-13-4]
  misc_feature (67)..(250): NCBI GI: 256724501 Blast Desc: NECHADRAFT_88143 [Nectria haematococca mpVI 77-13-4]
  misc_feature (27)..(156): NCBI GI: 85085459 Blast Desc: NCU04437 [Neurospora crassa OR74A] gi|28918606|gb|EAA28278.1| [Neurospora crassa OR74A] gi|40882183|emb|CAF06009.1| related to nuclear pore protein
  misc_feature (73)..(217): NCBI GI: 255945345 Blast Desc: Pc20g09440 [Penicillium chrysogenum Wisconsin 54-1255] gi|211588175|emb|CAP86273.1| Pc20g09440 [Penicillium chrysogenum Wisconsin 54-1255]
  misc_feature (33)..(229): NCBI GI: 119477312 Blast Desc: NFIA_072760 [Neosartorya fischeri NRRL 181] gi|119407413|gb|EAW17362.1| conserved [Neosartorya fischeri NRRL 181]
  misc_feature (63)..(262): NCBI GI: 116201755 Blast Desc: [Chaetomium globosum CBS 148.51] gi|88177280|gb|EAQ84748.1| [Chaetomium globosum CBS 148.51]
  misc_feature (35)..(224): NCBI GI: 261205306 Blast Desc: conserved [Ajellomyces dermatitidis SLH14081] gi|239592449|gb|EEQ75030.1| conserved [Ajellomyces dermatitidis SLH14081] gi|239611395|gb|EEQ88382.1| conserved [Ajellomyces
  misc_feature (41)..(224): NCBI GI: 240277976 Blast Desc: conserved [Ajellomyces capsulatus H143]
  misc_feature (63)..(229): NCBI GI: 145244184 Blast Desc: An11g06100 [Aspergillus niger] gi|134079284|emb|CAK96913.1| protein product [Aspergillus niger]
MSWSEASEGSESEGVEPFGDFEYHECDPDGNLFLNVEQEGLQRRFLLRYKSNLEISFETQHANPVALAVLFDIAHGNFCKVPNHLSLDDLHHVAVASATYHMQQILLPWASTWIKILDEVATEEFDATTANKSLRIAWVFGSSKNFYRLVRELAYHGVEPGNFVNTFDVVAKTRERYLKAFLDVINAEVNTLLDSPSCECGQALCSEQLVGSVFRNLRAIGLWPIPEGPVSESPVQLYPILSNMKLPATGSDVADEANEAIDICLRLAGIKTGCLVGLDSSAEDASNVNNELAVDERPKTPDPNRPRSHDGNKYLEGNVPMTPISPLFRISTATQEEEYSDNDDDVVQENTRVVEESVNEDTRSSADDNDSEILYVRPRKRKRKRRPEPDGKFVPDSNDEWDSDGPRKQQKTVPPNKT

SEQ ID NO: 31784 - DNA, 774 bp, Muscodor strobelii
  misc_feature: SGI cDNA ID NO. 570946
  misc_feature: Encodes the peptide sequence at SEQ ID NO 31785
atggaggaggcgctgcatcctttggctcgcggttggctcaagtcgctttgggacgagctccctgaacaatactccagctggcattatcttgctggactctatattgcctgggtattcgggtcgagcgagcattttgaccactgcctccaggagctcgcgtctcacaatgatggaacgattggcgcgggaaactgggctagaccatatgcatatctatccaccatactggaaattcgacaaaacatgttgcgagactacctcaccgttctagaggacgagctcggggggctcacagatccgcaacgccccgaatgcggctgtggcaatgagttctgtaccgaacagatactcggtagtgtcattcgtgctctccgagccgcgaatgtgtggcaaaaacctgaagccgcgccaaattggtggatgggatcgccatcggaagttcgacgcactccaaatgatgtatatgaagccttctcacagttgaaatccaccaaatcgctctgtttaatatcatggatcacacatgtcgaaaccaaattggacaaggtgcgcaagaattcaacgaccgactacgacaattacgggtaccatcgaaagtttttgcgcgagcaaggttgtaaaacaggttgttatgaaggaccctcagatatcgaagatatgagcgagtctgccgatgccgttgaaagtgctgcccccaaagaagccgagggcgaagagaagagtattgccgacctgtggactcatgttggaagttggggggtcgtgtgggagtaa

SEQ ID NO: 31785 - protein, 257 aa, Muscodor strobelii
  misc_feature: SGI Peptide ID NO. 570946
MEEALHPLARGWLKSLWDELPEQYSSWHYLAGLYIAWVFGSSEHFDHCLQELASHNDGTIGAGNWARPYAYLSTILEIRQNMLRDYLTVLEDELGGLTDPQRPECGCGNEFCTEQILGSVIRALRAANVWQKPEAAPNWWMGSPSEVRRTPNDVYEAFSQLKSTKSLCLISWITHVETKLDKVRKNSTTDYDNYGYHRKFLREQGCKTGCYEGPSDIEDMSESADAVESAAPKEAEGEEKSIADLWTHVGSWGVVWE

SEQ ID NO: 31786 - DNA, 816 bp, Muscodor strobelii
  misc_feature: SGI cDNA ID NO. 570947
  misc_feature: Encodes the peptide sequence at SEQ ID NO 31787
atggcaattgatcatgatcatccgcgaccatccgagtcgtccgcagcaccaccaccatactcagcatctcacaatcatgccagacaccacgatcattatgcccctgcagaaccagctccacattataatgctgtcttagcgaagccaagtgttggaaaatacccgagaatactcaatggatatttttcaaagggctgcaattctaacatttacctcggcgggcgggaaagcgaacggatgtacctgatgacgcaaaatggcactttcagcggcaaacctgaatttgttcttcacgacggcacaaaggagactgacccggtgctcgcaacttctgaacgcgactcgataatcaagccaaaaattcatcatttgacaattcctgcccaggatggcgttcgccacgatgagaagagccagcgcgtcgagatgaaaagcagctcattatttatgagaaacaacagctacactttcgaagccgatgtcggaatcgggaaggagactcaccgagagcgatttgagtggaagcagaccctcgggggtgaagtcgaggcgcttgagggttataattggggctggaagcttgtgcggatttccagtgagtcaaacggcacgggctcgtctgggagtggagaggaagttgtcgccgcatggacatttgacagcagttgctccgtgacgcattcctttagacttcaattcatgggtcacgctctgacgggcttgatgggtgatcggtgggcaacgcttacgattatgtcgactttgaagatatgggcggtgtctattcacagctccgctgtcgttgtgtccaagtga

SEQ ID NO: 31787 - protein, 271 aa, Muscodor strobelii
  misc_feature: SGI Peptide ID NO. 570947
  misc_feature (2)..(263): NCBI GI: 255951174 Blast Desc: Pc22g24660 [Penicillium chrysogenum Wisconsin 54-1255] gi|211593371|emb|CAP99754.1| Pc22g24660 [Penicillium chrysogenum Wisconsin 54-1255]
  misc_feature (18)..(265): NCBI GI: 240105211 Blast Desc: CPC735_047740 [Coccidioides posadasii C735 delta SOWgp]
  misc_feature (47)..(265): NCBI GI: 119194669 Blast Desc: CIMG_01709 [Coccidioides immitis RS]
  misc_feature (48)..(263): NCBI GI: 115433430 Blast Desc: [Aspergillus terreus NIH2624] gi|114189704|gb|EAU31404.1| [Aspergillus terreus NIH2624]
  misc_feature (95)..(263): NCBI GI: 169777689 Blast Desc: [Aspergillus oryzae RIB40] gi|83772047|dbj|BAE62177.1| protein product [Aspergillus oryzae]
  misc_feature (95)..(263): NCBI GI: 238494878 Blast Desc: conserved [Aspergillus flavus NRRL3357] gi|220695325|gb|EED51668.1| conserved [Aspergillus flavus NRRL3357]
  misc_feature (16)..(258): NCBI GI: 46134219 Blast Desc: FG09249.1 [Gibberella zeae PH-1]
  misc_feature (53)..(260): NCBI GI: 39972603 Blast Desc: MGG_07603 [Magnaporthe grisea 70-15] gi|145016807|gb|EDK01237.1| MGG_07603 [Magnaporthe grisea 70-15]
  misc_feature (69)..(266): NCBI GI: 256730926 Blast Desc: NECHADRAFT_96110 [Nectria haematococca mpVI 77-13-4]
  misc_feature (11)..(246): NCBI GI: 261352745 Blast Desc: conserved [Verticillium albo-atrum VaMs.102]
MAIDHDHPRPSESSAAPPPYSASHNHARHHDHYAPAEPAPHYNAVLAKPSVGKYPRILNGYFSKGCNSNIYLGGRESERMYLMTQNGTFSGKPEFVLHDGTKETDPVLATSERDSIIKPKIHHLTIPAQDGVRHDEKSQRVEMKSSSLFMRNNSYTFEADVGIGKETHRERFEWKQTLGGEVEALEGYNWGWKLVRISSESNGTGSSGSGEEVVAAWTFDSSCSVTHSFRLQFMGHALTGLMGDRWATLTIMSTLKIWAVSIHSSAVVVSK

SEQ ID NO: 31788 - DNA, 1433 bp, Muscodor strobelii
  misc_feature: SGI EST ID NO. CUFF.75195.0
  misc_feature: Variant of the nucleotide sequence at SEQ ID NO 31786
tccggggttgctattgtcatattccactttcttaggacctgtggacgatttgaaggtgtccatttcgagagaactaagaaactatttggatcaagatcagttccctggctcccggcaacaaatcgaacatacaacaatggcaattgatcatgatcatccgcgaccatccgagtcgtccgcagcaccaccaccatactcagcatctcacaatcatgccagacaccacgatcattatgcccctgcagaaccagctccacattataatgctgtcttagcgaagccaagtgttggaaaatacccgagaatactcaatggatatttttcaaagggctgcaattctaacatttacctcggcgggcgggaaagcgaacggatgtacctgatgacgcaaaatggcactttcagcggcaaacctgaatttgttcttcacgacggcacaaaggagactgacccggtgctcgcaacttctgaacgcgactcgataatcaagccaaaaattcatcatttgacaattcctgcccaggatggcgttcgccacgatgagaagagccagcgcgtcgagatgaaaagcagctcattatttatgagaaacaacagctacactttcgaagccgatgtcggaatcgggaaggagactcaccgagagcgatttgagtggaagcagaccctcgggggtgaagtcgaggcgcttgagggttataattggggctggaagcttgtgcggatttccagtgagtcaaacggcacgggctcgtctgggagtggagaggaagttgtcgccgcatggacatttgacagcagttgctccgtgacgcattcctttagacttcaattcatgggtcacgctctgacgggcttgatgggtgatcggtgggcaacgcttacgattatgtcgactttgaagatatgggcggtgtctattcacagctccgctgtcgttgtgtccaagtgatcgaggcgacgattgcgtgtacgaaccgagcttcggatatttcagaagtggttctggtggctgaattgagcatttcacaatgacgaatttgcgcttggcgtgacggtgttatgcgtacgggtgatatttagtgattaacactcgctcggacatgagtttaaagtcgtggagggccggaatttcagtagagacaacccaagatgcaaggcggtcttgctgaacctggacggttgcgtatgccaatggccaggttctaacttcttttttatacattactctcgggtgctgtttgacgaagggtcaagggcaggatcataagcgcagagatggacagactttgatttgagtacatattgggtagagtcaggacctaaccatcagccagacgcgcgtagaaattcgagagtattgttcaagaacgtgtagagaagataaagcactcgcaacgtattgcgattatacgcattaacttgaacatgaa

SEQ ID NO: 31789 - DNA, 768 bp, Muscodor strobelii
  misc_feature: SGI cDNA ID NO. 570948
  misc_feature: Encodes the peptide sequence at SEQ ID NO 31790
atgaaaccagtcatcatgttagttcatggagcctggcatacgccggagtactggtttttagtcaaagatcggcttgaagaggccggttacgacgtcctggcgccccggttgccgtctgtttgcggaccggagacggtgaactattcgtggcgctcagacgcggctacagttctggaccatgctacgccactattcgctgctgggcgcaacgtggtcgtcgttgggcattcgtatggaggtagtgtggttacgaactcggtgcccgggaacaccgttcacgaaagagctgctaaaggcttgaagggtggattttcagccgtggtgtatatatgtggttttcctgtcgttcagcgcgatacaccatgtgtaacgggagagcaccaagggtactatacttgtgctgagcctcaaaaaggaaacagcttttcgatgcgcatctaccccggccaagagcctttctacaacgacttaccagaagaggaggcgaagaagtggaatgagaaactccaatggcagtctcagcgttcgtttgaggagccgtacgcctggtgtgcccaagacttgagcgctctcgatgtcccactcgcatacttgtattgcgaaaaggacctcgcagttcctccgccagtgcaagacttctttattgagcagattggaccaaagatgacggtcgagcggtgtcctgctggtcatagcccaatgatcagtcagcctgagcaaacggcaagctttattttgaagtcggccgaggcagttacggtaacttaa

SEQ ID NO: 31790 - protein, 255 aa, Muscodor strobelii
  misc_feature: SGI Peptide ID NO. 570948
  misc_feature (2)..(251): NCBI GI: 256725652 Blast Desc: NECHADRAFT_43023 [Nectria haematococca mpVI 77-13-4]
  misc_feature (2)..(251): NCBI GI: 46114986 Blast Desc: FG03335.1 [Gibberella zeae PH-1]
  misc_feature (2)..(251): NCBI GI: 256720418 Blast Desc: NECHADRAFT_105756 [Nectria haematococca mpVI 77-13-4]
  misc_feature (2)..(245): NCBI GI: 256731227 Blast Desc: NECHADRAFT_85253 [Nectria haematococca mpVI 77-13-4]
  misc_feature (2)..(247): NCBI GI: 238837612 Blast Desc: conserved [Microsporum canis CBS 113480]
  misc_feature (2)..(240): NCBI GI: 261360555 Blast Desc: conserved [Verticillium albo-atrum VaMs.102]
  misc_feature (2)..(233): NCBI GI: 39945774 Blast Desc: MGG_08007 [Magnaporthe grisea 70-15] gi|145019241|gb|EDK03469.1| MGG_08007 [Magnaporthe grisea 70-15]
  misc_feature (2)..(245): NCBI GI: 255955955 Blast Desc: Pc21g17320 [Penicillium chrysogenum Wisconsin 54-1255] gi|211590441|emb|CAP96629.1| Pc21g17320 [Penicillium chrysogenum Wisconsin 54-1255]
  misc_feature (2)..(249): NCBI GI: 156049703 Blast Desc: SS1G_08558 [Sclerotinia sclerotiorum 1980] gi|154692957|gb|EDN92695.1| SS1G_08558 [Sclerotinia sclerotiorum 1980]
  misc_feature (2)..(251): NCBI GI: 169626162 Blast Desc: SNOG_16360 [Phaeosphaeria nodorum SN15] gi|111055226|gb|EAT76346.1| SNOG_16360 [Phaeosphaeria nodorum SN15]
MKPVIMLVHGAWHTPEYWFLVKDRLEEAGYDVLAPRLPSVCGPETVNYSWRSDAATVLDHATPLFAAGRNVVVVGHSYGGSVVTNSVPGNTVHERAAKGLKGGFSAVVYICGFPVVQRDTPCVTGEHQGYYTCAEPQKGNSFSMRIYPGQEPFYNDLPEEEAKKWNEKLQWQSQRSFEEPYAWCAQDLSALDVPLAYLYCEKDLAVPPPVQDFFIEQIGPKMTVERCPAGHSPMISQPEQTASFILKSAEAVTVT

SEQ ID NO: 31791 - DNA, 1334 bp, Muscodor strobelii
  misc_feature: SGI EST ID NO. CUFF.75209.0
  misc_feature: Variant of the nucleotide sequence at SEQ ID NO 31789
caattgttcaatccgcaatcgacaacggccagcattgtccggccatcttccaatgtaacctaggatctactagcacggggctaagtgcatccatcatggccaattcgatacagtagttcatccaccatcgagatgaacaacaccagtaggttggggccacgccaccgagcggccgggtctggctgcttggttctttgttctgctgttcccccccgcggagttcgttctatataaattctaggtttgccacccacttgttagacgcagccgttccagtccctcggtaaaaccgttacatttaattcctgattagttctgcattcaacgagatgacttcggattcagacaacaagaccacgaatagcatgaaaccagtcatcatgttagttcatggagcctggcatacgccggagtactggtttttagtcaaagatcggcttgaagaggccggttacgacgtcctggcgccccggttgccgtctgtttgcggaccggagacggtgaactattcgtggcgctcagacgcggctacagttctggaccatgctacgccactattcgctgctgggcgcaacgtggtcgtcgttgggcattcgtatggaggtagtgtggttacgaactcggtgcccgggaacaccgttcacgaaagagctgctaaaggcttgaagggtggattttcagccgtggtgtatatatgtggttttcctgtcgttcagcgcgatacaccatgtgtaacgggagagcaccaagggtactatacttgtgctgagcctcaaaaaggaaacagcttttcgatgcgcatctaccccggccaagagcctttctacaacgacttaccagaagaggaggcgaagaagtggaatgagaaactccaatggcagtctcagcgttcgtttgaggagccgtacgcctggtgtgcccaagacttgagcgctctcgatgtcccactcgcatacttgtattgcgaaaaggacctcgcagttcctccgccagtgcaagacttctttattgagcagattggaccaaagatgacggtcgagcggtgtcctgctggtcatagcccaatgatcagtcagcctgagcaaacggcaagctttattttgaagtcggccgaggcagttacggtaacttaaagcattgtgaatgagactggatatgactcttttatgtgagcaactcaagtttgattgtgagtagcatgctactagcaatcagacactgatcgagttgactaagctcttgatgagagggctgtaaccggtcgaatgcgtcaagtagcattcacatttatatcctatagataccttactatatacaatacgatagataataac

SEQ ID NO: 31792 - DNA, 804 bp, Muscodor strobelii
  misc_feature: SGI cDNA ID NO. 570949
  misc_feature: Encodes the peptide sequence at SEQ ID NO 31793
atgacttcggattcagacaacaagaccacgaatagcatgaaaccagtcatcatgttagttcatggagcctggcatacgccggagtactggtttttagtcaaagatcggcttgaagaggccggttacgacgtcctggcgccccggttgccgtctgtttgcggaccggagacggtgaactattcgtggcgctcagacgcggctacagttctggaccatgctacgccactattcgctgctgggcgcaacgtggtcgtcgttgggcattcgtatggaggtagtgtggttacgaactcggtgcccgggaacaccgttcacgaaagagctgctaaaggcttgaagggtggattttcagccgtggtgtatatatgtggttttcctgtcgttcagcgcgatacaccatgtgtaacgggagagcaccaagggtactatacttgtgctgagcctcaaaaaggaaacagcttttcgatgcgcatctaccccggccaagagcctttctacaacgacttaccagaagaggaggcgaagaagtggaatgagaaactccaatggcagtctcagcgttcgtttgaggagccgtacgcctggtgtgcccaagacttgagcgctctcgatgtcccactcgcatacttgtattgcgaaaaggacctcgcagttcctccgccagtgcaagacttctttattgagcagattggaccaaagatgacggtcgagcggtgtcctgctggtcatagcccaatgatcagtcagcctgagcaaacggcaagctttattttgaagtcggccgaggcagttacggtaacttaa

SEQ ID NO: 31793 - protein, 267 aa, Muscodor strobelii
  misc_feature: SGI Peptide ID NO. 570949
  misc_feature (12)..(263): NCBI GI: 256725652 Blast Desc: NECHADRAFT_43023 [Nectria haematococca mpVI 77-13-4]
  misc_feature (12)..(263): NCBI GI: 46114986 Blast Desc: FG03335.1 [Gibberella zeae PH-1]
  misc_feature (12)..(263): NCBI GI: 256720418 Blast Desc: NECHADRAFT_105756 [Nectria haematococca mpVI 77-13-4]
  misc_feature (7)..(259): NCBI GI: 238837612 Blast Desc: conserved [Microsporum canis CBS 113480]
  misc_feature (14)..(257): NCBI GI: 256731227 Blast Desc: NECHADRAFT_85253 [Nectria haematococca mpVI 77-13-4]
  misc_feature (10)..(252): NCBI GI: 261360555 Blast Desc: conserved [Verticillium albo-atrum VaMs.102]
  misc_feature (14)..(245): NCBI GI: 39945774 Blast Desc: MGG_08007 [Magnaporthe grisea 70-15] gi|145019241|gb|EDK03469.1| MGG_08007 [Magnaporthe grisea 70-15]
  misc_feature (14)..(257): NCBI GI: 255955955 Blast Desc: Pc21g17320 [Penicillium chrysogenum Wisconsin 54-1255] gi|211590441|emb|CAP96629.1| Pc21g17320 [Penicillium chrysogenum Wisconsin 54-1255]
  misc_feature (12)..(261): NCBI GI: 156049703 Blast Desc: SS1G_08558 [Sclerotinia sclerotiorum 1980] gi|154692957|gb|EDN92695.1| SS1G_08558 [Sclerotinia sclerotiorum 1980]
  misc_feature (11)..(263): NCBI GI: 169626162 Blast Desc: SNOG_16360 [Phaeosphaeria nodorum SN15] gi|111055226|gb|EAT76346.1| SNOG_16360 [Phaeosphaeria nodorum SN15]
MTSDSDNKTTNSMKPVIMLVHGAWHTPEYWFLVKDRLEEAGYDVLAPRLPSVCGPETVNYSWRSDAATVLDHATPLFAAGRNVVVVGHSYGGSVVTNSVPGNTVHERAAKGLKGGFSAVVYICGFPVVQRDTPCVTGEHQGYYTCAEPQKGNSFSMRIYPGQEPFYNDLPEEEAKKWNEKLQWQSQRSFEEPYAWCAQDLSALDVPLAYLYCEKDLAVPPPVQDFFIEQIGPKMTVERCPAGHSPMISQPEQTASFILKSAEAVTVT

SEQ ID NO: 31794 - DNA, 1334 bp, Muscodor strobelii; identical to SEQ ID NO: 31791
  misc_feature: SGI EST ID NO. CUFF.75209.0
  misc_feature: Variant of the nucleotide sequence at SEQ ID NO 31792

SEQ ID NO: 31795 - DNA, 1068 bp, Muscodor strobelii
  misc_feature: SGI cDNA ID NO. 570950
  misc_feature: Encodes the peptide sequence at SEQ ID NO 31796
atgggcgaccaacctgaccagcccgaccagccagctgccgcgctcccagcttcagtcactgccgcaccacaacctgttgcaacaccgcactggacggagcccgtggaggacgacgaagatgattttgatgacggagattcggcacttggcgacgatgccgccagcacaacggcgtcgttatctgccagtattctagagtaccgcacgctgcacggccgaacgtaccacgcagtgcacggtaatgccgatcattggacacctaatgatgatgcgcatctcgaaagcatggactgcgtacatcactgtctcacactcttagttgataacaagctctgtctttcacccatcgccgaaggacccatcaaagttctcgacataggctgcggaacagggatatgggcgatagattttgcagatatacatcccgaggccgaagttattggaacagatgtctctccctcacaaccagattgggttcctcccaacctgaaattcgaaatcgaagattgtactcagccgtggacgtacccaactgaccattttgattttattcatctacgatatctattcggctccatcgctgactgggatgcattatatgctgaagcttacaaagcaaccaaacctggaggctgggttgaggcagtcgaagcatccgtgaacctgcggagtgaagatggcagcatttgtgaaggcacagctatgtatgactggggtcgcttgttcaatgaggcttccaccaagtacggtcgaagcatgagcgttgtcgacgacgaggtcattcctgcagcgtttagaaaagccggattcgttgatgttcaggaaagaaaactcaaactcccggcaacgccatggcctaaagattcaaaaatgcaacagttgggtgccttttctcggcttgctatggagcaggatctggatggatatgccatgtacctcttcacgaacgccctcggatggtctaaagaacaggtacacgtatatctggcccgcatgcggagagagatgcgtaacatgcggttgcaaccatatttcttgattcagttcgtctgggcccggaagccatag

SEQ ID NO: 31796 - protein, 355 aa, Muscodor strobelii
  misc_feature: SGI Peptide ID NO. 570950
  misc_feature (124)..(215): Pfam Id: PF08241 Pfam Desc: Methyltransferase domain
  misc_feature (124)..(213): Pfam Id: PF08242 Pfam Desc: Methyltransferase domain
  misc_feature (30)..(355): NCBI GI: 46114338 Blast Desc: FG03011.1 [Gibberella zeae PH-1]
  misc_feature (10)..(355): NCBI GI: 171678563 Blast Desc: protein product [Podospora anserina] gi|170937351|emb|CAP62009.1| protein product [Podospora anserina]
  misc_feature (2)..(355): NCBI GI: 46109724 Blast Desc: FG01744.1 [Gibberella zeae PH-1]
  misc_feature (40)..(355): NCBI GI: 256720332 Blast Desc: NECHADRAFT_56071 [Nectria haematococca mpVI 77-13-4]
  misc_feature (17)..(355): NCBI GI: 256733855 Blast Desc: NECHADRAFT_77418 [Nectria haematococca mpVI 77-13-4]
  misc_feature (14)..(355): NCBI GI: 256727930 Blast Desc: NECHADRAFT_46272 [Nectria haematococca mpVI 77-13-4]
  misc_feature (24)..(355): NCBI GI: 46115856 Blast Desc: FG03770.1 [Gibberella zeae PH-1]
  misc_feature (46)..(355): NCBI GI: 256720463 Blast Desc: NECHADRAFT_55610 [Nectria haematococca mpVI 77-13-4]
  misc_feature (10)..(355): NCBI GI: 256724150 Blast Desc: NECHADRAFT_97152 [Nectria haematococca mpVI 77-13-4]
  misc_feature (24)..(355): NCBI GI: 256723728 Blast Desc: NECHADRAFT_72745 [Nectria haematococca mpVI 77-13-4]
MGDQPDQPDQPAAALPASVTAAPQPVATPHWTEPVEDDEDDFDDGDSALGDDAASTTASLSASILEYRTLHGRTYHAVHGNADHWTPNDDAHLESMDCVHHCLTLLVDNKLCLSPIAEGPIKVLDIGCGTGIWAIDFADIHPEAEVIGTDVSPSQPDWVPPNLKFEIEDCTQPWTYPTDHFDFIHLRYLFGSIADWDALYAEAYKATKPGGWVEAVEASVNLRSEDGSICEGTAMYDWGRLFNEASTKYGRSMSVVDDEVIPAAFRKAGFVDVQERKLKLPATPWPKDSKMQQLGAFSRLAMEQDLDGYAMYLFTNALGWSKEQVHVYLARMRREMRNMRLQPYFLIQFVWARKP

SEQ ID NO: 31797 - DNA, 2345 bp, Muscodor strobelii
  misc_feature: SGI EST ID NO. CUFF.75239.2
  misc_feature: Variant of the nucleotide sequence at SEQ ID NO 31795
ccgagtgtacataacgtcatgcaaccgatcattcgtgccaccagtctctgatcagtgacacaggtaattgttgcgaattaaatagaaatagctgggttggaccgatactacgataaatctgggcgatcatgggcgaccaacctgaccagcccgaccagccagctgccgcgctcccagcttcagtcactgccgcaccacaacctgttgcaacaccgcactggacggagcccgtggaggacgacgaagatgattttgatgacggagattcggcacttggcgacgatgccgccagcacaacggcgtcgttatctgccagtattctagagtaccgcacgctgcacggccgaacgtaccacgcagtgcacggtaatgccgatcattggacacctaatgatgatgcgcatctcgaaagcatggactgcgtacatcactgtctcacactcttagttgataacaagctctgtctttcacccatcgccgaaggacccatcaaagttctcgacataggctgcggaacagggatatgggcgatagattttgcagatatacatcccgaggccgaagttattggaacagatgtctctccctcacaaccagattgggttcctcccaacctgaaattcgaaatcgaagattgtactcagccgtggacgtacccaactgaccattttgattttattcatctacgatatctattcggctccatcgctgactgggatgcattatatgctgaagcttacaaagcaaccaaacctggaggctgggttgaggcagtcgaagcatccgtgaacctgcggagtgaagatggcagcatttgtgaaggcacagctatgtatgactggggtcgcttgttcaatgaggcttccaccaagtacggtcgaagcatgagcgttgtcgacgacgaggtcattcctgcagcgtttagaaaagccggattcgttgatgttcaggaaagaaaactcaaactcccggcaacgccatggcctaaagattcaaaaatgcaacagttgggtgccttttctcggcttgctatggagcaggatctggatggatatgccatgtacctcttcacgaacgccctcggatggtctaaagaacaggtacacgtatatctggcccgcatgcggagagagatgcgtaacatgcggttgcaaccatatttcttgattcagttcgtctgggcccggaagccatagtaaattggaagcgctagagggagagagccgtggacgccaaataccggccgatattactcgacaatttgcaaaaattttgaccttttggacgaatgcatagcaaacggcgacttggaaattcctagcatgtacctggataccacatcgataggtttcggatttacgagcaatatcccccaacgacatccaaaacacgaacgcgagaaaaaagaaccattatgaaattgaatgattcccagtttaccaagcggccggaattgtgtgaccaataccacccggtcggtatggaggttggcctccgaaaactaacgaccgtacggtcacgctattccatcaggtcgataccgttggccaatcacccgacagaaccgcccgaagcgaatccatttccgttcacgactgctcgcctattaagtgactagtagccattctcatcattcctccttacatcggacaggccggacgggggacttcctgcatgtgtcaatgtgtcagaactagagtggcaataaggttagaagcctcatcgaaccacacatcgattacatagcatccggtcctcaaaagtgagtctcagtgactcgcagaccaatttgaaacgattcttatgccatagtacgctgctgtagctgtagcccaggccaatgtcacgttatccgattttgcaggagctttcatcttcaaggttgtatagagtatattccgccaaaacataatgctacgagaaacggccatagtatagaatttttactaagcgctacatactgcggccgcaattgaatttttaaggctcctctttttcggtgcagattgtaccggaaggaacagaggaggatggtcggatttctgtccgggctggtgttcagccgtacttacctacccatgccggtcgtggattcccctattgagatgcgagactgcgccggctagaacattcctcaaatttcacctgcatgataccacataagcccgtttcgtctcgaaataggagacgctccatcgccctccaaaattcgagtcgaaaccgtcgcaagggcaacaatggttctatgatgcatctctctattgctccttaactacgaaccagatgagctcaaatatctagacattacatcggaatttcaatttggcagcttatgtcaactcagc

SEQ ID NO: 31798 - DNA, 489 bp, Muscodor strobelii
  misc_feature: SGI cDNA ID NO. 570951
  misc_feature: Encodes the peptide sequence at SEQ ID NO 31799
atgccgggacaaattcatctccaagccgtcgttgacgcccccctcgagatcgtctggcgagccttcaagactccatcggtcatccagcgtgtcgcgcagcccttcgacgacggatggcgcttggtctcgatcacgattgatctgcgagtcggaggtcagagagttgacaccattgagcgcggcgtcaaattcgagaccgtgcgccagactctcacctatgatcgggttgagccgatgtccgtcgtttctggagtaacggaccaaggccagcgcagacagaccgagttcaaggagcagaaaggaggcgtactggttcgtcagacttttgatgcttaccccagccctccctatccctccgacagtgagcagcaggcagaattgcagagaagcttggatgacttcgctcgatttatttcgacccaatggcgcgagtgggatgcgcgtggacgcctaggaaacggcgacttcatgggtagacttgggcagtga

SEQ ID NO: 31799 - protein, 162 aa, Muscodor strobelii
  misc_feature: SGI Peptide ID NO. 570951
  misc_feature (4)..(138): NCBI GI: 117620881 Blast Desc: AHA_2358 [Aeromonas hydrophila subsp. hydrophila ATCC 7966] gi|117562288|gb|ABK39236.1| conserved [Aeromonas hydrophila subsp. hydrophila ATCC 7966]
  misc_feature (4)..(140): NCBI GI: 224824557 Blast Desc: Activator of Hsp90 ATPase 1 family protein [Lutiella nitroferrum 2002] gi|224603050|gb|EEG09226.1| Activator of Hsp90 ATPase 1 family protein [Lutiella nitroferrum 2002]
  misc_feature (4)..(141): NCBI GI: 163747705 Blast Desc: Uncharacterized conserved protein [Oceanibulbus indolifex HEL-45] gi|161379020|gb|EDQ03445.1| Uncharacterized conserved protein [Oceanibulbus indolifex HEL-45]
  misc_feature (4)..(138): NCBI GI: 15896922 Blast Desc: CA_C3690 [Clostridium acetobutylicum ATCC 824] gi|15026794|gb|AAK81611.1|AE007864_7 Uncharacterized conserved protein, related to polyketide cyclase (CypC) [Clostridium ATCC
  misc_feature (1)..(141): NCBI GI: 27383263 Blast Desc: bll8152 [Bradyrhizobium japonicum USDA 110] gi|27356437|dbj|BAC53417.1| bll8152 [Bradyrhizobium japonicum USDA 110]
  misc_feature (4)..(141): NCBI GI: 148257530 Blast Desc: BBta_6290 [Bradyrhizobium sp. BTAi1] gi|146409703|gb|ABQ38209.1| BBta_6290 [Bradyrhizobium sp. BTAi1]
  misc_feature (7)..(140): NCBI GI: 119774551 Blast Desc: Sama_1414 [Shewanella amazonensis SB2B] gi|119767051|gb|ABL99621.1| conserved [Shewanella amazonensis SB2B]
  misc_feature (4)..(142): NCBI GI: 241894436 Blast Desc: activator of Hsp90 ATPase 1 family protein [Sphingobacterium spiritivorum ATCC 33861] gi|241865858|gb|EER69609.1| activator of Hsp90 ATPase 1 family
  misc_feature (4)..(142): NCBI GI: 227539954 Blast Desc: activator of Hsp90 ATPase 1 family protein [Sphingobacterium spiritivorum ATCC 33300] gi|227240232|gb|EEI90247.1| activator of Hsp90 ATPase 1 family
  misc_feature (4)..(116): NCBI GI: 149203349 Blast Desc: RTM1035_01990 [Roseovarius sp. TM1035] gi|149143182|gb|EDM31221.1| RTM1035_01990 [Roseovarius sp. TM1035]
MPGQIHLQAVVDAPLEIVWRAFKTPSVIQRVAQPFDDGWRLVSITIDLRVGGQRVDTIERGVKFETVRQTLTYDRVEPMSVVSGVTDQGQRRQTEFKEQKGGVLVRQTFDAYPSPPYPSDSEQQAELQRSLDDFARFISTQWREWDARGRLGNGDFMGRLGQ

SEQ ID NO: 31800 - DNA, 423 bp, Muscodor strobelii
  misc_feature: SGI cDNA ID NO. 570952
  misc_feature: Encodes the peptide sequence at SEQ ID NO 31801
atgtggggaaagattctactcacgttcgactgcattctgttgcttgtcggtgctccgatcgctgattatactgggccgacgcatatgcataatcctaactggcctcctcatgctaaattccacaatggccaaacaataaatctttccgtcctcctaggcctcacgacgctgttctatacgtataggtcagcggctacgccaacgctgaagaaagagtttatgctcgttacggcgttcacgagctcttattattggattgctggacttgcttcggcggcttatccgatgactacgggtttggatccggagtttggcgggccgggataccctcagtttcctctttttgcgcttgccgcggtctgtggactggctgggagcgcgattgatgggtttaaggctgctggaaagattaaggggaattga

SEQ ID NO: 31801 - protein, 140 aa, Muscodor strobelii
  misc_feature: SGI Peptide ID NO. 570952
  misc_feature (1)..(128): NCBI GI: 145614180 Blast Desc: MGG_08926 [Magnaporthe grisea 70-15] gi|145021129|gb|EDK05258.1| MGG_08926 [Magnaporthe grisea 70-15]
  misc_feature (1)..(133): NCBI GI: 256726348 Blast Desc: NECHADRAFT_43035 [Nectria haematococca mpVI 77-13-4]
  misc_feature (1)..(137): NCBI GI: 116205469 Blast Desc: CHGG_10618 [Chaetomium globosum CBS 148.51] gi|88176746|gb|EAQ84214.1| CHGG_10618 [Chaetomium globosum CBS 148.51]
  misc_feature (1)..(122): NCBI GI: 28881269 Blast Desc: [Neurospora crassa]
  misc_feature (1)..(134): NCBI GI: 156050389 Blast Desc: SS1G_07781 [Sclerotinia sclerotiorum 1980] gi|154692182|gb|EDN91920.1| SS1G_07781 [Sclerotinia sclerotiorum 1980]
  misc_feature (3)..(111): NCBI GI: 156053668 Blast Desc: SS1G_05681 [Sclerotinia sclerotiorum 1980] gi|154703462|gb|EDO03201.1| SS1G_05681 [Sclerotinia sclerotiorum 1980]
  misc_feature (1)..(122): NCBI GI: 154298201 Blast Desc: BC1G_11945 [Botryotinia fuckeliana B05.10] gi|150858131|gb|EDN33323.1| BC1G_11945 [Botryotinia fuckeliana B05.10]
  misc_feature (3)..(117): NCBI GI: 169613593 Blast Desc: SNOG_09927 [Phaeosphaeria nodorum SN15] gi|111061142|gb|EAT82262.1| SNOG_09927 [Phaeosphaeria nodorum SN15]
  misc_feature (3)..(124): NCBI GI: 169602207 Blast Desc: SNOG_04098 [Phaeosphaeria nodorum SN15] gi|111066738|gb|EAT87858.1| SNOG_04098 [Phaeosphaeria nodorum SN15]
  misc_feature (3)..(129): NCBI GI: 242822906 Blast Desc: conserved [Talaromyces stipitatus ATCC 10500] gi|218712904|gb|EED12329.1| conserved [Talaromyces stipitatus ATCC 10500]
MWGKILLTFDCILLLVGAPIADYTGPTHMHNPNWPPHAKFHNGQTINLSVLLGLTTLFYTYRSAATPTLKKEFMLVTAFTSSYYWIAGLASAAYPMTTGLDPEFGGPGYPQFPLFALAAVCGLAGSAIDGFKAAGKIKGN

SEQ ID NO: 31802 - DNA, 882 bp, Muscodor strobelii
  misc_feature: SGI EST ID NO. CUFF.75227.0
  misc_feature: Variant of the nucleotide sequence at SEQ ID NO 31800
gtcacattgactgcctttgaattcatctacgagctcgcattaactggttcttgaagagattaaagagatcgagatatcgaaagatgtggggaaagattctactcacgttcgactgcattctgttgcttgtcggtgctccgatcgctgattatactgggccgacgcatatgcataatcctaactggcctcctcatgctaaattccacaatggccaaacaataaatctttccgtcctcctaggcctcacgacgctgttctatacgtataggtcagcggctacgccaacgctgaagaaagagtttatgctcgttacggcgttcacgagctcttattattggattgctggacttgcttcggcggcttatccgatgactacgggtttggatccggagtttggcgggccgggataccctcagtttcctctttttgcgcttgccgcggtctgtggactggctgggagcgcgattgatgggtttaaggctgctggaaagattaaggggaattgaagaatgagatgaagtcgtctataggtgggatgtggtgctgtgaatgcggtgaggtgaggtgaggtgcgatggttggtagtggcttgtgaatgtggtgatgaggtggcgggatattgcgatgcggtcgtgggttggatgactggacagtctcattctcgttgcgaagtcctctatgggccgatgtagggaaagacttcgggatttggacactccatgcggttactagcaaaatgagaggtggaaggtgacttggcgatgagtgaacgggtgtaagttcgggctgtgagcgcgagtgttagggataaatgactcccctcatattatgtgctatcaattgtatcatcagaacttattacgtatagattggtctccgaaa

SEQ ID NO: 31803 - DNA, 5214 bp, Muscodor strobelii
  misc_feature: SGI cDNA ID NO. 570953
  misc_feature: Encodes the peptide sequence at SEQ ID NO 31804
atgtctttcagagacaatgaccagcgccggtacggccatgtccctcctgtgcagtatccggtcgcaaatcagcagccttcgccagacaacagccgctatcctgcccgcaacccgagtttcaaccatggcgacgatgcatctggcttccccgcagccgcccgccagcagtacccgcatcccaccttgaacaccactgggcgaggtatgggctctgaagacgagctcttcctcgtcgcaagcccgactaccgaggcaaatagagcgagctatgccagccagagtcctgccatgtccgggtatcagcattcttaccaacctaacactccgccaaccccctccacctacaatccacaggcctttgtgcgttctcagtcgacgagccttcatcattatcaccagcagcctcaatccaatcagtggggacagtccaacgtttcagcagcgccctacagtccaaccgcgccctcgggattctcgcacgcaccctacaacccagctgcgtacacaaactcagcggcgcctcaacgtcaacagagctatgccggctacactaacaactacaacagcccgcagtatggctctccggccaaccagtctccctacttccagtcgcagccaacttacgcacctccatcggcgcaatccacgccgcaaattccctctccgcccaccacatatacaggctacgatcagagcgggccggcttccatgtatgcgcaaagcaacacggctcagtatgactcgtcacagcagcagtatacacaaccgtattggaacgacggcagaaacaactcgacagcgccgtatcccactacgaccacgcaggctccatatccaactggatcacagataccagttggcccaaactattccgatcatgatcctcattccttcctgaatcttgcgtcagactccaactctacgccctcgcccgcgccctctccacagccttcgccaggcctcgcgcggcatccgactaatgcaccgcttccaagccgacctggtgaagccgcccgtacgaactcttatcggtcgaacggagtcaatcagtctgagctgtctgagcgcctggctcaggataatatcatgcaagatatcgaagccgagcttggaagagtgggaatctcgcagggtggccgatacgaccatcaaaacggcggatccggcgacggccttcatcgtctggcttcgagcgcgagttatcactcgacggccacaactctcaacagctcggatgaggcaggtgtatatcgctactcgtccaatgcctccacgctgaacaggaacaattctatgaacccgaacgccataatcgagaatgagggagacgagagcgatcctgaaggcgcggcaggtgcctgggcgttacaacaagcggaagaggacgatcgccgtattagcactattgggagtgcgtctttcccattattcagccagcctgaggtcacagtccagccagccccgactctgcccacacacaaagaagagcctagcagtgacagtgattatgctggaatggatttgggtctcatgggcggtggctacgctggccaccttgcgtacgataacaatctcggatcgcctcccagcactgagaccatgcgctccgattcgcaggcttttggtcgtaatcatgcgtcgcagagaagtcatgatagtaccaaatatcctgctttcgagcaggccgatgtcgactacggcaatgtcggtggtttgcagtcgccgcgcccacaccgtctcagctttgacgaaggagacgaacgtgtgtcccttcactcagctaagagtgataacgcgtcaccacacaaagatgattatccagatatgttctaccaccccggcattggaaatcggccgctaccatccatccctgctggctcggacagcagctccttactgtccgttcagtcgccaaaccgcccaagccatcaacacaactactcactcagctcggattctcgaccctacaccggcccggatgcacagtatggacagaatgctcagcagttgcaggttgagagatccatctcattatctagtcacagcacgtcgcctcaagtccagcctcctggacgatcgaagactgatgctgccgaagagcgcaatgccagactgagacatatgagacaacagcagcagctggcagctcaacaaggtctcgtatacgaaggctacgaaactgggactccttcgtctgtgaactacgaagtgatcactcttccaagtggtcgccgtagaaaattctcgccggacaaactgaacgaggccgacgtgcagtcgtgcacagaaccctgggcgctgagtggtattgcgaaatggctccgagagatggctgaaggcgaaccagatttgaaacgaaagactgtggaagacggtcttgtttctctctttggtctcaaggtccctactatgaatgtagccgacgctgaggcactcggcgcccaagtcattgactcccttttgcaggcaggtatccttgtgcccgaggaagagtggcttaagtttgggcatggtaccatttcgggcgtgctctggcagctgactgggatgggttgctatgcgcccaagttacatatgcaagatgcttttggcgacacaccagaggcagcaggacggtgctattcgttgcattgtatgcggacggtaaagaaagccaacaatcttgaccagctcttgttgggatggactgaaacgacatcctgggatgagttctaccacatgaccaaagagagcatagcggacaagccgaaagttgaaatcgatagacagaatgctcttcacgagtgcatcacatctgaagagcacttcaactacggtctggaggtcttgagggtgctctacaaggagaaaattgtcacaacccagcctagggtgattgctgaatcgcgaatggataaattcgtgaaagctctcttcggccgagttgacgccgttgcaatcgtcaacaaagaaaaccttttggcacaattgaagtatcgccaacaagaacaaggtccctggctcacgggtcttagcgacatcttcagagagtggatccgcaaggccaggacagcattcctcgagtacgccgctggccttccgtatgcaatgtttcttctgcgaagggaacaagagcgcaacgtcatgttccagcaatttctagatgccaaccaacgagacaagctttcaaaacgtctaggcctcgacaactatctaaagtcgcctatgacccgtctacaacggtaccctcttatcttagaggctacgttgaagaaagtgcctgaaaacgaagagaagcagaacatgctcaaagctgttgaagagatcagggcagtcaccgttgaatgcgacgctaaattcgacgaaatgaccaagaaagtgacgatgatggagcttgatcagatgctagtgttgcggcctgggttccatgccgatcttaaccttgaccatcttggcagagagctgatactcgagggcgacctacaacgcatggggtcaaagggtgtgcggtgggtcgatacacatgctctgctatttgatcattacatgatcctcgctaagctggtactctcacgtgacaatcgacaagacaggaagtacgacgtatcaaaagagccgattcccatgcctcttcttttcctagagagcagtcaggatgacccgatatcaaagtcaaagggcattgctgcacccttagcccgagcagcgaatccatcagagaccaagctcaataaggttgtgacgaataacggcgagcggccaggactggagcacgttcccacaagttcttccatcgggtcctctatgaataagctggatgatggcaagatcttatacccattccgtgtcaaacacttgggtcacgagatctatacattgtttgcctccacggcacagtcacgacaagattggtgcgataggattattgaagccaaaactcgccatgcgaaagctctctatgctcagaatgccgaaccattcaagcttcgtgtcatggcagatagtgcttttgcctacgaccctgtcagtgctgtcgggaaatatgtcggcggcgtgcacatccgcgggacccctctagatagagccattcgggatctcgagcaggtgttcggcccagggcgaggacctccggcaatatcacgggcagcagtgaattgtgctaccggattctctgccttcggcaagaacatggtcgcagttggcacggatgccggcgtctgcgtgacagaggccagtgatcaaagaggctggcttaagactgtgtcaattattcgcgttacgcagattgcgatcttggaggaattctcagtcgtcctggtcctctcagatcgcaatcttatttcttatcctttggatgtagtgtccccgccttccaacttcccagctccctcgagtgacaatccccggcgctcaccacagagactggcaaaggatgtagcattcttcgcaacggcccgtatgaaggatcgtatgcttgttttctacaaaaagaaagagaatcttcacagcactttcaaggtactcgagccggttttccaaaaggccacggaaaagaaatctcgactcttcggtggaacccgcaaagtcggcagcggcgcaaccgaaacattcagagattacgatgacttctatcttcctactgagtgcttctctctcaacattttccagtcctacgttgctattgccacagcgaagggctttgagcttatgactctggataaaaaagtcccgatgtctatcccggatactcgacaacctgctattgccaacattgcgagtcgtgtcaaagatcagaagcctcttggcatgttccgtctcaatgatcaggagttcctcttggcatatgaggattgcgctgtgtatatcgataaacatggcgatgtctctcgcagcgtcattatggagtattccggcaaacagaagaaggccaaaggcgccacgatgtacgggcagtacttacttcttttcaacgaggactatgttgaagtccgcaacgccgagaatggtcgactccgtcagatcattgccggccgcgacgtgagagttttagactacggcatccgaggaccaacgggtggtttctacaacaccagcaacggatatccgcgaaccaacggaaacgacaacgggtttgactccaaaggtaccgtcaaaataggcatggcgcaccccgaagttgctggccagcaaattgtgctggaaatgctcctcaacaacggacatacggagaaatga

SEQ ID NO: 31804 - protein, 1737 aa, Muscodor strobelii
  misc_feature: SGI Peptide ID NO. 570953
  misc_feature (1148)..(1306): Pfam Id: PF00169 Pfam Desc: PH domain
  misc_feature (1379)..(1683): Pfam Id: PF00780 Pfam Desc: CNH domain
  misc_feature (1530)..(1683): Pfam Id: PF00780 Pfam Desc: CNH domain
  misc_feature (1379)..(1447): Pfam Id: PF00780 Pfam Desc: CNH domain
  misc_feature (1019)..(1111): Pfam Id: PF00621 Pfam Desc: RhoGEF domain
  misc_feature (36)..(1731): NCBI GI: 242817985 Blast Desc: Rho guanyl nucleotide exchange factor, [Talaromyces stipitatus ATCC 10500] gi|218713508|gb|EED12932.1| Rho guanyl nucleotide exchange factor, [Talaromyces stipitatus ATCC 10500]
  misc_feature (36)..(1736): NCBI GI: 238844468 Blast Desc: Rho1 guanine nucleotide exchange factor 3 [Microsporum canis CBS 113480]
  misc_feature (311)..(1736): NCBI GI: 212530672 Blast Desc: Rho guanyl nucleotide exchange factor, [Penicillium marneffei ATCC 18224] gi|210074891|gb|EEA28978.1| Rho guanyl nucleotide exchange factor, [Penicillium marneffei ATCC 18224]
  misc_feature (63)..(1736): NCBI GI: 225562036 Blast Desc: CNH domain-containing protein [Ajellomyces capsulatus G186AR]
  misc_feature (63)..(1736): NCBI GI: 240275645 Blast Desc: CNH domain-containing protein [Ajellomyces capsulatus H143]
  misc_feature (314)..(1736): NCBI GI: 258571888 Blast Desc: conserved [Uncinocarpus reesii 1704] gi|237905017|gb|EEP79418.1| conserved [Uncinocarpus reesii 1704]
  misc_feature (496)..(1736): NCBI GI: 240109171 Blast Desc: CNH domain containing protein [Coccidioides posadasii C735 delta SOWgp]
  misc_feature (96)..(1736): NCBI GI: 121712916 Blast Desc: CNH domain protein [Aspergillus clavatus NRRL 1] gi|119402222|gb|EAW12643.1| CNH domain protein [Aspergillus clavatus NRRL 1]
  misc_feature (12)..(1736): NCBI GI: 115433737 Blast Desc: conserved [Aspergillus terreus NIH2624] gi|114189857|gb|EAU31557.1| conserved [Aspergillus terreus NIH2624]
  misc_feature (285)..(1736): NCBI GI: 169777995 Blast Desc: [Aspergillus oryzae RIB40] gi|83772200|dbj|BAE62330.1| protein product [Aspergillus oryzae]
MSFRDNDQRRYGHVPPVQYPVANQQPSPDNSRYPARNPSFNHGDDASGFPAAARQQYPHPTLNTTGRGMGSEDELFLVASPTTEANRASYASQSPAMSGYQHSYQPNTPPTPSTYNPQAFVRSQSTSLHHYHQQPQSNQWGQSNVSAAPYSPTAPSGFSHAPYNPAAYTNSAAPQRQQSYAGYTNNYNSPQYGSPANQSPYFQSQPTYAPPSAQSTPQIPSPPTTYTGYDQSGPASMYAQSNTAQYDSSQQQYTQPYWNDGRNNSTAPYPTTTTQAPYPTGSQIPVGPNYSDHDPHSFLNLASDSNSTPSPAPSPQPSPGLARHPTNAPLPSRPGEAARTNSYRSNGVNQSELSERLAQDNIMQDIEAELGRVGISQGGRYDHQNGGSGDGLHRLASSASYHSTATTLNSSDEAGVYRYSSNASTLNRNNSMNPNAIIENEGDESDPEGAAGAWALQQAEEDDRRISTIGSASFPLFSQPEVTVQPAPTLPTHKEEPSSDSDYAGMDLGLMGGGYAGHLAYDNNLGSPPSTETMRSDSQAFGRNHASQRSHDSTKYPAFEQADVDYGNVGGLQSPRPHRLSFDEGDERVSLHSAKSDNASPHKDDYPDMFYHPGIGNRPLPSIPAGSDSSSLLSVQSPNRPSHQHNYSLSSDSRPYTGPDAQYGQNAQQLQVERSISLSSHSTSPQVQPPGRSKTDAAEERNARLRHMRQQQQLAAQQGLVYEGYETGTPSSVNYEVITLPSGRRRKFSPDKLNEADVQSCTEPWALSGIAKWLREMAEGEPDLKRKTVEDGLVSLFGLKVPTMNVADAEALGAQVIDSLLQAGILVPEEEWLKFGHGTISGVLWQLTGMGCYAPKLHMQDAFGDTPEAAGRCYSLHCMRTVKKANNLDQLLLGWTETTSWDEFYHMTKESIADKPKVEIDRQNALHECITSEEHFNYGLEVLRVLYKEKIVTTQPRVIAESRMDKFVKALFGRVDAVAIVNKENLLAQLKYRQQEQGPWLTGLSDIFREWIRKARTAFLEYAAGLPYAMFLLRREQERNVMFQQFLDANQRDKLSKRLGLDNYLKSPMTRLQRYPLILEATLKKVPENEEKQNMLKAVEEIRAVTVECDAKFDEMTKKVTMMELDQMLVLRPGFHADLNLDHLGRELILEGDLQRMGSKGVRWVDTHALLFDHYMILAKLVLSRDNRQDRKYDVSKEPIPMPLLFLESSQDDPISKSKGIAAPLARAANPSETKLNKVVTNNGERPGLEHVPTSSSIGSSMNKLDDGKILYPFRVKHLGHEIYTLFASTAQSRQDWCDRIIEAKTRHAKALYAQNAEPFKLRVMADSAFAYDPVSAVGKYVGGVHIRGTPLDRAIRDLEQVFGPGRGPPAISRAAVNCATGFSAFGKNMVAVGTDAGVCVTEASDQRGWLKTVSIIRVTQIAILEEFSVVLVLSDRNLISYPLDVVSPPSNFPAPSSDNPRRSPQRLAKDVAFFATARMKDRMLVFYKKKENLHSTFKVLEPVFQKATEKKSRLFGGTRKVGSGATETFRDYDDFYLPTECFSLNIFQSYVAIATAKGFELMTLDKKVPMSIPDTRQPAIANIASRVKDQKPLGMFRLNDQEFLLAYEDCAVYIDKHGDVSRSVIMEYSGKQKKAKGATMYGQYLLLFNEDYVEVRNAENGRLRQIIAGRDVRVLDYGIRGPTGGFYNTSNGYPRTNGNDNGFDSKGTVKIGMAHPEVAGQQIVLEMLLNNGHTEK

SEQ ID NO: 31805 - DNA, 6854 bp, Muscodor strobelii
  misc_feature: SGI EST ID NO. CUFF.75233.0
  misc_feature: Variant of the nucleotide sequence at SEQ ID NO 31803
caacagtgcaccattggcatgagcagctgccagttcctgttccacctaccttctggagccatatccaggatcactggccacacacagtaccttccatccttacccctactatcttgtctctagccccgcctaatctaaaacatcctgcctcaagttacatgccttgcatctttcttagcaatacaaacatcttgaaacctaccctattcatctttatcggccataacaatgatcgattaatgatcaattcacaaacccgttctcgcgcctttgtttcctgtcgacggttgtagggcaggagcgtgacgtacgatatccattcctgtctcgttgatctcacaccaaccaccttagtattgcactacatcacctaattttagagtggtctaccccccaaagtccccatatacatcagtagtagtagttttaacacatctacctctcaatactgtggcaggtacgacgagcgttcactcacgatcctacagccttgggtgaagttgtattgcgcacaaagtatacatcgcccgacaacatttgttattgcaagaagacaccaggctcgcttgtacatcgctctggattgactccgctggcgtttcttgcacatttggatcccttggtgtgtttgagaagctgtccggatcgttgttcgcttgttcggttcgggtcttggaagcccttgcaaggtagtcgctgcctgtgctgacaacaacccacccccagcagcagctgcccacgttgtcttgcaccaagagggccatccttgacaatcccaatctgaccttcgccaactccagcgagctcttccctccccagcgagcgccgattgtacgtacatcagccaggccacaacatttgctggcgacagtactgtaccttatcacttttgacgaaactcattgcattgcatctggcgtcgacggttggttacttcgcagatagatacccactgcatcgaggaggcgcgcggcgcatcgggctttccctctgcaattgacattgagcccaagtcctgatccatctgcatacacctgcattcattcacctgcaccttcccaatcatcaatgtcacgccctcgccgggctcctgcttcaacttaagcaagctctgctttgagtcggctagtctctggattgctcgccgccactgcaagaccgtgctctcgtcggcggcgcaaccaccgccatgtctttcagagacaatgaccagcgccggtacggccatgtccctcctgtgcagtatccggtcgcaaatcagcagccttcgccagacaacagccgctatcctgcccgcaacccgagtttcaaccatggcgacgatgcatctggcttccccgcagccgcccgccagcagtacccgcatcccaccttgaacaccactgggcgaggtatgggctctgaagacgagctcttcctcgtcgcaagcccgactaccgaggcaaatagagcgagctatgccagccagagtcctgccatgtccgggtatcagcattcttaccaacctaacactccgccaaccccctccacctacaatccacaggcctttgtgcgttctcagtcgacgagccttcatcattatcaccagcagcctcaatccaatcagtggggacagtccaacgtttcagcagcgccctacagtccaaccgcgccctcgggattctcgcacgcaccctacaacccagctgcgtacacaaactcagcggcgcctcaacgtcaacagagctatgccggctacactaacaactacaacagcccgcagtatggctctccggccaaccagtctccctacttccagtcgcagccaacttacgcacctccatcggcgcaatccacgccgcaaattccctctccgcccaccacatatacaggctacgatcagagcgggccggcttccatgtatgcgcaaagcaacacggctcagtatgactcgtcacagcagcagtatacacaaccgtattggaacgacggcagaaacaactcgacagcgccgtatcccactacgaccacgcaggctccatatccaactggatcacagataccagttggcccaaactattccgatcatgatcctcattccttcctgaatcttgcgtcagactccaactctacgccctcgcccgcgccctctccacagccttcgccaggcctcgcgcggcatccgactaatgcaccgcttccaagccgacctggtgaagccgcccgtacgaactcttatcggtcgaacggagtcaatcagtctgagctgtctgagcgcctggctcaggataatatcatgcaagatatcgaagccgagcttggaagagtgggaatctcgcagggtggccgatacgaccatcaaaacggcggatccggcgacggccttcatcgtctggcttcgagcgcgagttatcactcgacggccacaactctcaacagctcggatgaggcaggtgtatatcgctactcgtccaatgcctccacgctgaacaggaacaattctatgaacccgaacgccataatcgagaatgagggagacgagagcgatcctgaaggcgcggcaggtgcctgggcgttacaacaagcggaagaggacgatcgccgtattagcactattgggagtgcgtctttcccattattcagccagcctgaggtcacagtccagccagccccgactctgcccacacacaaagaagagcctagcagtgacagtgattatgctggaatggatttgggtctcatgggcggtggctacgctggccaccttgcgtacgataacaatctcggatcgcctcccagcactgagaccatgcgctccgattcgcaggcttttggtcgtaatcatgcgtcgcagagaagtcatgatagtaccaaatatcctgctttcgagcaggccgatgtcgactacggcaatgtcggtggtttgcagtcgccgcgcccacaccgtctcagctttgacgaaggagacgaacgtgtgtcccttcactcagctaagagtgataacgcgtcaccacacaaagatgattatccagatatgttctaccaccccggcattggaaatcggccgctaccatccatccctgctggctcggacagcagctccttactgtccgttcagtcgccaaaccgcccaagccatcaacacaactactcactcagctcggattctcgaccctacaccggcccggatgcacagtatggacagaatgctcagcagttgcaggttgagagatccatctcattatctagtcacagcacgtcgcctcaagtccagcctcctggacgatcgaagactgatgctgccgaagagcgcaatgccagactgagacatatgagacaacagcagcagctggcagctcaacaaggtctcgtatacgaaggctacgaaactgggactccttcgtctgtgaactacgaagtgatcactcttccaagtggtcgccgtagaaaattctcgccggacaaactgaacgaggccgacgtgcagtcgtgcacagaaccctgggcgctgagtggtattgcgaaatggctccgagagatggctgaaggcgaaccagatttgaaacgaaagactgtggaagacggtcttgtttctctctttggtctcaaggtccctactatgaatgtagccgacgctgaggcactcggcgcccaagtcattgactcccttttgcaggcaggtatccttgtgcccgaggaagagtggcttaagtttgggcatggtaccatttcgggcgtgctctggcagctgactgggatgggttgctatgcgcccaagttacatatgcaagatgcttttggcgacacaccagaggcagcaggacggtgctattcgttgcattgtatgcggacggtaaagaaagccaacaatcttgaccagctcttgttgggatggactgaaacgacatcctgggatgagttctaccacatgaccaaagagagcatagcggacaagccgaaagttgaaatcgatagacagaatgctcttcacgagtgcatcacatctgaagagcacttcaactacggtctggaggtcttgagggtgctctacaaggagaaaattgtcacaacccagcctagggtgattgctgaatcgcgaatggataaattcgtgaaagctctcttcggccgagttgacgccgttgcaatcgtcaacaaagaaaaccttttggcacaattgaagtatcgccaacaagaacaaggtccctggctcacgggtcttagcgacatcttcagagagtggatccgcaaggccaggacagcattcctcgagtacgccgctggccttccgtatgcaatgtttcttctgcgaagggaacaagagcgcaacgtcatgttccagcaatttctagatgccaaccaacgagacaagctttcaaaacgtctaggcctcgacaactatctaaagtcgcctatgacccgtctacaacggtaccctcttatcttagaggctacgttgaagaaagtgcctgaaaacgaagagaagcagaacatgctcaaagctgttgaagagatcagggcagtcaccgttgaatgcgacgctaaattcgacgaaatgaccaagaaagtgacgatgatggagcttgatcagatgctagtgttgcggcctgggttccatgccgatcttaaccttgaccatcttggcagagagctgatactcgagggcgacctacaacgcatggggtcaaagggtgtgcggtgggtcgatacacatgctctgctatttgatcattacatgatcctcgctaagctggtactctcacgtgacaatcgacaagacaggaagtacgacgtatcaaaagagccgattcccatgcctcttcttttcctagagagcagtcaggatgacccgatatcaaagtcaaagggcattgctgcacccttagcccgagcagcgaatccatcagagaccaagctcaataaggttgtgacgaataacggcgagcggccaggactggagcacgttcccacaagttcttccatcgggtcctctatgaataagctggatgatggcaagatcttatacccattccgtgtcaaacacttgggtcacgagatctatacattgtttgcctccacggcacagtcacgacaagattggtgcgataggattattgaagccaaaactcgccatgcgaaagctctctatgctcagaatgccgaaccattcaagcttcgtgtcatggcagatagtgcttttgcctacgaccctgtcagtgctgtcgggaaatatgtcggcggcgtgcacatccgcgggacccctctagatagagccattcgggatctcgagcaggtgttcggcccagggcgaggacctccggcaatatcacgggcagcagtgaattgtgctaccggattctctgccttcggcaagaacatggtcgcagttggcacggatgccggcgtctgcgtgacagaggccagtgatcaaagaggctggcttaagactgtgtcaattattcgcgttacgcagattgcgatcttggaggaattctcagtcgtcctggtcctctcagatcgcaatcttatttcttatcctttggatgtagtgtccccgccttccaacttcccagctccctcgagtgacaatccccggcgctcaccacagagactggcaaaggatgtagcattcttcgcaacggcccgtatgaaggatcgtatgcttgttttctacaaaaagaaagagaatcttcacagcactttcaaggtactcgagccggttttccaaaaggccacggaaaagaaatctcgactcttcggtggaacccgcaaagtcggcagcggcgcaaccgaaacattcagagattacgatgacttctatcttcctactgagtgcttctctctcaacattttccagtcctacgttgctattgccacagcgaagggctttgagcttatgactctggataaaaaagtcccgatgtctatcccggatactcgacaacctgctattgccaacattgcgagtcgtgtcaaagatcagaagcctcttggcatgttccgtctcaatgatcaggagttcctcttggcatatgaggattgcgctgtgtatatcgataaacatggcgatgtctctcgcagcgtcattatggagtattccggcaaacagaagaaggccaaaggcgccacgatgtacgggcagtacttacttcttttcaacgaggactatgttgaagtccgcaacgccgagaatggtcgactccgtcagatcattgccggccgcgacgtgagagttttagactacggcatccgaggaccaacgggtggtttctacaacaccagcaacggatatccgcgaaccaacggaaacgacaacgggtttgactccaaaggtaccgtcaaaataggcatggcgcaccccgaagttgctggccagcaaattgtgctggaaatgctcctcaacaacggacatacggagaaatgagacgagtccacgagtagcaatggtggtaatgcatcggataacgatatgatcacgatacggatatgaacctttccatgaagatgattttcgtcgcgatgcatatgacgaacaatacaaactgcatgtattcggtcatctattttttgtttcctattgaagatatcccggcctggatggccatttcccgttctgctctggttagatcccaggtatagcgacgaggcgtattgacaaggaagggttggacagagaacaccaatggcattggcattacgcgaatgggctggataagtcgagcttggcgttcaggtcatgtattcggagccgcagcgaggcttcgacattcgtcatcttcacatcagcggtggtagtggactatatattataagtaacacacgtgtttacttaggagtaagccattgaaattaatattcgatatgatatcccgagg

SEQ ID NO: 31806 - DNA, 465 bp, Muscodor strobelii
  misc_feature: SGI cDNA ID NO. 570954
  misc_feature: Elevated expression when VOC is produced
  misc_feature: Encodes the peptide sequence at SEQ ID NO 31807
atggtcaaggctgtcgctgtcatccgtggtgactccaaggtctccggcaccgtcaccttcgagcagtcctcggagtcggagcccactaccatctcttgggacatcactggccacgaccccaacgcttcgcgaggcttccacatccacactttcggtgacaacaccaacggctgcacttccgccggccctcacttcaacccccatggcaagactcacggttcccccggcgatgagaaccgccacgttggtgatctaggcaacatcgagaccgacggccagggcaatgccaagggctccgtccaggataagctcatcaaacttatcggacccgagagcatcattggccgtaccgtcgtctcccacggaggtactgacgacctcggcaagggtggcaacgaggaatccctcaagactggcaacgccggtccccgacctgcttgcggtgtcattggtatctccaactag

SEQ ID NO: 31807 - protein, 154 aa, Muscodor strobelii
  misc_feature: SGI Peptide ID NO. 570954
  misc_feature (1)..(154): Pfam Id: PF00080 Pfam Desc: Copper/zinc superoxide dismutase (SODC)
  misc_feature (1)..(154): NCBI GI: 51702015 Blast Desc: SODC_CORMI RecName: Full=Superoxide dismutase [Cu-Zn] gi|26000295|gb|AAN75577.1| copper-zinc superoxide dismutase [Cordyceps militaris] gi|28415241|gb|AAO40743.1| copper-zinc
  misc_feature (1)..(153): NCBI GI: 94982453 Blast Desc: copper-zinc superoxide dismutase [Chaetomium thermophilum] gi|110564269|gb|ABG76789.1| copper zinc superoxide dismutase [Chaetomium thermophilum]
  misc_feature (1)..(154): NCBI GI: 116193365 Blast Desc: Cu/Zn superoxide dismutase [Chaetomium globosum CBS 148.51] gi|88182313|gb|EAQ89781.1| Cu/Zn superoxide dismutase [Chaetomium globosum CBS 148.51]
  misc_feature (1)..(153): NCBI GI: 169665480 Blast Desc: cupper/zinc superoxide dismutase [Oidiodendron maius]
  misc_feature (1)..(154): NCBI GI: 51702130 Blast Desc: SODC_CLAPU RecName: Full=Superoxide dismutase [Cu-Zn] gi|15139865|emb|CAC50073.1| Cu/Zn-superoxide dismutase [Claviceps purpurea]
  misc_feature (1)..(154): NCBI GI: 51702016 Blast Desc: SODC_PAETN RecName: Full=Superoxide dismutase [Cu-Zn] gi|26000293|gb|AAN75576.1| copper-zinc superoxide dismutase [Isaria tenuipes]
  misc_feature (1)..(154): NCBI GI: 254596853 Blast Desc: Cu/Zn superoxide dismutase [Beauveria bassiana]
  misc_feature (1)..(154): NCBI GI: 261353625 Blast Desc: superoxide dismutase [Verticillium albo-atrum VaMs.102]
  misc_feature (1)..(153): NCBI GI: 171684497 Blast Desc: protein product [Podospora anserina] gi|51701965|sp|Q711T9.3|SODC_PODAN RecName: Full=Superoxide dismutase [Cu-Zn] gi|40313251|emb|CAC83677.1| copper/zinc protein
  misc_feature (1)..(153): NCBI GI: 164429724 Blast Desc: superoxide dismutase [Neurospora crassa OR74A] gi|134615|sp|P07509.3|SODC_NEUCR RecName: Full=Superoxide dismutase [Cu-Zn] gi|168909|gb|AAA63780.1| Cu/Zn-superoxide
  misc_feature (1)..(154): SWISSPROT Homolog: EC 1.15.1.1 Superoxide dismutase
  misc_feature: Useful for introducing or modulating the production of volatile compounds
MVKAVAVIRGDSKVSGTVTFEQSSESEPTTISWDITGHDPNASRGFHIHTFGDNTNGCTSAGPHFNPHGKTHGSPGDENRHVGDLGNIETDGQGNAKGSVQDKLIKLIGPESIIGRTVVSHGGTDDLGKGGNEESLKTGNAGPRPACGVIGISN

SEQ ID NO: 31808 - DNA, 2889 bp, Muscodor strobelii
  misc_feature: SGI EST ID NO. CUFF.75235.0
  misc_feature: Variant of the nucleotide sequence at SEQ ID NO 31806
cagatctacacctcttccgcgtggctatgtgagcacaatcagggacccctttacctcgtgccagttgagcctcaccaatgaaactacagataagacaacgttgtgtggcttctcggtatatcatatcattcacctcggctctatcacacgttgcagaccttcaaatgttgatctactctgctatttgattgcgagggcctccctttcctaaaatttggggtccatttgtcttctgtctgccataagtacgcgcggactgacggcgcagtcctgattgatgcccttcaacaacagcagacatgccgtgtaacagtcatcccaagttgtcgaacatcttcagaaacacgtgcttactcgctgcagtcatgtcatctgtcaatcctgtcatttatcactgatatcttttgtgtggtcgcagtagtcggacccggctaatcatctagatctgtttagacggttcgatacaggctgtcgaaaatgttttcgtgctaacctatcatgcagataatgtcttgactcatcgtggcgtatcggcggcatacactagagtactcacttcaagaatgcgagttgaaacctaagaactgcaagttcatgagcaatcaagcggcttcctcaagtagtaggaaaagggcggatcgaatgttgaccagcttgacttgtgccacaagctgatttcttactaacttttgtgaagaaagatggcttgcatggtccacgacggagcataacgaactacacataagtgaggcttcacttggcatttggcagatagcacttctgtctacttgattgccggtcacagcttagacgggatatgttattgaatgggttatgatcccggagcttcgaacatttaacgataacgttatgagtggagaagaatgcagcgataaataacatatttcaacatgtctcgttatatcagacccttgcttactgaattgtttcacttgcgacactggccccagcagaaaataaggtgccgcacatttacatggactgcaccgtttggtgtcctgagatagttaaaccttgcaacgttggcaaaagaagcatatgtcacaagcttagcctacctgtctgccttaatatgttagctcgtcgtgatgacaacttgtttgcatcaggtagtggatttgcgaattatagcgaaatagtggaatgaatagaaacgacaaatccgaatctgaattaccttaggtacggtagagatagtttagatcagtgccgaaaccaagttgatacaacacaattccacatatcgtttctgcatcgtataaatctttgatggcattgaagctccttagtgtgctgttgtcccaactgtttgtcgatgttattctgggagcccctacctacctagtaataaccagcaaatgaagaatccgaaaatcggcgtgccccattgctgccacgagttcgtgaaataggcaagataggtccaaatttttgacgtacaagtttgggaatatgggattgataggacgatgtcatttgtcagcgctggttcccggtgactgtctcgactatgacggcagagaccttggtgcggggcagcttcagttcgcgacccctcccgcgcaatggacggcggatgacgaaacttgtcgaccctggtctaaatgataggttgcttcatgcgaattacctgcaggaggaaatcgtaattgacgggtaatgggtagagtagagagcagtagcttagtggcgttttaatgattgatcaaagtgacccgcagctgtgggagatggccaaactccgtcggtagattcggagagatgccaggacatccgaatgtctgaagccccctcctttgtaagtgggttggctgtataatacaaatttctagaagacagaagagctcacctatcttcccctcttcttcttacccgacaaacgtttattttgcaatctaagaaatattcccacctacatcaatacccgaattcagagcttaaatcaatcaaaatggtcaaggctgtcgctgtcatccgtggtgactccaaggtctccggcaccgtcaccttcgagcagtcctcggagtcggagcccactaccatctcttgggacatcactggccacgaccccaacgcttcgcgaggcttccacatccacactttcggtgacaacaccaacggctgcacttccgccggccctcacttcaacccccatggcaagactcacggttcccccggcgatgagaaccgccacgttggtgatctaggcaacatcgagaccgacggccagggcaatgccaagggctccgtccaggataagctcatcaaacttatcggacccgagagcatcattggccgtaccgtcgtctcccacggaggtactgacgacctcggcaagggtggcaacgaggaatccctcaagactggcaacgccggtccccgacctgcttgcggtgtcattggtatctccaactaggtcgagatattacacactcgagacggtaattagtctggtaggatagcttgtttccactgaaaatttagctcctcgtatcatgaatgaaaaccccaacagctactgctgaaaacccaacgcaattgacgagttctgttttccctgtgatgtgtttctgttgtaatacgaacctctctatttgacgcatgtctagcgtactgctgtcagggccaccaatgtgttgtacggaacatcaatctacgcattttccttataagtgacttgtgtatatcatcaagttgaacttcaaagctgatgtagcaaatttgcagtggtcttgttatgaggaatctttaattcttatgattcgccaagcatattccgacagattgtacaattagagctcagtcgtgaatcgtcacgcaatgagggaaggtcctagctaatgatgccatccaacacgttttgccccg

SEQ ID NO: 31809 - DNA, 456 bp, Muscodor strobelii
  misc_feature: SGI cDNA ID NO. 570955
  misc_feature: Reduced expression when VOC is produced
  misc_feature: Encodes the peptide sequence at SEQ ID NO 31810
atggtcaaggctgtcgctgtcatccgtggtgactccaaggtctccggcaccgtcaccttcgagcagtcctcggagtcggagcccactaccatctcttgggacatcactggccacgaccccaacgcttcgcgaggcttccacatccacactttcggtgacaacaccaacggctgcacttccgccggccctcacttcaacccccatggcaagactcacggttcccccggcgatgagaaccgccacgttggtgatctaggcaacatcgagaccgacggccagggcaatgccaagggctccgtccaggataagctcatcaaacttatcggacccgagagcatcattggccgtaccgtcgtctcccacggaggtactgacgacctcggcaagggtggcaacgaggaatccctcaagactggcaacgccggtccccgacctgcttgcggtacattaccttag

SEQ ID NO: 31810 - protein, 151 aa, Muscodor strobelii
  misc_feature: SGI Peptide ID NO. 570955
  misc_feature (1)..(151): Pfam Id: PF00080 Pfam Desc: Copper/zinc superoxide dismutase (SODC)
  misc_feature (1)..(150): NCBI GI: 94982453 Blast Desc: copper-zinc superoxide dismutase [Chaetomium thermophilum] gi|110564269|gb|ABG76789.1| copper zinc superoxide dismutase [Chaetomium thermophilum]
  misc_feature (1)..(150): NCBI GI: 51702015 Blast Desc: SODC_CORMI RecName: Full=Superoxide dismutase [Cu-Zn] gi|26000295|gb|AAN75577.1| copper-zinc superoxide dismutase [Cordyceps militaris] gi|28415241|gb|AAO40743.1| copper-zinc
  misc_feature (1)..(150): NCBI GI: 169665480 Blast Desc: cupper/zinc superoxide dismutase [Oidiodendron maius]
  misc_feature (1)..(150): NCBI GI: 116193365 Blast Desc: Cu/Zn superoxide dismutase [Chaetomium globosum CBS 148.51] gi|88182313|gb|EAQ89781.1| Cu/Zn superoxide dismutase [Chaetomium globosum CBS 148.51]
  misc_feature (1)..(150): NCBI GI: 256733583 Blast Desc: [Nectria haematococca mpVI 77-13-4]
  misc_feature (1)..(150): NCBI GI: 51702130 Blast Desc: SODC_CLAPU RecName: Full=Superoxide dismutase [Cu-Zn] gi|15139865|emb|CAC50073.1| Cu/Zn-superoxide dismutase [Claviceps purpurea]
  misc_feature (1)..(150): NCBI GI: 51702016 Blast Desc: SODC_PAETN RecName: Full=Superoxide dismutase [Cu-Zn] gi|26000293|gb|AAN75576.1| copper-zinc superoxide dismutase [Isaria tenuipes]
  misc_feature (1)..(150): NCBI GI: 254596853 Blast Desc: Cu/Zn superoxide dismutase [Beauveria bassiana]
  misc_feature (1)..(150): NCBI GI: 171684497 Blast Desc: protein product [Podospora anserina] gi|51701965|sp|Q711T9.3|SODC_PODAN RecName: Full=Superoxide dismutase [Cu-Zn] gi|40313251|emb|CAC83677.1| copper/zinc protein
  misc_feature (4)..(148): NCBI GI: 46128687 Blast Desc: SODC_NEUCR Superoxide dismutase [Gibberella zeae PH-1]
  misc_feature (1)..(150): SWISSPROT Homolog: EC 1.15.1.1 Superoxide dismutase
  misc_feature: Useful for introducing or modulating the production of volatile compounds
MVKAVAVIRGDSKVSGTVTFEQSSESEPTTISWDITGHDPNASRGFHIHTFGDNTNGCTSAGPHFNPHGKTHGSPGDENRHVGDLGNIETDGQGNAKGSVQDKLIKLIGPESIIGRTVVSHGGTDDLGKGGNEESLKTGNAGPRPACGTLP

SEQ ID NO: 31811 - DNA, 2889 bp, Muscodor strobelii; identical to SEQ ID NO: 31808
  misc_feature: SGI EST ID NO. CUFF.75235.0
  misc_feature: Variant of the nucleotide sequence at SEQ ID NO 31809

SEQ ID NO: 31812 - DNA, 2646 bp, Muscodor strobelii
  misc_feature: SGI cDNA ID NO. 570956
  misc_feature: Encodes the peptide sequence at SEQ ID NO 31813
atggcgaaacagttccatgccaacgttaagtcggtcctgagtggcgactcgctcatcctcggtagccagacaaaccccaatgccgaacgcaccttctctttggcttacgttactggtccccgcttgagaagagagggtgacgagccatttgctttccaatcgcgcgagtacctccgaggcttagctgttggtaagccaatcttgtgcagcgtagcctacactatcccgtcttccggtcgcgaatatggctctgccgaactcaaggatggcaccaaacttcccgatgagctcgtgaaggctgggtggctcaaagtccgggaggacgcaggacgcaaagacgattccgaggaagtgctagaacgccttgaaaatctgcggaacctcgagtcccaggcgaagagtgaaggcaaaggactctgggcaggtactggtggtgacatcgaggtacagaatgacatcggagcaatcaattttagtcagtggaagggcaagacagttgatggtatcgttgagcgcatcctaagcggagatcgttgcctcgttcgcgtgatgctctccgacaatctacatctccaagtcatgactctcgtggctggtatccgtacaccttctacagaaagagtcaatcaatcaacaggacagactcaacctgctgaagagttcggcaacgaagcacgtcaatacgttgagaccaggctcttacaacgatctgtcaaggtcgaattggttggcatcagccaacaaggccagctcatcgcctccctgatacatcctcgaggaagcattgccgaatttttgcttgctgacggtctcgcgagatgcaacgatgtccactcgactttactaggtagcaagatggcctcacttcgcgcggcagagaagaaggcacaggccggaaaactgcgtctacacaaggatcatgtcgctaaagttggtgccggcagcacgtcagatatgatcgtctcgagagtatttagtgctgataccatattcgttcgtactaaagccggagacgaaaagcgtatcagcctcagcagtgtccgtggtccccgagccggtgaaccctctgaagctcctttccgtgatgaagccaaagagtatctacgaaagaagctcattggcaagcatgtcaaagtttcaattgacggatcaaagcctgctagcgaagagtttgatgcgcgggatgtcgcaacagtcactgagaagggtaagaacatcaatcttgccctggtccaagacggttggtgctctgttattcgccacagaaaggatgacaccgacagagctcctaactacgatgaacttttggccgctcaagaagaagcgaaagaggcaaaaaagggtatttggtctggcaaatcgtccaaggctagaacgtacgtggatgtatcggaatcagtgcagaaagctaagattcaggcatctacattgtcgcgtcaaaagaaggtgcccggagtcgtcgatttctgcaaggctgggtcgcgcttcaccatcttgatccctcgcgagaacatcaagcttacccttgtcctcgccggtattcgagccccacgagccccgagagccggccagaatgatggcgagccttttggagccgaggcactggatttagccaacaaacgctgccttcagcgtgactgcgagatcgacgttcatgataccgacaaagttggtggatttattggcgatctctatatcaacagggagagctttgccaaggctcttgtcgaagagggtctagcttccgtccaccagtactcagcagagaaggctggcaatgccaatgagctcaatgcagttcagcagaaggccaaggagggccgcaaagggttatggcatgactgggacccatctcaagatgaggacgacgaagaagaggccgcacaagccgaggcacctgcggattccggacctgtagataagaaagcgtccgactatcgcgaggtcgtcgttacgaacatcgattcaaacggaaagctcaagatccaggagattggcaaaggcacctctgccctcgaagtcatgatgaacgaattcaagaggttccatctcgatgctaagaatagcaagccgctcgccaatccacctaagacgggcgaatacgtggctgcgaaattctctgccgatggccagtggtaccgtgcacgcatccgagccaatgaccgaactgccaagaaggccgaagttgtctacatcgactacggcaatagcgagcagattccctgggcaaacctccgcgctctcgaccagcctcagttcactgtccagaagctcaagggacaagccgtagacgccgtgctatcattcatccagctgcccacagccacagactatttccaggacgcgattgagttcatccaggaggcgacggacggtcgaacactggttgcaagcttcgacttcgtcgatgtcaaggaaggtctcagctacatcaccctcttcgacgaagctgccggtgactcattcgcggactcggttaacaaagatgtcgtagctaatggttacgccatggtaccgaagaagctcaaggcttgggagagaggtcgtgcctccgaggaagtgctgaagaagctgcgcgaagtcgcgactcaggctaagtctgagcgacgtggaatgtggcagtatggcgatatcacggaggactaa

SEQ ID NO: 31813 - protein, 881 aa, Muscodor strobelii
  misc_feature: SGI Peptide ID NO. 570956
  misc_feature (481)..(614): Pfam Id: PF00565 Pfam Desc: Staphylococcal nuclease homologue
  misc_feature (315)..(452): Pfam Id: PF00565 Pfam Desc: Staphylococcal nuclease homologue
  misc_feature (164)..(306): Pfam Id: PF00565 Pfam Desc: Staphylococcal nuclease homologue
  misc_feature (641)..(769): Pfam Id: PF00567 Pfam Desc: Tudor domain
  misc_feature (1)..(881): NCBI GI: 46128689 Blast Desc: FG08722.1 [Gibberella zeae PH-1]
  misc_feature (5)..(881): NCBI GI: 85112164 Blast Desc: NCU02134 [Neurospora crassa OR74A] gi|28926068|gb|EAA35056.1| NCU02134 [Neurospora crassa OR74A]
  misc_feature (5)..(881): NCBI GI: 116193367 Blast Desc: CHGG_06401 [Chaetomium globosum CBS 148.51] gi|88182314|gb|EAQ89782.1| CHGG_06401 [Chaetomium globosum CBS 148.51]
  misc_feature (2)..(879): NCBI GI: 145610248 Blast Desc: MGG_12646 [Magnaporthe grisea 70-15] gi|149209731|ref|XP_001522240.1| MGCH7_ch7g348 [Magnaporthe grisea 70-15] gi|86196303|gb|EAQ70941.1| MGCH7_ch7g348 grisea
  misc_feature (1)..(881): NCBI GI: 171684499 Blast Desc: protein product [Podospora anserina] gi|170942210|emb|CAP67862.1| protein product [Podospora anserina]
  misc_feature (1)..(881): NCBI GI: 261353624 Blast Desc: staphylococcal nuclease domain-containing protein [Verticillium albo-atrum VaMs.102]
  misc_feature (6)..(881): NCBI GI: 156065379 Blast Desc: SS1G_00700 [Sclerotinia sclerotiorum 1980] gi|154691559|gb|EDN91297.1| SS1G_00700 [Sclerotinia sclerotiorum 1980]
  misc_feature (6)..(881): NCBI GI: 154322429 Blast Desc: BC1G_00557 [Botryotinia fuckeliana B05.10] gi|150847891|gb|EDN23084.1| BC1G_00557 [Botryotinia fuckeliana B05.10]
  misc_feature (5)..(881): NCBI GI: 119479473 Blast Desc: transcription factor (Snd1/p100), [Neosartorya fischeri NRRL 181] gi|119407919|gb|EAW17868.1| transcription factor (Snd1/p100), [Neosartorya fischeri NRRL 181]
  misc_feature (2)..(881): NCBI GI: 169594590 Blast Desc: SNOG_00021 [Phaeosphaeria nodorum SN15] gi|111070396|gb|EAT91516.1| SNOG_00021 [Phaeosphaeria nodorum SN15]
MAKQFHANVKSVLSGDSLILGSQTNPNAERTFSLAYVTGPRLRREGDEPFAFQSREYLRGLAVGKPILCSVAYTIPSSGREYGSAELKDGTKLPDELVKAGWLKVREDAGRKDDSEEVLERLENLRNLESQAKSEGKGLWAGTGGDIEVQNDIGAINFSQWKGKTVDGIVERILSGDRCLVRVMLSDNLHLQVMTLVAGIRTPSTERVNQSTGQTQPAEEFGNEARQYVETRLLQRSVKVELVGISQQGQLIASLIHPRGSIAEFLLADGLARCNDVHSTLLGSKMASLRAAEKKAQAGKLRLHKDHVAKVGAGSTSDMIVSRVFSADTIFVRTKAGDEKRISLSSVRGPRAGEPSEAPFRDEAKEYLRKKLIGKHVKVSIDGSKPASEEFDARDVATVTEKGKNINLALVQDGWCSVIRHRKDDTDRAPNYDELLAAQEEAKEAKKGIWSGKSSKARTYVDVSESVQKAKIQASTLSRQKKVPGVVDFCKAGSRFTILIPRENIKLTLVLAGIRAPRAPRAGQNDGEPFGAEALDLANKRCLQRDCEIDVHDTDKVGGFIGDLYINRESFAKALVEEGLASVHQYSAEKAGNANELNAVQQKAKEGRKGLWHDWDPSQDEDDEEEAAQAEAPADSGPVDKKASDYREVVVTNIDSNGKLKIQEIGKGTSALEVMMNEFKRFHLDAKNSKPLANPPKTGEYVAAKFSADGQWYRARIRANDRTAKKAEVVYIDYGNSEQIPWANLRALDQPQFTVQKLKGQAVDAVLSFIQLPTATDYFQDAIEFIQEATDGRTLVASFDFVDVKEGLSYITLFDEAAGDSFADSVNKDVVANGYAMVPKKLKAWERGRASEEVLKKLREVATQAKSERRGMWQYGDITED

SEQ ID NO: 31814 - DNA, 3333 bp, Muscodor strobelii
  misc_feature: SGI EST ID NO. CUFF.75247.1
  misc_feature: Variant of the nucleotide sequence at SEQ ID NO 31812
aagttatcttgatataaattcagcagctgattatattcgcagttaaagccctaaatctctcaggtgcagcttctgctgttctttcacttcttctgggattccattgaccttcattcatcatggcgaaacagttccatgccaacgttaagtcggtcctgagtggcgactcgctcatcctcggtagccagacaaaccccaatgccgaacgcaccttctctttggcttacgttactggtccccgcttgagaagagagggtgacgagccatttgctttccaatcgcgcgagtacctccgaggcttagctgttggtaagccaatcttgtgcagcgtagcctacactatcccgtcttccggtcgcgaatatggctctgccgaactcaaggatggcaccaaacttcccgatgagctcgtgaaggctgggtggctcaaagtccgggaggacgcaggacgcaaagacgattccgaggaagtgctagaacgccttgaaaatctgcggaacctcgagtcccaggcgaagagtgaaggcaaaggactctgggcaggtactggtggtgacatcgaggtacagaatgacatcggagcaatcaattttagtcagtggaagggcaagacagttgatggtatcgttgagcgcatcctaagcggagatcgttgcctcgttcgcgtgatgctctccgacaatctacatctccaagtcatgactctcgtggctggtatccgtacaccttctacagaaagagtcaatcaatcaacaggacagactcaacctgctgaagagttcggcaacgaagcacgtcaatacgttgagaccaggctcttacaacgatctgtcaaggtcgaattggttggcatcagccaacaaggccagctcatcgcctccctgatacatcctcgaggaagcattgccgaatttttgcttgctgacggtctcgcgagatgcaacgatgtccactcgactttactaggtagcaagatggcctcacttcgcgcggcagagaagaaggcacaggccggaaaactgcgtctacacaaggatcatgtcgctaaagttggtgccggcagcacgtcagatatgatcgtctcgagagtatttagtgctgataccatattcgttcgtactaaagccggagacgaaaagcgtatcagcctcagcagtgtccgtggtccccgagccggtgaaccctctgaagctcctttccgtgatgaagccaaagagtatctacgaaagaagctcattggcaagcatgtcaaagtttcaattgacggatcaaagcctgctagcgaagagtttgatgcgcgggatgtcgcaacagtcactgagaagggtaagaacatcaatcttgccctggtccaagacggttggtgctctgttattcgccacagaaaggatgacaccgacagagctcctaactacgatgaacttttggccgctcaagaagaagcgaaagaggcaaaaaagggtatttggtctggcaaatcgtccaaggctagaacgtacgtggatgtatcggaatcagtgcagaaagctaagattcaggcatctacattgtcgcgtcaaaagaaggtgcccggagtcgtcgatttctgcaaggctgggtcgcgcttcaccatcttgatccctcgcgagaacatcaagcttacccttgtcctcgccggtattcgagccccacgagccccgagagccggccagaatgatggcgagccttttggagccgaggcactggatttagccaacaaacgctgccttcagcgtgactgcgagatcgacgttcatgataccgacaaagttggtggatttattggcgatctctatatcaacagggagagctttgccaaggctcttgtcgaagagggtctagcttccgtccaccagtactcagcagagaaggctggcaatgccaatgagctcaatgcagttcagcagaaggccaaggagggccgcaaagggttatggcatgactgggacccatctcaagatgaggacgacgaagaagaggccgcacaagccgaggcacctgcggattccggacctgtagataagaaagcgtccgactatcgcgaggtcgtcgttacgaacatcgattcaaacggaaagctcaagatccaggagattggcaaaggcacctctgccctcgaagtcatgatgaacgaattcaagaggttccatctcgatgctaagaatagcaagccgctcgccaatccacctaagacgggcgaatacgtggctgcgaaattctctgccgatggccagtggtaccgtgcacgcatccgagccaatgaccgaactgccaagaaggccgaagttgtctacatcgactacggcaatagcgagcagattccctgggcaaacctccgcgctctcgaccagcctcagttcactgtccagaagctcaagggacaagccgtagacgccgtgctatcattcatccagctgcccacagccacagactatttccaggacgcgattgagttcatccaggaggcgacggacggtcgaacactggttgcaagcttcgacttcgtcgatgtcaaggaaggtctcagctacatcaccctcttcgacgaagctgccggtgactcattcgcggactcggttaacaaagatgtcgtagctaatggttacgccatggtaccgaagaagctcaaggcttgggagagaggtcgtgcctccgaggaagtgctgaagaagctgcgcgaagtcgcgactcaggctaagtctgagcgacgtggaatgtggcagtatggcgatatcacggaggactaaatcttgcgactcattcttcgtggatgccctctctttcacgcgagctctggagcgatatgcgtttgcgcgatcttcatagaggatgaactagcgatatttgtacgaaagagaatatgactctatggcgacaacagtctcatttatctgcatatcaggagggtaaaggccaaaaaaatatctcggatatcattcaaagtctatagccaagaagcatcaatttcaagagtgcatgtacatcagaggtctatgtattatgagtgaccgttattgtgaatattatctcgaagtgacattcatgagtttctaattggctgccggtctgcaaaccgaggagcgaatcgcctgaaaaagtcgttcatggattgagtaccagtcaggacccccacgtggagggtcatggcaatagtccaggtgcactgtgatccagcgtatcggtggggtcaacatgtggcaggtttagcatgtctaccgcattaactctttgagtatatcggtcggcataccggctgcgagcctagagacgccgggcaaggtcacgacattttctcgcctgtaacgaattggcgac

SEQ ID NO: 31815 - DNA, 975 bp, Muscodor strobelii
  misc_feature: SGI cDNA ID NO. 570957
  misc_feature: Reduced expression when VOC is produced
  misc_feature: Encodes the peptide sequence at SEQ ID NO 31816
atgtctagctctctcgaccagctgaaagccactggcactgtcgtcgtgtgcgactctggtgatttcgcaaccatcggaaagtacaagcctcaagatgccaccaccaacccatctctcatcctcgccgcctccaagaagcccgagtatgctaagctgatcgacgacgccgtcgcctacgccaagaagcagggtggtgatgccgaccagcaggtagatatcgcgctcgacagcctccttgtcgagttcggaaaggaaatcctcaagatcatccccggcaaggtctcaactgaggtcgacgctcgcttctccttcgacaccaaggcctccgtcaacaaggccctccgtattatcagcctgtacaaggagcagggcatctccaaggaccgtgtcctgatcaagatcgcctcgacctgggaaggcatcaaggccgctgagatcctgcagcgcgaccacggcatcaactgcaaccttaccctcatgttctcccctgttcaggccattgctgccgctgaggccggcgctttcctcatctccccattcgtcggccgtattctcgactggtacaaggcctccaccggcaagacctactctagcgaagaggatcccggtgtcaagtctgtccaggctatctacaactactacaagaagttcggccacaagaccatcgtaatgggtgcttctttccgcaacgttggcgagatcaccgagcttgccggctgcgactacctgaccatcgcacccaaactgttggaggagctgctgaactcttccgacgccgtgccccagaagctcgacgcctcgggcgcctcctcgctcaacatcgagcaaaagtcatatatcaacgacgaggctctcttccgattcgagttcaacgaggagaagatggcggtcgagaagctgcgcgacggcatcagcggattccacgctgatgcctccactctgaaggacatcatcaaggctaaggttactgcatag

SEQ ID NO: 31816 - protein, 324 aa, Muscodor strobelii
  misc_feature: SGI Peptide ID NO. 570957
  misc_feature (14)..(318): Pfam Id: PF00923 Pfam Desc: Transaldolase
  misc_feature (1)..(323): NCBI GI: 46128691 Blast Desc: FG08723.1 [Gibberella zeae PH-1]
  misc_feature (1)..(322): NCBI GI: 256733599 Blast Desc: [Nectria haematococca mpVI 77-13-4]
  misc_feature (1)..(324): NCBI GI: 39970315 Blast Desc: transaldolase [Magnaporthe grisea 70-15] gi|149209729|ref|XP_001522239.1| MGCH7_ch7g347 [Magnaporthe grisea 70-15] gi|58257441|gb|AAW69342.1| transaldolase-like
  misc_feature (1)..(324): NCBI GI: 67515917 Blast Desc: AN0240.2 [Aspergillus nidulans FGSC A4] gi|40746957|gb|EAA66113.1| conserved [Aspergillus nidulans FGSC A4] gi|259489542|tpe|CBF89899.1| TPA: transaldolase AFUA_5G09230)
  misc_feature (1)..(324): NCBI GI: 240109621 Blast Desc: Transaldolase, [Coccidioides posadasii C735 delta SOWgp]
  misc_feature (1)..(324): NCBI GI: 119183481 Blast Desc: CIMG_06675 [Coccidioides immitis RS]
  misc_feature (1)..(324): NCBI GI: 240277765 Blast Desc: transaldolase [Ajellomyces capsulatus H143]
  misc_feature (1)..(324): NCBI GI: 121713044 Blast Desc: transaldolase [Aspergillus clavatus NRRL 1] gi|119402286|gb|EAW12707.1| transaldolase [Aspergillus clavatus NRRL 1]
  misc_feature (1)..(324): NCBI GI: 238505090 Blast Desc: transaldolase [Aspergillus flavus NRRL3357] gi|220689888|gb|EED46238.1| transaldolase [Aspergillus flavus NRRL3357]
  misc_feature (1)..(324): NCBI GI: 154285594 Blast Desc: transaldolase [Ajellomyces capsulatus NAm1] gi|150407233|gb|EDN02774.1| transaldolase [Ajellomyces capsulatus NAm1]
  misc_feature (3)..(324): SWISSPROT Homolog: EC 2.2.1.2 Transaldolase
  misc_feature: Useful for introducing or modulating the production of volatile compounds
MSSSLDQLKATGTVVVCDSGDFATIGKYKPQDATTNPSLILAASKKPEYAKLIDDAVAYAKKQGGDADQQVDIALDSLLVEFGKEILKIIPGKVSTEVDARFSFDTKASVNKALRIISLYKEQGISKDRVLIKIASTWEGIKAAEILQRDHGINCNLTLMFSPVQAIAAAEAGAFLISPFVGRILDWYKASTGKTYSSEEDPGVKSVQAIYNYYKKFGHKTIVMGASFRNVGEITELAGCDYLTIAPKLLEELLNSSDAVPQKLDASGASSLNIEQKSYINDEALFRFEFNEEKMAVEKLRDGISGFHADASTLKDIIKAKVTA

SEQ ID NO: 31817 - DNA, 1255 bp, Muscodor strobelii
  misc_feature: SGI EST ID NO. CUFF.75244.0
  misc_feature: Variant of the nucleotide sequence at SEQ ID NO 31815
caaagctcatgcgtcaagtcatatagaatggaggggcaattactcttttttacaacaaaaccctcatccccaaccatttcatcaaccattatacctcataccccaatccaaacacatcaaccattttcacaatgtctagctctctcgaccagctgaaagccactggcactgtcgtcgtgtgcgactctggtgatttcgcaaccatcggaaagtacaagcctcaagatgccaccaccaacccatctctcatcctcgccgcctccaagaagcccgagtatgctaagctgatcgacgacgccgtcgcctacgccaagaagcagggtggtgatgccgaccagcaggtagatatcgcgctcgacagcctccttgtcgagttcggaaaggaaatcctcaagatcatccccggcaaggtctcaactgaggtcgacgctcgcttctccttcgacaccaaggcctccgtcaacaaggccctccgtattatcagcctgtacaaggagcagggcatctccaaggaccgtgtcctgatcaagatcgcctcgacctgggaaggcatcaaggccgctgagatcctgcagcgcgaccacggcatcaactgcaaccttaccctcatgttctcccctgttcaggccattgctgccgctgaggccggcgctttcctcatctccccattcgtcggccgtattctcgactggtacaaggcctccaccggcaagacctactctagcgaagaggatcccggtgtcaagtctgtccaggctatctacaactactacaagaagttcggccacaagaccatcgtaatgggtgcttctttccgcaacgttggcgagatcaccgagcttgccggctgcgactacctgaccatcgcacccaaactgttggaggagctgctgaactcttccgacgccgtgccccagaagctcgacgcctcgggcgcctcctcgctcaacatcgagcaaaagtcatatatcaacgacgaggctctcttccgattcgagttcaacgaggagaagatggcggtcgagaagctgcgcgacggcatcagcggattccacgctgatgcctccactctgaaggacatcatcaaggctaaggttactgcatagattattaatgaagttgtcttacggaaatgctgtaaacattatatagtaaaagtagtaatgggataatcttctacctaactttcaaatagaccggcgaataacgcctgtatatatgtatatgcttaaacctttgtatcatgttcccctaa

SEQ ID NO: 31818 - DNA, 570 bp, Muscodor strobelii
  misc_feature: SGI cDNA ID NO. 570958
  misc_feature: Encodes the peptide sequence at SEQ ID NO 31819
atgacgtcctcagccgacgacatggacgtagcgaagaatcatagaccctcatatcctcatatcagccgtctcgacccttctctcctacccacagatccagcaatcgaggcagacatacccagacgtctaataataatcggcgatgtgcacggacatcttgaagcgctcaaggcgctccttaaaaaagcgaagtactcaccaagtaccgaccatgtaatactagccggtgaccttgtaaataaaggtccggacagcgccggcgtcgtagagcttgctatgcgcatcggcgcaagtgcagtccgagggaaccacgaagaccggatattgggtgcttgggatattgcgcacagccattcccactccctagacgccagcgacgacgacgacgacgacgaaacggagagcgaggctgatggatccggagaggaggcgcaggactccgagaccgagcaggagatactgcaatcccgaaaacaccataaaggcaaagacacgaaaaaggacaaaaaaaggggaagaagaagggcaaagataaaaaaaagaaaggcaagacttacaagggcgatctga

SEQ ID NO: 31819 - protein, 189 aa, Muscodor strobelii
  misc_feature: SGI Peptide ID NO. 570958
  misc_feature (41)..(162): Pfam Id: PF00149 Pfam Desc: Calcineurin-like phosphoesterase
  misc_feature (41)..(107): Pfam Id: PF00149 Pfam Desc: Calcineurin-like phosphoesterase
  misc_feature (13)..(109): NCBI GI: 212534642 Blast Desc: Ser/Thr protein phosphatase family [Penicillium marneffei ATCC 18224] gi|210069876|gb|EEA23966.1| Ser/Thr protein phosphatase family [Penicillium marneffei ATCC 18224]
  misc_feature (40)..(188): NCBI GI: 154309398 Blast Desc: BC1G_07593 [Botryotinia fuckeliana B05.10] gi|150852417|gb|EDN27609.1| BC1G_07593 [Botryotinia fuckeliana B05.10]
  misc_feature (10)..(109): NCBI GI: 238505270 Blast Desc: Ser/Thr protein phosphatase family [Aspergillus flavus NRRL3357] gi|220689978|gb|EED46328.1| Ser/Thr protein phosphatase family [Aspergillus flavus NRRL3357]
  misc_feature (6)..(112): NCBI GI: 46128693 Blast Desc: FG08724.1 [Gibberella zeae PH-1]
  misc_feature (24)..(109): NCBI GI: 169780558 Blast Desc: [Aspergillus oryzae RIB40] gi|83773483|dbj|BAE63610.1| protein product [Aspergillus oryzae]
  misc_feature (10)..(109): NCBI GI: 242790722 Blast Desc: Ser/Thr protein phosphatase family [Talaromyces stipitatus ATCC 10500] gi|218718199|gb|EED17619.1| Ser/Thr protein phosphatase family [Talaromyces stipitatus ATCC 10500]
  misc_feature (8)..(161): NCBI GI: 261353622 Blast Desc: ser/Thr protein phosphatase family [Verticillium albo-atrum VaMs.102]
  misc_feature (40)..(188): NCBI GI: 156058238 Blast Desc: SS1G_03130 [Sclerotinia sclerotiorum 1980] gi|154700918|gb|EDO00657.1| SS1G_03130 [Sclerotinia sclerotiorum 1980]
  misc_feature (20)..(151): NCBI GI: 225683382 Blast Desc: conserved [Paracoccidioides brasiliensis Pb03]
  misc_feature (20)..(151): NCBI GI: 226286998 Blast Desc: conserved [Paracoccidioides brasiliensis Pb18]
MTSSADDMDVAKNHRPSYPHISRLDPSLLPTDPAIEADIPRRLIIIGDVHGHLEALKALLKKAKYSPSTDHVILAGDLVNKGPDSAGVVELAMRIGASAVRGNHEDRILGAWDIAHSHSHSLDASDDDDDDETESEADGSGEEAQDSETEQEILQSRKHHKGKDTKKDKKRGRRRAKIKKRKARLTRAI

SEQ ID NO: 31820 - DNA, 399 bp, Muscodor strobelii
  misc_feature: SGI cDNA ID NO. 570959
  misc_feature: Encodes the peptide sequence at SEQ ID NO 31821
atgccgagctcctgtaaagaaatccgagccgccctagcacaatgcctccaagaatccgaatgcgtaatgatccaacgcaatacagccgccgactgcctccggcctcctctctcggacaccctaccaaccaaatgccaacaactcaagaaagggttcggcgagtgcagacgcggcatgatagatatgcggaagcgctttcgtggtaatcaacctattacttttaagacactcgagacgagcgagaattctggagagggataccaattgtatgctgggaggtccgcgtttgcaggaagtgtgcataagacggatgggaatgaaccggaaccgaaggattggcgtgaggtcgagaatgaaaagttccgcgctgctgaggcggcgaagcaggataagaaatga

SEQ ID NO: 31821 - protein, 132 aa, Muscodor strobelii
  misc_feature: SGI Peptide ID NO. 570959
  misc_feature (1)..(128): NCBI GI: 39970313 Blast Desc: MGG_02623 [Magnaporthe grisea 70-15] gi|149209725|ref|XP_001522237.1| MGCH7_ch7g345 [Magnaporthe grisea 70-15] gi|86196300|gb|EAQ70938.1| MGCH7_ch7g345 grisea
  misc_feature (1)..(132): NCBI GI: 46128695 Blast Desc: FG08725.1 [Gibberella zeae PH-1]
  misc_feature (1)..(122): NCBI GI: 116193377 Blast Desc: CHGG_06406 [Chaetomium globosum CBS 148.51] gi|88182319|gb|EAQ89787.1| CHGG_06406 [Chaetomium globosum CBS 148.51]
  misc_feature (1)..(132): NCBI GI: 85113366 Blast Desc: NCU02149 [Neurospora crassa OR74A] gi|28926293|gb|EAA35272.1| conserved [Neurospora crassa OR74A]
  misc_feature (1)..(131): NCBI GI: 261353117 Blast Desc: conserved [Verticillium albo-atrum VaMs.102]
  misc_feature (1)..(123): NCBI GI: 256734098 Blast Desc: NECHADRAFT_67463 [Nectria haematococca mpVI 77-13-4]
  misc_feature (1)..(131): NCBI GI: 171684505 Blast Desc: protein product [Podospora anserina] gi|170942213|emb|CAP67865.1| protein product [Podospora anserina]
  misc_feature (1)..(122): NCBI GI: 156058616 Blast Desc: SS1G_03320 [Sclerotinia sclerotiorum 1980] gi|154701107|gb|EDO00846.1| SS1G_03320 [Sclerotinia sclerotiorum 1980]
  misc_feature (1)..(107): NCBI GI: 255955957 Blast Desc: Pc21g17330 [Penicillium chrysogenum Wisconsin 54-1255] gi|211590442|emb|CAP96630.1| Pc21g17330 [Penicillium chrysogenum Wisconsin 54-1255]
  misc_feature (1)..(107): NCBI GI: 225683423 Blast Desc: conserved [Paracoccidioides brasiliensis Pb03] gi|226287043|gb|EEH42556.1| conserved [Paracoccidioides brasiliensis Pb18]
MPSSCKEIRAALAQCLQESECVMIQRNTAADCLRPPLSDTLPTKCQQLKKGFGECRRGMIDMRKRFRGNQPITFKTLETSENSGEGYQLYAGRSAFAGSVHKTDGNEPEPKDWREVENEKFRAAEAAKQDKK

SEQ ID NO: 31822 - DNA, 2630 bp, Muscodor strobelii
  misc_feature: SGI EST ID NO. CUFF.75257.0
  misc_feature: Variant of the nucleotide sequence at SEQ ID NO 31820
cctccatccagcattgaagcttcagcttcagaccaatcaagacggccgaagtcacgagctcgaactttttgacgacagcgaaagcgaccgtgacgacaaccaacaacgcaaaaggaaccagatctcaacaccaaagctcgccgccgcaggcacatccaaaatgccgagctcctgtaaagaaatccgagccgccctagcacaatgcctccaagaatccgaatgcgtaatgatccaacgcaatacagccgccgactgcctccggcctcctctctcggacaccctaccaaccaaatgccaacaactcaagaaagggttcggcgagtgcagacgcggcatgatagatatgcggaagcgctttcgtggtaatcaacctattacttttaagacactcgagacgagcgagaattctggagagggataccaattgtatgctgggaggtccgcgtttgcaggaagtgtgcataagacggatgggaatgaaccggaaccgaaggattggcgtgaggtcgagaatgaaaagttccgcgctgctgaggcggcgaagcaggataagaaatgagggttgagggggagggagggtgtatgatgtgtgtatagatgggattggccgtgtacagcgattgcattgggtggcgttcaggcatgataaatctggattacagaatatgatactctacctcgtggtctcacggctttcacatcaatcgtgaagaattctgaagaagcctaaagctgcgttgtacagctaagccacgtagttagtcgagaccgaaatagttatgacagaaaacatacgcatactgctaaagacaggcagtactcacgacgcagcattgaagacatgagattattggtattcaccatcttgccatctcccatcaatgtcaaccaaaaagatacagggaacatgatgtgtatcagaatctattgggtatctcacatattgtctcttttcttctcttcctctttcctctaacccaacatctaagcgctcagctcagccctctcatcaaaatcctgacaagaaacactaacaaggcgatgtctaatcttcgcagcacgatctttcttcctactaccattcacatccccatcatccccatccccctcttctccccccttatattccccaacaacctcaaaaacagcagcagtcaattccacccccttcccacacccactatccaatcccatagcataatccctaatctgcagtcccgccttcgaatcatggccatagaccacggtgcttctactccccttcggcatagccctttgaaaccttgaccatatcttcgcccaggctgtgccatctcttcccggtaaaggcacaaaatccggtatcttcggttgcttaagccccgagggatcgggagtgatctctaggtcctctaattcttccactgagtttgttgtagtggtatcgtctgaagtggatagcgagggaagcaacgtccgcatattcataacggcctgcgcatcctgcgccagcagcgggacaccaggaacgagtcccgcgtggacgacaaacacgtctccgtatttcgggcccaggtccccgacttctaatattaagggcaaagcagatagccattctcgctgagcatgagagagtgatttagcggtcttcagatcgcccttgtaagtcttgcctttcttttttttatctttgcccttcttcttcccctttttttgtcctttttcgtgtctttgcctttatggtgttttcgggattgcagtatctcctgctcggtctcggagtcctgcgcctcctctccggatccatcagcctcgctctccgtttcgtcgtcgtcgtcgtcgtcgctggcgtctagggagtgggaatggctgtgcgcaatatcccaagcacccaatatccggtcttcgtggttccctcggactgcacttgcgccgatgcgcatagcaagctctacgacgccggcgctgtccggacctttatttacaaggtcaccggctagtattacatggtcggtacttggtgagtacttcgcttttttaaggagcgccttgagcgcttcaagatgtccgtgcacatcgccgattattattagacgtctgggtatgtctgcctcgattgctggatctgtgggtaggagagaagggtcgagacggctgatatgaggatatgagggtctatgattcttcgctacgtccatgtcgtcggctgaggacgtcatagtgtcggaatgagggcgaaaggttgggagcgagatcggatcgagtcgtttgtagctaagtagcacaagagcgacgatgatgaatatcgtgacgaggactcgaggtcgccacctgagcaggagattatccatttcatacaagagtatgacgctttccaagtttcgaggctggaattgtaggtgtcaaatattgagtggcagcctggacggctattgcaggttcatcggcttcccattgttcgcagggaagatagttcgtgagcgatgggttccgcaagtttggagcctggtctccgtagaatcgggtcagtgaaaaatggcataagtcactggtgaatctgtcagactctagtcttgaccaaacaacgaataaaagaaacaatcatgacgacggaccctttgaatcagggttcatcgaggggaaaattggct

SEQ ID NO: 31823 - DNA, 1182 bp, Muscodor strobelii
  misc_feature: SGI cDNA ID NO. 570960
  misc_feature: Encodes the peptide sequence at SEQ ID NO 31824
atgagcgacgaagacattcttgtcagtagcggaacatgttattccgctgctggcaagaagcttgattcctccttcatcccgtgcggcaacgacgcctttggccatgtgacatgctgtggaaaaggggacaattgtctcgcggacaatgcttgttatggcgtccacggcgacggcgacccgtcgcaatatggacacatgctgacatatatggccggatgcactgatcctgaatacaaagactcctcttgcccggacaaacagggaatagtcgcggcgagcgcgacaaccgccttcagcgatgcgtcgagtctcgacaacatcgcttccttgccccagaataccggcgacacgatatcgttttttcccggccacactcccactacacctccaggtggaccgaccgggggcggaacctcagggaccacgggcaccaccggatccatgccggggcctacaacgtttactacgacgggagcggacggggcaacagtcacggtgacgcagcaaggaccgacacagacggtggataacacgaagtccagcagcggcctagggcaaggggcagcaataggaattggagttggtgtgggcgtaggagcaattgtcatccttctagcacttggagcactcctctggcgccggcgaaagaggagacgtgagcaaccaagagatgacctaaaaggagcggccggaggaaaactgcagaagaaaggggctggagcggcacttgatgccgagaaggcgggtgatgcagcagatggcacaggcgtgtcaaaagcagacaagctaggaattacggagacggatggtcaagcagtttccgaagccgacagtaaaggggtatcgaaagcggacaaaacactcatggccgaagcgggcggggtacctattattgagacggatggccatgctgtgatacgtccgcatagtttaaggagcgaacttgaaggaagtcctgtcacacccacggtgcctgaccaccatttagacggcacacatgcagcgcacgtacgaatgagtgcagacttgagcccggtggcggagaaccctggcgccagtccgccaggtgatggtgtcatggctgcgtctacaacgggagcccccggacctgtagaaattgatagtcggcccttccctgacattggagggaggtcaagctacggagcattcaggcgcggctag

SEQ ID NO: 31824 - protein, 393 aa, Muscodor strobelii
  misc_feature: SGI Peptide ID NO. 570960
  misc_feature (5)..(130): NCBI GI: 171688158 Blast Desc: protein product [Podospora anserina] gi|170944041|emb|CAP70151.1| protein product [Podospora anserina]
  misc_feature (1)..(350): NCBI GI: 145614781 Blast Desc: [Magnaporthe grisea 70-15] gi|149209323|ref|XP_001522036.1| MGCH7_ch7g154 [Magnaporthe grisea 70-15] gi|86196109|gb|EAQ70747.1| MGCH7_ch7g154 grisea
  misc_feature (2)..(87): NCBI GI: 171676926 Blast Desc: protein product [Podospora anserina] gi|170936530|emb|CAP61190.1| protein product [Podospora anserina]
  misc_feature (1)..(86): NCBI GI: 261357687 Blast Desc: conserved [Verticillium albo-atrum VaMs.102]
  misc_feature (1)..(128): NCBI GI: 116196680 Blast Desc: [Chaetomium globosum CBS 148.51] gi|88180851|gb|EAQ88319.1| [Chaetomium globosum CBS 148.51]
  misc_feature (1)..(117): NCBI GI: 171677458 Blast Desc: protein product [Podospora anserina] gi|170936797|emb|CAP61455.1| protein product [Podospora anserina]
  misc_feature (132)..(309): NCBI GI: 145246828 Blast Desc: An12g05990 [Aspergillus niger] gi|134080385|emb|CAK46306.1| protein product [Aspergillus niger]
  misc_feature (12)..(88): NCBI GI: 238506403 Blast Desc: conserved [Aspergillus flavus NRRL3357] gi|220689116|gb|EED45467.1| conserved [Aspergillus flavus NRRL3357]
MSDEDILVSSGTCYSAAGKKLDSSFIPCGNDAFGHVTCCGKGDNCLADNACYGVHGDGDPSQYGHMLTYMAGCTDPEYKDSSCPDKQGIVAASATTAFSDASSLDNIASLPQNTGDTISFFPGHTPTTPPGGPTGGGTSGTTGTTGSMPGPTTFTTTGADGATVTVTQQGPTQTVDNTKSSSGLGQGAAIGIGVGVGVGAIVILLALGALLWRRRKRRREQPRDDLKGAAGGKLQKKGAGAALDAEKAGDAADGTGVSKADKLGITETDGQAVSEADSKGVSKADKTLMAEAGGVPIIETDGHAVIRPHSLRSELEGSPVTPTVPDHHLDGTHAAHVRMSADLSPVAENPGASPPGDGVMAASTTGAPGPVEIDSRPFPDIGGRSSYGAFRRG

SEQ ID NO: 31825 - DNA, 3876 bp, Muscodor strobelii
  misc_feature: SGI EST ID NO. CUFF.75272.0
  misc_feature: Variant of the nucleotide sequence at SEQ ID NO 31823
ctaacccctaccgttacgatgaccggcactatgtaacccacgtattagagccgagttacagatcccgatcttgaattcaactcctctccattaggaatgtgatgtccagcaagaattgaactgtagcaatggcgcagaaaggacgtcatcacacaggcactccatggcttcttgttctggagctatgggctcggcactggctcctcggcgcgtgctcaacccgcaatgagcatctgttctcatcgcaaagcagcttgtcgctctttacaaccttgaaggccattctttctgcgctttcagtcctgcgccgggcgccttaagtttcgtcgcatcataggcgctcgagcgctgcgctctggtcttgaccttataggtgccgcgtcgttgcataccacgatagctaataacgtctcctgactgcgtcattcgaaagactagcggagtagatgaatttcaatcgagtgattcgtttttgtaccggcattcggaaccccttctgaaggtcttcagtccgctggatcctcctcgcgaagagactcaaacgacgatgagcgacgaagacattcttgtcagtagcggaacatgttattccgctgctggcaagaagcttgattcctccttcatcccgtgcggcaacgacgcctttggccatgtgacatgctgtggaaaaggggacaattgtctcgcggacaatgcttgttatggcgtccacggcgacggcgacccgtcgcaatatggacacatgctgacatatatggccggatgcactgatcctgaatacaaagactcctcttgcccggacaaacagggaatagacgataattcatggattgcccttacattatgcggcaacaccgacatatgggcagcttgttcacagcccggcaacccgtccacgctgcaaccaggcgccacatgcacatgcacagtcgcggcgagcgcgacaaccgccttcagcgatgcgtcgagtctcgacaacatcgcttccttgccccagaataccggcgacacgatatcgttttttcccggccacactcccactacacctccaggtggaccgaccgggggcggaacctcagggaccacgggcaccaccggatccatgccggggcctacaacgtttactacgacgggagcggacggggcaacagtcacggtgacgcagcaaggaccgacacagacggtggataacacgaagtccagcagcggcctagggcaaggggcagcaataggaattggagttggtgtgggcgtaggagcaattgtcatccttctagcacttggagcactcctctggcgccggcgaaagaggagacgtgagcaaccaagagatgacctaaaaggagcggccggaggaaaactgcagaagaaaggggctggagcggcacttgatgccgagaaggcgggtgatgcagcagatggcacaggcgtgtcaaaagcagacaagctaggaattacggagacggatggtcaagcagtttccgaagccgacagtaaaggggtatcgaaagcggacaaaacactcatggccgaagcgggcggggtacctattattgagacggatggccatgctgtgatacgtccgcatagtttaaggagcgaacttgaaggaagtcctgtcacacccacggtgcctgaccaccatttagacggcacacatgcagcgcacgtacgaatgagtgcagacttgagcccggtggcggagaaccctggcgccagtccgccaggtgatggtgtcatggctgcgtctacaacgggagcccccggacctgtagaaattgatagtcggcccttccctgacattggagggaggtcaagctacggagcattcaggcgcggctaggagactacttccgaatactgattccgagcattgaacggccaaagacgtgcacaggcaatgtctttacgttagcgtaataacccgccccttccatacagcatgtataattcgggcgcgagaccgggcctgcacgtattgtgtctcagctcatgcagagaaaggaatggagaacgactctatagtgacgatctatatcctagggatctgccagtacagcagcagatagacgtattagttaacgcggggcacatgacgaagacgccgaatcgcagccagaccagcaccggagtcgtaagtctggccaccaggcgcggctgcggctccgcgatgtcatggcggtacctaaggtagtatctacacactactccatacacgtacaatgcgcggcttggggtactgtgcttccttgacctcgccccgtggacaacgaggagcgaaacataaagactgaaagcgagataagaagcaacaagacgaggaagattaccaagaaagcacagaatcctcggaacatacaacgtcggggattgctagtcctcaccgatctaactactgattcggcaatatatctacataagtacaaggacagcttaaagtagtccttgatagtggctaagaagacatttgccatcaatgtttggctttatgctttgtcaaaatgcgataaaaccattgcttacgcattacgtgcttattaaaggctacaacatatgttaatttaggtatggagacaagtgtcattgatcagaagttctatgcgagcaagttcgagttgcttccaattcattgatcgtgtatatctgtgctatatcttgcctgtaaacagcaaaaatgttctagcagcagaacgttagggtctgcaataattaatttttactcaataggcctgcttggttctgtaaagcgacatcaagaactgaccatgaagctttgaagaagatatgtccttcagatatccctcaggaagccgaggcgattgagaatctgctgcttacatatgagatctattgctaaactggactactctctaaaacgaacccatttcttacctaacgctttcatgattcatgagttccggaagaccagtatatcgtctagagcttcaccgtccgctgctcacaactcgatgcgatagtagttgatatgcattccagctgagcgatgtcagatctttcaaagctgtcccttgccccgccgaatattttgcgcaaaaccagagcgttacatgattagtacggctgaatcgtcaattcgtggtgagcaagcatcgacgtcggtatccgagatccgtcgccggatcacgtaccttagcgtacgaacgcgcagatcgtattgatcggcatagatattgtgaaataacgttgacttcaaatcgcacgtgttctggctcgaagaattctcaagagagtcgcatagcagccgatggcgatatgtgatgccaattcggtctcttatgcatagaaagtatgttgcaattcagcttggttgtagatatcttcgcacatctttcgtgtttgttccggcaaaaacttagctactagcgtgtcatacaaaaattgtacaattttcatcacaaggaccaactatactatgtccaacgtagtagccattagatataacacagttgtcttaataatatgtatgtgatcagtcttagacttgttgagagacaagctaatgaccaaggcagcaaacctacccggcaaagcaacaatttcatgaaagggctgggactgttacctgccatggagtgcagaaatcattggataacccgagagatcacagcccctttttgactagggcattgaaaccagatatcgtcgcaagaatgtcaaaaattagggcaagcatggtgtttagattagcatatcatcttgatattactagattgaataataagagaagagggtgcaaaaagcaaaacatacaacactggggattcgctggtcgtcaccgacccaactactaatccagcggtatcaagcttatctagggcagagcggacgggatgccgagttttcttgatcctgtgg

SEQ ID NO: 31826 - DNA, 498 bp, Muscodor strobelii
  misc_feature: SGI cDNA ID NO. 570961
  misc_feature: Encodes the peptide sequence at SEQ ID NO 31827
atggctgcgatcgaaacagacgaggaaacccagagtacgttattggagacaaaagacatgagagagtcatgggacatgattccatacgtagcgaatgaagagtcgcaacaggtcagagaagaggcgcaacagagcgaagaagacatgcaactagatgaggatgaggaagacctgaatgctacctcatctcgacacacggtagaagacaccgggaatgtggtggttggaggtgatgctaccggtattacaactggagcagaggctgacggaagcacaaatacgcgcgcgacagcaataaatactggagatatagacgttgacaagaatgcggagaatgtcgtaacaggggcgcaggttatggacggcgctacagcaagtgtgaagaaaagtgggaacgtcagagttcgcggctctgcgaaatgtgtgagcactggagtccgagttcgcgctttcgacgtaggggtgagcagtggcagcggaccaggtcgccaacagtag

SEQ ID NO: 31827 - protein, 165 aa, Muscodor strobelii
  misc_feature: SGI Peptide ID NO. 570961
MAAIETDEETQSTLLETKDMRESWDMIPYVANEESQQVREEAQQSEEDMQLDEDEEDLNATSSRHTVEDTGNVVVGGDATGITTGAEADGSTNTRATAINTGDIDVDKNAENVVTGAQVMDGATASVKKSGNVRVRGSAKCVSTGVRVRAFDVGVSSGSGPGRQQ

SEQ ID NO: 31828 - DNA, 633 bp, Muscodor strobelii
  misc_feature: SGI cDNA ID NO. 570962
  misc_feature: Encodes the peptide sequence at SEQ ID NO 31829
atgatgatcacgttctctccccgacaactctgcacagaggcttgccaaaatggggagcttgagatattggtggatggcatacctcaagcttacaaagactcgttgtccttcgctcgcgccttatcagaacgagctaatttgaatcctgctgatgagatctccggcttatacgaggactcggctgatgctcgagagctatatcaactcgatacacctcgcccaccggaatggcgcaacattttcttgctgtacaaaaaggaatgcgacgccacgccatctttcgttactctcaaagcggcggcactttcagggaagattctcacgagacaaatctccgtgacctccttgacattatcactggggaccgttcatcggctagcagcgaaggctgtaatgaacgatctagagtccggccgatacatggcgtacaaaaacatcaacagttgtgacttgaacacgcgccgaagagaaattgcgcatagtccgtggactagcttcgtggtaatcaatcacgaagcctctacgaatgacaccgcagtgcgccgagatcacgatgagaaaatcaaagtcgataagagagaagccaagaacggacaacaattggcgaaaaagcagaagcagaaaacatggtga

SEQ ID NO: 31829 - protein, 210 aa, Muscodor strobelii
  misc_feature: SGI Peptide ID NO. 570962
MMITFSPRQLCTEACQNGELEILVDGIPQAYKDSLSFARALSERANLNPADEISGLYEDSADARELYQLDTPRPPEWRNIFLLYKKECDATPSFVTLKAAALSGKILTRQISVTSLTLSLGTVHRLAAKAVMNDLESGRYMAYKNINSCDLNTRRREIAHSPWTSFVVINHEASTNDTAVRRDHDEKIKVDKREAKNGQQLAKKQKQKTW

SEQ ID NO: 31830 - DNA, 1905 bp, Muscodor strobelii
  misc_feature: SGI cDNA ID NO. 570963
  misc_feature: Encodes the peptide sequence at SEQ ID NO 31831
atgcctgtgcccttcatcggccgattgaacccaatcgagtacatagcattgatcggctcgttcttgttcatcatcttcgaatccatcatccgaatcctcacgctcgcattaccgacatcacttatcggggtcttttacgacgcatcgagacgcatcttcaatcgcacaacttcgcccgcgcagaagaaagctgaagagcgaaagaaatctatctcaacttcgctacgaaatgccaccgacttcgtagacatctgcgccacgtttggctataccgccgaagaacatgtagtgccgacaaaagacggatatttgctcgggatccatcgtctggcctggaagaaaggtgaagaggatatcaaagtgaatgacggcccggctagcgtcaaaaagcgcgtcgtctacctccatcatggactcttgatgaacagtgaggtttgggtttgtctgaccgacgctaaacgatgtctaccgttcgtcttagtagaggcaggtttcgatgtttggctgggcaataaccgcggaaacaaatattctaaaaagtcaatcaactgctcgcccaattcaacccaattctggaatttctcaatcgacgagttcgcctttcacgacatccctgattctatacagtatatcatagacaccacgaggcagccatcactctcatacatcggtttctcgcagggtaccgcgcaagcgtttgctagtctctcaatacaccctaaactcaacaagcaggtcaatgtattcattgcactcgccccagcaatgtcagtccccgggttgaagaacgggattgtcgacgcgcttatcaaggcttcgccatctgtcctcttcctcctttttggtcgacggtccatcttaagttctgctacaatgtggcagaatatactctatccgccgatcttcgtcaaagtcatcgatatgggtaacaattttctctttggctggaagtcaaagaacatgtctctcagccaaaagctcgccgcgtacccacatttgtactcattcacaagcaccaagtctgtggtccactggttccagatcattcgtaacaagtccttccagatgtttgatgacgatgtgcagtcacgtttcggtatgaactccccgaacaaatacacgaaagtggccaagtacccgactcgcaacatcaaaacgcccattgtgattgtctacggcggaagcgactctttggtcaatattaaggttatgctgaaggagcttcccaatagaaccgtggctacggagatcccccattacgaacatctcgacttcttatgggctcgcgatgcggacacgcaggtcttccgccatgtgtttgatgcgctggagagtttcacgactgccgaaaacccattagaagagtatgagaattacgcgcgggcaagacacgtcagcttgtccgcgtcgacgactttcaaacacacccggataaacagtgacgcccaagagtcagatagcgcatcaatcctgtctaattcacaggagagcgctcctcgccacagagctagagaaggcgcctttagacctcaatctcgttccacagatctctcacctcagcaccctcacccaacgactccctacacggagaagaaactgcagagtctccgtattgtgacgcccgaaaataggagccccggatcactagacgggacaacagaacctcagaccccgtcgcagagtgatagtccagcgagaactacgaccccatccccggcggttctcaatatcgggaagtcagtaaagcgacgcggtagtgccgctagtaatcttagcattgactccgcgaagggtgggaaaagcgggatcaagataaaagcttcgaaacctcttatcggtgatgttgtgaccacgggtagtagtgacgagggagctcagcaccgaaaatcgagcgaggcgctgtag

SEQ ID NO: 31831 - protein, 634 aa, Muscodor strobelii
  misc_feature: SGI Peptide ID NO. 570963
  misc_feature (165)..(438): Pfam Id: PF00561 Pfam Desc: alpha/beta hydrolase fold
  misc_feature (73)..(150): Pfam Id: PF04083 Pfam Desc: ab-hydrolase associated lipase region
  misc_feature (165)..(241): Pfam Id: PF00561 Pfam Desc: alpha/beta hydrolase fold
  misc_feature (382)..(438): Pfam Id: PF00561 Pfam Desc: alpha/beta hydrolase fold
  misc_feature (1)..(494): NCBI GI: 164429734 Blast Desc: NCU02148 [Neurospora crassa OR74A] gi|157073597|gb|EAA35271.2| NCU02148 [Neurospora crassa OR74A]
  misc_feature (1)..(466): NCBI GI: 116193379 Blast Desc: CHGG_06407 [Chaetomium globosum CBS 148.51] gi|88182320|gb|EAQ89788.1| CHGG_06407 [Chaetomium globosum CBS 148.51]
  misc_feature (1)..(613): NCBI GI: 110628931 Blast Desc: triacylglycerol lipase [Magnaporthe grisea]
  misc_feature (4)..(626): NCBI GI: 171684999 Blast Desc: protein product [Podospora anserina] gi|170942460|emb|CAP68112.1| protein product [Podospora anserina]
  misc_feature (1)..(631): NCBI GI: 256733600 Blast Desc: [Nectria haematococca mpVI 77-13-4]
  misc_feature (1)..(630): NCBI GI: 46128387 Blast Desc: FG08571.1 [Gibberella zeae PH-1]
  misc_feature (1)..(613): NCBI GI: 149209723 Blast Desc: MGCH7_ch7g344 [Magnaporthe grisea 70-15] gi|86196299|gb|EAQ70937.1| MGCH7_ch7g344 [Magnaporthe grisea 70-15]
  misc_feature (1)..(467): NCBI GI: 154303164 Blast Desc: BC1G_09602 [Botryotinia fuckeliana B05.10] gi|150855065|gb|EDN30257.1| BC1G_09602 [Botryotinia fuckeliana B05.10]
  misc_feature (68)..(613): NCBI GI: 145610252 Blast Desc: MGG_02622 [Magnaporthe grisea 70-15] gi|145017595|gb|EDK01958.1| MGG_02622 [Magnaporthe grisea 70-15]
  misc_feature (3)..(601): NCBI GI: 169600737 Blast Desc: SNOG_03213 [Phaeosphaeria nodorum SN15] gi|111068824|gb|EAT89944.1| SNOG_03213 [Phaeosphaeria nodorum SN15]
  misc_feature (1)..(515): SWISSPROT Homolog: EC 3.1.1.13 Sterol esterase
MPVPFIGRLNPIEYIALIGSFLFIIFESIIRILTLALPTSLIGVFYDASRRIFNRTTSPAQKKAEERKKSISTSLRNATDFVDICATFGYTAEEHVVPTKDGYLLGIHRLAWKKGEEDIKVNDGPASVKKRVVYLHHGLLMNSEVWVCLTDAKRCLPFVLVEAGFDVWLGNNRGNKYSKKSINCSPNSTQFWNFSIDEFAFHDIPDSIQYIIDTTRQPSLSYIGFSQGTAQAFASLSIHPKLNKQVNVFIALAPAMSVPGLKNGIVDALIKASPSVLFLLFGRRSILSSATMWQNILYPPIFVKVIDMGNNFLFGWKSKNMSLSQKLAAYPHLYSFTSTKSVVHWFQIIRNKSFQMFDDDVQSRFGMNSPNKYTKVAKYPTRNIKTPIVIVYGGSDSLVNIKVMLKELPNRTVATEIPHYEHLDFLWARDADTQVFRHVFDALESFTTAENPLEEYENYARARHVSLSASTTFKHTRINSDAQESDSASILSNSQESAPRHRAREGAFRPQSRSTDLSPQHPHPTTPYTEKKLQSLRIVTPENRSPGSLDGTTEPQTPSQSDSPARTTTPSPAVLNIGKSVKRRGSAASNLSIDSAKGGKSGIKIKASKPLIGDVVTTGSSDEGAQHRKSSEAL

SEQ ID NO: 31832 - DNA, 3308 bp, Muscodor strobelii
  misc_feature: SGI EST ID NO. CUFF.75319.0
  misc_feature: Variant of the nucleotide sequence at SEQ ID NO 31830
cttaatcttgcatctcgacaaatactcgcagctagcaccaagccacgttgtcgtgattgagcctcatcggtcgtggcaggccgtgggcggtggtcttcgtatgggattctaccgtatggcatctagtcatcgccgaattgccgttagagcctgacacgcctgactgtgctgggcgcgccagggggtccagcgtcgttccttgcatgtgacatcactgacgtgtattagaagctgtgccgcgccgccgatcgcgacagcccctctgcttgactcgagattctattctcaagtcggccgaggcacatcctcacatccttctttttgctcctaaactgaaaatgtctttgaggtagatcgcggtaacatagctgcatggttctgtaatcctctcctgtgcgaccgtcggctaatcgacgaaactttcccaacatgcctgtgcccttcatcggccgattgaacccaatcgagtacatagcattgatcggctcgttcttgttcatcatcttcgaatccatcatccgaatcctcacgctcgcattaccgacatcacttatcggggtcttttacgacgcatcgagacgcatcttcaatcgcacaacttcgcccgcgcagaagaaagctgaagagcgaaagaaatctatctcaacttcgctacgaaatgccaccgacttcgtagacatctgcgccacgtttggctataccgccgaagaacatgtagtgccgacaaaagacggatatttgctcgggatccatcgtctggcctggaagaaaggtgaagaggatatcaaagtgaatgacggcccggctagcgtcaaaaagcgcgtcgtctacctccatcatggactcttgatgaacagtgaggtttgggtttgtctgaccgacgctaaacgatgtctaccgttcgtcttagtagaggcaggtttcgatgtttggctgggcaataaccgcggaaacaaatattctaaaaagtcaatcaactgctcgcccaattcaacccaattctggaatttctcaatcgacgagttcgcctttcacgacatccctgattctatacagtatatcatagacaccacgaggcagccatcactctcatacatcggtttctcgcagggtaccgcgcaagcgtttgctagtctctcaatacaccctaaactcaacaagcaggtcaatgtattcattgcactcgccccagcaatgtcagtccccgggttgaagaacgggattgtcgacgcgcttatcaaggcttcgccatctgtcctcttcctcctttttggtcgacggtccatcttaagttctgctacaatgtggcagaatatactctatccgccgatcttcgtcaaagtcatcgatatgggtaacaattttctctttggctggaagtcaaagaacatgtctctcagccaaaagctcgccgcgtacccacatttgtactcattcacaagcaccaagtctgtggtccactggttccagatcattcgtaacaagtccttccagatgtttgatgacgatgtgcagtcacgtttcggtatgaactccccgaacaaatacacgaaagtggccaagtacccgactcgcaacatcaaaacgcccattgtgattgtctacggcggaagcgactctttggtcaatattaaggttatgctgaaggagcttcccaatagaaccgtggctacggagatcccccattacgaacatctcgacttcttatgggctcgcgatgcggacacgcaggtcttccgccatgtgtttgatgcgctggagagtttcacgactgccgaaaacccattagaagagtatgagaattacgcgcgggcaagacacgtcagcttgtccgcgtcgacgactttcaaacacacccggataaacagtgacgcccaagagtcagatagcgcatcaatcctgtctaattcacaggagagcgctcctcgccacagagctagagaaggcgcctttagacctcaatctcgttccacagatctctcacctcagcaccctcacccaacgactccctacacggagaagaaactgcagagtctccgtattgtgacgcccgaaaataggagccccggatcactagacgggacaacagaacctcagaccccgtcgcagagtgatagtccagcgagaactacgaccccatccccggcggttctcaatatcgggaagtcagtaaagcgacgcggtagtgccgctagtaatcttagcattgactccgcgaagggtgggaaaagcgggatcaagataaaagcttcgaaacctcttatcggtgatgttgtgaccacgggtagtagtgacgagggagctcagcaccgaaaatcgagcgaggcgctgtagagttggggagaaatccgtgaagtaatgtgtttcatccgtcgcgttccgttggtacttcgttgacaccgcattggcattgcatttcttagactcatacatggagcgggagttggttggcgttgttgtgacagagacatgcatctaggagatgcgcatgactattgttttagagggccatgacccgctcgattacccaattgaaatattgtttactgctatatttcctttatagactgaaactgaagtcactcagcgcggattgaggtatgccctaagagtagtgcgtccataatgcctactttgtcttgagtattcaggaatgcagcgaagtatctgcgttaaaggccgttggtgcttggtttaggtacactaaacatgcaggcaaagcttcatccctcaaacatactcaagctcaactacaatattgcaacttactccagtctgtcttcttactcgtgaataacttcacttgctaggccacaaatggaagcctcctgtgctaatagttgaccaatagctaataacaaccgtccggctcgaccgcgtgcgatagatcgaacgaagacccagctactcccggcctcggcagcgatatctatgcgtgcaaacaaaatcatgcattagcttgtgtgctcagccgcacatgcgggctcgaaactagctatctatgtgtatccccatcccacactcgcgccatgtaccgctgcgacaaggatctcaggagatttctccaggacagcgcgtagagctgcaccaacgcttgttttctcatcggttgatgcgccgtcttgagatggggggtgagcgcctggccgacacagaaatggtgcccagcgtctgcgacgaggacaacgactccgacgctataggcgaatgatagagattcgttgagggctaggcatccaagtatggcaatagtctgaaggcattgccgagtttgcgttggctgtgaggtgcgaaaccgctgagccggg

SEQ ID NO: 31833 - DNA, 2796 bp, Muscodor strobelii
  misc_feature: SGI cDNA ID NO. 570964
  misc_feature: Reduced expression when VOC is produced
  misc_feature: Encodes the peptide sequence at SEQ ID NO 31834
atggcatacaacggcggatacggagaccgaccgtacgccgggccggctgcgcgagctccgcgaggaggaggtggtggcggcggcggaggtccaagaggcgcataccctcccgctccccagagacaatatgatcagtaccaagacggctacggaaatggaggttacgatcagtacgacgatggctattacgacgactacaatgctcctgctcaagacatgaactatggcagaggcgccccgccccccaatcaaggctatcccccacaagacatgtatcgaggaccacccggaggacctcctggtccaggacgagggcgcggcactccacctagaggaagaggaggacccatgcgcggtggcccggctccgagaggaggttacccgcctcagggtgctggcagaggatatccaccccccggacagggcagacctgagccgaatggcaatcgaggaccgccaatgatgagtccacaggagcgagattttggaagcccattccccgtatttcccggacagagtcgacagacagacctagatcatgagcagcagattctcgacaagatgggtggtatggatatcaacggtcgacctcccccgaatagaggtccaagacccggagctagacagcaggcatcaatggacgactatgcgcgcccatcaatggatagccagcgcagtggcggaagaggaccgccgccacaaggctacggtgatccgagacgaggacctccaccccagcgccagatttatgatgactattacgatgacggctatggccagggccctcctatgtcgcctggacgaaatgaattcggccctcccccccgaagcatgacaatgcctgcaaatgctggtcttcctccccgcaatggtagtcttccgccgcgcacagatagcgctccttatggtgccccccaaatgccgcctcaaagaccttccacttctcacagcgctcgaccccctcctcacagaacatatcctagtgacgagcctcctccacctgtacctatgaattcctctttgcagcctccaggatgggaggatgagcctagtcgaacatctatcggagatgtttacgactcttactatgaccagccgtacgatcaacatcagcctcctcagcagccaatgcagaattacgatggcggatacgctccccgtaatcagtacgaccagcaaccggtgcaagcgccacagcccggtcgtccgcagcctggacctgagcgctttgctgaactatccaggaccaaatcgcagccaaatctacgagagcctcagtctgccgtatttgagatggcaagtgatcatccacctatgcctactggcgggtttcaggcatataagcctggtttacccagcactccatcgagtaccaggcaaggttcccaaggaagtcctcctgcaaccggacctggctccggccacccagcccctgttcgtcccggtcttatgcccaattccctcgtcaatatgaacgataagcccgctccggtccgtcactattctggaaactccgccagttctgcgaataccccgccggcacccgttcgaaactacaatactccgccggctgccgctgcgggggctcaaggacgcccatccccaggcgcagcgcctctacctgtccaagctcctcctttggctccggagcaacttcctattacccctgatgaacttgagcgccttcgttctatcatcaaagtcgaccccaatgatcaggtttctgctctcgacttggctaagaagctgctcgaagccgcagacgttcttatacaccagattcccgatcccaaagggcgagcaaagcagcgtgaacgatatctaaatgactcgcacaagatcctgaagaaattggttagtgctaacaatgctgatgcaatgtttttcatggcagacggtgtgggacgtggagcatttggtcacgaaccagatactaaggaagctttcactctataccagtctgccgctaagttgcaacacgctgctgccgcttaccgcacggccgtgtgctgcgaggttggaaatgatgacggaggcggcactcgaaaggatcctctgaaagcgattcagtggtacaagcgagccgctatgctaggagatccgccagccatgtacaaggtcggcatgatcctgctcaagggtctgctgggccagccacgtaatcccagagaagccgtaggctggttgaaacgcgctgctgatgtagctgacgccgataatccgcacgcccttcacgagcttggtttgctttacgagtccgcccaacccaacgacgtcatcattcgagacgaacaatatgcgctgcagctgttcgagaaagctgctggacttggctacaagttcagtcagttccgcttgggctgtgcgtacgagtacggtctgatgggttgcccgcgcgacccacggctttccattttgtggtatagtcgtgcggctacgcagcaggagcaccagtccgagctagctttgtccggttggtatcttactggggccgacggtatactacagcagagtgacacggaggcgtacttgtgggcgcggaaagccgccaatgccggtctcgctaaggccgagtacggcatgggttactataccgagagtggtattggcgtcccggccaacatggaggatgccaagcgttggtactggcgggctgctgcccaagatttccccaaggcgcgtgagcgtctggaagatctcaagaggtcgggtgcaaaaggcccacctcggcaacgcgagcgtatctcgcggagcaagatggggcgccagcaggaaggggaatgctccgtaatgtag

SEQ ID NO: 31834 - protein, 931 aa, Muscodor strobelii
  misc_feature: SGI Peptide ID NO. 570964
  misc_feature (780)..(816): Pfam Id: PF08238 Pfam Desc: Sel1 repeat
  misc_feature (855)..(890): Pfam Id: PF08238 Pfam Desc: Sel1 repeat
  misc_feature (661)..(700): Pfam Id: PF08238 Pfam Desc: Sel1 repeat
  misc_feature (701)..(737): Pfam Id: PF08238 Pfam Desc: Sel1 repeat
  misc_feature (741)..(779): Pfam Id: PF08238 Pfam Desc: Sel1 repeat
  misc_feature (624)..(660): Pfam Id: PF08238 Pfam Desc: Sel1 repeat
  misc_feature (1)..(931): NCBI GI: 256733578 Blast Desc: NECHADRAFT_35947 [Nectria haematococca mpVI 77-13-4]
  misc_feature (40)..(931): NCBI GI: 46128591 Blast Desc: FG08673.1 [Gibberella zeae PH-1]
  misc_feature (145)..(931): NCBI GI: 116193133 Blast Desc: CHGG_06284 [Chaetomium globosum CBS 148.51] gi|88182197|gb|EAQ89665.1| CHGG_06284 [Chaetomium globosum CBS 148.51]
  misc_feature (148)..(931): NCBI GI: 171683871 Blast Desc: protein product [Podospora anserina] gi|170941896|emb|CAP67548.1| protein product [Podospora anserina]
  misc_feature (148)..(931): NCBI GI: 149209837 Blast Desc: MGCH7_ch7g400 [Magnaporthe grisea 70-15] gi|86196355|gb|EAQ70993.1| MGCH7_ch7g400 [Magnaporthe grisea 70-15]
  misc_feature (148)..(931): NCBI GI: 145610173 Blast Desc: MGG_02667 [Magnaporthe grisea 70-15] gi|145017538|gb|EDK01901.1| MGG_02667 [Magnaporthe grisea 70-15]
  misc_feature (232)..(931): NCBI GI: 85116125 Blast Desc: NCU02592 [Neurospora crassa OR74A] gi|28926795|gb|EAA35759.1| conserved [Neurospora crassa OR74A]
  misc_feature (120)..(890): NCBI GI: 261353521 Blast Desc: SKT5 [Verticillium albo-atrum VaMs.102]
  misc_feature (276)..(931): NCBI GI: 255950848 Blast Desc: Pc22g22970 [Penicillium chrysogenum Wisconsin 54-1255] gi|211593208|emb|CAP99585.1| Pc22g22970 [Penicillium chrysogenum Wisconsin 54-1255]
  misc_feature (40)..(931): NCBI GI: 115386600 Blast Desc: ATEG_07155 [Aspergillus terreus NIH2624] gi|114190839|gb|EAU32539.1| ATEG_07155 [Aspergillus terreus NIH2624]
  misc_feature: Useful for introducing or modulating the production of volatile compounds
MAYNGGYGDRPYAGPAARAPRGGGGGGGGGPRGAYPPAPQRQYDQYQDGYGNGGYDQYDDGYYDDYNAPAQDMNYGRGAPPPNQGYPPQDMYRGPPGGPPGPGRGRGTPPRGRGGPMRGGPAPRGGYPPQGAGRGYPPPGQGRPEPNGNRGPPMMSPQERDFGSPFPVFPGQSRQTDLDHEQQILDKMGGMDINGRPPPNRGPRPGARQQASMDDYARPSMDSQRSGGRGPPPQGYGDPRRGPPPQRQIYDDYYDDGYGQGPPMSPGRNEFGPPPRSMTMPANAGLPPRNGSLPPRTDSAPYGAPQMPPQRPSTSHSARPPPHRTYPSDEPPPPVPMNSSLQPPGWEDEPSRTSIGDVYDSYYDQPYDQHQPPQQPMQNYDGGYAPRNQYDQQPVQAPQPGRPQPGPERFAELSRTKSQPNLREPQSAVFEMASDHPPMPTGGFQAYKPGLPSTPSSTRQGSQGSPPATGPGSGHPAPVRPGLMPNSLVNMNDKPAPVRHYSGNSASSANTPPAPVRNYNTPPAAAAGAQGRPSPGAAPLPVQAPPLAPEQLPITPDELERLRSIIKVDPNDQVSALDLAKKLLEAADVLIHQIPDPKGRAKQRERYLNDSHKILKKLVSANNADAMFFMADGVGRGAFGHEPDTKEAFTLYQSAAKLQHAAAAYRTAVCCEVGNDDGGGTRKDPLKAIQWYKRAAMLGDPPAMYKVGMILLKGLLGQPRNPREAVGWLKRAADVADADNPHALHELGLLYESAQPNDVIIRDEQYALQLFEKAAGLGYKFSQFRLGCAYEYGLMGCPRDPRLSILWYSRAATQQEHQSELALSGWYLTGADGILQQSDTEAYLWARKAANAGLAKAEYGMGYYTESGIGVPANMEDAKRWYWRAAAQDFPKARERLEDLKRSGAKGPPRQRERISRSKMGRQQEGECSVM

SEQ ID NO: 31835 - DNA, 3896 bp, Muscodor strobelii
  misc_feature: SGI EST ID NO. CUFF.75332.0
  misc_feature: Variant of the nucleotide sequence at SEQ ID NO 31833
atttggaacgtgggcggcccatccttctcctacctcaacatcttcgttcctttattcccaacttccacactctggaccgccgagcacaagcactgccttacttgtactcttctctttcatcgtcagtcctttcattgcagtgcgcaggccacggcatctttagctgcgtttcccgttcttgacgctcccttgcgaccgttatagtggcgttggtgctatttctagacacggcgcactacggtacactacccgctggccgcgacttgcacttccagtcgcatcaccaacccagagacactccgcttctgctctgtgaccttgaggttgtccactttgcgtgtatactacggctttccttttctgacaacaagactttgcgacattgcgaacctcacgacagctgatcatcccagcatttcccgaatacattccactcacactctcgcataataatcatacaagcatgcaatcagcactttcgcatagactgtgaaactacacggcctccaagataccctctatactaaatctctgtatcaaaatcgacttttcctaatagtatcacctccactcccaaccacgacattgcccacgcccaagcacgagcttgccgagcttaacgttcgatacgtcgctcgtgtcgacttacaatccggcttgcctctctcacgatggcatacaacggcggatacggagaccgaccgtacgccgggccggctgcgcgagctccgcgaggaggaggtggtggcggcggcggaggtccaagaggcgcataccctcccgctccccagagacaatatgatcagtaccaagacggctacggaaatggaggttacgatcagtacgacgatggctattacgacgactacaatgctcctgctcaagacatgaactatggcagaggcgccccgccccccaatcaaggctatcccccacaagacatgtatcgaggaccacccggaggacctcctggtccaggacgagggcgcggcactccacctagaggaagaggaggacccatgcgcggtggcccggctccgagaggaggttacccgcctcagggtgctggcagaggatatccaccccccggacagggcagacctgagccgaatggcaatcgaggaccgccaatgatgagtccacaggagcgagattttggaagcccattccccgtatttcccggacagagtcgacagacagacctagatcatgagcagcagattctcgacaagatgggtggtatggatatcaacggtcgacctcccccgaatagaggtccaagacccggagctagacagcaggcatcaatggacgactatgcgcgcccatcaatggatagccagcgcagtggcggaagaggaccgccgccacaaggctacggtgatccgagacgaggacctccaccccagcgccagatttatgatgactattacgatgacggctatggccagggccctcctatgtcgcctggacgaaatgaattcggccctcccccccgaagcatgacaatgcctgcaaatgctggtcttcctccccgcaatggtagtcttccgccgcgcacagatagcgctccttatggtgccccccaaatgccgcctcaaagaccttccacttctcacagcgctcgaccccctcctcacagaacatatcctagtgacgagcctcctccacctgtacctatgaattcctctttgcagcctccaggatgggaggatgagcctagtcgaacatctatcggagatgtttacgactcttactatgaccagccgtacgatcaacatcagcctcctcagcagccaatgcagaattacgatggcggatacgctccccgtaatcagtacgaccagcaaccggtgcaagcgccacagcccggtcgtccgcagcctggacctgagcgctttgctgaactatccaggaccaaatcgcagccaaatctacgagagcctcagtctgccgtatttgagatggcaagtgatcatccacctatgcctactggcgggtttcaggcatataagcctggtttacccagcactccatcgagtaccaggcaaggttcccaaggaagtcctcctgcaaccggacctggctccggccacccagcccctgttcgtcccggtcttatgcccaattccctcgtcaatatgaacgataagcccgctccggtccgtcactattctggaaactccgccagttctgcgaataccccgccggcacccgttcgaaactacaatactccgccggctgccgctgcgggggctcaaggacgcccatccccaggcgcagcgcctctacctgtccaagctcctcctttggctccggagcaacttcctattacccctgatgaacttgagcgccttcgttctatcatcaaagtcgaccccaatgatcaggtttctgctctcgacttggctaagaagctgctcgaagccgcagacgttcttatacaccagattcccgatcccaaagggcgagcaaagcagcgtgaacgatatctaaatgactcgcacaagatcctgaagaaattggttagtgctaacaatgctgatgcaatgtttttcatggcagacggtgtgggacgtggagcatttggtcacgaaccagatactaaggaagctttcactctataccagtctgccgctaagttgcaacacgctgctgccgcttaccgcacggccgtgtgctgcgaggttggaaatgatgacggaggcggcactcgaaaggatcctctgaaagcgattcagtggtacaagcgagccgctatgctaggagatccgccagccatgtacaaggtcggcatgatcctgctcaagggtctgctgggccagccacgtaatcccagagaagccgtaggctggttgaaacgcgctgctgatgtagctgacgccgataatccgcacgcccttcacgagcttggtttgctttacgagtccgcccaacccaacgacgtcatcattcgagacgaacaatatgcgctgcagctgttcgagaaagctgctggacttggctacaagttcagtcagttccgcttgggctgtgcgtacgagtacggtctgatgggttgcccgcgcgacccacggctttccattttgtggtatagtcgtgcggctacgcagcaggagcaccagtccgagctagctttgtccggttggtatcttactggggccgacggtatactacagcagagtgacacggaggcgtacttgtgggcgcggaaagccgccaatgccggtctcgctaaggccgagtacggcatgggttactataccgagagtggtattggcgtcccggccaacatggaggatgccaagcgttggtactggcgggctgctgcccaagatttccccaaggcgcgtgagcgtctggaagatctcaagaggtcgggtgcaaaaggcccacctcggcaacgcgagcgtatctcgcggagcaagatggggcgccagcaggaaggggaatgctccgtaatgtagtactgttaccggcagcatcccctttcctggtgggccccggagatggagcgatggaaggagcttccaacacggaagaaaagcctcggcaggaggctcaaagaggcaatttgggagccggccccagagtcggaagaacatcctccgatcattcgcttttattagtgtcagggggcgggatttctggctctgttttttgctctggcagtggtaatgattatgagacacgcatcgtgtatataatgcatagggcatagggtataggcaatggaataaaccagcgatctgatttttcataagactttgtcattgacagtgatgaaagcatatagatgccctggtgatgtcattttcggatacatgaacgaagagcttgacggatagatttacaaggaaactgatgaatcaactttggaggtaaacagatgcctc

SEQ ID NO: 31836 - DNA, 435 bp, Muscodor strobelii
  misc_feature: SGI cDNA ID NO. 570965
  misc_feature: Encodes the peptide sequence at SEQ ID NO 31837
atggcgactaaagcagcagcatccaaggcagggaggtacaagaccttagccaaaatgttcggcgcaggcggcgcggtatgcatcggtggaccagcattcgtgatgtggattcaaccaaccgacgaagagctgttcgagagatacagcccagatctgaagaagaagagccttgagggccgatacgagagacaaaaggactttgacgattttgtcaatcggctgaaagattactccaagtccgacaagccgatatggacagtacaagaagaagcgatgcgcaaacaaaagcaagagatgttacgacaagattacctgaacgcgcaagatgcgaaagctaggcaagaagccatgaggaaagaagcaggtcttatgaagggcggcggcgaactcaaagctactgggaaatcagatttgaccgataatccggtgctttga

SEQ ID NO: 31837 - protein, 144 aa, Muscodor strobelii
  misc_feature: SGI Peptide ID NO. 570965
  misc_feature (9)..(115): Pfam Id: PF07960 Pfam Desc: CBP4
  misc_feature (17)..(87): Pfam Id: PF07960 Pfam Desc: CBP4
  misc_feature (6)..(123): NCBI GI: 85111977 Blast Desc: NCU03147 [Neurospora crassa OR74A] gi|74618023|sp|Q7SDU5.1|CBP4_NEUCR RecName: Full=Assembly factor cbp-4; AltName: Full=Cytochrome b mRNA-processing protein 4 to
  misc_feature (18)..(123): NCBI GI: 187470870 Blast Desc: NCU03147 [Neurospora crassa OR74A] gi|74618023|sp|Q7SDU5.1|CBP4_NEUCR RecName: Full=Assembly factor cbp-4; AltName: Full=Cytochrome b mRNA-processing protein 4 to
  misc_feature (19)..(123): NCBI GI: 116193135 Blast Desc: CHGG_06285 [Chaetomium globosum CBS 148.51] gi|88182198|gb|EAQ89666.1| CHGG_06285 [Chaetomium globosum CBS 148.51]
  misc_feature (17)..(123): NCBI GI: 171683873 Blast Desc: protein product [Podospora anserina] gi|170941897|emb|CAP67549.1| protein product [Podospora anserina]
  misc_feature (1)..(123): NCBI GI: 256734084 Blast Desc: [Nectria haematococca mpVI 77-13-4]
  misc_feature (7)..(123): NCBI GI: 39970495 Blast Desc: MGG_02714 [Magnaporthe grisea 70-15] gi|187470662|sp|A4RC22.1|CBP4_MAGGR RecName: Full=Assembly factor CBP4; AltName: Full=Cytochrome b mRNA-processing protein 4 grisea
  misc_feature (14)..(114): NCBI GI: 189199418 Blast Desc: conserved [Pyrenophora tritici-repentis Pt-1C-BFP] gi|187983145|gb|EDU48633.1| conserved [Pyrenophora tritici-repentis Pt-1C-BFP]
  misc_feature (18)..(98): NCBI GI: 258569044 Blast Desc: conserved [Uncinocarpus reesii 1704] gi|237906712|gb|EEP81113.1| conserved [Uncinocarpus reesii 1704]
  misc_feature (9)..(130): NCBI GI: 154302306 Blast Desc: BC1G_09937 [Botryotinia fuckeliana B05.10] gi|187470664|sp|A6SAY2.1|CBP4_BOTFB RecName: Full=Assembly factor cbp4; AltName: Full=Cytochrome b mRNA-processing protein 4
  misc_feature (9)..(130): NCBI GI: 156056172 Blast Desc: SS1G_05438 [Sclerotinia sclerotiorum 1980] gi|187470667|sp|A7EJE5.1|CBP4_SCLS1 RecName: Full=Assembly factor cbp4; AltName: Full=Cytochrome b mRNA-processing protein 4 1980]
MATKAAASKAGRYKTLAKMFGAGGAVCIGGPAFVMWIQPTDEELFERYSPDLKKKSLEGRYERQKDFDDFVNRLKDYSKSDKPIWTVQEEAMRKQKQEMLRQDYLNAQDAKARQEAMRKEAGLMKGGGELKATGKSDLTDNPVL

SEQ ID NO: 31838 - DNA, 2494 bp, Muscodor strobelii
  misc_feature: SGI EST ID NO. CUFF.75365.0
  misc_feature: Variant of the nucleotide sequence at SEQ ID NO 31836
ccgggaccagaaggaggccggtagccggcggtaccaattaccagcactgaggatgcagctacgtgcgacatgattgagatgactgattgagaaagctctccttgtgtgtttcgaacacagaaacattccattgattggcggctgtttggtgcttccgagctccttggctacgagtgaaagaacgttttcggcacggcaagacatcatctgcattccaaacctgtaaatggcaattgagttcgaagacagtcggacagcgaacaatctgctcagtgtctgcatgatagtgacttgcagaaagacgagatcgtatgacggccgtaaagctgaagatgtgtagacgaggcgatcaacatcaaatactgcgagctgtttggttcggtcgccgatggaacgtgaaactcaacaataagtagacaccttattggaatgagtcgtatgccacaattcggatgccaacttcgagactgcccgttctggggtcctgtcaagactttgggatgaaacacacagggctgcctcacctcaaactagtttttggtgggggttcgtcgaatgaaagcaaggattatcttcagccactgcgacccatgctcccccagccacagtctagacccttaacgccatgagcttccgatagaggtttcgtcattgacgatggcatttgcagctccaatcgagctatcatcgacatttgcacgcgtcttgcggcgaaacaaagctttgacgtccaacactctatcgccttcgcaacacaattccatatcggcagcacgatggcgactaaagcagcagcatccaaggcagggaggtacaagaccttagccaaaatgttcggcgcaggcggcgcggtatgcatcggtggaccagcattcgtgatgtggattcaaccaaccgacgaagagctgttcgagagatacagcccagatctgaagaagaagagccttgagggccgatacgagagacaaaaggactttgacgattttgtcaatcggctgaaagattactccaagtccgacaagccgatatggacagtacaagaagaagcgatgcgcaaacaaaagcaagagatgttacgacaagattacctgaacgcgcaagatgcgaaagctaggcaagaagccatgaggaaagaagcaggtcttatgaagggcggcggcgaactcaaagctactgggaaatcagatttgaccgataatccggtgctttgaattctccctaaaaccaagcttcataacctcttgtaatcactgtatatcacgtcctgggcatttgtttggcgttggggtgtgggtgtagcaacaaaatcatctgagcagtctttgctcgctgctctgatttgcaaaatactatataagtatggtaaatatagactaggccatcaaataaggcataccctttcaaagcctagcctcttgtgagaggaaaatcacatactttttagccaaatttgttcctcatgtgtcatgatttcttgtcctgctccagactcaatatcttcctatctagtaacctgcaaatctgctcccatctcctcccaagaagctctctctgatcctgttcaccaacttccaaccccctaacctcacctaacattttctcagccttcaccctatactcacttagtatacctaaaagcaacacatcaacatctccttgactcttctccccatccagcgtcccatcaacaaacttccgccactccccaatcttgcaacacagtaatctgagcgcaacctgggttctatgacatacttgttccctgtccagaacataattccctaaaaatcctgcctcctctagtgtctctttcatcatctcatcaaacccactcaatatcacttcatccaacaccacctcatcccaaacattttcatccataataaagccatactcaacaagcaagaagtcgttagaatgccgtccataacaaatcttcacctcatcgcctttgttaaaagggacggtggcgcggaatgaatacccatcgcttccatacgcgacatgacaccctccttcatcggtgtgattgaacagatctgctaccggctgaagtgctagatggtcgtctgtcgtgaggttgggacgctttttgagcgcggcatccatgtagtagaatgtccgggagttgactaatagccaatgatatctaaaatcctttatcgcttcttctttccccttcttcgtgatatgttccggaaatgaagtagaaaatgcggcgaagtcccggtcgaactttgattgttgctttgccagcatttttgcactgcggaatggcaagagagcttggagcgctggatcccagagtaagggcatgccgctgaagtctgacagtgagggcagtattgcgttccagactgtgtactttgtgcctttgtccagaacaaaatctgctgcaagaataccttgaaccgagatcttagatggtagtttccggactcgggacttagggacagtgcttagggtccgcagacaggatgttgggacgtctaag

SEQ ID NO: 31839 - DNA, 1164 bp, Muscodor strobelii
  misc_feature: SGI cDNA ID NO. 570966
  misc_feature: Encodes the peptide sequence at SEQ ID NO 31840
atggacccgcttgaagagcttctggactgggcaacaagctacggcgtgaagctgaacggcatcacaccgaagcgcatccctggtcgcggcacaggcgtcatcgcgacgagagacattttggcggatgaaatagtcttagacgtcccaacatcctgtctgcggaccctaagcactgtccctaagtcccgagtccggaaactaccatctaagatctcggttcaaggtattcttgcagcagattttgttctggacaaaggcacaaagtacacagtctggaacgcaatactgccctcactgtcagacttcagcggcatgcccttactctgggatccagcgctccaagctctcttgccattccgcagtgcaaaaatgctggcaaagcaacaatcaaagttcgaccgggacttcgccgcattttctacttcatttccggaacatatcacgaagaaggggaaagaagaagcgataaaggattttagatatcattggctattagtcaactcccggacattctactacatggatgccgcgctcaaaaagcgtcccaacctcacgacagacgaccatctagcacttcagccggtagcagatctgttcaatcacaccgatgaaggagggtgtcatgtcgcgtatggaagcgatgggtattcattccgcgccaccgtcccttttaacaaaggcgatgaggtgaagatttgttatggacggcattctaacgacttcttgcttgttgagtatggctttattatggatgaaaatgtttgggatgaggtggtgttggatgaagtgatattgagtgggtttgatgagatgatgaaagagacactagaggaggcaggatttttagggaattatgttctggacagggaacaagtatgtcatagaacccaggttgcgctcagattactgtgttgcaagattggggagtggcggaagtttgttgatgggacgctggatggggagaagagtcaaggagatgttgatgtgttgcttttaggtatactaagtgagtatagggtgaaggctgagaaaatgttaggtgaggttagggggttggaagttggtgaacaggatcagagagagcttcttgggaggagatgggagcagatttgcaggttactagataggaagatattgagtctggagcaggacaagaaatcatga

SEQ ID NO: 31840 - protein, 387 aa, Muscodor strobelii
  misc_feature: SGI Peptide ID NO. 570966
  misc_feature (1)..(381): NCBI GI: 149210013 Blast Desc: MGCH7_ch7g488 [Magnaporthe grisea 70-15] gi|86196443|gb|EAQ71081.1| MGCH7_ch7g488 [Magnaporthe grisea 70-15]
  misc_feature (5)..(382): NCBI GI: 256734206 Blast Desc: NECHADRAFT_105995 [Nectria haematococca mpVI 77-13-4]
  misc_feature (2)..(383): NCBI GI: 261353492 Blast Desc: conserved [Verticillium albo-atrum VaMs.102]
  misc_feature (1)..(382): NCBI GI: 189190580 Blast Desc: conserved [Pyrenophora tritici-repentis Pt-1C-BFP] gi|187973235|gb|EDU40734.1| conserved [Pyrenophora tritici-repentis Pt-1C-BFP]
  misc_feature (10)..(381): NCBI GI: 145610066 Blast Desc: MGG_02740 [Magnaporthe grisea 70-15] gi|145017450|gb|EDK01813.1| MGG_02740 [Magnaporthe grisea 70-15]
  misc_feature (1)..(339): NCBI GI: 46129354 Blast Desc: FG08862.1 [Gibberella zeae PH-1]
  misc_feature (1)..(382): NCBI GI: 171684553 Blast Desc: protein product [Podospora anserina] gi|170942237|emb|CAP67889.1| protein product [Podospora anserina]
  misc_feature (5)..(382): NCBI GI: 116200882 Blast Desc: CHGG_10986 [Chaetomium globosum CBS 148.51] gi|88175700|gb|EAQ83168.1| CHGG_10986 [Chaetomium globosum CBS 148.51]
  misc_feature (1)..(382): NCBI GI: 85113406 Blast Desc: NCU02158 [Neurospora crassa OR74A] gi|28926302|gb|EAA35281.1| NCU02158 [Neurospora crassa OR74A]
  misc_feature (40)..(378): NCBI GI: 154290554 Blast Desc: BC1G_15621 [Botryotinia fuckeliana B05.10] gi|150847516|gb|EDN22709.1| BC1G_15621 [Botryotinia fuckeliana B05.10]
MDPLEELLDWATSYGVKLNGITPKRIPGRGTGVIATRDILADEIVLDVPTSCLRTLSTVPKSRVRKLPSKISVQGILAADFVLDKGTKYTVWNAILPSLSDFSGMPLLWDPALQALLPFRSAKMLAKQQSKFDRDFAAFSTSFPEHITKKGKEEAIKDFRYHWLLVNSRTFYYMDAALKKRPNLTTDDHLALQPVADLFNHTDEGGCHVAYGSDGYSFRATVPFNKGDEVKICYGRHSNDFLLVEYGFIMDENVWDEVVLDEVILSGFDEMMKETLEEAGFLGNYVLDREQVCHRTQVALRLLCCKIGEWRKFVDGTLDGEKSQGDVDVLLLGILSEYRVKAEKMLGEVRGLEVGEQDQRELLGRRWEQICRLLDRKILSLEQDKKS

SEQ ID NO: 31841 - DNA, 1986 bp, Muscodor strobelii
  misc_feature: SGI cDNA ID NO. 570967
  misc_feature: Encodes the peptide sequence at SEQ ID NO 31842
atgagtagtccgagtgagcacggagaggatgtggatgatcagcagacggacccgtatgttgatgctgaggacgacaccgaggatcctgactacgaagaggaggacgatgatgaggaagacgatatcgacgacataattcagaatctaatcgacgatcgaagtgaagatgacgatgacgaatatcacgatgctgaagatggaggagaacgatatatcgagttcgtaatggaagaagaggaagaagacgagcaaggtgaagaagctggcgagctagtagatgaagagcaagcggctgaaaatgctcgagcgcgtatcatcaacttcatacagaacttcggtcagcgcgtggtcttcgccaacagagcagaacgtctgaactttttacgacgactcaacatcgaggatgatgaactcgatgacacgcgagcggcttggagagcccgtatgagacagcgcagaaaccagggcagagatccattccccaaggtacccagtgagaaagggagggagctcatgaactctggtgtgtttggtgcgaacgatgttatctcaccgatcaaaaggagaaaagagctcgccaggcggatactggaccgcgagatgggcattgggaatgattcttatcggaagatgaaccaaggtgttatggcacaatctatgctaccacgcaccgaagcagacatgataatcaactacgaagacccagtctactccggccagttctcagcagacggaaatttcttctattcttgcgtgaaagacttcaaagtccggatgtacgacacatcaaacccgtacaactggcggcactacaaaactgtcactttccccttcggctcctggacactcaccgacgcgtcactctccccagacaacaaatggctagcctacacatccatccaatccaacgtttgcctcgcacccacagacccaaatgacaccggagatccgtacacgctctccctctccgagcacggagcccgtaaccaaggctggcgaggatccttcggaatctggtccatccgcttctcaggcgatggacgagagctcgtagcaggtacaaacgcgcactcaataatagtctatgacatcgaaactcgttccgtcctacacagtataaacggccacgaagacgacgtaaacgccgtctgtttcgccgataaggcatccccacacatcctgtactccggttccgacgacaaaacaatcaaagtctgggaccgccgctccatgggcgacaggcgcgaagcgggagcattcgtaggacatatccaaggcctgacctacatggactcgaaagacgacggccgatacctactctccaacgggaaagaccaaagcatgaaactctgggatctaaaaatgatgtacacaacgacgcaattccgtgaccgcaaaccccagcgccacacaccttccgacgggttcgactaccgatgggccacatttgcagacgaagactggtttctacacccagacgataactcactcgtgactttccgcggtcaccgcgtacagcgaacactcatccgctgtcatttctcgccgcctaatagtacgaattcacgatatgtctactccgggtctcacgatggaaaggtatatgtttggaatatggacgctacgatcgctgcgactattgatgtgaagaagacgacgagtgcacggaagagtctgccgaggaattatagacggtattttgatagacagggtctaccgtcttggggtacggtcgttagggatgcgagttggcatcctactgcgccttttatcgctgcatccgcgttcaacggctgggatcaacaactcggcaccgtctccctacatagttacaacgagacagaaaacgacgagggaacaccagtcatgggcacggcgtatgatgagaagttgaggatagttagtggtgagccgggagagggacaggatccagagtcagatagggattttgatgatgatgatccgatggggattttcggtgattaa

SEQ ID NO: 31842 - protein, 661 aa, Muscodor strobelii
  misc_feature: SGI Peptide ID NO. 570967
  misc_feature (367)..(407): Pfam Id: PF00400 Pfam Desc: WD domain, G-beta repeat
  misc_feature (494)..(538): Pfam Id: PF00400 Pfam Desc: WD domain, G-beta repeat
  misc_feature (105)..(632): NCBI GI: 46129374 Blast Desc: FG08872.1 [Gibberella zeae PH-1]
  misc_feature (72)..(632): NCBI GI: 85113374 Blast Desc: NCU02151 [Neurospora crassa OR74A] gi|28926295|gb|EAA35274.1| NCU02151 [Neurospora crassa OR74A]
  misc_feature (94)..(636): NCBI GI: 171684517 Blast Desc: protein product [Podospora anserina] gi|170942219|emb|CAP67871.1| protein product [Podospora anserina]
  misc_feature (147)..(646): NCBI GI: 149210017 Blast Desc: MGCH7_ch7g490 [Magnaporthe grisea 70-15] gi|86196445|gb|EAQ71083.1| MGCH7_ch7g490 [Magnaporthe grisea 70-15]
  misc_feature (115)..(632): NCBI GI: 156035937 Blast Desc: SS1G_13173 [Sclerotinia sclerotiorum 1980] gi|154698577|gb|EDN98315.1| SS1G_13173 [Sclerotinia sclerotiorum 1980]
  misc_feature (37)..(634): NCBI GI: 145245269 Blast Desc: An11g09440 [Aspergillus niger] gi|134079600|emb|CAK40817.1| protein product [Aspergillus niger]
  misc_feature (46)..(634): NCBI GI: 238505524 Blast Desc: WD repeat protein [Aspergillus flavus NRRL3357] gi|220690098|gb|EED46448.1| WD repeat protein [Aspergillus flavus NRRL3357]
  misc_feature (52)..(632): NCBI GI: 116193431 Blast Desc: CHGG_06433 [Chaetomium globosum CBS 148.51] gi|88182346|gb|EAQ89814.1| CHGG_06433 [Chaetomium globosum CBS 148.51]
  misc_feature (30)..(635): NCBI GI: 115402477 Blast Desc: conserved [Aspergillus terreus NIH2624] gi|114189161|gb|EAU30861.1| conserved [Aspergillus terreus NIH2624]
  misc_feature (63)..(634): NCBI GI: 240106259 Blast Desc: WD domain, G-beta repeat containing protein [Coccidioides posadasii C735 delta SOWgp]
MSSPSEHGEDVDDQQTDPYVDAEDDTEDPDYEEEDDDEEDDIDDIIQNLIDDRSEDDDDEYHDAEDGGERYIEFVMEEEEEDEQGEEAGELVDEEQAAENARARIINFIQNFGQRVVFANRAERLNFLRRLNIEDDELDDTRAAWRARMRQRRNQGRDPFPKVPSEKGRELMNSGVFGANDVISPIKRRKELARRILDREMGIGNDSYRKMNQGVMAQSMLPRTEADMIINYEDPVYSGQFSADGNFFYSCVKDFKVRMYDTSNPYNWRHYKTVTFPFGSWTLTDASLSPDNKWLAYTSIQSNVCLAPTDPNDTGDPYTLSLSEHGARNQGWRGSFGIWSIRFSGDGRELVAGTNAHSIIVYDIETRSVLHSINGHEDDVNAVCFADKASPHILYSGSDDKTIKVWDRRSMGDRREAGAFVGHIQGLTYMDSKDDGRYLLSNGKDQSMKLWDLKMMYTTTQFRDRKPQRHTPSDGFDYRWATFADEDWFLHPDDNSLVTFRGHRVQRTLIRCHFSPPNSTNSRYVYSGSHDGKVYVWNMDATIAATIDVKKTTSARKSLPRNYRRYFDRQGLPSWGTVVRDASWHPTAPFIAASAFNGWDQQLGTVSLHSYNETENDEGTPVMGTAYDEKLRIVSGEPGEGQDPESDRDFDDDDPMGIFGD

SEQ ID NO: 31843 - DNA, 3314 bp, Muscodor strobelii
  misc_feature: SGI EST ID NO. CUFF.75464.0
  misc_feature: Variant of the nucleotide sequence at SEQ ID NO 31841
ccgccaacgagcataccccacagatattgaacaatcgccgaactatcggtgtcgtcatgtaatatctcactttccatttaaccgtcaatgagcctcacatttcgtcgttgtttcattttatacctatatatacttatgaccttgtgtagtccgaaagcactcgatattgtttcgttggcctattattcgaccgcccaagctcttatctgtgcacagctcgctttataagccagccggtggctccggaacatatcacatagcagttcacgatgagtagtccgagtgagcacggagaggatgtggatgatcagcagacggacccgtatgttgatgctgaggacgacaccgaggatcctgactacgaagaggaggacgatgatgaggaagacgatatcgacgacataattcagaatctaatcgacgatcgaagtgaagatgacgatgacgaatatcacgatgctgaagatggaggagaacgatatatcgagttcgtaatggaagaagaggaagaagacgagcaaggtgaagaagctggcgagctagtagatgaagagcaagcggctgaaaatgctcgagcgcgtatcatcaacttcatacagaacttcggtcagcgcgtggtcttcgccaacagagcagaacgtctgaactttttacgacgactcaacatcgaggatgatgaactcgatgacacgcgagcggcttggagagcccgtatgagacagcgcagaaaccagggcagagatccattccccaaggtacccagtgagaaagggagggagctcatgaactctggtgtgtttggtgcgaacgatgttatctcaccgatcaaaaggagaaaagagctcgccaggcggatactggaccgcgagatgggcattgggaatgattcttatcggaagatgaaccaaggtgttatggcacaatctatgctaccacgcaccgaagcagacatgataatcaactacgaagacccagtctactccggccagttctcagcagacggaaatttcttctattcttgcgtgaaagacttcaaagtccggatgtacgacacatcaaacccgtacaactggcggcactacaaaactgtcactttccccttcggctcctggacactcaccgacgcgtcactctccccagacaacaaatggctagcctacacatccatccaatccaacgtttgcctcgcacccacagacccaaatgacaccggagatccgtacacgctctccctctccgagcacggagcccgtaaccaaggctggcgaggatccttcggaatctggtccatccgcttctcaggcgatggacgagagctcgtagcaggtacaaacgcgcactcaataatagtctatgacatcgaaactcgttccgtcctacacagtataaacggccacgaagacgacgtaaacgccgtctgtttcgccgataaggcatccccacacatcctgtactccggttccgacgacaaaacaatcaaagtctgggaccgccgctccatgggcgacaggcgcgaagcgggagcattcgtaggacatatccaaggcctgacctacatggactcgaaagacgacggccgatacctactctccaacgggaaagaccaaagcatgaaactctgggatctaaaaatgatgtacacaacgacgcaattccgtgaccgcaaaccccagcgccacacaccttccgacgggttcgactaccgatgggccacatttgcagacgaagactggtttctacacccagacgataactcactcgtgactttccgcggtcaccgcgtacagcgaacactcatccgctgtcatttctcgccgcctaatagtacgaattcacgatatgtctactccgggtctcacgatggaaaggtatatgtttggaatatggacgctacgatcgctgcgactattgatgtgaagaagacgacgagtgcacggaagagtctgccgaggaattatagacggtattttgatagacagggtctaccgtcttggggtacggtcgttagggatgcgagttggcatcctactgcgccttttatcgctgcatccgcgttcaacggctgggatcaacaactcggcaccgtctccctacatagttacaacgagacagaaaacgacgagggaacaccagtcatgggcacggcgtatgatgagaagttgaggatagttagtggtgagccgggagagggacaggatccagagtcagatagggattttgatgatgatgatccgatggggattttcggtgattaatttgaatcactcccatatcgggctcaatttctgattactctctttcaggattcttgaattcttgagggagtaatccagagctggagcgcctgatatgtagttggtggtcacgatgtgttcacgacttcaagattagcatgtttctggtaattggggacaggagtttggtcgcatagagtcattcgcttaatttttatcttgtttaaaccccttaggccgtgatgctattttgtacagtaacttcgaagagccgtctgaagcccgtgctccctctctgcgaggcacagggccatcgagactccttgccccatccaaatcagatgccctctcgccatcgtgattatgtgtctgtcgatatcggtagcgtagagtggtcgtagtatgtgacctttggaggacgttcatcgttgtcgttatttggctcgtggtatctccttcacccaacccctttgcgtcgcgaatgtctctatgcgcctcctactaatacgttgttgacaggaatatggactgcgcagatatgtgttagtcacagagtcttctggggcaagtagcatcgccaaagaagggagttcgtcgatatgcataggaggtggttgtcgtcaaggtaaacgtactcagcttaacgaggtagccaatagcgcccatcacgacgaaaccgacaccgacagcctggcagattttgaggtattcgttgcggtcgggcttggtgcagcgcgtcatgaactgagtgccatccttgacgaactccttttgggtatcgatgagctctgttacgaagtcggccattgtagatatgtgtgagaggtgcaagggtgattgaaggagttgagtatggcgagggaaacgaatgcgcttcgtgagattaggagattgtttggggaagattaatcgtcgagagagatggacgtgtttcgatatggaagtggatggacgagtaattgcgccgcgagttgaccacggagtcgagtacctcgatagatgcggccagatttccactgtctacagtaaatttccccagggcgaatctgacaggggtggagcttcctcaggcacctgagc

SEQ ID NO: 31844 - DNA, 213 bp, Muscodor strobelii
  misc_feature: SGI cDNA ID NO. 570968
  misc_feature: Encodes the peptide sequence at SEQ ID NO 31845
atggccgacttcgtaacagagctcatcgatacccaaaaggagttcgtcaaggatggcactcagttcatgacgcgctgcaccaagcccgaccgcaacgaatacctcaaaatctgccaggctgtcggtgtcggtttcgtcgtgatgggcgctattggctacctcgttaagctgatccatattcctgtcaacaacgtattagtaggaggcgcatag

SEQ ID NO: 31845 - protein, 70 aa, Muscodor strobelii
  misc_feature: SGI Peptide ID NO. 570968
  misc_feature (11)..(67): Pfam Id: PF00584 Pfam Desc: SecE/Sec61-gamma subunits of protein translocation complex
  misc_feature (14)..(67): Pfam Id: PF00584 Pfam Desc: SecE/Sec61-gamma subunits of protein translocation complex
  misc_feature (1)..(70): NCBI GI: 39970551 Blast Desc: conserved [Magnaporthe grisea 70-15] gi|145017448|gb|EDK01811.1| conserved [Magnaporthe grisea 70-15]
  misc_feature (1)..(70): NCBI GI: 226286336 Blast Desc: conserved [Paracoccidioides brasiliensis Pb01]
  misc_feature (1)..(70): NCBI GI: 256733716 Blast Desc: [Nectria haematococca mpVI 77-13-4]
  misc_feature (1)..(70): NCBI GI: 154273937 Blast Desc: [Ajellomyces capsulatus NAm1] gi|150415428|gb|EDN10781.1| [Ajellomyces capsulatus NAm1] gi|240282205|gb|EER45708.1| translocation complex subunit Sss1
  misc_feature (1)..(68): NCBI GI: 212544556 Blast Desc: protein translocation complex subunit Sss1, [Penicillium marneffei ATCC 18224] gi|210065401|gb|EEA19495.1| protein translocation complex subunit Sss1, [Penicillium ATCC
  misc_feature (1)..(70): NCBI GI: 58257445 Blast Desc: protein transport protein SEC61 gamma subunit-like protein [Magnaporthe grisea]
  misc_feature (1)..(70): NCBI GI: 85102174 Blast Desc: NCU04127 [Neurospora crassa OR74A] gi|42559873|sp|Q9C2D4.2|SC61G_NEUCR RecName: Full= protein transport protein Sec61 subunit gamma gi|16944423|emb|CAC28779.2|
  misc_feature (1)..(66): NCBI GI: 149210017 Blast Desc: MGCH7_ch7g490 [Magnaporthe grisea 70-15] gi|86196445|gb|EAQ71083.1| MGCH7_ch7g490 [Magnaporthe grisea 70-15]
  misc_feature (1)..(70): NCBI GI: 156035935 Blast Desc: SS1G_13172 [Sclerotinia sclerotiorum 1980] gi|154698576|gb|EDN98314.1| SS1G_13172 [Sclerotinia sclerotiorum 1980]
  misc_feature (1)..(70): NCBI GI: 46129372 Blast Desc: FG08871.1 [Gibberella zeae PH-1]
MADFVTELIDTQKEFVKDGTQFMTRCTKPDRNEYLKICQAVGVGFVVMGAIGYLVKLIHIPVNNVLVGGA

SEQ ID NO: 31846 - DNA, 2748 bp, Muscodor strobelii
  misc_feature: SGI EST ID NO. CUFF.75465.1
  misc_feature: Variant of the nucleotide sequence at SEQ ID NO 31844
gctcaggtgcctgaggaagctccacccctgtcagattcgccctggggaaatttactgtagacagtggaaatctggccgcatctatcgaggtactcgactccgtggtcaactcgcggcgcaattactcgtccatccacttccatatcgaaacacgtccatctctctcgacgattaatcttccccaaacaatctcctaatctcacgaagcgcattcgtttccctcgccatactcaactccttcaatcacccttgcacctctcacacatatctacaatggccgacttcgtaacagagctcatcgatacccaaaaggagttcgtcaaggatggcactcagttcatgacgcgctgcaccaagcccgaccgcaacgaatacctcaaaatctgccaggctgtcggtgtcggtttcgtcgtgatgggcgctattggctacctcgttaagctgatccatattcctgtcaacaacgtattagtaggaggcgcatagagacattcgcgacgcaaaggggttgggtgaaggagataccacgagccaaataacgacaacgatgaacgtcctccaaaggtcacatactacgaccactctacgctaccgatatcgacagacacataatcacgatggcgagagggcatctgatttggatggggcaaggagtctcgatggccctgtgcctcgcagagagggagcacgggcttcagacggctcttcgaagttactgtacaaaatagcatcacggcctaaggggtttaaacaagataaaaattaagcgaatgactctatgcgaccaaactcctgtccccaattaccagaaacatgctaatcttgaagtcgtgaacacatcgtgaccaccaactacatatcaggcgctccagctctggattactccctcaagaattcaagaatcctgaaagagagtaatcagaaattgagcccgatatgggagtgattcaaattaatcaccgaaaatccccatcggatcatcatcatcaaaatccctatctgactctggatcctgtccctctcccggctcaccactaactatcctcaacttctcatcatacgccgtgcccatgactggtgttccctcgtcgttttctgtctcgttgtaactatgtagggagacggtgccgagttgttgatcccagccgttgaacgcggatgctattacaaatattaatatcaacgtgtttgaatggggtacaaaggagggcaagatgagactcaccagcgataaaaggcgcagtaggatgccaactcgcatccctaacgaccgtaccccaagacggtagaccctgtctatcaaaataccgtctataattcctcggcagactcttccgtgcactcgtcgtcttcttcacatcaatagtcgcagcgatcgtagcgtccatattccaaacatatacctttccatcgtgagacccggagtagacatatcgtgaattcgtactattaggcggcgagaaatgacagcggatgagtgttcgctgtacgcggtgaccgcggaaagtcacgagtgagttatcgtctgggtgtagaaaccagtcttcgtctgcaaatgtggcccatcggtagtcgaacccgtcggaaggtgtgtggcgctggggtttgcggtcacggaattgcgtcgttgtgtacatcatttttagatcccagagtttcatgctttggtctttcccgttggagagtaggtatcggccgtcgtctttcgagtccatgtaggtcaggccttggatatgtcctacgaatgctcccgcttcgcgcctgtcgcccatggagcggcggtcccagactttgattgttttgtcgtcggaaccggagtacaggatgtgtggggatgccttatcggcgaaacagacggcgtttacgtcgtcttcgtggccgtttatactgtgtaggacggaacgagtttcgatgtcatagactattattgagtgcgcgtttgtacctgctacgagctctcgtccatcgcctgagaagcggatggaccagattccgaaggatcctcgccagccttggttacgggctccgtgctcggagagggagagcgtgtacggatctccggtgtcatttgggtctgtgggtgcgaggcaaacgttggattggatggatgtgtaggctagccatttgttgtctggggagagtgacgcgtcggtgagtgtccaggagccgaaggggaaagtgacagttttgtagtgccgccagttgtacgggtttgatgtgtcgtacatccggactttgaagtctttcacgcaagaatagaagaaatttccgtctgctgagaactggccggagtagactgggtcttcgtagttgattatcatgtctgcttcggtgcgtggtagcatagactgaatactgtcagtaacgcatcgtaagacaaggtttgatgggtagactgacttgtgccataacaccttggttcatcttccgataagaatcattcccaatgcccatctcgcggtccagtatccgcctggcgagctcttttctccttttgatcggtgagataacatcgttcgcaccaaacacaccagagttcatgagctccctccctttctcactgggtaccttggggaatggatctctgccctggtttctgcgctgtctcatacgggctctccaagccgctcgcgtgtcatcgagttcatcatcctcgatgttgagtcgtcgtaaaaagttcagacgttctgctctgttggcgaagaccacgcgctgaccgaagtctggagcttgttagataaagatgac

SEQ ID NO: 31847 - DNA, 1107 bp, Muscodor strobelii
  misc_feature: SGI cDNA ID NO. 570969
  misc_feature: Reduced expression when VOC is produced
  misc_feature: Encodes the peptide sequence at SEQ ID NO 31848
atggccgatgaggacttcgagatcgacgtctacggcgacgccaacggcgatggcgataccaaggtagccgactccaacacacaagcttacgaaagcaacaccaacattaccatcgcaaatgggtcgaacgcacccgatccagagatcaacgatcacggtaactacggctctcacaatcacaacgatatggatggccacgataatcacggcgctcctcaacactaccagcagggcgttaagcgcaagaccgaggacgacgacaggccagtcgaccctggcgccacaaactgtctcctgctgtccgaactcaactggtggacaaccgacgacgacatccgggcttggatcaagcaaggttcctgcgaggacgagcttcgagacattacttatagcgaacataaggtgaacggcaagagtaaaggtcaagcctaccttgaattcatgtcccagcaagcagcgacagccgcgaaacacgcaattgagagcccagcatctgatggctcacagcccggagccaagaagcacacagtaatatactcaagcccatcaaataatcccttccgcacactcccgaaagatgcgcccgcgagggctaaggacagtggaggtacccgtggaggtgcttcgggtggtttcgagcgaggaggcggtagcttcagaggccgcggtaactttagcggacctcgtggtggtggctacggcaaccgaaacttctcgggtggcaacatgggcggtggaactggcttccaacataataataacaacaacatgggtggcggcggtttcaacaacaacatgggaggtggtggcggaaactttggtttcaataacatgggtggcggtggaggcaacttcggcggcttccgtggaggaatgatgggcaataatatgggtggtggtatgagaggtggtggcatgcgcggacggggcggtgccatgggtggtggaatgaacccggggatgagtggaggtatgatgggcggcatgaacatgggtatgccgatgatgggtttccaacagccccatttcaacccagctttcttcggcggcaatcagcaatcagactggcagaaccctcacggtgccaaacgaccacgcggggagtag

SEQ ID NO: 31848 - protein, 368 aa, Muscodor strobelii
  misc_feature: SGI Peptide ID NO. 570969
  misc_feature (1)..(264): NCBI GI: 116193433 Blast Desc: CHGG_06434 [Chaetomium globosum CBS 148.51] gi|88182347|gb|EAQ89815.1| CHGG_06434 [Chaetomium globosum CBS 148.51]
  misc_feature (1)..(200): NCBI GI: 39970549 Blast Desc: MGG_02741 [Magnaporthe grisea 70-15] gi|149210015|ref|XP_001522382.1| MGCH7_ch7g489 [Magnaporthe grisea 70-15] gi|86196444|gb|EAQ71082.1| MGCH7_ch7g489 grisea
  misc_feature (1)..(198): NCBI GI: 85113379 Blast Desc: NCU02152 [Neurospora crassa OR74A] gi|28926296|gb|EAA35275.1| [Neurospora crassa OR74A]
  misc_feature (3)..(300): NCBI GI: 258573489 Blast Desc: [Uncinocarpus reesii 1704] gi|237901192|gb|EEP75593.1| [Uncinocarpus reesii 1704]
  misc_feature (3)..(368): NCBI GI: 226286335 Blast Desc: conserved [Paracoccidioides brasiliensis Pb01]
  misc_feature (1)..(208): NCBI GI: 256734212 Blast Desc: NECHADRAFT_78106 [Nectria haematococca mpVI 77-13-4]
  misc_feature (3)..(212): NCBI GI: 145245271 Blast Desc: An11g09450 [Aspergillus niger] gi|134079601|emb|CAK40818.1| protein product [Aspergillus niger]
  misc_feature (1)..(266): NCBI GI: 46129370 Blast Desc: FG08870.1 [Gibberella zeae PH-1]
  misc_feature (1)..(210): NCBI GI: 154290556 Blast Desc: BC1G_15622 [Botryotinia fuckeliana B05.10] gi|150847517|gb|EDN22710.1| BC1G_15622 [Botryotinia fuckeliana B05.10]
  misc_feature (76)..(211): NCBI GI: 171684531 Blast Desc: protein product [Podospora anserina] gi|170942226|emb|CAP67878.1| protein product [Podospora anserina]
  misc_feature: Useful for introducing or modulating the production of volatile compounds
MADEDFEIDVYGDANGDGDTKVADSNTQAYESNTNITIANGSNAPDPEINDHGNYGSHNHNDMDGHDNHGAPQHYQQGVKRKTEDDDRPVDPGATNCLLLSELNWWTTDDDIRAWIKQGSCEDELRDITYSEHKVNGKSKGQAYLEFMSQQAATAAKHAIESPASDGSQPGAKKHTVIYSSPSNNPFRTLPKDAPARAKDSGGTRGGASGGFERGGGSFRGRGNFSGPRGGGYGNRNFSGGNMGGGTGFQHNNNNNMGGGGFNNNMGGGGGNFGFNNMGGGGGNFGGFRGGMMGNNMGGGMRGGGMRGRGGAMGGGMNPGMSGGMMGGMNMGMPMMGFQQPHFNPAFFGGNQQSDWQNPHGAKRPRGE

SEQ ID NO: 31849 - DNA, 2638 bp, Muscodor strobelii
  misc_feature: SGI EST ID NO. CUFF.75516.1
  misc_feature: Variant of the nucleotide sequence at SEQ ID NO 31847
gcttgggcctcgtgtccagtcgcgccacggaaggcagtcatcttacggcgacccaacacgggtcggagctccctgtcgtcaggtcttgtatcacaccatcttttccactccagcctgaccacccgacttcgtttctcaccttcgtcttcgattgttacacattatttctagagctgcctgctcttgttctcttcccgccatctactacgaagtttgcgaagtgctcgagtctatcgtacatggtctgcacctatccgtccagcttacgaagtgtgtcgggcgtccacgaaacgatcagcttcgttgacgggacctttcgaccacatcttcgtagctccatctaactcaacccccccagcaactagataaagcgttcggtttgagtctaagacagaggtgtatgagactgataggaccaggcggtgcttcttctgctatcttccggacatctgcaggttgtagctgcacacctgtactctccacatcatcatcctcttgaccgtcgacggacagcttggacaggcgcggatatctacccccatatcattgaagggatagtgtgggattgcaagcacagagcttcatcctcgactcttgacttagcgttcggctactgtgccagtttttccgcttgttttctgctgttacgttggttcaaaccagccaaggcatcaagagagcctgaccgacgtcctgtgtcgtcagagcctacgtacgccagacgcatcttgtatctactcagaatacaaccaattgccagatacctcacatctttctaacttgtcagccttgctgctcccttgattactatcacagccgtgaacatggccgatgaggacttcgagatcgacgtctacggcgacgccaacggcgatggcgataccaaggtagccgactccaacacacaagcttacgaaagcaacaccaacattaccatcgcaaatgggtcgaacgcacccgatccagagatcaacgatcacggtaactacggctctcacaatcacaacgatatggatggccacgataatcacggcgctcctcaacactaccagcagggcgttaagcgcaagaccgaggacgacgacaggccagtcgaccctggcgccacaaactgtctcctgctgtccgaactcaactggtggacaaccgacgacgacatccgggcttggatcaagcaaggttcctgcgaggacgagcttcgagacattacttatagcgaacataaggtgaacggcaagagtaaaggtcaagcctaccttgaattcatgtcccagcaagcagcgacagccgcgaaacacgcaattgagagcccagcatctgatggctcacagcccggagccaagaagcacacagtaatatactcaagcccatcaaataatcccttccgcacactcccgaaagatgcgcccgcgagggctaaggacagtggaggtacccgtggaggtgcttcgggtggtttcgagcgaggaggcggtagcttcagaggccgcggtaactttagcggacctcgtggtggtggctacggcaaccgaaacttctcgggtggcaacatgggcggtggaactggcttccaacataataataacaacaacatgggtggcggcggtttcaacaacaacatgggaggtggtggcggaaactttggtttcaataacatgggtggcggtggaggcaacttcggcggcttccgtggaggaatgatgggcaataatatgggtggtggtatgagaggtggtggcatgcgcggacggggcggtgccatgggtggtggaatgaacccggggatgagtggaggtatgatgggcggcatgaacatgggtatgccgatgatgggtttccaacagccccatttcaacccagctttcttcggcggcaatcagcaatcagactggcagaaccctcacggtgccaaacgaccacgcggggagtaggaaagaccgccgggagtaccaccgggagtaccaccaattaggagacctccccccgaccacccgacctagcacgtcagtggggacctttatggccgcggaccgcctgctccaggaccacccccgaatgggcccgcggaggttaatctcaatgccgagacgttgtatgagaggctgcaatcccttaccaggaattacgtctctttaatgtctcgtctacagcgtccagattcagatatggacctcccccatccggagcacgactctatttgaaagagcctggatttacttgcaaaatgtgtacgaaagacgggcgagcggcgtttttactgaatcccggctctgagtttgattaaggcgttgacttggggcgtgaatggaaataggggcttaaactgcataaattggcttgcattgcttgtgtaccaggtagatcaacattggttctttctcaacttatggatgagctttgatactgtgagaattggtgcggtagaggtatgtaatataggggtttgggtaggagatttggtatgcgtcaagacttgtgagagtattgctgtatgatgcggcgagattggtgggaacatagcattgtctatgaagactgagaatattgcttatgtcaacacatcctagagtctgagcaatgatatgcggcttctagtctttcgtctatgacatgtaagcaacggaagtcaatccagctg

SEQ ID NO: 31850 - DNA, 468 bp, Muscodor strobelii
  misc_feature: SGI cDNA ID NO. 570970
  misc_feature: Elevated expression when VOC is produced
  misc_feature: Encodes the peptide sequence at SEQ ID NO 31851
atggcgtctcaattgccagcttttccgcgcacgatcttcactatcgtcgagcccatctcacttgtagcgggctgccttggtgccattatcgatcccgaatggttcatagcgagccagattgataacccagcattactcgcctcttccgataacgctcgccttgtcgccttgcagctgggaaattgctacggcttgctattcctcgtgggggtcgctgtgttatacacgacgaacgagctgaaggttgtcaggaattatctagttgccttgcttattgcagacgtgacccacgtaggacagacatgctgggttcttggctatgagaagtcgatggacgtcgcggcatggaatgcgacaacttggggcaacataggcttcaccatattcttagggatgactcgtacagcatatcttctaggactctttagccccggtactaagtcggtcaaaggctcaaaggagttatga

SEQ ID NO: 31851 - protein, 155 aa, Muscodor strobelii
  misc_feature: SGI Peptide ID NO. 570970
  misc_feature (1)..(148): NCBI GI: 156035941 Blast Desc: SS1G_13175 [Sclerotinia sclerotiorum 1980] gi|154698579|gb|EDN98317.1| SS1G_13175 [Sclerotinia sclerotiorum 1980]
  misc_feature (5)..(144): NCBI GI: 145610062 Blast Desc: MGG_02745 [Magnaporthe grisea 70-15] gi|145017445|gb|EDK01808.1| MGG_02745 [Magnaporthe grisea 70-15]
  misc_feature (1)..(127): NCBI GI: 46128667 Blast Desc: FG08711.1 [Gibberella zeae PH-1]
  misc_feature (1)..(127): NCBI GI: 256734096 Blast Desc: NECHADRAFT_91970 [Nectria haematococca mpVI 77-13-4]
  misc_feature (1)..(142): NCBI GI: 255944147 Blast Desc: Pc20g02870 [Penicillium chrysogenum Wisconsin 54-1255] gi|211587576|emb|CAP85616.1| Pc20g02870 [Penicillium chrysogenum Wisconsin 54-1255]
  misc_feature (1)..(128): NCBI GI: 261353550 Blast Desc: conserved [Verticillium albo-atrum VaMs.102]
  misc_feature (1)..(154): NCBI GI: 240282200 Blast Desc: conserved [Ajellomyces capsulatus H143]
  misc_feature (1)..(154): NCBI GI: 212544584 Blast Desc: PMAA_003000 [Penicillium marneffei ATCC 18224] gi|210065415|gb|EEA19509.1| PMAA_003000 [Penicillium marneffei ATCC 18224]
  misc_feature (1)..(154): NCBI GI: 225559266 Blast Desc: conserved [Ajellomyces capsulatus G186AR]
  misc_feature (1)..(128): NCBI GI: 154290564 Blast Desc: BC1G_15626 [Botryotinia fuckeliana B05.10] gi|150847521|gb|EDN22714.1| BC1G_15626 [Botryotinia fuckeliana B05.10]
  misc_feature: Useful for introducing or modulating the production of volatile compounds
MASQLPAFPRTIFTIVEPISLVAGCLGAIIDPEWFIASQIDNPALLASSDNARLVALQLGNCYGLLFLVGVAVLYTTNELKVVRNYLVALLIADVTHVGQTCWVLGYEKSMDVAAWNATTWGNIGFTIFLGMTRTAYLLGLFSPGTKSVKGSKEL

SEQ ID NO: 31852 - DNA, 4401 bp, Muscodor strobelii
  misc_feature: SGI EST ID NO. CUFF.75369.0
  misc_feature: Variant of the nucleotide sequence at SEQ ID NO 31850
gaaaagccatgatacgccgtccattgcatctgatatatcaggaaactgatcatctttccacaattgccggtggagtaagatgactccttgcaacacccacttccaatgctacttgacgtagacttcaccatcatcatgatgcgtcgacatactcgatgtaggtgtacagggcaaggcagtcagatacatctagttgatagcttatagtcacatttcagtgattgaatttgcttagcttttatacgaagagcttcatgcgttgcttttattttgcagttttttcccggctagatttataagtattatgtcaaccaacgccaatgccacccgctcatgtgctcttgaatccgacttttgggtttcattagatgtggtgacctctcgtctgggtcagacctggccgttgggccacggcttgtgtgaacctttttcgacttgttgcaagtcgcgttccaactctggagactctctttgaacccaccttttcctatgagccggcatttcttaccatctctcctattccccctcaaagcaagcagacttaaattcctgtatacacaactacgcttcagacccgaggtcccgatggcacgatgataccctacgaaacaggaaagtgctctctaggcgtgggattgaatttgctgctccatcgtagatcatgtgtccctggcgcacttcggcgccgggttgttactagccaaagccccttctttcagacgccagtggctcgctcattatttgtgtgtcgtcgaggagtagacgtgaaatgtccatctccccggacgggaagcctcctggaccattctcattccagaacgcttgctgtggttgcgtggactcacccgcgtcagtaaacccgggccacttgggaatatcttctcgtgaaccggtcctgttgagatggggttctagtagggttgtcttcggcgcattcagtgaattttcaatgtccatcgtgactgatggctcgagtaaattgttgcttcgcccgccagattccctgacttgcatagtggtcttttctgtgctgacaaacttctccgggtacttattgcgtaatcgatctctcaaatccgttggttgcctacttgaaaggttgaatctagaatccctttgaattttggtccaatgcggcccgtaaagttcaaatccttggagaatctcccggtcgtcttgttcagagaacggtcttcgctcgcgtctttgagatttcttgaatggccccttgattcctaactccgcaagatcttccatcttcttcctatgagctcgactcttccgttgctttggcgccaagtcataatcgtattgtcctgtcatggtcttctccatttcaacctcctcgtcgggttcatttaggatattctccgccatgagcccctttttgggtttcttcaaggtcttgtgtcctgctccaactggggtttccggtccatcctgcttaagaccagtgctgccacgaagctcttcggggcagcaagtacgaaacctgtccttcaaatcaccagctgtccgatcattgaagttgtactctttatcatcgaggatgtcagtccatctaccaacaccatgtttgctaactcccaaaagcaggtgatttgtctcctcttcagaccatttcctgcgaggttttgctgctctccgtttgaccttaccagtcggtgtcctttcggtgtcggccggaggacttggcacaactggttcttcatatacaccctgcacttctggcggaggcttcgtcaaattgagagctcgtgggggctcagagcgtggacgtagcgatcccgaagatattggggggaataaagtggcatttttcgagggcggttcgagaattcccatgatcattggaggaaacatatgctgctggcttggctgagctttctgcttcttgagtgtcggctgaggcagctgaggaaagtcctccttcacaggccgtttcttcgtggatacatcgtccgtggcatcgctcggtatgtcctcgaggatcatgcggagatcttgcgatgagacatgtgttgagaacggcctatcagccactgcgtagattggtgtatcttttctcgaagacgaggtggtgtttgaggatgggccggtcaaagaaggtgcactcaggctgtcatcggtcatggcatacaaggatggaatggattgagcggccaattggcctccattggcatcctgctgggcatctggctcgataggatgaggtcggccggaggcctggtgatagggcagggccttgatgggaggcagttcggcattgtgcggtctcggcgtggtcgtcgtttcattcagcagatggatcaaccgcggctcgataaacgccatcctgaatgcaacagaggcgacgatgagcggtacatgggtattttaaattttgtacttaagacgaacggtgtaattgagcgagaggatagaagtaaaagacagtaccgggcggatggatcgttgacaatcgacgagcgatggatatagcaacaagcaatagacagttctttctctaagtcaaggcagtatgcagacgaagtagaaaagagtgagggtgtcaatcgacagcacgatcagccgacaattaagttatttctcaaagctaaaatagaattgccacggtggaagaacagaacagaacagagcaagacagacaagacggagactggatacaacaggacaagcaggccgacttgacgctctctccacgggctgctaggaacaagccctcatgaaaatgaatggccgttgctcgcgcatgcaggaggagctttgctgcacgacaaatgtaatagtgccagtaggtgtatgcgcgagccgggccatgcagctggatagccgacctggacctgggcacggccaattgataggatctgatagataaccgtctgtctgcgagtgtctgcactgactgctgcactgactgcacactgactacgacactcgagtccccctctctaggtctctagaggcaagggaggtgcagcgaattagcgttacactacatggccacccggcgaagagggtgatgaggatgggcagcaggcgaaggccgtgacaggcccgtcgctattcctgcagagagcacgagaggcaaggttgcttggtgtttggttgtttggttggggaaaagatcgaaagatggaggaatgttcgaggccgtccagatgcaccaggtcaagccgggcagggcagagacagggggcccgcagtcttggcttcgaagctaggatgcagcccacagacgtgcctctagctctgcagcctctgctctaggtacctcagctaagtcaagatcgccgccgcccggacgcatgcgtgtgacggcgtaacgctgcggcacagataacgcaacacataacggacggggaactgtgacgacctgccgatcccctctagccccaaccaacgacctgagaccagccagagacaaacagccttccaattgcattgagacggaggtctaatgttgtgtcagcatctgtcataatctgcacctccatccagtaaatcaagtgaagttgtcgtcacctcatatcaccagtctcacaaattctcaccttataaatagagccatggcgtctcaattgccagcttttccgcgcacgatcttcactatcgtcgagcccatctcactgtaagccgccacatgcccccgtcccgctccttcaaccttcctaccgacccaaccctaattacattggattttcagtgtagcgggctgccttggtgccattatcgatcccgaatggttcatagcgagccagattgataacccagcattactcgcctcttccgataacgctcgccttgtcgccttgcagctgggaaattgctacggcttgctattcctcgtgggggtcgctgtgttatacacgacgaacgagctgaaggttgtcaggaattatctagttgccttgcttattgcagacgtgacccacgtaggacagacatgctgggttcttggctatgagaagtcgatggacgtcgcggcatggaatgcgacaacttggggcaacataggcttcaccatattcttagggatgactcgtacagcatatcttctaggactctttagccccggtactaagtcggtcaaaggctcaaaggagttatgagcagcaattccttttgtcatgtttcagacttgatattcaaacttatttccgcgagcactacatcaagccggtgtacaagactttataggctgctgtgaaatatttggctatagtgttagtaacataatcatctattcggttgccatcactagtatctatccgatattttgagcctaatgctaagggcatgcttattcgaatttcaacctcaccatcacaacagtcgaggagcaaacacgattgacacatgaaatatctcgccgatcatcctggtggtcgtcaagtctcg

SEQ ID NO: 31853 - DNA, 1638 bp, Muscodor strobelii
  misc_feature: SGI cDNA ID NO. 570971
  misc_feature: Encodes the peptide sequence at SEQ ID NO 31854
atggcgtttatcgagccgcggttgatccatctgctgaatgaaacgacgaccacgccgagaccgcacaatgccgaactgcctcccatcaaggccctgccctatcaccaggcctccggccgacctcatcctatcgagccagatgcccagcaggatgccaatggaggccaattggccgctcaatccattccatccttgtatgccatgaccgatgacagcctgagtgcaccttctttgaccggcccatcctcaaacaccacctcgtcttcgagaaaagatacaccaatctacgcagtggctgataggccgttctcaacacatgtctcatcgcaagatctccgcatgatcctcgaggacataccgagcgatgccacggacgatgtatccacgaagaaacggcctgtgaaggaggactttcctcagctgcctcagccgacactcaagaagcagaaagctcagccaagccagcagcatatgtttcctccaatgatcatgggaattctcgaaccgccctcgaaaaatgccactttattccccccaatatcttcgggatcgctacgtccacgctctgagcccccacgagctctcaatttgacgaagcctccgccagaagtgcagggtgtatatgaagaaccagttgtgccaagtcctccggccgacaccgaaaggacaccgactggtaaggtcaaacggagagcagcaaaacctcgcaggaaatggtctgaagaggagacaaatcacctgcttttgggagttagcaaacatggtgttggtagatggactgacatcctcgatgataaagagtacaacttcaatgatcggacagctggtgatttgaaggacaggtttcgtacttgctgccccgaagagcttcgtggcagcactggtcttaagcaggatggaccggaaaccccagttggagcaggacacaagaccttgaagaaacccaaaaaggggctcatggcggagaatatcctaaatgaacccgacgaggaggttgaaatggagaagaccatgacaggacaatacgattatgacttggcgccaaagcaacggaagagtcgagctcataggaagaagatggaagatcttgcggagttaggaatcaaggggccattcaagaaatctcaaagacgcgagcgaagaccgttctctgaacaagacgaccgggagattctccaaggatttgaactttacgggccgcattggaccaaaattcaaagggattctagattcaacctttcaagtaggcaaccaacggatttgagagatcgattacgcaataagtacccggagaagtttgtcagcacagaaaagaccactatgcaagtcagggaatctggcgggcgaagcaacaatttactcgagccatcagtcacgatggacattgaaaattcactgaatgcgccgaagacaaccctactagaaccccatctcaacaggaccggttcacgagaagatattcccaagtggcccgggtttactgacgcgggtgagtccacgcaaccacagcaagcgttctggaatgagaatggtccaggaggcttcccgtccggggagatggacatttcacgtctactcctcgacgacacacaaataatgagcgagccactggcgtctgaaagaaggggctttggctag

SEQ ID NO: 31854 - protein, 545 aa, Muscodor strobelii
  misc_feature: SGI Peptide ID NO. 570971
  misc_feature (236)..(286): Pfam Id: PF00249 Pfam Desc: Myb-like DNA-binding domain
  misc_feature (380)..(429): Pfam Id: PF00249 Pfam Desc: Myb-like DNA-binding domain
  misc_feature (236)..(283): Pfam Id: PF00249 Pfam Desc: Myb-like DNA-binding domain
  misc_feature (1)..(544): NCBI GI: 256733590 Blast Desc: NECHADRAFT_36089 [Nectria haematococca mpVI 77-13-4]
  misc_feature (1)..(532): NCBI GI: 46128671 Blast Desc: FG08713.1 [Gibberella zeae PH-1]
  misc_feature (1)..(535): NCBI GI: 171685033 Blast Desc: protein product [Podospora anserina] gi|170942477|emb|CAP68129.1| protein product [Podospora anserina]
  misc_feature (1)..(531): NCBI GI: 39970559 Blast Desc: MGG_02746 [Magnaporthe grisea 70-15] gi|149210023|ref|XP_001522386.1| MGCH7_ch7g493 [Magnaporthe grisea 70-15] gi|86196448|gb|EAQ71086.1| MGCH7_ch7g493 grisea
  misc_feature (122)..(541): NCBI GI: 85074690 Blast Desc: NCU02182 [Neurospora crassa OR74A] gi|28926026|gb|EAA35016.1| [Neurospora crassa OR74A]
  misc_feature (1)..(501): NCBI GI: 116193491 Blast Desc: CHGG_06463 [Chaetomium globosum CBS 148.51] gi|88182376|gb|EAQ89844.1| CHGG_06463 [Chaetomium globosum CBS 148.51]
  misc_feature (1)..(536): NCBI GI: 261353549 Blast Desc: conserved [Verticillium albo-atrum VaMs.102]
  misc_feature (4)..(391): NCBI GI: 154290562 Blast Desc: BC1G_15625 [Botryotinia fuckeliana B05.10] gi|150847520|gb|EDN22713.1| BC1G_15625 [Botryotinia fuckeliana B05.10]
  misc_feature (138)..(434): NCBI GI: 189202730 Blast Desc: MYB DNA-binding domain containing protein [Pyrenophora tritici-repentis Pt-1C-BFP] gi|187984800|gb|EDU50288.1| MYB DNA-binding domain containing protein [Pyrenophora Pt-1C-BFP]
  misc_feature (4)..(294): NCBI GI: 156035939 Blast Desc: SS1G_13174 [Sclerotinia sclerotiorum 1980] gi|154698578|gb|EDN98316.1| SS1G_13174 [Sclerotinia sclerotiorum 1980]
MAFIEPRLIHLLNETTTTPRPHNAELPPIKALPYHQASGRPHPIEPDAQQDANGGQLAAQSIPSLYAMTDDSLSAPSLTGPSSNTTSSSRKDTPIYAVADRPFSTHVSSQDLRMILEDIPSDATDDVSTKKRPVKEDFPQLPQPTLKKQKAQPSQQHMFPPMIMGILEPPSKNATLFPPISSGSLRPRSEPPRALNLTKPPPEVQGVYEEPVVPSPPADTERTPTGKVKRRAAKPRRKWSEEETNHLLLGVSKHGVGRWTDILDDKEYNFNDRTAGDLKDRFRTCCPEELRGSTGLKQDGPETPVGAGHKTLKKPKKGLMAENILNEPDEEVEMEKTMTGQYDYDLAPKQRKSRAHRKKMEDLAELGIKGPFKKSQRRERRPFSEQDDREILQGFELYGPHWTKIQRDSRFNLSSRQPTDLRDRLRNKYPEKFVSTEKTTMQVRESGGRSNNLLEPSVTMDIENSLNAPKTTLLEPHLNRTGSREDIPKWPGFTDAGESTQPQQAFWNENGPGGFPSGEMDISRLLLDDTQIMSEPLASERRGFG

SEQ ID NO: 31855 - DNA, 789 bp, Muscodor strobelii
  misc_feature: SGI cDNA ID NO. 570972
  misc_feature: Reduced expression when VOC is produced
  misc_feature: Encodes the peptide sequence at SEQ ID NO 31856
atgggccgtggacctaagaagcatcagaagcgcctaagcgccccctcgcactggcttctcgacaagctctcgggaacgtacgcgcccaaggcctcgcccggtccccacaagacgcgagaatgcctgcccctcatcatcttcatccgcaaccgcctcaagtacgcgctcaactaccgtgagacccgcgccatcctcatgcagcgcctcgtcaaggtcgacggcaaggtccgcaccgacatgacctaccccaccggcttcatggacgtcatcaccatcgagaagacgggcgagaacttccgcctcatctacgacaccaagggccgctacaccgtccaccgcatccaggaggaggaggccgcctacaagctgggcaaggtcaagcgagtgcaactgggcaagggcggcatcccattcttggttacgcacgatgcgagaaccatccgctaccccgaccctctgatcaaggtcaacgacaccgtcaagatcgacctcgccactggcaagatcgactcctacatccacttcgacactggtgccatcgccatgatcaccggtggtcgcaacatgggtcgtgtgggtgtcatcactcaccgtgagcgccacgacggaggtttcaacatcgtccacatcaaggatgccattgacaacactttcgccacccgcgagaacaacgtcttcgtcattggtgacgagaagccctggatctctctgcccaagggtaagggtgtcaagcttaccattgccgaggagagagaccgccgccgtgcccacgctctggctggccactaa

SEQ ID NO: 31856 - protein, 262 aa, Muscodor strobelii
  misc_feature: SGI Peptide ID NO. 570972
  misc_feature (94)..(170): Pfam Id: PF00900 Pfam Desc: Ribosomal family S4e
  misc_feature (3)..(40): Pfam Id: PF08071 Pfam Desc: RS4NT (NUC023) domain
  misc_feature (1)..(262): NCBI GI: 225559261 Blast Desc: 40S ribosomal protein S4 [Ajellomyces capsulatus G186AR] gi|240282196|gb|EER45699.1| 40S ribosomal protein S4 [Ajellomyces capsulatus H143]
  misc_feature (1)..(260): NCBI GI: 164429760 Blast Desc: 40S ribosomal protein S4 [Neurospora crassa OR74A] gi|157073608|gb|EAA35015.2| 40S ribosomal protein S4 [Neurospora crassa OR74A]
  misc_feature (1)..(262): NCBI GI: 154273927 Blast Desc: ribosomal protein S4 [Ajellomyces capsulatus NAm1] gi|150415423|gb|EDN10776.1| ribosomal protein S4 [Ajellomyces capsulatus NAm1]
  misc_feature (1)..(262): NCBI GI: 225680007 Blast Desc: 40S ribosomal protein S4-A [Paracoccidioides brasiliensis Pb03] gi|226291789|gb|EEH47217.1| 40S ribosomal protein S4 [Paracoccidioides brasiliensis Pb18]
  misc_feature (1)..(262): NCBI GI: 261204631 Blast Desc: ribosomal protein S4 [Ajellomyces dermatitidis SLH14081] gi|239587314|gb|EEQ69957.1| ribosomal protein S4 [Ajellomyces dermatitidis SLH14081] gi|239614147|gb|EEQ91134.1|
  misc_feature (1)..(262): NCBI GI: 226286329 Blast Desc: 40S ribosomal protein S4 [Paracoccidioides brasiliensis Pb01]
  misc_feature (1)..(262): NCBI GI: 116193489 Blast Desc: 40S ribosomal protein S4 [Chaetomium globosum CBS 148.51] gi|88182375|gb|EAQ89843.1| 40S ribosomal protein S4 [Chaetomium globosum CBS 148.51]
  misc_feature (1)..(260): NCBI GI: 256733591 Blast Desc: [Nectria haematococca mpVI 77-13-4]
  misc_feature (1)..(262): NCBI GI: 145610060 Blast Desc: 40S ribosomal protein S4-A [Magnaporthe grisea 70-15] gi|149210025|ref|XP_001522387.1| MGCH7_ch7g494 [Magnaporthe grisea 70-15] gi|86196449|gb|EAQ71087.1| MGCH7_ch7g494 grisea 40S
  misc_feature (1)..(260): NCBI GI: 242812945 Blast Desc: 40S ribosomal protein S4, [Talaromyces stipitatus ATCC 10500] gi|218714405|gb|EED13828.1| 40S ribosomal protein S4, [Talaromyces stipitatus ATCC 10500]
  misc_feature: Useful for introducing or modulating the production of volatile compounds
MGRGPKKHQKRLSAPSHWLLDKLSGTYAPKASPGPHKTRECLPLIIFIRNRLKYALNYRETRAILMQRLVKVDGKVRTDMTYPTGFMDVITIEKTGENFRLIYDTKGRYTVHRIQEEEAAYKLGKVKRVQLGKGGIPFLVTHDARTIRYPDPLIKVNDTVKIDLATGKIDSYIHFDTGAIAMITGGRNMGRVGVITHRERHDGGFNIVHIKDAIDNTFATRENNVFVIGDEKPWISLPKGKGVKLTIAEERDRRRAHALAGH

SEQ ID NO: 31857 - DNA, 2226 bp, Muscodor strobelii
  misc_feature: SGI EST ID NO. CUFF.75574.0
  misc_feature: Variant of the nucleotide sequence at SEQ ID NO 31855
agtagctcttatctaatcagttttggctagggcacaacagccctttttcgcatcctcgaaaattcctggcccatccatccaatccacccccaactttctgcagagccgtgaacaagtgcagacgcccattcccaccaccacacctctccgacaacccatcatcaccagtaagtcgtcgacaaaatgggccgtggacctaagaagcatcagaagcgcctaagcgccccctcgcactggcttctcgacaagctctcgggaacgtacgcgcccaaggcctcgcccggtccccacaagacgcgagaatgcctgcccctcatcatcttcatccgcaaccgcctcaagtacgcgctcaactaccgtgagacccgcgccatcctcatgcagcgcctcgtcaaggtcgacggcaaggtccgcaccgacatgacctaccccaccggcttcatggacgtcatcaccatcgagaagacgggcgagaacttccgcctcatctacgacaccaagggccgctacaccgtccaccgcatccaggaggaggaggccgcctacaagctgggcaaggtcaagcgagtgcaactgggcaagggcggcatcccattcttggttacgcacgatgcgagaacgtaagtgttctgtcagacatcattcagtcgttggatcaagctttggttgaaccaccctttcaacacgccacacgagaatgtgcttcgtcgagcttcgaaccgatggctggtatgtgcccccctctcgatccgattgctaacgtgatgttttttctgctacagcatccgctaccccgaccctctgatcaaggtcaacgacaccgtcaagatcgacctcgccactggcaagatcgactcctacatccacttcgacactggtgccatcgccatgatcaccggtggtcgcaacatgggtcgtgtgggtgtcatcactcaccgtgagcgccacgacggaggtttcaacatcgtccacatcaaggatgccattgacaacactttcgccacccgcgagaacaacgtcttcgtcattggtgacgagaagccctggatctctctgcccaagggtaagggtgtcaagcttaccattgccgaggagagagaccgccgccgtgcccacgctctggctggccactaagtggtttgacgactactaatgaacaaaaatggggaattctgcgggtcaagggttgacgattgttttccgcgcatgggaactggagtctggcatatccatattgttgctttaccgcgaatcggacaacgcggtctaggtctatgactaaatgagaaaaaataattgaccaaagattccccgtgccgatgctctcttgtcttctgtcttagatgaaatatatcctctcgcgcagctgccgcggctcaaatttcttcttctcgtccctttcctagggttatgccggtccctatgcggccttgccactttataacgtcgcatccggatagctacgcggctaacccgcacgaacccaaatgccgaggaggctgtcaaacgcgcagacaacgatgttgcaataggaggctcttccaatgacgattgccagccgctgcatgtgtctcgtgaaaatgcacaacatcgagcattgacgggcaactgcgctatcgtggttgcatcgaggcaatggtcgcctcatcgcatatatgagggagcccacatcggtcaggctgcatccgtcctctttgggagagatggcaacctattttcggcggcgtttatcccggctgttgcctcgttcggagagccttgtaggtaaggtgactgaactgcatgataatagagattatatagatacgatgcaatggtataatctagtgttatagggcgtgaacgtgtaaatgcgtatagttgtcaggactgtttgatggttggttgaaccactcgatggcaggtttggaccactggtgagatcgtggtataacttgataccaatgtatatatgcatgtggtagagaattaccaagtcaagtatgtgatatggatgactgttggagacacggcaccggatcggatcggatctctgggcgttggagggttggggttggggttcgtgatggtgttgctttggtttttgttgggcgactaacacggacggcgatatttgatggtttgcggttttgtaaccgagtaacgaagtctatactctgagatgagaatcacccagaactaccctatgatgtgcagattggttatctgaggatatacggactgcgc

SEQ ID NO: 31858 - DNA, 1518 bp, Muscodor strobelii
  misc_feature: SGI cDNA ID NO. 570973
  misc_feature: Encodes the peptide sequence at SEQ ID NO 31859
atggtgggcttcggactcgcaaaggctgtgctgcccgatgagagtaaaccgacacattttggggagaagataaagagtcctagatatgcttctctgaaagaaatggaggccgccttagccgagatacgcaccacattgaaaggtctcggagaagccgaagacataatttcaactgatgcagaggatctgcatgcgcacgggtactcagaatggtcgacggtgaatcctgatgtgttaccggttgctgttgcgtacccgaggtctacggaacaggtttcggtcattgcgagagtgtgtaataagtatcggatacccatcattggatattcggggggttcgagtcttgaggggaatttttcggcgccttatgggggtgttagtgttgattttgcttatatggatcaaatcattcagttcaataaggaggatatggatatcgttgtacagccgagtatagggtggcaagacctcaatgtgaagttgctggagatggatagtggtctcttctttcctgttgatcctggcccgagtgcgaaaattggtggtatgatcggtacgaattgctcaggcacaaatgctgttagatacggcacgatgaaggactgggtgatcaacctgactgtcgtattagcggatggcacagtcattaagacgaggaggcgtccgaggaaaagttcggccgggtataatctcaatgggatgtttgttggtagtgaagggacgcttggtttggtgactgaagcgaccctgaaactcgccatcatacccgaagagacctctgttgtagttgtatccttccccacaattcgagacgccgcatcagcagcagccgaagtcgcgcgtcaaggaattcccgtgggctcaatggagatcatggacgaagtacaaatgaaagtcgtaaatcttggcggtcaaacggcgccacgggtctggaaagaagcaccgacactatttttcaaattctccggtacgaaagtcagtgtgaaggataacatcaaacgagtccagcatatcacaaagaacaacaagggtagtaatttcgagtttgcgaaggatgaaaaggaggcaaaaatgctgtggagtgccaggaaagaggctttgtggtccatgcttgcgcttagaaaagaaggagatgaagtttggagcacggatgttgcggtgccatttagtagattggctgatttgatagagattagtaagaaggagatggatgacatggggctttttgcgtccattctgggacatattggggatggaaattttcacgagagtattttgtataacaggcaggatccggccgagcgagaaaaagtcgagaagtgtgttaagaggatggttgacagagcattagagatggagggtacgtgcacgggtgaacactcgattggatgggggaagaaggagagtttgttgaaggaggttgggcctgatactgttggtgttatgatggctgttaaggctgcgttggatccgaaatgggtgctaaatcccgggaagatctttgatgttccgaagtaa

SEQ ID NO: 31859 - protein, 505 aa, Muscodor strobelii
  misc_feature: SGI Peptide ID NO. 570973
  misc_feature (255)..(500): Pfam Id: PF02913 Pfam Desc: FAD linked oxidases, C-terminal domain
  misc_feature (80)..(219): Pfam Id: PF01565 Pfam Desc: FAD binding domain
  misc_feature (1)..(502): NCBI GI: 171685027 Blast Desc: protein product [Podospora anserina] gi|170942474|emb|CAP68126.1| protein product [Podospora anserina]
  misc_feature (29)..(502): NCBI GI: 85074684 Blast Desc: D-lactate dehydrogenase, mitochondrial precursor [Neurospora crassa OR74A] gi|28926023|gb|EAA35013.1| D-lactate dehydrogenase, mitochondrial precursor [Neurospora crassa OR74A]
  misc_feature (21)..(504): NCBI GI: 46128675 Blast Desc: FG08715.1 [Gibberella zeae PH-1]
  misc_feature (21)..(504): NCBI GI: 261353535 Blast Desc: D-lactate dehydrogenase [Verticillium albo-atrum VaMs.102]
  misc_feature (20)..(504): NCBI GI: 256733592 Blast Desc: [Nectria haematococca mpVI 77-13-4]
  misc_feature (26)..(490): NCBI GI: 116193485 Blast Desc: conserved [Chaetomium globosum CBS 148.51] gi|88182373|gb|EAQ89841.1| conserved [Chaetomium globosum CBS 148.51]
  misc_feature (23)..(502): NCBI GI: 189202026 Blast Desc: D-lactate dehydrogenase, mitochondrial precursor [Pyrenophora tritici-repentis Pt-1C-BFP] gi|187984448|gb|EDU49936.1| D-lactate dehydrogenase, precursor
  misc_feature (23)..(489): NCBI GI: 156035907 Blast Desc: SS1G_13158 [Sclerotinia sclerotiorum 1980] gi|154698562|gb|EDN98300.1| SS1G_13158 [Sclerotinia sclerotiorum 1980]
  misc_feature (20)..(505): NCBI GI: 240282194 Blast Desc: oxidoreductase [Ajellomyces capsulatus H143]
  misc_feature (38)..(505): NCBI GI: 261204629 Blast Desc: oxidoreductase [Ajellomyces dermatitidis SLH14081] gi|239587313|gb|EEQ69956.1| oxidoreductase [Ajellomyces dermatitidis SLH14081]
  misc_feature (22)..(503): SWISSPROT Homolog: EC 1.1.2.4 D-lactate dehydrogenase (cytochrome)
MVGFGLAKAVLPDESKPTHFGEKIKSPRYASLKEMEAALAEIRTTLKGLGEAEDIISTDAEDLHAHGYSEWSTVNPDVLPVAVAYPRSTEQVSVIARVCNKYRIPIIGYSGGSSLEGNFSAPYGGVSVDFAYMDQIIQFNKEDMDIVVQPSIGWQDLNVKLLEMDSGLFFPVDPGPSAKIGGMIGTNCSGTNAVRYGTMKDWVINLTVVLADGTVIKTRRRPRKSSAGYNLNGMFVGSEGTLGLVTEATLKLAIIPEETSVVVVSFPTIRDAASAAAEVARQGIPVGSMEIMDEVQMKVVNLGGQTAPRVWKEAPTLFFKFSGTKVSVKDNIKRVQHITKNNKGSNFEFAKDEKEAKMLWSARKEALWSMLALRKEGDEVWSTDVAVPFSRLADLIEISKKEMDDMGLFASILGHIGDGNFHESILYNRQDPAEREKVEKCVKRMVDRALEMEGTCTGEHSIGWGKKESLLKEVGPDTVGVMMAVKAALDPKWVLNPGKIFDVPK

SEQ ID NO: 31860 - DNA, 2107 bp, Muscodor strobelii
  misc_feature: SGI EST ID NO. CUFF.75577.0
  misc_feature: Variant of the nucleotide sequence at SEQ ID NO 31858
attttttggtggtgaagttatcgtgaccttgagagtttcagtcctcttctccgtacttattataccaacaaagaatcgagatgtcaacaagacaagcaacccgtcgtctagccagcggcgcatttagacgctcgttctcaagcagaccggcattgagacgtcccaaagagaaaataccggaacgaatcgaagttggtgtgaagtcgtcatggacgggaagatctgtgttcgcgttatctgcagcggcggggatggtgggcttcggactcgcaaaggctgtgctgcccgatgagagtaaaccgacacattttggggagaagataaagagtcctagatatgcttctctgaaagaaatggaggccgtacgtctttcttactcacctttccatgtgtcttttcgcgttccgccaatacccctcctaacataaacgccaggccttagccgagatacgcaccacattgaaaggtctcggagaagccgaagacataatttcaactgatgcagaggatctgcatgcgcacgggtactcagaatggtcgacggtgaatcctgatgtgttaccggttgctgttgcgtacccgaggtctacggaacaggtttcggtcattgcgagagtgtgtaataagtatcggatacccatcattggatattcggggggttcgagtcttgaggggaatttttcggcgccttatgggggtgttagtgttgattttgcttatatggatcaaatcattcagttcaataaggaggatatggatatcgttgtacagccgagtatagggtggcaagacctcaatgtgaagttgctggagatggatagtggtctcttctttcctgttgatcctggcccgagtgcgaaaattggtggtatgatcggtacgaattgctcaggcacaaatgctgttagatacggcacgatgaaggactgggtgatcaacctgactgtcgtattagcggatggcacagtcattaagacgaggaggcgtccgaggaaaagttcggccgggtataatctcaatgggatgtttgttggtagtgaagggacgcttggtttggtgactgaagcgaccctgaaactcgccatcatacccgaagagacctctgttgtagttgtatccttccccacaattcgagacgccgcatcagcagcagccgaagtcgcgcgtcaaggaattcccgtgggctcaatggagatcatggacgaagtacaaatgaaagtcgtaaatcttggcggtcaaacggcgccacgggtctggaaagaagcaccgacactatttttcaaattctccggtacgaaagtcagtgtgaaggataacatcaaacgagtccagcatatcacaaagaacaacaagggtagtaatttcgagtttgcgaaggatgaaaaggaggcaaaaatgctgtggagtgccaggaaagaggctttgtggtccatgcttgcgcttagaaaagaaggagatgaagtttggagcacggatgttgcggtgccatttagtagattggctgatttgatagagattagtaagaaggagatggatgacatggggctttttgcgtccattctgggacatattggggatggaaattttcacgagagtattttgtataacaggcaggatccggccgagcgagaaaaagtcgagaagtgtgttaagaggatggttgacagagcattagagatggagggtacgtgcacgggtgaacactcgattggatgggggaagaaggagagtttgttgaaggaggttgggcctgatactgttggtgttatgatggctgttaaggctgcgttggatccgaaatgggtgctaaatcccgggaagatctttgatgttccgaagtaaaacgtatgggctgtgattatacgggtggaagtagtgtgaggagaattcaggctatctcatggtcaaatatgatggctcatctttggaggacagtgtgagagcagaatcacatccatttgggcaatttttagcatgaaggcatgtcgaaggctgcctccgtatggctctccatgtcttggagagtgccactgtgtcatgctagttggcttttgattttgctattggaagaagagcatctttggaatgcgaaactacccccttattg

SEQ ID NO: 31861 - DNA, 3984 bp, Muscodor strobelii
  misc_feature: SGI cDNA ID NO. 570974
  misc_feature: Encodes the peptide sequence at SEQ ID NO 31862
atgtcacaactcaatccgccttcccagtatgggagaggcaggggccggcggccggcgggataccaaatgagacttccgcgtcagcagcttcaaatgcgcccggattgggagtcctgggagtcgttgagaatccatgtcttcaaacttccgaagaatgttcagactctagatatatggacgcatttcaatcagtatggcaacattatctggattgagatatccaaagaccagtcgaggcctgggctgtcggtcgccaagcttcgttttcgtcctccacctaaccgtcagttttggggcagcaaaacagagatgtctattcagggcaccttctataaggtcgatccgattcttcagcaggacgactcttcctccaatctgattaagggtccacatggccacagctatcctaaagaattacgtctcgagccttcatcgttacaattcggaattctcaaacaagaggacgaattcatggccatgcgatcacttgcggagatcgagcagaaacccctcacttttgttgtggacttgaaacacagaaagataattctacgatttttctgcaacatcaacaatcacattgcagaatataagacggagatcttcttttcacacatgacaaagctcgttttgcttgaggaggaaaaggtgtgctccttgatgatcccactgcaaactccccctatcttctggaagagaaccaacaaaccagagaaaacgcattcagagagtttgagttggacagagaatgaaacttggaaccgagcagcagagattgcctacgacacagcttcgtccaagaacgacaaggcttgcctttggagaaatcaccagttcatcgacatcggacggtggactgtctacaaaatcatgttctccaagctcgatgcaaacatgtcgacattgcagcacatatacagagctctaaaagacttcaatattccaatggatatccaacatggtatatgcaccatccctgctgaggaacttaacttttggagactcctagagccgaaagcgacacctagtatatcgcactctaacctcgacctccttgctaccaccgacgagttcaatattccatttgaagtgcaatatcagcttgaagtctgcattgcgcagggcttcctcaacgaggcaaacctcggtgccgattttcttcatgaacttgtcaatcttgtgagcaagagcaaggggaagagaaacaaggcaaaagaccttctcacttacgttgctgaagaggcgcgcgttgatgagatgcaaaagattagactctatccaaaaagattgtatgatccgatggtattattccaggacaggttggccctcagtcactatcccgagcttggagcacccgagcattgtacgatgatcagaaaggtcatcatcacgccatcaaccattatccccagcacgcctattccagaagcatcaaatcgggtcttgcgtcactatgcagagttctcggatcgctttctgcgagttcaattctccgacgaattggtgaagggcaaaatgtatgcttgtcctaacagcaaacgcgacaatccgttattcaaccgggttttccgagccctggcaaacggcgttcaagtcggcggtcgacattttgagtttcttgcctttggcaattcacagctccgagaacacggtgcatggtttttttctaagacagaacatctgacttgtgacgacattcggcagtggatgggcgatgtcaaccacatcaaagttgtcgccaaatacgctgccaggcttggccaatgtttttctacgacacgagcagccaaaggtatcccgatcagccagaagatcgagcatatcgaagatgttgagcgcaatggatggtgtttcactgatggcgttggcaagatttctcctaggcttgctgaatacgtggcgaagcatctacgaatctttaaggcaaatcctccttctgcttatcaaatccgcataggtggtagcaaaggtttgctggtggtatgccccgatcttccgttcaatgaaattcagctgcgcccatcgcaacgcaagttcgaagcaatttcaaagcaactcgaaattatcagagtgtctcaattcactgtggcaacgctcaatcggcagactattacaatacttagctgtttgggcgtcccagacgaagtttttcttcgaatgcagcaaacacagctgagggactataacaaggcaatggaagaccctgcagttgcaatgcatttgctcacaagatttgtcgatcagaatgaggttagcaccaaaattgcgcagatgatcacggatggattcatggatgcagaagagccgtttttcatgtggctccttcaagtctggcgcgcctggtcacagagaatgctccgtgaaaaggcacgaatcgtcgttgaacagggggcgtttgtgtttggctgtgtggacgagacgtccacactccgcggctactatgacaagactagcgatgcctccaagcataattataccgctgacgagaataacgagggcaacggcgagggcgtacatgaggactctgacaagcaggagcttgcccaggtcttcctccagatacccaagatgaccagccgaggtccttcccaaaccgactatgtcgtcgtggaggggccctgcgtggttggccgcaatccatctctacatccaggagatatcaggattgtcgaggcggtagatgtccccgcacttcatcacattcgcgattgtgtagttttcccttccacgggtgatcgagacatcccgtcgatgtgttccggcggagaccttgatggagatgacttttttgtcatctgggacccggatctacttccaaaagagtggaattatccgcctatgaccaatgacgccgtgaaaccaaaagagcttgatcgagatgtccaggtagaggatctcataggattctttgcggaatatatgaagaacgattcccttcccagtattgcgactgcacatctcgcccaagcagatcgacttaaacacgacggaggaccaggacccagacattctacatgtgtcaagcttgctcgcctgcactccaatgctgttgattacaacaagtctggtgaacctgcccatatggatccagcgctacgaccgcgggagaaaccacatttcacggaacccaccggcaagcattacaaatctcgcgaaatcctaggacaactgtacgatgacatcagaagagctgaattttcgccaaactacagtggcaagttcgacgaacgtatcatgcgccgcttcgacctatctgatgaaattctcaagcaggccaggatcatcaagagacaacacgacaaagcactcagacagatcatgaaccagcgggagattggcacggaatttgaggtctggagcaccttcatcctcacgaagccgcgtttcagcagcgagtacaaactacaagaggacatgggtgtcatcatacatgcgcacaaggatcggtttcgaaatgcctgcatccgagtcgcaggctctcgctatcctgagaagctataccctttcatcgcggcagcatatcgagtaacctgggaggaggtccaggttgcccttcgtaaaagagcagaaccatctggtgataacggtgacgagccgatgccggcgcagcaggagcaggagcagccgatgcccctgatcagctttccatggatctttgaacgagagatgggtctaattgcgaggatgaaggagaagttcgagctggaagactacccggcaatcagtgacgatgcactattggagacggagtacgaagaagctgagtatgaggaactcctattggccggcgtattcgacccaaccctcagagacgtggagggtacagacggaccaatctcacctggcgaactcgttgacaccaccctaaacagctctcccgaagctacgggacctttcgaagaagaggaagtcgaggaggaagtattcatagatctcagcggcgagacgaatactgaagcactcgagagactgatgctaggctaa

SEQ ID NO: 31862 - protein, 1327 aa, Muscodor strobelii
  misc_feature: SGI Peptide ID NO. 570974
  misc_feature (607)..(1024): Pfam Id: PF05183 Pfam Desc: RNA dependent RNA polymerase
  misc_feature (849)..(1024): Pfam Id: PF05183 Pfam Desc: RNA dependent RNA polymerase
  misc_feature (607)..(815): Pfam Id: PF05183 Pfam Desc: RNA dependent RNA polymerase
  misc_feature (30)..(1227): NCBI GI: 156035913 Blast Desc: SS1G_13161 [Sclerotinia sclerotiorum 1980] gi|154698565|gb|EDN98303.1| SS1G_13161 [Sclerotinia sclerotiorum 1980]
  misc_feature (222)..(1227): NCBI GI: 154290540 Blast Desc: BC1G_15614 [Botryotinia fuckeliana B05.10] gi|150847509|gb|EDN22702.1| BC1G_15614 [Botryotinia fuckeliana B05.10]
  misc_feature (16)..(1286): NCBI GI: 258573507 Blast Desc: conserved [Uncinocarpus reesii 1704] gi|237901201|gb|EEP75602.1| conserved [Uncinocarpus reesii 1704]
  misc_feature (36)..(1227): NCBI GI: 119192036 Blast Desc: CIMG_00395 [Coccidioides immitis RS]
  misc_feature (16)..(1233): NCBI GI: 116193483 Blast Desc: CHGG_06459 [Chaetomium globosum CBS 148.51] gi|88182372|gb|EAQ89840.1| CHGG_06459 [Chaetomium globosum CBS 148.51]
  misc_feature (4)..(1227): NCBI GI: 240106252 Blast Desc: RNA-directed RNA polymerase, [Coccidioides posadasii C735 delta SOWgp]
  misc_feature (9)..(1228): NCBI GI: 13641451 Blast Desc: suppressor of ascus dominance [Neurospora crassa]
  misc_feature (42)..(1227): NCBI GI: 256733593 Blast Desc: NECHADRAFT_91974 [Nectria haematococca mpVI 77-13-4]
  misc_feature (28)..(1227): NCBI GI: 115402503 Blast Desc: conserved [Aspergillus terreus NIH2624] gi|114189174|gb|EAU30874.1| conserved [Aspergillus terreus NIH2624]
  misc_feature (31)..(1227): NCBI GI: 46128677 Blast Desc: FG08716.1 [Gibberella zeae PH-1]
  misc_feature (57)..(1228): SWISSPROT Homolog: EC 2.7.7.48 RNA-directed RNA polymerase
MSQLNPPSQYGRGRGRRPAGYQMRLPRQQLQMRPDWESWESLRIHVFKLPKNVQTLDIWTHFNQYGNIIWIEISKDQSRPGLSVAKLRFRPPPNRQFWGSKTEMSIQGTFYKVDPILQQDDSSSNLIKGPHGHSYPKELRLEPSSLQFGILKQEDEFMAMRSLAEIEQKPLTFVVDLKHRKIILRFFCNINNHIAEYKTEIFFSHMTKLVLLEEEKVCSLMIPLQTPPIFWKRTNKPEKTHSESLSWTENETWNRAAEIAYDTASSKNDKACLWRNHQFIDIGRWTVYKIMFSKLDANMSTLQHIYRALKDFNIPMDIQHGICTIPAEELNFWRLLEPKATPSISHSNLDLLATTDEFNIPFEVQYQLEVCIAQGFLNEANLGADFLHELVNLVSKSKGKRNKAKDLLTYVAEEARVDEMQKIRLYPKRLYDPMVLFQDRLALSHYPELGAPEHCTMIRKVIITPSTIIPSTPIPEASNRVLRHYAEFSDRFLRVQFSDELVKGKMYACPNSKRDNPLFNRVFRALANGVQVGGRHFEFLAFGNSQLREHGAWFFSKTEHLTCDDIRQWMGDVNHIKVVAKYAARLGQCFSTTRAAKGIPISQKIEHIEDVERNGWCFTDGVGKISPRLAEYVAKHLRIFKANPPSAYQIRIGGSKGLLVVCPDLPFNEIQLRPSQRKFEAISKQLEIIRVSQFTVATLNRQTITILSCLGVPDEVFLRMQQTQLRDYNKAMEDPAVAMHLLTRFVDQNEVSTKIAQMITDGFMDAEEPFFMWLLQVWRAWSQRMLREKARIVVEQGAFVFGCVDETSTLRGYYDKTSDASKHNYTADENNEGNGEGVHEDSDKQELAQVFLQIPKMTSRGPSQTDYVVVEGPCVVGRNPSLHPGDIRIVEAVDVPALHHIRDCVVFPSTGDRDIPSMCSGGDLDGDDFFVIWDPDLLPKEWNYPPMTNDAVKPKELDRDVQVEDLIGFFAEYMKNDSLPSIATAHLAQADRLKHDGGPGPRHSTCVKLARLHSNAVDYNKSGEPAHMDPALRPREKPHFTEPTGKHYKSREILGQLYDDIRRAEFSPNYSGKFDERIMRRFDLSDEILKQARIIKRQHDKALRQIMNQREIGTEFEVWSTFILTKPRFSSEYKLQEDMGVIIHAHKDRFRNACIRVAGSRYPEKLYPFIAAAYRVTWEEVQVALRKRAEPSGDNGDEPMPAQQEQEQPMPLISFPWIFEREMGLIARMKEKFELEDYPAISDDALLETEYEEAEYEELLLAGVFDPTLRDVEGTDGPISPGELVDTTLNSSPEATGPFEEEEVEEEVFIDLSGETNTEALERLMLG

SEQ ID NO: 31863 - DNA, 160 bp, Muscodor strobelii
  misc_feature: SGI EST ID NO. CUFF.75377.0
  misc_feature: Variant of the nucleotide sequence at SEQ ID NO 31861
attcggcagtggatgggcgatgtcaaccacatcaaagttgtcgccaaatacgctgccaggcttggccaatgtttttctacgacacgagcagccaaaggtatcccgatcagccagaagatcgagcatatcgaagatgttgagcgcaatggatggtgtttca

SEQ ID NO: 31864 - DNA, 465 bp, Muscodor strobelii
  misc_feature: SGI cDNA ID NO. 570975
  misc_feature: Encodes the peptide sequence at SEQ ID NO 31865
atggccgacgttcaggagctgctcaagaagaaattcggcggtgccgcccccgccagaaccggtggaaagggcacaccgcgccacaagcagaagcgcaacgtcgcccgcagcgccaacgacgacaagaagctccaggccaccctcaagaagctcaacacccagcccatccaggccatcgaggaggtcaacatgttcaagagcgacggaaacgtcatccacttctccgcccccaaggtccacgctgctgtcccctctaacaccttcgccatctacggtgccggtgaggacaaggagctgactgagctcgtccccggcatcctgaaccagcttggccccgactcccttgcttccctccgtaagctcgccgagagctaccagagcatgaccaaggacaacaaggaggctgacgacgacgacattcccgacctggtcgctggcgagaacttcgagagcaaggtcgaataa

SEQ ID NO: 31865 - protein, 154 aa, Muscodor strobelii
  misc_feature: SGI Peptide ID NO. 570975
  misc_feature (39)..(98): Pfam Id: PF01849 Pfam Desc: NAC domain
  misc_feature (1)..(154): NCBI GI: 38567258 Blast Desc: transcription factor BTF3a [Neurospora crassa]
  misc_feature (1)..(154): NCBI GI: 164427263 Blast Desc: NCU03148 [Neurospora crassa OR74A] gi|189041717|sp|Q7SDU4.2|NACB_NEUCR RecName: Full=Nascent polypeptide-associated complex subunit beta; Short=NAC-beta;
  misc_feature (1)..(154): NCBI GI: 171683875 Blast Desc: protein product [Podospora anserina] gi|170941898|emb|CAP67550.1| protein product [Podospora anserina]
  misc_feature (1)..(154): NCBI GI: 256734083 Blast Desc: [Nectria haematococca mpVI 77-13-4]
  misc_feature (1)..(154): NCBI GI: 116193137 Blast Desc: conserved [Chaetomium globosum CBS 148.51] gi|121785559|sp|Q2H4X9.1|NACB_CHAGB RecName: Full=Nascent polypeptide-associated complex subunit beta; Short=NAC-beta; CBS
  misc_feature (1)..(154): NCBI GI: 39970493 Blast Desc: conserved [Magnaporthe grisea 70-15] gi|149209953|ref|XP_001522351.1| MGCH7_ch7g458 [Magnaporthe grisea 70-15] gi|152032614|sp|A4RC23.1|NACB_MAGGR RecName: beta;
  misc_feature (1)..(154): NCBI GI: 261353523 Blast Desc: nascent polypeptide-associated complex subunit beta [Verticillium albo-atrum VaMs.102]
  misc_feature (22)..(154): NCBI GI: 119467320 Blast Desc: nascent polypeptide-associated complex (NAC) subunit, [Neosartorya fischeri NRRL 181] gi|143355011|sp|A1DL98.1|NACB_NEOFI RecName: Full=Nascent complex
  misc_feature (22)..(154): NCBI GI: 70984591 Blast Desc: nascent polypeptide-associated complex (NAC) subunit [Aspergillus fumigatus Af293] gi|74667384|sp|Q4WCX4.1|NACB_ASPFU RecName: Full=Nascent polypeptide-associated complex subunit
  misc_feature (22)..(154): NCBI GI: 121703980 Blast Desc: nascent polypeptide-associated complex (NAC) subunit, [Aspergillus clavatus NRRL 1] gi|143354997|sp|A1CMP1.1|NACB_ASPCL RecName: Full=Nascent polypeptide-associated complex subunit NRRL
MADVQELLKKKFGGAAPARTGGKGTPRHKQKRNVARSANDDKKLQATLKKLNTQPIQAIEEVNMFKSDGNVIHFSAPKVHAAVPSNTFAIYGAGEDKELTELVPGILNQLGPDSLASLRKLAESYQSMTKDNKEADDDDIPDLVAGENFESKVE

SEQ ID NO: 31866 - DNA, 1268 bp, Muscodor strobelii
  misc_feature: SGI EST ID NO. CUFF.75498.3
  misc_feature: Variant of the nucleotide sequence at SEQ ID NO 31864
cgggcgacgcacctacccaggagcactggccaaacggaaggagggtttctcctctagcgattgggattgcaaagtcttggcaacgcacatacaattttctgccgaccaaccttgcctgctgcatcgccgaccgaacgccttgtgattcaatccccagacgacggcaggaacacgcgattttcgagacaatccacaccttccgccttctaccccaacatctcgaggaagcttgttcgacaccatggccgacgttcaggagctgctcaagaagaaattcggcggtgccgcccccgccagaaccggtggaaagggcacaccgcgccacaagcagaagcgcaacgtcgcccgcagcgccaacgacgacaagaagctccaggccaccctcaagaagctcaacacccagcccatccaggccatcgaggaggtcaacatgttcaagagcgacggaaacgtcatccacttctccgcccccaaggtccacgctgctgtcccctctaacaccttcgccatctacggtgccggtgaggacaaggagctgactgagctcgtccccggcatcctgaaccagcttggccccgactcccttgcttccctccgtaagctcgccgagagctaccagagcatgaccaaggacaacaaggaggctgacgacgacgacattcccgacctggtcgctggcgagaacttcgagagcaaggtcgaataagaagccatttgagctaatcacgtgaaacttccccacattgaaacaaaccttctcctcaaaacgatgtaacgaacaaagcgtctctcggaaaacggaaaatgggccggggagaacgagtaattgatatttgatcttttttcactgtcggcggggtgaaatccgagagtacccgggagggagctgagggaaacagaaacacggaatttcttctgtcttctcccacacaatccacatttggggctgttgcactcggggaattcttgatcttgatgccacggtctgaagggcattaggacaggaatcgatactgttgttgaagctggcgagccttagcactgcctgggtccagccccttttcttgctttggttatcaggggtttgatgccatcgcttgttgaaatgaaataagaaaaaaattccccgaacaatgtaataactgatgagtttttgatatgagcaatggtgacatcgctacaaaatttgctacagaagagaatgtacttccctcacaacggtatttctgaatcaaaaattccatcatgagtacacgatctactccgag

SEQ ID NO: 31867 - DNA, 2913 bp, Muscodor strobelii
  misc_feature: SGI cDNA ID NO. 570976
  misc_feature: Elevated expression when VOC is produced
  misc_feature: Encodes the peptide sequence at SEQ ID NO 31868
atggctaacctgtccctaggaaagattcaggccgcattggcttctgcgacaaacgaagtaacagtcgccgccgcgaacatcaatttcgactttactttgatgaagtttgaggcaccgcctgaataccagtctctttcaaccattttgactacaaagcgtagagaaaatgcggaacatggagatatccacgttacagcccgccgcctcgcagcgttgttcgagggtgtgtgtacaaaaaccccgaatctaatcaaagcttacggaaagagagcctctgagatctccgaatccgcgaagaagatgccatcgaaggatgaaggcgggatgtttgcggagtatgtcgggattgatgcaacgtctatctgggctgctgcaacttcgagccagtcaggtagtgcaattcaagtccatcttctcgcctgtctactagcacgcatgtggactcatgcagaggcagtctcaatttgggaccagatcgttgcgtcgaggcggcacgagatagcagaaaactttgaagacaacagcagtgtcccatttgctgctctagcggctgctacacaacatgagatatctctcagcagtcttgcaaattgggacgcgagcgctcgatcatggcttaggacggcagactcattgaagaataaacaacagactcaattctacttgatctggaagaatattagcttgcccgtcaataatgagactggtctctaccgcagcgttatgaccgcatggtcctcggctgtgaggacactcaatgaagttatcatgggtgcgccacatgttgtccatgacggatctatcctacttgccatgtcctcatggcacatctatccagaccttcttgtttacgggtccgacgcagctcagaagtccaccactgaagtgcggatggaagacgacctcatcgccgagggaggcatcttgtctcttggtctatcgaaacccggcaaagcgtacaccaacgacccagatcgtgagaacacaggagttaattggtcggtgcctctagatcgactcaagcattacggcaagtcggtccggagaacgcgaacgctgcttgatgacggacaccggctgtcttttcaagatctactaacggttaacctgggtgctatcttggccaaatggcatgttgctcggaaaaacaggcaatggtacatcacctttcttataaaactggtgtcgttcgtcaaaagtcaagacgaagaagacaatactatgcccgtcgataagagtaattggatggacatgctactagagccggctttattctacatgcaagctcctgaaaaagcggactttcttcttgatttgggatttcggcgtcaggtcttcgtcaagcagcccgggctagatagcggtttcaccacgttgcaacctggaatggattggccggagcttttcggtctctaccgcatggaaactctgcaatccatcctcaatggggagacagagaatgtcaatttcttgctccacgtctaccatcaacattttcgaagcatcccagatgcgattattgcaggcattgcgaaaggtaacggtaaacaagaggattatcgattttgggcaacaaaatggttaagcttatatccgccgggctccaatcagaccatcgagactcaattctggtctcggacgattcggcgacttcccacgcaaacctgccttcctgagggatttgttcacaccgataaccaagtgtataatatattagtaggggatccacgctttgctgcaatttacgtcagaagctctgtggttctaagggacccagtgttacgaacctggcagacgaagccgtggaatcccggtgaggtgcaatggtgtctggagtcgggtctagtttcgcggaagagattagaaatccatcttcatgcgactctcaactctcactgccgtatgcatctcggcttcctgggagccatcttccgattgtactcaggcaagtcgatggaaggatcgacaatctcctccaggatcctcgagaggacattgcttaaaccttggagaaaacgtcgaccgctctatccgtgggtattggataagactcaagataccaacaagcagttaaagtctgatgatatagaacttccttccctagagagcaatcaagctatggtcgttttatgctatctagaaacagggtctatgggcattcaggttttgtcggacagcaccctaaatggtatcattggattcgcagtgggtgattcaatattggtgcgatcagagcttctgagagatccctggcagggtaccaacacggccgcctatcggttgccggccatctcaagacttctcggtaacgtaggaaaacctgggctcaccttattcagcacgccttcggacctcatggtcgctgatcgcgacccgggcgcgtggagaatggccaattacgccgcgtttgatgggtcgttcattaattgcttcactcaaacctcgatgcatctcaaaattctcggctggtcccagccgattaccgatgacgaggcacttggacagctaactgcggaggcacacatagctgaagccgttgtatccgttcatgataggggcgtctggctgggcgatattgacatactatcagcactgccgaaagtgatgcacgcgcggtctgactgcgtgagcaatcacgatgactctagtagcatcgacgcagaccactgtggatcagacgacgcggtagcactagacacctgggacgaggtactggactgtcctcagaatggcatagtggttgttcgatcccaaggaaactgggtggcgcggctcgcgctgatagggatgctagcgcaccataaggatattatttccaaggtttctgtttgtccgggtgactcatctaatggctgttggcgctgtctcagtaggcttaggaatgacgttgggtttagggtcttcatcatttaa

SEQ ID NO: 31868 - protein, 970 aa, Muscodor strobelii
  misc_feature: SGI Peptide ID NO. 570976
  misc_feature (5)..(965): NCBI GI: 145609608 Blast Desc: MGG_09129 [Magnaporthe grisea 70-15] gi|145017020|gb|EDK01383.1| MGG_09129 [Magnaporthe grisea 70-15]
  misc_feature (5)..(965): NCBI GI: 149210921 Blast Desc: MGCH7_ch7g933 [Magnaporthe grisea 70-15] gi|86196888|gb|EAQ71526.1| MGCH7_ch7g933 [Magnaporthe grisea 70-15]
  misc_feature (5)..(955): NCBI GI: 46137867 Blast Desc: FG10449.1 [Gibberella zeae PH-1]
  misc_feature (4)..(410): NCBI GI: 169604668 Blast Desc: SNOG_05349 [Phaeosphaeria nodorum SN15] gi|160706620|gb|EAT87740.2| SNOG_05349 [Phaeosphaeria nodorum SN15]
  misc_feature (7)..(958): NCBI GI: 145244114 Blast Desc: An11g05770 [Aspergillus niger] gi|134079251|emb|CAK40734.1| [Aspergillus niger]
  misc_feature (4)..(492): NCBI GI: 169605903 Blast Desc: SNOG_05984 [Phaeosphaeria nodorum SN15] gi|111065928|gb|EAT87048.1| SNOG_05984 [Phaeosphaeria nodorum SN15]
  misc_feature (4)..(491): NCBI GI: 115492241 Blast Desc: [Aspergillus terreus NIH2624] gi|114197608|gb|EAU39308.1| [Aspergillus terreus NIH2624]
  misc_feature (4)..(374): NCBI GI: 240111731 Blast Desc: CPC735_011940 [Coccidioides posadasii C735 delta SOWgp]
  misc_feature (6)..(491): NCBI GI: 238844746 Blast Desc: conserved [Microsporum canis CBS 113480]
  misc_feature (8)..(352): NCBI GI: 169598688 Blast Desc: SNOG_02149 [Phaeosphaeria nodorum SN15] gi|111069241|gb|EAT90361.1| SNOG_02149 [Phaeosphaeria nodorum SN15]
  misc_feature: Useful for introducing or modulating the production of volatile compounds
MANLSLGKIQAALASATNEVTVAAANINFDFTLMKFEAPPEYQSLSTILTTKRRENAEHGDIHVTARRLAALFEGVCTKTPNLIKAYGKRASEISESAKKMPSKDEGGMFAEYVGIDATSIWAAATSSQSGSAIQVHLLACLLARMWTHAEAVSIWDQIVASRRHEIAENFEDNSSVPFAALAAATQHEISLSSLANWDASARSWLRTADSLKNKQQTQFYLIWKNISLPVNNETGLYRSVMTAWSSAVRTLNEVIMGAPHVVHDGSILLAMSSWHIYPDLLVYGSDAAQKSTTEVRMEDDLIAEGGILSLGLSKPGKAYTNDPDRENTGVNWSVPLDRLKHYGKSVRRTRTLLDDGHRLSFQDLLTVNLGAILAKWHVARKNRQWYITFLIKLVSFVKSQDEEDNTMPVDKSNWMDMLLEPALFYMQAPEKADFLLDLGFRRQVFVKQPGLDSGFTTLQPGMDWPELFGLYRMETLQSILNGETENVNFLLHVYHQHFRSIPDAIIAGIAKGNGKQEDYRFWATKWLSLYPPGSNQTIETQFWSRTIRRLPTQTCLPEGFVHTDNQVYNILVGDPRFAAIYVRSSVVLRDPVLRTWQTKPWNPGEVQWCLESGLVSRKRLEIHLHATLNSHCRMHLGFLGAIFRLYSGKSMEGSTISSRILERTLLKPWRKRRPLYPWVLDKTQDTNKQLKSDDIELPSLESNQAMVVLCYLETGSMGIQVLSDSTLNGIIGFAVGDSILVRSELLRDPWQGTNTAAYRLPAISRLLGNVGKPGLTLFSTPSDLMVADRDPGAWRMANYAAFDGSFINCFTQTSMHLKILGWSQPITDDEALGQLTAEAHIAEAVVSVHDRGVWLGDIDILSALPKVMHARSDCVSNHDDSSSIDADHCGSDDAVALDTWDEVLDCPQNGIVVVRSQGNWVARLALIGMLAHHKDIISKVSVCPGDSSNGCWRCLSRLRNDVGFRVFII

SEQ ID NO: 31869 - DNA, 3335 bp, Muscodor strobelii
  misc_feature: SGI EST ID NO. CUFF.75399.0
  misc_feature: Variant of the nucleotide sequence at SEQ ID NO 31867
cgaacatcaatttcgactttactttgatgaagtttgaggcaccgcctgaataccagtctctttcaaccattttgactacaaagcgtagagaaaatgcggaacatggagatatccacgttacagcccgccgcctcgcagcgttgttcgagggtgtgtgtacaaaaaccccgaatctaatcaaagcttacggaaagagagcctctgagatctccgaatccgcgaagaagatgccatcgaaggatgaaggcgggatgtttgcggagtatgtcgggattgatgcaacgtctatctgggctgctgcaacttcgagccagtcaggtagtgcaattcaagtccatcttctcgcctgtctactagcacgcatgtggactcatgcagaggcagtctcaatttgggaccagatcgttgcgtcgaggcggcacgagatagcagaaaactttgaagacaacagcagtgtcccatttgctgctctagcggctgctacacaacatgagatatctctcagcagtcttgcaaattgggacgcgagcgctcgatcatggcttaggacggcagactcattgaagaataaacaacagactcaattctacttgatctggaagaatattagcttgcccgtcaataatgagactggtctctaccgcagcgttatgaccgcatggtcctcggctgtgaggacactcaatgaagttatcatgggtgcgccacatgttgtccatgacggatctatcctacttgccatgtcctcatggcacatctatccagaccttcttgtttacgggtccgacgcagctcagaagtccaccactgaagtgcggatggaagacgacctcatcgccgagggaggcatcttgtctcttggtctatcgaaacccggcaaagcgtacaccaacgacccagatcgtgagaacacaggagttaattggtcggtgcctctagatcgactcaagcattacggcaagtcggtccggagaacgcgaacgctgcttgatgacggacaccggctgtcttttcaagatctactaacggttaacctgggtgctatcttggccaaatggcatgttgctcggaaaaacaggcaatggtacatcacctttcttataaaactggtgtcgttcgtcaaaagtcaagacgaagaagacaatactatgcccgtcgataagagtaattggatggacatgctactagagccggctttattctacatgcaagctcctgaaaaagcggactttcttcttgatttgggatttcggcgtcaggtcttcgtcaagcagcccgggctagatagcggtttcaccacgttgcaacctggaatggattggccggagcttttcggtctctaccgcatggaaactctgcaatccatcctcaatggggagacagagaatgtcaatttcttgctccacgtctaccatcaacattttcgaagcatcccagatgcgattattgcaggcattgcgaaaggtaacggtaaacaagaggattatcgattttgggcaacaaaatggttaagcttatatccgccgggctccaatcagaccatcgagactcaattctggtctcggacgattcggcgacttcccacgcaaacctgccttcctgagggatttgttcacaccgataaccaagtgtataatatattagtaggggatccacgctttgctgcaatttacgtcagaagctctgtggttctaagggacccagtgttacgaacctggcagacgaagccgtggaatcccggtgaggtgcaatggtgtctggagtcgggtctagtttcgcggaagagattagaaatccatcttcatgcgactctcaactctcactgccgtatgcatctcggcttcctgggagccatcttccgattgtactcaggcaagtcgatggaaggatcgacaatctcctccaggatcctcgagaggacattgcttaaaccttggagaaaacgtcgaccgctctatccgtgggtattggataagactcaagataccaacaagcagttaaagtctgatgatatagaacttccttccctagagagcaatcaagctatggtcgttttatgctatctagaaacagggtctatgggcattcaggttttgtcggacagcaccctaaatggtatcattggattcgcagtgggtgattcaatattggtgcgatcagagcttctgagagatccctggcagggtaccaacacggccgcctatcggttgccggccatctcaagacttctcggtaacgtaggaaaacctgggctcaccttattcagcacgccttcggacctcatggtcgctgatcgcgacccgggcgcgtggagaatggccaattacgccgcgtttgatgggtcgttcattaattgcttcactcaaacctcgatgcatctcaaaattctcggctggtcccagccgattaccgatgacgaggcacttggacagctaactgcggaggcacacatagctgaagccgttgtatccgttcatgataggggcgtctggctgggcgatattgacatactatcagcactgccgaaagtgatgcacgcgcggtctgactgcgtgagcaatcacgatgactctagtagcatcgacgcagaccactgtggatcagacgacgcggtagcactagacacctgggacgaggtactggactgtcctcagaatggcatagtggttgttcgatcccaaggaaactgggtggcgcggctcgcgctgatagggatgctagcgcaccataaggatattatttccaaggtttctgtttgtccgggtgactcatctaatggctgttggcgctgtctcagtaggcttaggaatgacgttgggtttagggtcttcatcatttaatcgtaacgattatgatacatattctgtacatggcgcattgccagtgactctgataaattctctaactttcctagagaagtagtgagtgacaagtacgtggggctcaaggaccatcaacatccttccataattttagctcaccaagtagagaatacaagcatcttaaactcccaattccgtacaacttgttttcttagttttcagtagccatcttattatcgacataagaaccgggtcttcccgtttgcactcgctatatagttacaaaggtcagaaatttggggcagaacgagattcaagttcgaaaccacgtgaggaagatgatcgatgaattcacgagcctcaatctcctttcacgagttcactactacgcacccatcacgtacttgaaacgaattcaaacgtgagcttcattgaataccggtattgccaaagtcgcgcagctagatacctggactgtcatgagcccagtcgtgctgtctcgctcttaaaaca

SEQ ID NO: 31870 - DNA, 804 bp, Muscodor strobelii
  misc_feature: SGI cDNA ID NO. 570977
  misc_feature: Encodes the peptide sequence at SEQ ID NO 31871
atgccttccatcgcattcatcttgatttctctctttttgtcacgggtggtctttgcggcaccgaccctacaaaaaccggaagatgtcacagacaatggctcttcatatatggaccttccgccccaagtaccagccaatccacgatcagaagacacaagcctaattcatgcgcttgaactttccccggttgcgaaggagcgacttgctctgctcgatcagcccggcgacttcaagtttgactaccgcaatcccaacccgaacgcaattgcacaaggagacggcggccatttggttgttcccaatggcaacatctttccagcgcttatcggcaacaacgtcatgatgtcgatgggatttctccaaccatgcggcttcaacacgcctcactcgcaccctcgggcatcggaggtacaggttatcatcaagggggagatggtaagcgagatgattgcagagaacaaggttgaaccggtgacgaacctcttgtcattgtatcaaatgacgatctatcctcaaggatcaatgcacctgcagttcaatccgggatgcgatgaagccgtgtttgtgtccggcttcaataacgaggacccaggcgtacagcaagcagcacaaacgttctttggcatgcgtgccgatgcagtgatggcttctcttagcactgacacgatcaatggggatgatatcgataatttccgtcaccaaattcctgctaatgttgcggcgggtatcgatgcttgcttagctgcttgcgggattccgaagaagtcaaagaggacacacgaggataatgctttttcggcatga

SEQ ID NO: 31871 - protein, 267 aa, Muscodor strobelii
  misc_feature: SGI Peptide ID NO. 570977
  misc_feature (79)..(214): Pfam Id: PF00190 Pfam Desc: Cupin
  misc_feature (8)..(258): NCBI GI: 67539534 Blast Desc: AN5937.2 [Aspergillus nidulans FGSC A4] gi|40738610|gb|EAA57800.1| AN5937.2 [Aspergillus nidulans FGSC A4] gi|259479891|tpe|CBF70529.1| TPA: conserved [Aspergillus FGSC
  misc_feature (16)..(258): NCBI GI: 261354582 Blast Desc: spherulin-1A [Verticillium albo-atrum VaMs.102]
  misc_feature (39)..(262): NCBI GI: 46102638 Blast Desc: FG00023.1 [Gibberella zeae PH-1]
  misc_feature (39)..(259): NCBI GI: 256724103 Blast Desc: [Nectria haematococca mpVI 77-13-4]
  misc_feature (35)..(256): NCBI GI: 256726910 Blast Desc: [Nectria haematococca mpVI 77-13-4]
  misc_feature (54)..(252): NCBI GI: 225884 Blast Desc: [Nectria haematococca mpVI 77-13-4]
  misc_feature (54)..(252): NCBI GI: 134858 Blast Desc: SR1A_PHYPO RecName: Full=Spherulin-1A; Flags: Precursor gi|161262|gb|AAA29982.1| spherulin 1a precursor [Physarum polycephalum]
  misc_feature (35)..(256): NCBI GI: 46121411 Blast Desc: FG05084.1 [Gibberella zeae PH-1]
  misc_feature (42)..(252): NCBI GI: 134860 Blast Desc: SR1B_PHYPO RecName: Full=Spherulin-1B; Flags: Precursor gi|161256|gb|AAA29979.1| spherulin 1b precursor [Physarum polycephalum] gi|225883|prf||1402254A spherulin 1a
  misc_feature (1)..(250): NCBI GI: 189191992 Blast Desc: spherulin-1B precursor [Pyrenophora tritici-repentis Pt-1C-BFP] gi|187973941|gb|EDU41440.1| spherulin-1B precursor [Pyrenophora tritici-repentis Pt-1C-BFP]
MPSIAFILISLFLSRVVFAAPTLQKPEDVTDNGSSYMDLPPQVPANPRSEDTSLIHALELSPVAKERLALLDQPGDFKFDYRNPNPNAIAQGDGGHLVVPNGNIFPALIGNNVMMSMGFLQPCGFNTPHSHPRASEVQVIIKGEMVSEMIAENKVEPVTNLLSLYQMTIYPQGSMHLQFNPGCDEAVFVSGFNNEDPGVQQAAQTFFGMRADAVMASLSTDTINGDDIDNFRHQIPANVAAGIDACLAACGIPKKSKRTHEDNAFSA

SEQ ID NO: 31872 - DNA, 433 bp, Muscodor strobelii
  misc_feature: SGI EST ID NO. CUFF.75407.0
  misc_feature: Variant of the nucleotide sequence at SEQ ID NO 31870
ccatcgcattcatcttgatttctctctttttgtcacgggtggtctttgcggcaccgaccctacaaaaaccggaagatgtcacagacaatggctcttcatatatggaccttccgccccaagtaccagccaatccacgatcagaagacacaagcctaattcatgcgcttgaactttccccggttgcgaaggagcgacttgctctgctcgatcagcccggcgacttcaagtttgactaccgcaatcccaacccgaacgcaattgcacaaggagacggcggccatttggttgttcccaatggcaacatctttccagcgcttatcggcaacaacgtcatgatgtcgatgggatttctccaaccatgcggcttcaacacgcctcactcgcaccctcgggcatcggaggtacaggttatcatcaagggggagatggtaag

SEQ ID NO: 31873 - DNA, 1398 bp, Muscodor strobelii
  misc_feature: SGI cDNA ID NO. 570978
  misc_feature: Encodes the peptide sequence at SEQ ID NO 31874
atgatcgccacgccagacgagatagcatttttggtgcagcaagaatacgacaaactgccagcgaagcgaaagcccgtgacccgtggtaatggcctacgagaatgggtgcccctagctggaatagtagctgaaggaaaggatggcaaattaagatgcctctcattcggaacaggcatgaaatgcctccccttgactaagttatcacaagcccagggcaacgtgctccatgactggcacgctgaggtgctatgtatccgagccttcaaccgcttcgttttagatgagtgtcattcaataacagatggctcgaaaagctcgtccgacttcatccgatgtcgaaatgcttcagaactaccttcaacccctgaatccgacaggacagacaatgaaaagggactctggaatttgcaaccatttgcctggcgagaggatgtgacattgcatatgtactgctcagaagccccatgcggagacgcgagcatggagttgactatggcagcgcaagacgacgcttcaccatggcctactccaggatttcaaacgtcttcatcaccctcatctgcagactcagaatctctaatgccaggacgcgcctacttctcccaactgggcatcgtccgacgcaagccctcacgaggtgatgcgccgccaactctctccaagtcttgctcagataaattggctctacatcagtgtacatcgcttctttcatctctcacatctttactagtgtcacccgaaaacgcctacttaagtacgttgatcttaccaaaggcgcagtacagtgcctctggttgcttgcgagctttctctgctgtggaagacatcttagagaaaggcgaaggaggtcgtatggcgcctttgaaagacatgacatggggagcaggatacgcatttcatcctttcaacgtgaaaacggaatcgcttgaatttcgcttttctcggcgtgctcaccttactcctattccttctacttgtcatacaactattgcaacacagtccaagataaccccgtccaacctctccgtagcctggacgcactcaggtcaaatagaatcaaccctctctggcgtccttcaaggacggaaagcctcttcggcttctgtcactggcgcgagtttcacttcgagacggaagatgtggagtctaacggtagaaatcattgatctactacaagcttcaaaattgaataccgacaataagcttgcgtacggagagcttgtgaggaagatcagtggctatggcgaagagcaaaatggagagcaaaccaggatggcatacggacaagtcaaagattccaagatgctaaacgcacgaagacgcgtgaagcaagacacgaggacgctcgccttgaagacgtgggttagaaatttgggtgatgaggattggacgctctga

SEQ ID NO: 31874 - protein, 465 aa, Muscodor strobelii
  misc_feature: SGI Peptide ID NO. 570978
  misc_feature (54)..(434): Pfam Id: PF02137 Pfam Desc: Adenosine-deaminase (editase) domain
  misc_feature (54)..(91): Pfam Id: PF02137 Pfam Desc: Adenosine-deaminase (editase) domain
  misc_feature (6)..(457): NCBI GI: 38567257 Blast Desc: related to tRNA-specific adenosine deaminase 1 [Neurospora crassa]
  misc_feature (1)..(465): NCBI GI: 256733577 Blast Desc: NECHADRAFT_36604 [Nectria haematococca mpVI 77-13-4]
  misc_feature (6)..(461): NCBI GI: 149209951 Blast Desc: MGCH7_ch7g457 [Magnaporthe grisea 70-15] gi|86196412|gb|EAQ71050.1| MGCH7_ch7g457 [Magnaporthe grisea 70-15]
  misc_feature (1)..(465): NCBI GI: 171683877 Blast Desc: protein product [Podospora anserina] gi|170941899|emb|CAP67551.1| protein product [Podospora anserina]
  misc_feature (59)..(465): NCBI GI: 116193139 Blast Desc: CHGG_06287 [Chaetomium globosum CBS 148.51] gi|88182200|gb|EAQ89668.1| CHGG_06287 [Chaetomium globosum CBS 148.51]
  misc_feature (54)..(457): NCBI GI: 85111981 Blast Desc: NCU03149 [Neurospora crassa OR74A] gi|28925969|gb|EAA34962.1| [Neurospora crassa OR74A]
  misc_feature (59)..(465): NCBI GI: 261353524 Blast Desc: tRNA-specific adenosine deaminase [Verticillium albo-atrum VaMs.102]
  misc_feature (6)..(463): NCBI GI: 156056146 Blast Desc: SS1G_05425 [Sclerotinia sclerotiorum 1980] gi|154703209|gb|EDO02948.1| SS1G_05425 [Sclerotinia sclerotiorum 1980]
  misc_feature (67)..(461): NCBI GI: 145610099 Blast Desc: MGG_02712 [Magnaporthe grisea 70-15] gi|145017482|gb|EDK01845.1| MGG_02712 [Magnaporthe grisea 70-15]
  misc_feature (59)..(465): NCBI GI: 189188060 Blast Desc: tRNA-specific adenosine deaminase [Pyrenophora tritici-repentis Pt-1C-BFP] gi|187971975|gb|EDU39474.1| tRNA-specific adenosine deaminase [Pyrenophora tritici-repentis
MIATPDEIAFLVQQEYDKLPAKRKPVTRGNGLREWVPLAGIVAEGKDGKLRCLSFGTGMKCLPLTKLSQAQGNVLHDWHAEVLCIRAFNRFVLDECHSITDGSKSSSDFIRCRNASELPSTPESDRTDNEKGLWNLQPFAWREDVTLHMYCSEAPCGDASMELTMAAQDDASPWPTPGFQTSSSPSSADSESLMPGRAYFSQLGIVRRKPSRGDAPPTLSKSCSDKLALHQCTSLLSSLTSLLVSPENAYLSTLILPKAQYSASGCLRAFSAVEDILEKGEGGRMAPLKDMTWGAGYAFHPFNVKTESLEFRFSRRAHLTPIPSTCHTTIATQSKITPSNLSVAWTHSGQIESTLSGVLQGRKASSASVTGASFTSRRKMWSLTVEIIDLLQASKLNTDNKLAYGELVRKISGYGEEQNGEQTRMAYGQVKDSKMLNARRRVKQDTRTLALKTWVRNLGDEDWTL

SEQ ID NO: 31875 - DNA, 1655 bp, Muscodor strobelii
  misc_feature: SGI EST ID NO. CUFF.75411.0
  misc_feature: Variant of the nucleotide sequence at SEQ ID NO 31873
cttttgcactggtggtgaaagcgaaatatagagaaagtagtgttcctcgaaaaattgaatagttgacaccataaggttgaacctttttattctcccccacacccctacagacaatgtcatgatcgccacgccagacgagatagcatttttggtgcagcaagaatacgacaaactgccagcgaagcgaaagcccgtgacccgtggtaatggcctacgagaatgggtgcccctagctggaatagtagctgaaggaaaggatggcaaattaagatgcctctcattcggaacaggcatgaaatgcctccccttgactaagttatcacaagcccagggcaacgtgctccatgactggcacgctgaggtgctatgtatccgagccttcaaccgcttcgttttagatgagtgtcattcaataacagatggctcgaaaagctcgtccgacttcatccgatgtcgaaatgcttcagaactaccttcaacccctgaatccgacaggacagacaatgaaaagggactctggaatttgcaaccatttgcctggcgagaggatgtgacattgcatatgtactgctcagaagccccatgcggagacgcgagcatggagttgactatggcagcgcaagacgacgcttcaccatggcctactccaggatttcaaacgtcttcatcaccctcatctgcagactcagaatctctaatgccaggacgcgcctacttctcccaactgggcatcgtccgacgcaagccctcacgagtgtcacccgaaaacgcctacttaagtacgttgatcttaccaaaggcgcagtacagtgcctctggttgcttgcgagctttctctgctgtggaagacatcttagagaaaggcgaaggaggtcgtatggcgcctttgaaagacatgacatggggagcaggatacgcatttcatcctttcaacgtgaaaacggaatcgcttgaatttcgcttttctcggcgtgctcaccttactcctattccttctacttgtcatacaactattgcaacacagtccaagataaccccgtccaacctctccgtagcctggacgcactcaggtcaaatagaatcaaccctctctggcgtccttcaaggacggaaagcctcttcggcttctgtcactggcgcgagtttcacttcgagacggaagatgtggagtctaacggtagaaatcattgatctactacaagcttcaaaattgaataccgacaataagcttgcgtacggagagcttgtgaggaagatcagtggctatggcgaagagcaaaatggagagcaaaccaggatggcatacggacaagtcaaagattccaagatgctaaacgcacgaagacgcgtgaagcaagacacgaggacgctcgccttgaagacgtgggttagaaatttgggtgatgaggattggacgctctgagcatggaacgagacagtatttatcaatcgaaagagagtctaagaatattcaagcccgcaagaattggctatgttgctatgcggctttgtgcagtggacctcggaatgtgattgttggactttcgacttgggggcgcagacccttcatgtatagaaatataccatcagcgcgcgattctgtctatactggcgcaaacataacaatacgcaatagcaaggattctacattcaga

SEQ ID NO: 31876 - DNA, 483 bp, Muscodor strobelii
  misc_feature: SGI cDNA ID NO. 570979
  misc_feature: Reduced expression when VOC is produced
  misc_feature: Encodes the peptide sequence at SEQ ID NO 31877
atgagaacttacgacgactccttctctggccagagaatctaccctggcaagggcaagatctacgtcagaggcgacagcaaagtcttccgattccagaacggcaagtccgagtcgctcttcctccagcgcaagaacccccgccgcatctcatggactgttctcttccgtcgccagcaccgcaagggtatcactgaggaagccgccaagaagcgcactcgccgtaccgtcaagtcccagcgtgccatcgtcggtgcctccctcgatgtcatcaaggagaagcgatccatgagacccgaggcccgctccgccgcccgtctcgccgccgtcaaggaggccaaggagaagaaggccgaggccgccgccgccaagaagtccgagaaggccaagaaggccaccaccgcctccaagggccaaacccagcgcatcgtcggcaagcaggcctccaggggtgctcagcagaaggtcgccgccaacacccgctaa

SEQ ID NO: 31877 - protein, 160 aa, Muscodor strobelii
  misc_feature: SGI Peptide ID NO. 570979
  misc_feature (1)..(71): Pfam Id: PF01246 Pfam Desc: Ribosomal protein L24e
  misc_feature (1)..(160): NCBI GI: 116193141 Blast Desc: CHGG_06288 [Chaetomium globosum CBS 148.51] gi|88182201|gb|EAQ89669.1| CHGG_06288 [Chaetomium globosum CBS 148.51]
  misc_feature (1)..(160): NCBI GI: 46128597 Blast Desc: FG08676.1 [Gibberella zeae PH-1]
  misc_feature (1)..(160): NCBI GI: 119181537 Blast Desc: CIMG_05869 [Coccidioides immitis RS] gi|240108980|gb|EER27149.1| 60S ribosomal protein L24, [Coccidioides posadasii C735 delta SOWgp]
  misc_feature (1)..(160): NCBI GI: 226280316 Blast Desc: PAAG_00205 [Paracoccidioides brasiliensis Pb01]
  misc_feature (1)..(160): NCBI GI: 225678099 Blast Desc: 60S ribosomal protein L24a [Paracoccidioides brasiliensis Pb03] gi|226287591|gb|EEH43104.1| PADG_07924 [Paracoccidioides brasiliensis Pb18]
  misc_feature (1)..(160): NCBI GI: 238838014 Blast Desc: 60S ribosomal protein L24a [Microsporum canis CBS 113480]
  misc_feature (1)..(160): NCBI GI: 154280515 Blast Desc: conserved [Ajellomyces capsulatus NAm1] gi|150411249|gb|EDN06637.1| conserved [Ajellomyces capsulatus NAm1] gi|225558004|gb|EEH06289.1| 60S ribosomal protein L24 60S
  misc_feature (1)..(160): NCBI GI: 261192851 Blast Desc: 60S ribosomal protein L24 [Ajellomyces dermatitidis SLH14081] gi|239589314|gb|EEQ71957.1| 60S ribosomal protein L24 [Ajellomyces dermatitidis SLH14081] gi|239610152|gb|EEQ87139.1|
  misc_feature (1)..(160): NCBI GI: 85111983 Blast Desc: 60S ribosomal protein L24 [Neurospora crassa OR74A] gi|52783256|sp|Q7SDU2.1|RL24_NEUCR RecName: Full=60S ribosomal protein L24 gi|28925970|gb|EAA34963.1| 60S ribosomal protein L24
  misc_feature (1)..(160): NCBI GI: 261353525 Blast Desc: 60S ribosomal protein L24 [Verticillium albo-atrum VaMs.102]
  misc_feature: Useful for introducing or modulating the production of volatile compounds
MRTYDDSFSGQRIYPGKGKIYVRGDSKVFRFQNGKSESLFLQRKNPRRISWTVLFRRQHRKGITEEAAKKRTRRTVKSQRAIVGASLDVIKEKRSMRPEARSAARLAAVKEAKEKKAEAAAAKKSEKAKKATTASKGQTQRIVGKQASRGAQQKVAANTR

SEQ ID NO: 31878 - DNA, 2262 bp, Muscodor strobelii
  misc_feature: SGI EST ID NO. CUFF.76027.0
  misc_feature: Variant of the nucleotide sequence at SEQ ID NO 31876
cgcctaccagagtgtttcgctgagccgcctctgccaatctcccactccacgaccatactaaccaccacagccgacgacaagttctcttcacacaaccgtcaccatgagaacttacgacgactccttctctggccagagaatctaccctggcaagggcaagatctacgtcagaggcgacagcaaagtcttccgattccagaacggcaagtccgagtcgctcttcctccagcgcaagaacccccgccgcatctcatggactgttctcttccgtcgccagcaccgcaagggtatcactgaggaagccgccaagaagcgcactcgccgtaccgtcaagtcccagcgtgccatcgtcggtgcctccctcgatgtcatcaaggagaagcgatccatgagacccgaggcccgctccgccgcccgtctcgccgccgtcaaggaggccaaggagaagaaggccgaggccgccgccgccaagaagtccgagaaggccaagaaggccaccaccgcctccaagggccaaacccagcgcatcgtcggcaagcaggcctccaggggtgctcagcagaaggtcgccgccaacacccgctaaacaatcacgattatgatgagcgaacttggtagggattcggtttgggcagcggatgagataaagacatcaaacttccggtgggcgtgatgaatggacggacattatactgcgcgtgtctggcggcgtctggggtgggaaattcctcgacttgttttgtcattcggattcttcattacgaatcagcacaaaatgaaatacacatctctcgggtcggggattgcataggaattctctctcatggctatgggagttgttttccctggtagctcataaatgccagcaattgttctacgatatgatccctatgcacgtgctacgtgatggtgttgaagacggacatgacatcgattgtaataagacaagtatggaccgaggtatttcaaaagggcgcaaacaccatagttgtgatcaaccaagatcaacgaagcctagagtattctcacaaagcagtaatgccgaatctgaaccccatgtcaagtcacttctgtaacgtgttcaatcacaaatgcgtatgaaaattacaaatttgttcgattttactttattcttgacttttaaaactaggcatcttcagtcttcagaacgccgtgctttttctaagtctatgggtattccaccgatgcaccgatacttagcacatctttctcaaatctacatatttgtactcgttttctcaagccagtaagcactctagtgtcgatgacaaagtagctgtttacagcttagcgagcacagcatcaacgccagagacaccgacatccttgccgggctccttctcggcgtaggtcaccttgccgttctcgacgatgagagcgtagcgggcggtgcgggggccgagagtccagtcgccgatcgacttggagaaagctgcttcgttgtctgttgcgaagatctgttgatacaattacacattagcatactactcttttctctagtttggccctttggggttaatggagggggaggggggcgagagtggtggggagataggagagtagaggaagagctcggcagagacgtacgatagactcatccttgatgccgttggccttgccccaggcggccatgacgaaggggtcgttgaaggcgatgacgatgacttggtcgacgcccttggacttgagctcctggagcttgccgatgaagccggtgacgtgctggacttggcaggtgggtgtgaaggcaccagggacggagacgatgactactttcttgtccttgacagctgcatttgtttccgtcagtacttacttgatttcaatagataatgatcggcaatgtggggactgggtgaagatgttgggagtcatggcgagcttaccttcgctggcgttgtagggagagggcatgccgcaggcgagaacatcgctagtctcgggcgtgggcttcacgtagaggaagttaactccctcggggaaagaatcgccagcagtgagagcacccattttgaactgattagagtatcggaattggttgaaagtgtaaacgaagttggatggaagcttgggagaatagtatgtcgaggtaaggttgaaggttagctacctatggaggggtagccgaaacttataaactttgtcacgtaacgcggctcggcggcggtgaatggcaaaatcacacaaactgctgctgtcctaattgtctaccttactagtattgcttctacagtacctcgg

SEQ ID NO: 31879 - DNA, 504 bp, Muscodor strobelii
  misc_feature: SGI cDNA ID NO. 570980
  misc_feature: Elevated expression when VOC is produced
  misc_feature: Encodes the peptide sequence at SEQ ID NO 31880
atgggtgctctcactgctggcgattctttccccgagggagttaacttcctctacgtgaagcccacgcccgagactagcgatgttctcgcctgcggcatgccctctccctacaacgccagcgaagctgtcaaggacaagaaagtagtcatcgtctccgtccctggtgccttcacacccacctgccaagtccagcacgtcaccggcttcatcggcaagctccaggagctcaagtccaagggcgtcgaccaagtcatcgtcatcgccttcaacgaccccttcgtcatggccgcctggggcaaggccaacggcatcaaggatgagtctatcatcttcgcaacagacaacgaagcagctttctccaagtcgatcggcgactggactctcggcccccgcaccgcccgctacgctctcatcgtcgagaacggcaaggtgacctacgccgagaaggagcccggcaaggatgtcggtgtctctggcgttgatgctgtgctcgctaagctgtaa

SEQ ID NO: 31880 - protein, 167 aa, Muscodor strobelii
  misc_feature: SGI Peptide ID NO. 570980
  misc_feature (5)..(167): Pfam Id: PF08534 Pfam Desc: Redoxin
  misc_feature (44)..(105): Pfam Id: PF00578 Pfam Desc: AhpC/TSA family
  misc_feature (1)..(167): NCBI GI: 164427260 Blast Desc: NCU03151 [Neurospora crassa OR74A] gi|38567255|emb|CAE76545.1| peroxisomal membrane protein [Neurospora crassa] gi|157071672|gb|EAA34964.2| NCU03151 crassa
  misc_feature (4)..(167): NCBI GI: 156056134 Blast Desc: peroxiredoxin [Sclerotinia sclerotiorum 1980] gi|154703203|gb|EDO02942.1| peroxiredoxin [Sclerotinia sclerotiorum 1980]
  misc_feature (4)..(167): NCBI GI: 154302296 Blast Desc: BC1G_09932 [Botryotinia fuckeliana B05.10] gi|150855420|gb|EDN30612.1| BC1G_09932 [Botryotinia fuckeliana B05.10]
  misc_feature (1)..(167): NCBI GI: 119181446 Blast Desc: CIMG_05828 [Coccidioides immitis RS]
  misc_feature (1)..(167): NCBI GI: 225678115 Blast Desc: peroxisomal matrix protein [Paracoccidioides brasiliensis Pb03]
  misc_feature (1)..(167): NCBI GI: 34980256 Blast Desc: peroxisomal-like protein [Paracoccidioides brasiliensis] gi|226279562|gb|EEH35128.1| peroxisomal matrix protein [Paracoccidioides brasiliensis Pb01]
  misc_feature (1)..(167): NCBI GI: 240108960 Blast Desc: peroxisomal membrane protein, [Coccidioides posadasii C735 delta SOWgp]
  misc_feature (1)..(167): NCBI GI: 226287613 Blast Desc: peroxisomal matrix protein [Paracoccidioides brasiliensis Pb18]
  misc_feature (1)..(167): NCBI GI: 225558028 Blast Desc: allergen Asp F3 [Ajellomyces capsulatus G186AR]
  misc_feature (1)..(167): NCBI GI: 39970487 Blast Desc: MGG_02710 [Magnaporthe grisea 70-15] gi|149209947|ref|XP_001522348.1| MGCH7_ch7g455 [Magnaporthe grisea 70-15] gi|86196410|gb|EAQ71048.1| MGCH7_ch7g455 grisea
  misc_feature (1)..(167): SWISSPROT Homolog: EC 1.11.1.15 Peroxiredoxin
  misc_feature: Useful for introducing or modulating the production of volatile compounds
MGALTAGDSFPEGVNFLYVKPTPETSDVLACGMPSPYNASEAVKDKKVVIVSVPGAFTPTCQVQHVTGFIGKLQELKSKGVDQVIVIAFNDPFVMAAWGKANGIKDESIIFATDNEAAFSKSIGDWTLGPRTARYALIVENGKVTYAEKEPGKDVGVSGVDAVLAKL

SEQ ID NO: 31881 - DNA, 2406 bp, Muscodor strobelii
  misc_feature: SGI EST ID NO. CUFF.76028.1
  misc_feature: Variant of the nucleotide sequence at SEQ ID NO 31879
ccgaggtactgtagaagcaatactagtaaggtagacaattaggacagcagcagtttgtgtgattttgccattcaccgccgccgagccgcgttacgtgacaaagtttataagtttcggctacccctccataggtagctaaccttcaaccttacctcgacatactattctcccaagcttccatccaacttcgtttacactttcaaccaattccgatactctaatcagttcaaaatgggtgctctcactgctggcgattctttccccgagggagttaacttcctctacgtgaagcccacgcccgagactagcgatgttctcgcctgcggcatgccctctccctacaacgccagcgaagctgtcaaggacaagaaagtagtcatcgtctccgtccctggtgccttcacacccacctgccaagtccagcacgtcaccggcttcatcggcaagctccaggagctcaagtccaagggcgtcgaccaagtcatcgtcatcgccttcaacgaccccttcgtcatggccgcctggggcaaggccaacggcatcaaggatgagtctatcatcttcgcaacagacaacgaagcagctttctccaagtcgatcggcgactggactctcggcccccgcaccgcccgctacgctctcatcgtcgagaacggcaaggtgacctacgccgagaaggagcccggcaaggatgtcggtgtctctggcgttgatgctgtgctcgctaagctgtaaacagctactttgtcatcgacactagagtgcttactggcttgagaaaacgagtacaaatatgtagatttgagaaagatgtgctaagtatcggtgcatcggtggaatacccatagacttagaaaaagcacggcgttctgaagactgaagatgcctagttttaaaagtcaagaataaagtaaaatcgaacaaatttgtaattttcatacgcatttgtgattgaacacgttacagaagtgacttgacatggggttcagattcggcattactgctttgtgagaatactctaggcttcgttgatcttggttgatcacaactatggtgtttgcgcccttttgaaatacctcggtccatacttgtcttattacaatcgatgtcatgtccgtcttcaacaccatcacgtagcacgtgcatagggatcatatcgtagaacaattgctggcatttatgagctaccagggaaaacaactcccatagccatgagagagaattcctatgcaatccccgacccgagagatgtgtatttcattttgtgctgattcgtaatgaagaatccgaatgacaaaacaagtcgaggaatttcccaccccagacgccgccagacacgcgcagtataatgtccgtccattcatcacgcccaccggaagtttgatgtctttatctcatccgctgcccaaaccgaatccctaccaagttcgctcatcataatcgtgattgtttagcgggtgttggcggcgaccttctgctgagcacccctggaggcctgcttgccgacgatgcgctgggtttggcccttggaggcggtggtggccttcttggccttctcggacttcttggcggcggcggcctcggccttcttctccttggcctccttgacggcggcgagacgggcggcggagcgggcctcgggtctcatggatcgcttctccttgatgacatcgagggaggcaccgacgatggcacgctgggacttgacggtacggcgagtgcgcttcttggcggcttcctgaaatggatattagcatcctgctgctccggaagtatccctcaagttcggaagagtttcgagattatgctggatgatcggggcgatgacgccagtgtagggaacaatcgtacctcagtgatacccttgcggtgctggcgacggaagagaacagtccatgagatgcggcgggggttcttgcgctggaggaagagcgactcggacttgccgttctggaatcggaagactttgctgtcgcctctgacgtagatcttgccctgttatttgagcacatatatcagcctctttatcttcaattgcagatggcctaatctcaagcctaaacagtgtgaacgcatcgaagtcaagatcgtcaagatatttggtcggtcgttcgctcgttttctggtttatcgttcctgtcgtccatcccctcccttcaccatttatttcgctgctcatcatcctctttttcgacttgtggcgacttgactccgatgcgatcgctcgtgatggaaacggaaaaatggcgtaccttgccagggtagattctctggccagagaaggagtcgtcgtaagttctcatggtgacggttgtgtgaagagaacttgtcgtcggctgtggtggttagtatggtcgtggagtgggagattggcagaggcggctcagcgaaacactctggtaggcg

SEQ ID NO: 31882 - DNA, 471 bp, Muscodor strobelii
  misc_feature: SGI cDNA ID NO. 570981
  misc_feature: Encodes the peptide sequence at SEQ ID NO 31883
atggcgaccggaaccgagggaagacctccatacccacctttcacagccgagacggcacaaatcaaagtcaaggccgcacaggatgcgtggaatactaaagatccggcaaaagtgaagatggcatacacaccagactcaatctggcgcaaccgtgacaaatttcttcaaggtcgcgacgagatcgagagcttccttacagcgaaatggcagcgtgagaagggatatcgcctgcgcaaggaactgttttcattcacagacaacaagatcgctgttcagttctggtacgagtggtacgacaacgagggacagtggtggcgcacgtacggtcttgaagactggacatttgcggataatggactcatgcgtaagagacagatgagtggaaatgatgtcaaaatcacgaatgatgagagatggtatgctaatgatgttgatgtgaatactatcgagatctcggagaagcactggtag

SEQ ID NO: 31883 - protein, 156 aa, Muscodor strobelii
  misc_feature: SGI Peptide ID NO. 570981
  misc_feature (8)..(150): Pfam Id: PF07080 Pfam Desc: Domain of function (DUF1348)
  misc_feature (8)..(140): Pfam Id: PF07080 Pfam Desc: Domain of function (DUF1348)
  misc_feature (4)..(156): NCBI GI: 261353527 Blast Desc: conserved [Verticillium albo-atrum VaMs.102]
  misc_feature (4)..(156): NCBI GI: 39970485 Blast Desc: conserved [Magnaporthe grisea 70-15] gi|149209945|ref|XP_001522347.1| MGCH7_ch7g454 [Magnaporthe grisea 70-15] gi|86196409|gb|EAQ71047.1| MGCH7_ch7g454 grisea
  misc_feature (5)..(156): NCBI GI: 256728614 Blast Desc: NECHADRAFT_96988 [Nectria haematococca mpVI 77-13-4]
  misc_feature (1)..(156): NCBI GI: 154302294 Blast Desc: BC1G_09931 [Botryotinia fuckeliana B05.10] gi|150855419|gb|EDN30611.1| BC1G_09931 [Botryotinia fuckeliana B05.10]
  misc_feature (1)..(156): NCBI GI: 156056136 Blast Desc: SS1G_05420 [Sclerotinia sclerotiorum 1980] gi|154703204|gb|EDO02943.1| SS1G_05420 [Sclerotinia sclerotiorum 1980]
  misc_feature (12)..(156): NCBI GI: 170092030 Blast Desc: [Laccaria bicolor S238N-H82] gi|164648730|gb|EDR12973.1| [Laccaria bicolor S238N-H82]
  misc_feature (12)..(156): NCBI GI: 242781346 Blast Desc: conserved [Talaromyces stipitatus ATCC 10500] gi|218719929|gb|EED19348.1| conserved [Talaromyces stipitatus ATCC 10500]
  misc_feature (40)..(156): NCBI GI: 164427258 Blast Desc: NCU03152 [Neurospora crassa OR74A] gi|157071671|gb|EAA34965.2| conserved [Neurospora crassa OR74A]
  misc_feature (1)..(155): NCBI GI: 134111709 Blast Desc: CNBE1060 [Cryptococcus neoformans var. neoformans B-3501A] gi|50258049|gb|EAL20743.1| CNBE1060 [Cryptococcus neoformans var. neoformans B-3501A]
  misc_feature (12)..(155): NCBI GI: 189198632 Blast Desc: PTRG_05320 [Pyrenophora tritici-repentis Pt-1C-BFP] gi|187982752|gb|EDU48240.1| PTRG_05320 [Pyrenophora tritici-repentis Pt-1C-BFP]
MATGTEGRPPYPPFTAETAQIKVKAAQDAWNTKDPAKVKMAYTPDSIWRNRDKFLQGRDEIESFLTAKWQREKGYRLRKELFSFTDNKIAVQFWYEWYDNEGQWWRTYGLEDWTFADNGLMRKRQMSGNDVKITNDERWYANDVDVNTIEISEKHW

SEQ ID NO: 31884 - DNA, 1294 bp, Muscodor strobelii
  misc_feature: SGI EST ID NO. CUFF.76227.0
  misc_feature: Variant of the nucleotide sequence at SEQ ID NO 31882
agctcatcagcatgtatctgacgggttcagttgggttgccttgagttgccttgagtctcgcctccaaggggagtaaatgcatattccgttgtaatcgagtttttaaggtgatcttttcttttgtgacttcgaagacggattaacctatgaacggtggaattccatgagactaaggcataaactaaggcataaaggtaggttcatgaggaatcatcgataccgaaagatcgcctacattgggaccatgacgatgttttagatgttctccgcgggttgattcaaaatgactcaatcaccatcaaacaccacgccctccgacggtagtcgtctggccgtggaaatcgcggcggtgacctgagcaaaggccggcttcgtcatccggctagagaggacggcatcggtattgttgggacccttgtcctgaccgaatgatctccgattgaaaaactttatacaacgtacaacaattatttcaagagagcattgtgaatcatctgactggagctttattaacgaacacctgtatcgtggcgagtaccatttttgaatccaagagttttatctgcatctcgaaagacacatcggatctgcgccgatagacctcattcacaatggcgaccggaaccgagggaagacctccatacccacctttcacagccgagacggcacaaatcaaagtcaaggccgcacaggatgcgtggaatactaaagatccggcaaaagtgaagatggcatacacaccagactcaatctggcgcaaccgtgacaaatttcttcaaggtcgcgacgagatcgagagcttccttacagcgaaatggcagcgtgagaagggatatcgcctgcgcaaggaactgttttcattcacagacaacaagatcgctgttcagttctggtacgagtggtacgacaacgagggacagtggtggcgcacgtacggtcttgaagactggacatttgcggataatggactcatgcgtaagagacagatgagtggaaatgatgtcaaaatcacgaatgatgagagatggtatgctaatgatgttgatgtgaatactatcgagatctcggagaagcactggtagcgtggattttagctgagagacgttaggtggtgagagttgctagtcaagtcacgtctaccagattgaggtcctctcctatcagtcattaatattgagtatgagatcctgtagcgcaattcatccacgggctctgtgtattccaacgttaattggcgaagcacgtcagtccaattgcagtgtagatgtctcgacgatttcctcaaaggaattct

SEQ ID NO: 31885 - DNA, 1323 bp, Muscodor strobelii
  misc_feature: SGI cDNA ID NO. 570982
  misc_feature: Encodes the peptide sequence at SEQ ID NO 31886
atggtgctatcactgagttacaggcgtcctgatcacgtcaataggaatgagttcagccacaatcgagacagcggtgtctctttcgacgagaagagcgattcttctctaaaatcaggacagtcaggtggcattgctggcataccagaggctttggcctttgataagatcatcaatggcggaacatgtcctgcaattcgcgatttcatgaactatctcatatacatcgaacactctgcagagaatcttcaattcttcctctggtttcgtgaatatgaaaagcggttcaacaacgctcccgcctcggagatcgaactagcccctgaatggacacagactatggaagatgatgccatagccaggatccaaaaagatgctgcagataaggcgagaagagaaaccacggcagcggctgaaatcttcaagggcaccgatttcgaaaaagcatccgaagcagttgaaagcaaggatccgttctcgacacctgcgtactctgagtacggggatagcgcttcgtacttttccggctctcaggggttgagctaccggtcgcaggcttcggatgctttcctggcggcgggagctaaacttccattcactattcagcccttcagagctgagatcaatcgagtcatatctacctacattgtcgacgacgcccccagacagcttaatctctcatcccgggagcaaaaagcaattgttcaagccctatcctacactacccatccttcagcttttcgcacgctatctcgcaacatcgagacggttcttcgcaagcaggcacatcccaacttcatccgctggacaatctgcaacggcaacccagcccgagtgacttttgcgcgtggtctaggcgtgggaactatcttattagccctcatcggatccatcgtccttactctcagctctgctggccgtggctggcgtgccctcttcaccatcctctgggtcctcggcatagcgacactcatcacagcatggaaggggatgtgcgttgtgctccacggcatgcaccatcggcacgtccgaccgtgggagctgttcgtagatgacaacggtagtagcactgagttcctatgcgaaggcaagcgtagcttcgattcgttcgggtcgtgcaatagctatgaggacgaaccctggatcgtcaggtacgatcacaggttctatgtgcgcaaggtcttcgatcgtgaagtttggattcaggagccggcgctgcgacaaattcaagatactatcttcttgcagtccatgctgatggcgttgcttggtgctggtgtcttgaccgctatcttcgttgctgtacctgcgggcaacttctattag

SEQ ID NO: 31886 - protein, 440 aa, Muscodor strobelii
  misc_feature: SGI Peptide ID NO. 570982
  misc_feature (2)..(440): NCBI GI: 85113671 Blast Desc: NCU03153 [Neurospora crassa OR74A] gi|28926346|gb|EAA35323.1| conserved [Neurospora crassa OR74A]
  misc_feature (2)..(440): NCBI GI: 46128603 Blast Desc: FG08679.1 [Gibberella zeae PH-1]
  misc_feature (2)..(440): NCBI GI: 39970573 Blast Desc: MGG_02753 [Magnaporthe grisea 70-15] gi|149210039|ref|XP_001522394.1| MGCH7_ch7g501 [Magnaporthe grisea 70-15] gi|86196456|gb|EAQ71094.1| MGCH7_ch7g501 grisea
  misc_feature (2)..(440): NCBI GI: 171683883 Blast Desc: protein product [Podospora anserina] gi|170941902|emb|CAP67554.1| protein product [Podospora anserina]
  misc_feature (2)..(440): NCBI GI: 116193149 Blast Desc: CHGG_06292 [Chaetomium globosum CBS 148.51] gi|88182205|gb|EAQ89673.1| CHGG_06292 [Chaetomium globosum CBS 148.51]
  misc_feature (1)..(440): NCBI GI: 169609096 Blast Desc: SNOG_07633 [Phaeosphaeria nodorum SN15] gi|160701778|gb|EAT85099.2| SNOG_07633 [Phaeosphaeria nodorum SN15]
  misc_feature (1)..(440): NCBI GI: 189200132 Blast Desc: conserved [Pyrenophora tritici-repentis Pt-1C-BFP] gi|187983502|gb|EDU48990.1| conserved [Pyrenophora tritici-repentis Pt-1C-BFP]
  misc_feature (4)..(440): NCBI GI: 154302292 Blast Desc: BC1G_09930 [Botryotinia fuckeliana B05.10] gi|150855418|gb|EDN30610.1| BC1G_09930 [Botryotinia fuckeliana B05.10]
  misc_feature (49)..(440): NCBI GI: 238840578 Blast Desc: conserved [Microsporum canis CBS 113480]
  misc_feature (49)..(440): NCBI GI: 226277904 Blast Desc: conserved [Paracoccidioides brasiliensis Pb01]
MVLSLSYRRPDHVNRNEFSHNRDSGVSFDEKSDSSLKSGQSGGIAGIPEALAFDKIINGGTCPAIRDFMNYLIYIEHSAENLQFFLWFREYEKRFNNAPASEIELAPEWTQTMEDDAIARIQKDAADKARRETTAAAEIFKGTDFEKASEAVESKDPFSTPAYSEYGDSASYFSGSQGLSYRSQASDAFLAAGAKLPFTIQPFRAEINRVISTYIVDDAPRQLNLSSREQKAIVQALSYTTHPSAFRTLSRNIETVLRKQAHPNFIRWTICNGNPARVTFARGLGVGTILLALIGSIVLTLSSAGRGWRALFTILWVLGIATLITAWKGMCVVLHGMHHRHVRPWELFVDDNGSSTEFLCEGKRSFDSFGSCNSYEDEPWIVRYDHRFYVRKVFDREVWIQEPALRQIQDTIFLQSMLMALLGAGVLTAIFVAVPAGNFY

SEQ ID NO: 31887 - DNA, 3006 bp, Muscodor strobelii
  misc_feature: SGI EST ID NO. CUFF.75431.0
  misc_feature: Variant of the nucleotide sequence at SEQ ID NO 31885
tgaatatgaaaagcggttcaacaacgctcccgcctcggagatcgaactagcccctgaatggacacagactatggaagatgatgccatagccaggatccaaaaagatgctgcagataaggcgagaagagaaaccacggcagcggctgaaatcttcaagggcaccgatttcgaaaaagcatccgaagcagttgaaagcaaggatccgttctcgacacctgcgtactctgagtacggggatagcgcttcgtacttttccggctctcaggggttgagctaccggtcgcaggcttcggatgctttcctggcggcgggagctaaacttccattcactattcagcccttcagagctgagatcaatcgagtcatatctacctacattgtcgacgacgcccccagacagcttaatctctcatcccgggagcaaaaagcaattgttcaagccctatcctacactacccatccttcagcttttcgcacgctatctcgcaacatcgagacggttcttcgcaagcaggcacatcccaacttcatccgctggacaatctgcaacggcaacccagcccgagtgacttttgcgcgtggtctaggcgtgggaactatcttattagccctcatcggatccatcgtccttactctcagctctgctggccgtggctggcgtgccctcttcaccatcctctgggtcctcggcatagcgacactcatcacagcatggaaggggatgtgcgttgtgctccacggcatgcaccatcggcacgtccgaccgtgggagctgttcgtagatgacaacggtagtagcactgagttcctatgcgaaggcaagcgtagcttcgattcgttcgggtcgtgcaatagctatgaggacgaaccctggatcgtcaggtacgatcacaggttctatgtgcgcaaggtcttcgatcgtgaagtttggattcaggagccggcgctgcgacaaattcaagatactatcttcttgcagtccatgctgatggcgttgcttggtgctggtgtcttgaccgctatcttcgttgctgtacctgcgggcaacttctattagatgcggcaaaatcaagtaccacgcattgggcttcaattccgttcattcttggagttcgtttcatttgtcagctagaggatatactaagctcgggcaagaagagggccagtacacccaggctaactatggtccttggcaccaagcagcgggagtcccttgaaaaggagatgaaatggttgatatccatgcgtaggcgtgtattccttctttgtattgatagaatatgtgttataaaagtaataggtgcatcttcttcagttcatttccaattctgaaattcgtggcctcagtgtcttcagcagccgtatgggcgatgctaccgccgccttacagtggatgaagcaccacccaggcgtcaaatacaggcacccataggtggttaccagactgaggcatcagtggacccactatcgtcatcactgtcgtcgctggcggggacccacatttgctcgtcacccaccagcctgtctccagtcacatgctcggctgatttgagctatataggatgctttaattgcaggactttcaccagctaatctcaatcggttcctttagattacactgtggccgtgcggtaaaaggttagactgctaacaggacaacctggagcacgccagttcgagttcggtttccggttggggtgtgtggttaaatgtcccgcctcgactctttttgcaattattttttatttttgctcttgtcgtgcgcctgctttaaacagtttcattcgctttgcattagcctgtttgcgctgttgggcgcagtaaaagtgcgtggatgatgggaaagctacaactgagttctgcaaaggatgcgtgttcgagcgcgggtcgtgcacccaacaatcccgtgggttttcttgctgctttgcatgcatacagtaatacgtgttctgcatccgtcttaagcgtaaccccttagtatttattgcacatcagatgcaaccatattattcttccttctagttcgcatcgccaacaatgattctaggactgcgacctcttagttccaaaagtaccgacatcgaagtctggccgggtttcgcgaggactcaccaacagcgctgagagaataggtgcaccatttgtgtgtctagtaagagttagaaccaatttcattgcctcgcacgatgaaacaaggcgtcgtctgggtctggagtgcagtgaggcgacagctatctccttttgatttgacgcataagtaataacatatgttatcattcacataaggatccgagcttcatcccatggtatcaatgcctgaagcgcagtatcgtactgatggtgtagtcgtaagtatgtgcatatcgcgggtagttcatatcgggctctgaagttcatccaccaaacggtatggcgcgccttcgcataccataaggagagcaataatagcgcaactggatccttattctcgagagccacctcgaattcgtcgtgcattttgcccataaccatcatggctgcgcctaatgtcatattatctttcttctggagccatgagacgccgtgcgcgacttcgaagtaggggttcgtctcctttctcgacgagtcaataataccacacacatctgccagatcatctggcatattgttgcgcccctttacaggtaagggctcgcgcatttttgtgaatgtctcggacatgattcggaagatactatttgggcgaaggggattgactatatgccaaagcgtcatcttagcgtttccaagtctcgtccattctagatcggaggagtctggtggtcccaacggccacgcctctccgtatgaagaagcattgatagatgcaaatgcgagtatgccgagcatgccggctgttgcccatatcggatctttgtgatcttctcttaaaggttggcttagccatttgttgaaaagagaagtgcactgtgaccagtgatatgactctttaagtgtgcggtgataatttggggtcagcccagtata

SEQ ID NO: 31888 - DNA, 1173 bp, Muscodor strobelii
  misc_feature: SGI cDNA ID NO. 570983
  misc_feature: Encodes the peptide sequence at SEQ ID NO 31889
atggccgcagggtcacaaccagtcaagcggcaacgcaaatcacgattcggctgtaagaactgtaagcttagaaagctcaaatgtgatgaaacgaagccgcattgcatgagatgccgccaatatggagttgtttgtaacttcggcttaaccaatgtagccgatttgcaaccgctctccgagcagcggtctaaaccccagaccaaaaagcagtatatgctaccggtagcaaagtctattagtaatggcgtctggattggagatggaacagagcgatttgaactagacttgcaagaccaggcgctcttcgcccgcttccgtcatcgtacccttgtggcactgaaccccgatatggtacagctctatgaaagtcatctatacaatgtctcgcttagctgccgattcatgatgcatggcatgcttgccgtggcagctgttcatgaccgctatactgggctgaccccaaattatcaccgcacacttaaagagtcatatcactggtcacagtgcacttctcttttcaacaaatggctaagccaacctttaagagaagatcacaaagatccgatatgggcaacagccggcatgctcggcatactcgcatttgcatctatcaatgcttcttcatacggagaggcgtggccgttgggaccaccagactcctccgatctagaatggacgagacttggaaacgctaagatgacgctttggcatatagtcaatccccttcgcccaaatagtatcttccgaatcatgtccgagacattcacaaaaatgcgcgagcccttacctgtaaaggggcgcaacaatatgccagatgatctggcagatgtgtgtggtattattgactcgtcgagaaaggagacgaacccctacttcgaagtcgcgcacggcgtctcatggctccagaagaaagataatatgacattaggcgcagccatgatggttatgggcaaaatgcacgacgaattcgaggtggctctcgagaataaggatccagttgcgctattattgctctccttatggtatgcgaaggcgcgccataccgtttggtggatgaacttcagagcccgatatgaactacccgcgatatgcacatacttacgactacaccatcagtacgatactgcgcttcaggcattgataccatgggatgaagctcggatccttatgtga

SEQ ID NO: 31889 - protein, 390 aa, Muscodor strobelii
  misc_feature: SGI Peptide ID NO. 570983
  misc_feature (16)..(50): Pfam Id: PF00172 Pfam Desc: Fungal Zn(2)-Cys(6) binuclear cluster domain
  misc_feature (16)..(45): Pfam Id: PF00172 Pfam Desc: Fungal Zn(2)-Cys(6) binuclear cluster domain
  misc_feature (6)..(382): NCBI GI: 255955525 Blast Desc: Pc21g15030 [Penicillium chrysogenum Wisconsin 54-1255] gi|211590226|emb|CAP96400.1| Pc21g15030 [Penicillium chrysogenum Wisconsin 54-1255]
  misc_feature (9)..(382): NCBI GI: 119497451 Blast Desc: NFIA_022980 [Neosartorya fischeri NRRL 181] gi|119413646|gb|EAW23587.1| [Neosartorya fischeri NRRL 181]
  misc_feature (9)..(382): NCBI GI: 70990132 Blast Desc: C6 finger domain protein [Aspergillus fumigatus Af293] gi|66847547|gb|EAL87877.1| C6 finger domain protein, [Aspergillus fumigatus Af293]
  misc_feature (9)..(382): NCBI GI: 159130397 Blast Desc: C6 finger domain protein, [Aspergillus fumigatus A1163]
  misc_feature (20)..(382): NCBI GI: 145250573 Blast Desc: An15g02620 [Aspergillus niger] gi|134082321|emb|CAL00416.1| protein product [Aspergillus niger]
  misc_feature (37)..(382): NCBI GI: 256723582 Blast Desc: NECHADRAFT_94076 [Nectria haematococca mpVI 77-13-4]
  misc_feature (38)..(390): NCBI GI: 46139267 Blast Desc: FG11148.1 [Gibberella zeae PH-1]
  misc_feature (12)..(381): NCBI GI: 154319664 Blast Desc: BC1G_02313 [Botryotinia fuckeliana B05.10] gi|150855971|gb|EDN31163.1| BC1G_02313 [Botryotinia fuckeliana B05.10]
  misc_feature (42)..(382): NCBI GI: 67527136 Blast Desc: AN3994.2 [Aspergillus nidulans FGSC A4] gi|40740275|gb|EAA59465.1| [Aspergillus nidulans FGSC A4] gi|259481425|tpe|CBF74930.1| TPA: C6 finger domain protein, FGSC
  misc_feature (28)..(382): NCBI GI: 242820257 Blast Desc: C6 finger domain protein, [Talaromyces stipitatus ATCC 10500] gi|218713943|gb|EED13367.1| C6 finger domain protein, [Talaromyces stipitatus ATCC 10500]
MAAGSQPVKRQRKSRFGCKNCKLRKLKCDETKPHCMRCRQYGVVCNFGLTNVADLQPLSEQRSKPQTKKQYMLPVAKSISNGVWIGDGTERFELDLQDQALFARFRHRTLVALNPDMVQLYESHLYNVSLSCRFMMHGMLAVAAVHDRYTGLTPNYHRTLKESYHWSQCTSLFNKWLSQPLREDHKDPIWATAGMLGILAFASINASSYGEAWPLGPPDSSDLEWTRLGNAKMTLWHIVNPLRPNSIFRIMSETFTKMREPLPVKGRNNMPDDLADVCGIIDSSRKETNPYFEVAHGVSWLQKKDNMTLGAAMMVMGKMHDEFEVALENKDPVALLLLSLWYAKARHTVWWMNFRARYELPAICTYLRLHHQYDTALQALIPWDEARILM

SEQ ID NO: 31890 - DNA, 3719 bp, Muscodor strobelii
  misc_feature: SGI EST ID NO. CUFF.75432.1
  misc_feature: Variant of the nucleotide sequence at SEQ ID NO 31888
gacccgagcaaagggaaattggtggagttcgaatacgactcgaggtttagcgtcgacagcatgctgacgttagcggcggacagaacggagatatgagcggtagatcaaggggtcggagatagaacttcccactttcccaacttcatctcacaatgcaagcggaggcaaatgtgctgcacatctggctacggaagcaatgttagcattttgttaataattcgttcattttacttgaaagccccagaccaatcagataataaccccccaccaactgtatcctagtatggccgcagggtcacaaccagtcaagcggcaacgcaaatcacgattcggctgtaagaactgtaagcttagaaagctcaaatgtgatgaaacgaagccgcattgcatgagatgccgccaatatggagttgtttgtaacttcggcttaaccaatgtagccgatttgcaaccgctctccgagcagcggtctaaaccccagaccaaaaagcagtatatgctaccggtagcaaagtctattagtaatggcgtctggattggagatggaacagagcgatttgaactagacttgcaagaccaggcgctcttcgcccgcttccgtcatcgtacccttgtggcactgaaccccgatatggtacagctctatgaaagtcatctatacaatgtctcgcttagctgccgattcatgatgcatggcatgcttgccgtggcagctgttcatgaccgctatactgggctgaccccaaattatcaccgcacacttaaagagtcatatcactggtcacagtgcacttctcttttcaacaaatggctaagccaacctttaagagaagatcacaaagatccgatatgggcaacagccggcatgctcggcatactcgcatttgcatctatcaatgcttcttcatacggagaggcgtggccgttgggaccaccagactcctccgatctagaatggacgagacttggaaacgctaagatgacgctttggcatatagtcaatccccttcgcccaaatagtatcttccgaatcatgtccgagacattcacaaaaatgcgcgagcccttacctgtaaaggggcgcaacaatatgccagatgatctggcagatgtgtgtggtattattgactcgtcgagaaaggagacgaacccctacttcgaagtcgcgcacggcgtctcatggctccagaagaaagataatatgacattaggcgcagccatgatggttatgggcaaaatgcacgacgaattcgaggtggctctcgagaataaggatccagttgcgctattattgctctccttatggtatgcgaaggcgcgccataccgtttggtggatgaacttcagagcccgatatgaactacccgcgatatgcacatacttacgactacaccatcagtacgatactgcgcttcaggcattgataccatgggatgaagctcggatccttatgtgaatgataacatatgttattacttatgcgtcaaatcaaaaggagatagctgtcgcctcactgcactccagacccagacgacgccttgtttcatcgtgcgaggcaatgaaattggttctaactcttactagacacacaaatggtgcacctattctctcagcgctgttgtcctagaatcattgttggcgatgcgaactagaaggaagaataatatggttgcatctgatgtgcaataaatactaaggggttacgcttaagacggatgcagaacacgtattactgtatgcatgcaaagcagcaagaaaacccacgggattgttgggtgcacgacccgcgctcgaacacgcatcctttgcagaactcagttgtagctttcccatcatccacgcacttttactgcgcccaacagcgcaaacaggctaatgcaaagcgaatgaaactgtttaaagcaggcgcacgacaagagcaaaaataaaaaataattgcaaaaagagtcgaggcgggacatttaaccacacaccccaaccggaaaccgaactcgaactggcgtgctccaggttgtcctgttagcagtctaaccttttaccgcacggccacagtgtaatctaaaggaaccgattgagattagctggtgaaagtcctgcaattaaagcatcctatatagctcaaatcagccgagcatgtgactggagacaggctggtgggtgacgagcaaatgtgggtccccgccagcgacgacagtgatgacgatagtgggtccactgatgcctcagtctggtaaccacctatgggtgcctgtatttgacgcctgggtggtgcttcatccactgtaaggcggcggtagcatcgcccatacggctgctgaagacactgaggccacgaatttcagaattggaaatgaactgaagaagatgcacctattacttttataacacatattctatcaatacaaagaaggaatacacgcctacgcatggatatcaaccatttcatctccttttcaagggactcccgctgcttggtgccaaggaccatagttagcctgggtgtactggccctcttcttgcccgagcttagtatatcctctagctgacaaatgaaacgaactccaagaatgaacggaattgaagcccaatgcgtggtacttgattttgccgcatctaatagaagttgcccgcaggtacagcaacgaagatagcggtcaagacaccagcaccaagcaacgccatcagcatggactgcaagaagatagtatcttgaatttgtcgcagcgccggctcctgaatccaaacttcacgatcgaagaccttgcgcacatagaacctgtgatcgtacctgacgatccagggttcgtcctcatagctattgcacgacccgaacgaatcgaagctacgcttgccttcgcataggaactcagtgctactaccgttgtcatctacgaacagctcccacggtcggacgtgccgatggtgcatgccgtggagcacaacgcacatccccttccatgctgtgatgagtgtcgctatgccgaggacccagaggatggtgaagagggcacgccagccacggccagcagagctgagagtaaggacgatggatccgatgagggctaataagatagttcccacgcctagaccacgcgcaaaagtcactcgggctgggttgccgttgcagattgtccagcggatgaagttgggatgtgcctgcttgcgaagaaccgtctcgatgttgcgagatagcgtgcgaaaagctgaaggatgggtagtgtaggatagggcttgaacaattgctttttgctcccgggatgagagattaagctgtctgggggcgtcgtcgacaatgtaggtagatatgactcgattgatctcagctctgaagggctgaatagtgactagggtccattagcatctgtgttctcggcatagcggtgcatgtcttacatggaagtttagctcccgccgccaggaaagcatccgaagcctgcgaccggtagctcaacccctgagagccggaaaagtacgaagcgctatccccgtactcagagtacgcaggtgtcgagaacggatccttgctttcaactgcttcggatgctttttcgaaatcggtgcccttgaagatttcagccgctgccgtggtttctcttctcgccttatctgcagcatctttttggatcctggctatggcatcatcttccatagtctgtgtccattcaggggctagttcgatctccgaggcgggagcgttgttgaaccgcttttcatattca

SEQ ID NO: 31891 - DNA, 927 bp, Muscodor strobelii
  misc_feature: SGI cDNA ID NO. 570984
  misc_feature: Encodes the peptide sequence at SEQ ID NO 31892
atgcgcgtcttcgtaacaggatcaactggcttcgtcggcactgccgttgtcaaggaactcgtctctcacggccaccaggttgttggtcttactagaaacgagaagggtgtcgcgcagctcaaatctcaaggtgctgagccacttcttggcgatatcacagacctagaatgcctaaagaagggtgcagccggcgctgatgctgttgcgcacttggcgtttgtgcacgacttttcggacttcgtgggctcatgtgccactgaccgcgcggctattgctgccatgggtgacgttcttgctgaagccggtggtgataaggcattggtcatcacttccggcaccatgatgcttccgcacggcaagctgggcaacgaagacgatggcttcgatgcctcaaacccatttggatctactcgcggccagtcggagaccatctgcctcgattacgccaagaagggagttcgaacctcagtcgtgcgcctccctccaacgactcacggtcccggtttgtctggcttcaccggaatgctggtcacgattgcattgcagaagggtgtctcagcatacattggtgatggagagaaccgctggtgtgccggacatcgcgacgatgctgccaaaatttacagacttgcaattgaaaagggaaagcctggtcaagtttaccatgctattggtgaggaggcggtccctgtgaaaaccatcgctactgaaattggcaagcaacttaacattcctgtcgagagcctcccgaaggagaagattgaggagcacttcggcttctttggctttggcatcaatgctgataacattgcctcgagccagaagactaaggatcgcttgggatggacacctaccggtgtaactgttgtggaaagtgttttgccaactgttgagtttgtcaagtctcagcctacacctgtccactag

SEQ ID NO: 31892 - protein, 308 aa, Muscodor strobelii
  misc_feature: SGI Peptide ID NO. 570984
  misc_feature (3)..(225): Pfam Id: PF01370 Pfam Desc: NAD dependent epimerase/dehydratase family
  misc_feature (5)..(208): Pfam Id: PF07993 Pfam Desc: Male sterility protein
  misc_feature (4)..(72): Pfam Id: PF01073 Pfam Desc: 3-beta hydroxysteroid dehydrogenase/isomerase family
  misc_feature (3)..(72): Pfam Id: PF01370 Pfam Desc: NAD dependent epimerase/dehydratase family
  misc_feature (5)..(21): Pfam Id: PF07993 Pfam Desc: Male sterility protein
  misc_feature (3)..(68): Pfam Id: PF05368 Pfam Desc: NmrA-like family
  misc_feature (1)..(34): Pfam Id: PF04321 Pfam Desc: RmlD substrate binding domain
  misc_feature (1)..(303): NCBI GI: 70983870 Blast Desc: oxidoreductase [Aspergillus fumigatus Af293] gi|66845087|gb|EAL85423.1| oxidoreductase, [Aspergillus fumigatus Af293] gi|159123559|gb|EDP48678.1| oxidoreductase, [Aspergillus
  misc_feature (1)..(303): NCBI GI: 119485508 Blast Desc: oxidoreductase, [Neosartorya fischeri NRRL 181] gi|119410344|gb|EAW20291.1| oxidoreductase, [Neosartorya fischeri NRRL 181]
  misc_feature (1)..(285): NCBI GI: 149279833 Blast Desc: 3-beta hydroxysteroid dehydrogenase/isomerase [Pedobacter sp. BAL39] gi|149229423|gb|EDM34815.1| 3-beta hydroxysteroid dehydrogenase/isomerase [Pedobacter sp. BAL39]
  misc_feature (1)..(293): NCBI GI: 27379410 Blast Desc: dyhydroflavanol-4-reductas [Bradyrhizobium japonicum USDA 110] gi|27352561|dbj|BAC49564.1| bll4299 [Bradyrhizobium japonicum USDA 110]
  misc_feature (1)..(293): NCBI GI: 212538827 Blast Desc: oxidoreductase, [Penicillium marneffei ATCC 18224] gi|210069311|gb|EEA23402.1| oxidoreductase, [Penicillium marneffei ATCC 18224]
  misc_feature (1)..(293): NCBI GI: 266628641 Blast Desc: NAD-dependent epimerase/dehydratase [Caulobacter segnis ATCC 21756] gi|264673118|gb|EEZ36518.1| NAD-dependent epimerase/dehydratase [Caulobacter segnis ATCC 21756]
  misc_feature (1)..(284): NCBI GI: 91779544 Blast Desc: epimerase/dehydratase [Burkholderia xenovorans LB400] gi|91692204|gb|ABE35402.1| epimerase/dehydratase [Burkholderia xenovorans LB400]
  misc_feature (1)..(284): NCBI GI: 169780492 Blast Desc: [Aspergillus oryzae RIB40] gi|238505348|ref|XP_002383903.1| oxidoreductase, [Aspergillus flavus NRRL3357] gi|83773450|dbj|BAE63577.1| protein product
  misc_feature (1)..(290): NCBI GI: 19113003 Blast Desc: NAD dependent epimerase/dehydratase family protein [Schizosaccharomyces pombe] gi|74626300|sp|Q9Y7K4.1|YGI2_SCHPO RecName: Full=Uncharacterized protein C2A9.02 NAD dependent
  misc_feature (1)..(293): NCBI GI: 207343291 Blast Desc: YLL056Cp-like protein [Saccharomyces cerevisiae AWRI1631]
  misc_feature (2)..(249): SWISSPROT Homolog: EC 1.1.1.170 Sterol-4-alpha-carboxylate 3-dehydrogenase (decarboxylating)
MRVFVTGSTGFVGTAVVKELVSHGHQVVGLTRNEKGVAQLKSQGAEPLLGDITDLECLKKGAAGADAVAHLAFVHDFSDFVGSCATDRAAIAAMGDVLAEAGGDKALVITSGTMMLPHGKLGNEDDGFDASNPFGSTRGQSETICLDYAKKGVRTSVVRLPPTTHGPGLSGFTGMLVTIALQKGVSAYIGDGENRWCAGHRDDAAKIYRLAIEKGKPGQVYHAIGEEAVPVKTIATEIGKQLNIPVESLPKEKIEEHFGFFGFGINADNIASSQKTKDRLGWTPTGVTVVESVLPTVEFVKSQPTPVH

SEQ ID NO: 31893 - DNA, 1669 bp, Muscodor strobelii
  misc_feature: SGI EST ID NO. CUFF.75436.0
  misc_feature: Variant of the nucleotide sequence at SEQ ID NO 31891
tatcatgcggccggacttcaattccgtccgccttcaatggaccgtgagaaaatacgccgtgataaccgtaaagtgtcgtagatgatgtgagggtgctaatacgtataaagatgaagcatttcctcgttgagagggacaaatatcaaacacacatcgcaagcttcacccaagaacccaggcaaatatttagcaaggcattgctgctatctactattgaaacatatcctctcgaaattttccaagttgcacgatgcgcgtcttcgtaacaggatcaactggcttcgtcggcactgccgttgtcaaggaactcgtctctcacggccaccaggttgttggtcttactagaaacgagaagggtgtcgcgcagctcaaatctcaaggtgctgagccacttcttggcgatatcacagacctagaatgcctaaagaagggtgcagccggcgctgatgctgttgcgcacttggcgtttgtgcacgacttttcggacttcgtgggctcatgtgccactgaccgcgcggctattgctgccatgggtgacgttcttgctgaagccggtggtgataaggcattggtcatcacttccggcaccatgatgcttccgcacggcaagctgggcaacgaagacgatggcttcgatgcctcaaacccatttggatctactcgcggccagtcggagaccatctgcctcgattacgccaagaagggagttcgaacctcagtcgtgcgcctccctccaacgactcacggtcccggtttgtctggcttcaccggaatgctggtcacgattgcattgcagaagggtgtctcagcatacattggtgatggagagaaccgctggtgtgccggacatcgcgacgatgctgccaaaatttacagacttgcaattgaaaagggaaagcctggtcaagtttaccatgctattggtgaggaggcggtccctgtgaaaaccatcgctactgaaattggcaagcaacttaacattcctgtcgagagcctcccgaaggagaagattgaggagcacttcggcttctttggctttggcatcaatgctgataacattgcctcgagccagaagactaaggatcgcttgggatggacacctaccggtgtaactgttgtggaaagtgttttgccaactgttgagtttgtcaagtctcagcctacacctgtccactagaagagtctcaaataaatcaatgacatcgtatttggtatgctgtagtggaatatagtatcaatcccactagagctttctgccttcatagtaccactataatttctcaagtgatcgatggttaagcaaaaggggaggcgagctccaagagtcatgacgggatgccatgacgaattggatcaaatgcagattccccgtcacatcaacattggttcatccaaccgaccttaacgcgccagttaccctcatcagtaatctcgcccgcagtccatttatggccatgcccttctcttccagggtccgtggtacagtcgtcagcgatcttgttgacatagtccgcgatatctccacacgatggagcaggattaatcgcaccgctattatcgttgcagagccatatcccaacattgtagggaccgcatgacactaccgaacagacatttgggccatcgccaactgtgcatgaccctccatttttggccaggtttgttgctg

SEQ ID NO: 31894 - DNA, 654 bp, Muscodor strobelii
  misc_feature: SGI cDNA ID NO. 570985
  misc_feature: Encodes the peptide sequence at SEQ ID NO 31895
atgcgtttctcaacgattgctgcccttttgggcgcgggctttctcgccaatgcagcgtccgactctcgcacgcctcaggctgttcctgactaccaaccagtcgaaagatataccgttattcccatgacctggactggcatactggatagatggggacctgagatgtctctcaacggcacaatcgaggaagtgacgcgacaaatccggaaaacccgaagaggtttcacttgggagaaacatcgacgtggtcttggactatcggctcgcgattttagcaaaaggaacaacgagaaagaggagcattgcgccaaggactctggaggttccgttataggtcctttagagcccaatgtgagaacagcagcaacaaacctggccaaaaatggagggtcatgcacagttggcgatggcccaaatgtctgttcggtagtgtcatgcggtccctacaatgttgggatatggctctgcaacgataatagcggtgcgattaatcctgctccatcgtgtggagatatcgcggactatgtcaacaagatcgctgacgactgtaccacggaccctggaagagaagggcatggccataaatggactgcgggcgagattactgatgagggtaactggcgcgttaaggtcggttggatgaaccaatgttga

SEQ ID NO: 31895 - protein, 217 aa, Muscodor strobelii
  misc_feature: SGI Peptide ID NO. 570985
  misc_feature (4)..(183): NCBI GI: 46133985 Blast Desc: FG09132.1 [Gibberella zeae PH-1]
  misc_feature (14)..(212): NCBI GI: 256723698 Blast Desc: NECHADRAFT_86628 [Nectria haematococca mpVI 77-13-4]
  misc_feature (1)..(211): NCBI GI: 238839568 Blast Desc: [Microsporum canis CBS 113480]
  misc_feature (1)..(183): NCBI GI: 169770867 Blast Desc: [Aspergillus oryzae RIB40] gi|83767762|dbj|BAE57901.1| protein product [Aspergillus oryzae]
  misc_feature (40)..(211): NCBI GI: 169785409 Blast Desc: [Aspergillus oryzae RIB40] gi|83775913|dbj|BAE66032.1| protein product [Aspergillus oryzae]
  misc_feature (1)..(183): NCBI GI: 238486654 Blast Desc: conserved [Aspergillus flavus NRRL3357] gi|220699444|gb|EED55783.1| conserved [Aspergillus flavus NRRL3357]
  misc_feature (1)..(200): NCBI GI: 169785397 Blast Desc: [Aspergillus oryzae RIB40] gi|83775907|dbj|BAE66026.1| protein product [Aspergillus oryzae]
  misc_feature (1)..(196): NCBI GI: 238506391 Blast Desc: conserved [Aspergillus flavus NRRL3357] gi|220689110|gb|EED45461.1| conserved [Aspergillus flavus NRRL3357]
  misc_feature (1)..(196): NCBI GI: 238497574 Blast Desc: conserved [Aspergillus flavus NRRL3357] gi|220693296|gb|EED49641.1| conserved [Aspergillus flavus NRRL3357]
  misc_feature (33)..(211): NCBI GI: 238506405 Blast Desc: conserved [Aspergillus flavus NRRL3357] gi|220689117|gb|EED45468.1| conserved [Aspergillus flavus NRRL3357]
MRFSTIAALLGAGFLANAASDSRTPQAVPDYQPVERYTVIPMTWTGILDRWGPEMSLNGTIEEVTRQIRKTRRGFTWEKHRRGLGLSARDFSKRNNEKEEHCAKDSGGSVIGPLEPNVRTAATNLAKNGGSCTVGDGPNVCSVVSCGPYNVGIWLCNDNSGAINPAPSCGDIADYVNKIADDCTTDPGREGHGHKWTAGEITDEGNWRVKVGWMNQC

SEQ ID NO: 31896 - DNA, 315 bp, Muscodor strobelii
  misc_feature: SGI EST ID NO. CUFF.75440.0
  misc_feature: Variant of the nucleotide sequence at SEQ ID NO 31894
ctcgctgctctacttatcagaagcgaaaaattatttgagttcagttcttttctctgaaatgcgtttctcaacgattgctgcccttttgggcgcgggctttctcgccaatgcagcggtaggtccctatatcagccttgcgaattgttattgacgccaatatttgcagtccgactctcgcacgcctcaggctgttcctgactaccaaccagtcgaaagatataccgttattcccatgacctggactggcatactggatagatggggacctgagatgtctctcaacggcacaatcgaggaagtgacgcgacaaatccg

SEQ ID NO: 31897 - DNA, 555 bp, Muscodor strobelii
  misc_feature: SGI cDNA ID NO. 570986
  misc_feature: Encodes the peptide sequence at SEQ ID NO 31898
atgctagtgcaggcagataccaatatccccatcatggagccttccgagccctcgatcaagctcgatgacaacggaaccgagtttgaagcgcagtcatacactcgcggcgtcaacacccctccgaccacactcttcgatgagccatacgctgcccgtcgatacgttgctccatcaccaggcaagagatacaaaatatttgagaaagagaccggccgcgccatcagtctcgacaatcactggctccggctctctgaacccgaggagctcgatgacgcgaagaaaacttggcttattatcgaaaagaacaactacttagacttctacaatgaagctagaggaaaatacatgggccacgacaaccataatatccaggctgaagtatcgcatcatgatttgcgggagctgttcacacttcagcatgaagtgaacgagtggtatcggatcgcgtctccgttttggtctcatacattgatgacggtccacgtggctgaggacggaaagagtctcacgaggaggaagcatggtattactttgtggaaatttgttgaggtttga

SEQ ID NO: 31898 - protein, 184 aa, Muscodor strobelii
  misc_feature: SGI Peptide ID NO. 570986
  misc_feature (22)..(184): NCBI GI: 256724888 Blast Desc: NECHADRAFT_77040 [Nectria haematococca mpVI 77-13-4]
  misc_feature (42)..(184): NCBI GI: 238842158 Blast Desc: conserved [Microsporum canis CBS 113480]
  misc_feature (36)..(184): NCBI GI: 46109910 Blast Desc: FG01837.1 [Gibberella zeae PH-1]
  misc_feature (22)..(184): NCBI GI: 154289769 Blast Desc: BC1G_15956 [Botryotinia fuckeliana B05.10] gi|150848775|gb|EDN23968.1| BC1G_15956 [Botryotinia fuckeliana B05.10]
  misc_feature (29)..(184): NCBI GI: 156055820 Blast Desc: SS1G_05262 [Sclerotinia sclerotiorum 1980] gi|154703046|gb|EDO02785.1| SS1G_05262 [Sclerotinia sclerotiorum 1980]
  misc_feature (56)..(183): NCBI GI: 256728514 Blast Desc: NECHADRAFT_50572 [Nectria haematococca mpVI 77-13-4]
  misc_feature (55)..(184): NCBI GI: 154314233 Blast Desc: BC1G_05210 [Botryotinia fuckeliana B05.10] gi|150848855|gb|EDN24048.1| BC1G_05210 [Botryotinia fuckeliana B05.10]
  misc_feature (53)..(184): NCBI GI: 46126651 Blast Desc: FG07703.1 [Gibberella zeae PH-1]
  misc_feature (39)..(184): NCBI GI: 169776241 Blast Desc: [Aspergillus oryzae RIB40] gi|83771322|dbj|BAE61454.1| protein product [Aspergillus oryzae]
  misc_feature (56)..(184): NCBI GI: 156057461 Blast Desc: SS1G_04462 [Sclerotinia sclerotiorum 1980] gi|154702247|gb|EDO01986.1| SS1G_04462 [Sclerotinia sclerotiorum 1980]
MLVQADTNIPIMEPSEPSIKLDDNGTEFEAQSYTRGVNTPPTTLFDEPYAARRYVAPSPGKRYKIFEKETGRAISLDNHWLRLSEPEELDDAKKTWLIIEKNNYLDFYNEARGKYMGHDNHNIQAEVSHHDLRELFTLQHEVNEWYRIASPFWSHTLMTVHVAEDGKSLTRRKHGITLWKFVEV

SEQ ID NO: 31899 - DNA, 495 bp, Muscodor strobelii
  misc_feature: SGI cDNA ID NO. 570987
  misc_feature: Encodes the peptide sequence at SEQ ID NO 31900
atggcggccaaaggttcgccggtgctcggtgaagatgaagattatatcgacttcatatcccgcaccttgagcaagcgctacatgatcatcgagaaagactccggccgagcaattacaatcttcaacagatgggttcacctcgtaccggtccataaccacgccattgagcatcaatcctggcttcttgtgggtaccaacaactacttggggttcttcagcgaagagcaagggcaattcattagccatgatggcatgtttgatagttcgggccatctaaagcttgagcctacgcaacacgagtcacgtgccgtcttcagcgtccaacatgaggcgaatgagtggtatcgcatcacatccccacacgataggctgacattgctctttgtcactgttggcttcgacggggcgagtctcgagcgaagactgtatgggaacacattatttaagtttgttgaggttgaagacatgggagaggcgaaggattctagactctaa

SEQ ID NO: 31900 - protein, 164 aa, Muscodor strobelii
  misc_feature: SGI Peptide ID NO. 570987
  misc_feature (27)..(153): NCBI GI: 256724888 Blast Desc: NECHADRAFT_77040 [Nectria haematococca mpVI 77-13-4]
  misc_feature (27)..(153): NCBI GI: 238842158 Blast Desc: conserved [Microsporum canis CBS 113480]
MAAKGSPVLGEDEDYIDFISRTLSKRYMIIEKDSGRAITIFNRWVHLVPVHNHAIEHQSWLLVGTNNYLGFFSEEQGQFISHDGMFDSSGHLKLEPTQHESRAVFSVQHEANEWYRITSPHDRLTLLFVTVGFDGASLERRLYGNTLFKFVEVEDMGEAKDSRL

SEQ ID NO: 31901 - DNA, 465 bp, Muscodor strobelii
  misc_feature: SGI cDNA ID NO. 570988
  misc_feature: Reduced expression when VOC is produced
  misc_feature: Encodes the peptide sequence at SEQ ID NO 31902
atgcctcgtcaatcacgatcctccggccgtcccgccgccgccccctctcgccctaccgccgctcctcgcgccgctcccacctccacaccacagcagcagcagcggcccgcgagcacatatgctcccaatcagactcctcccgctgccgcgcctgctgctactcagggcggctcccagggccccggcttgttcgccaacatggcgagcaccgctgccggtgtagcagtcggctcttccatcggccacgccatcggcggattcttcggcggcggttcttccgcaccggctgaggcctcgccccaagccgtccccacccagacacacacccagcaggctcagaacaactgcgctggtgccgccgagtctttcacaaagtgcatggacgataacggtggaaacatgcagatctgcaactggtacctcgagcagctcaaggcctgccaggctgctgctagacagtactag

SEQ ID NO: 31902 - protein, 154 aa, Muscodor strobelii
  misc_feature: SGI Peptide ID NO. 570988
  misc_feature (109)..(150): Pfam Id: PF06747 Pfam Desc: CHCH domain
  misc_feature (1)..(154): NCBI GI: 171684865 Blast Desc: protein product [Podospora anserina] gi|170942393|emb|CAP68045.1| protein product [Podospora anserina]
  misc_feature (1)..(153): NCBI GI: 46129358 Blast Desc: FG08864.1 [Gibberella zeae PH-1]
  misc_feature (1)..(150): NCBI GI: 256734207 Blast Desc: NECHADRAFT_59388 [Nectria haematococca mpVI 77-13-4]
  misc_feature (1)..(154): NCBI GI: 226294593 Blast Desc: conserved [Paracoccidioides brasiliensis Pb18]
  misc_feature (1)..(154): NCBI GI: 156035917 Blast Desc: SS1G_13163 [Sclerotinia sclerotiorum 1980] gi|154698567|gb|EDN98305.1| SS1G_13163 [Sclerotinia sclerotiorum 1980]
  misc_feature (1)..(154): NCBI GI: 154290544 Blast Desc: BC1G_15616 [Botryotinia fuckeliana B05.10] gi|150847511|gb|EDN22704.1| BC1G_15616 [Botryotinia fuckeliana B05.10]
  misc_feature (1)..(154): NCBI GI: 85113388 Blast Desc: NCU02154 [Neurospora crassa OR74A] gi|28926298|gb|EAA35277.1| conserved [Neurospora crassa OR74A]
  misc_feature (1)..(154): NCBI GI: 39970537 Blast Desc: MGG_02735 [Magnaporthe grisea 70-15] gi|145017455|gb|EDK01818.1| MGG_02735 [Magnaporthe grisea 70-15]
  misc_feature (67)..(154): NCBI GI: 149210003 Blast Desc: MGCH7_ch7g483 [Magnaporthe grisea 70-15] gi|86196438|gb|EAQ71076.1| MGCH7_ch7g483 [Magnaporthe grisea 70-15]
  misc_feature (32)..(154): NCBI GI: 226279287 Blast Desc: PAAG_05900 [Paracoccidioides brasiliensis Pb01]
  misc_feature: Useful for introducing or modulating the production of volatile compounds
MPRQSRSSGRPAAAPSRPTAAPRAAPTSTPQQQQRPASTYAPNQTPPAAAPAATQGGSQGPGLFANMASTAAGVAVGSSIGHAIGGFFGGGSSAPAEASPQAVPTQTHTQQAQNNCAGAAESFTKCMDDNGGNMQICNWYLEQLKACQAAARQY

SEQ ID NO: 31903 - DNA, 1011 bp, Muscodor strobelii
  misc_feature: SGI EST ID NO. CUFF.75520.1
  misc_feature: Variant of the nucleotide sequence at SEQ ID NO 31901
ctgcactccagctatttgtccgtttttcactctcttgctcttaaatccgagaaccctgaacctcaacaaccacgacagcttcatcagagcttcctccttgcgcgcttccatacaacgtctcgagtcttctcacctcaacaacacatccacaatgcctcgtcaatcacgatcctccggccgtcccgccgccgccccctctcgccctaccgccgctcctcgcgccgctcccacctccacaccacagcagcagcagcggcccgcgagcacatatgctcccaatcagactcctcccgctgccgcgcctgctgctactcagggcggctcccagggccccggcttgttcgccaacatggcgagcaccgctgccggtgtagcagtcggctcttccatcggccacgccatcggcggattcttcggcggcggttcttccgcaccggctgaggcctcgccccaagccgtccccacccagacacacacccagcaggctcagaacaactgcgctggtgccgccgagtctttcacaaagtgcatggacgataacggtggaaacatgcagatctgcaactggtacctcgagcagctcaaggcctgccaggctgctgctagacagtactagatgggtaccgcttggtgatgaggaggcgggaggggagagtagttgatgaagaggaaggctgagtgtgttgatgacagaactccactttgcgttgcattcatgagttggtggtaaaaaagcatgaaaatgagtctttcgatagactgtacatagcggtactttagattggttcgctattgagcattggttggctgatcgtccatcgctgacaacagctcttgtatcaacaatatactccagaatgagcataaaatacccgaatcccccctttgatactttgtctacgctcttaagcacgaaggacatgttcacgaagataatgagaaccactatcattagccctacgaagccagcactgcaagtctagatgccacggttggcatgagacataggcg

SEQ ID NO: 31904 - DNA, 849 bp, Muscodor strobelii
  misc_feature: SGI cDNA ID NO. 570989
  misc_feature: Reduced expression when VOC is produced
  misc_feature: Encodes the peptide sequence at SEQ ID NO 31905
atggactatcgatcttctccgcgcgatgagcgtcccgaccgccatgaccgccatgagcgcgatcgcgagcactacgactcgcgctctcccacaccacagtcgcgttacacagcttcgcctcctccctcccgtcgccggcgcccctccagccgatccccgcctcgcaatggcagctatcgctctgacagccgaagccctagtcgagcccgagaccgatcccgaagccctagtcgtggtcgtggtcgcacggagagccgaagccctctgagaggaagcactaagattgttgtggagaagctgtccaagaacattaccgagaaccacctgcacgagatattcggtcgatatggcgagatccgagatctcgacctgcccatgagccgccagttcggcaccaatcgaggaacggcctacatcctctacattcatgaagccgacgccgaggccgccatcgcccacatgcacgaggcccagctggatggtaacattatcaatgtctctattgtcctaccccgccgcaagttctccccttcgcctcctgtcgctagccgcggcgccaacatcgatcctcgcgttcccgcccctacgtccttccgcggctcgggccgtggaggaggagacccagatcttactcaccctcccgatcacctccgcgtcgcaatcgaagccggtcccgctcatacgactcacgctcgccatctcctccccgtcgccgaggtgggcgacggagcgaatatgacaatgttcatcccgacagacgtcgaagccctagctatgacagctatcgagaccgcagcccgtctcgtagcccccggtctcccagtcgctcgagaggctatcgttgattga

SEQ ID NO: 31905 - protein, 282 aa, Muscodor strobelii
  misc_feature: SGI Peptide ID NO. 570989
  misc_feature (95)..(166): Pfam Id: PF00076 Pfam Desc: RNA recognition motif. (a.k.a. RRM, RBD, or RNP domain)
  misc_feature (20)..(193): NCBI GI: 256733621 Blast Desc: NECHADRAFT_77914 [Nectria haematococca mpVI 77-13-4]
  misc_feature (87)..(199): NCBI GI: 170940369 Blast Desc: protein product [Podospora anserina]
  misc_feature (92)..(203): NCBI GI: 156040784 Blast Desc: SS1G_11370 [Sclerotinia sclerotiorum 1980] gi|154695754|gb|EDN95492.1| SS1G_11370 [Sclerotinia sclerotiorum 1980]
  misc_feature (20)..(193): NCBI GI: 261353717 Blast Desc: conserved [Verticillium albo-atrum VaMs.102]
  misc_feature (92)..(191): NCBI GI: 85089585 Blast Desc: NCU09901 [Neurospora crassa OR74A] gi|28919323|gb|EAA28780.1| [Neurospora crassa OR74A]
  misc_feature (90)..(207): NCBI GI: 154303874 Blast Desc: BC1G_08821 [Botryotinia fuckeliana B05.10] gi|150854405|gb|EDN29597.1| BC1G_08821 [Botryotinia fuckeliana B05.10]
  misc_feature (99)..(193): NCBI GI: 46128317 Blast Desc: FG08536.1 [Gibberella zeae PH-1]
  misc_feature (60)..(191): NCBI GI: 145610314 Blast Desc: MGG_02580 [Magnaporthe grisea 70-15] gi|145017640|gb|EDK02003.1| MGG_02580 [Magnaporthe grisea 70-15]
  misc_feature (60)..(191): NCBI GI: 149209627 Blast Desc: MGCH7_ch7g296 [Magnaporthe grisea 70-15] gi|86196251|gb|EAQ70889.1| MGCH7_ch7g296 [Magnaporthe grisea 70-15]
  misc_feature (31)..(185): NCBI GI: 116194055 Blast Desc: CHGG_06745 [Chaetomium globosum CBS 148.51] gi|88182658|gb|EAQ90126.1| CHGG_06745 [Chaetomium globosum CBS 148.51]
  misc_feature: Useful for introducing or modulating the production of volatile compounds
MDYRSSPRDERPDRHDRHERDREHYDSRSPTPQSRYTASPPPSRRRRPSSRSPPRNGSYRSDSRSPSRARDRSRSPSRGRGRTESRSPLRGSTKIVVEKLSKNITENHLHEIFGRYGEIRDLDLPMSRQFGTNRGTAYILYIHEADAEAAIAHMHEAQLDGNIINVSIVLPRRKFSPSPPVASRGANIDPRVPAPTSFRGSGRGGGDPDLTHPPDHLRVAIEAGPAHTTHARHLLPVAEVGDGANMTMFIPTDVEALAMTAIETAARLVAPGLPVAREAIVD

SEQ ID NO: 31906 - DNA, 3624 bp, Muscodor strobelii
  misc_feature: SGI EST ID NO. CUFF.75468.2
  misc_feature: Variant of the nucleotide sequence at SEQ ID NO 31904
ctgaacttgcaattcattcacccattagcaaatcagtatatcccacgcgttgtctttggcattagagattccaagtcaaacatttctcagaagctggcaatagctgagtggagctgaagctgagacagcgttgctgacctacagcctgtccgcagtcctccctgctgttctacctcatcgcgggttgcgacttctctcgactcctcctcctccacattggcataactttacctcttcttgacgccgttgctttcagcacaacgtgctagactcctcactatggactatcgatcttctccgcgcgatgagcgtcccgaccgccatgaccgccatgagcgcgatcgcgagcactacgactcgcgctctcccacaccacagtcgcgttacacagcttcgcctcctccctcccgtcgccggcgcccctccagccgatccccgcctcgcaatggcagctatcgctctgacagccgaagccctagtcgagcccgagaccgatcccgaagccctagtcgtggtcgtggtcgcacggagagccgaagccctctgagaggaagcactaagattgttgtggagaagctgtccaagaacattaccgagaaccacctgcacgagatattcggtcgatatggcgagatccgagatctcgacctgcccatgagccgccagttcggcaccaatcgaggaacggcctacatcctctacattcatgaagccgacgccgaggccgccatcgcccacatgcacgaggcccagctggatggtaacattatcaatgtctctattgtcctaccccgccgcaagttctccccttcgcctcctgtcgctagccgcggcgccaacatcgatcctcgcgttcccgcccctacgtccttccgcggctcgggccgtggaggaggaggtatgggcggtggcggcggcggcagaggtgggaggaatcctcgcgcctctcctcgtcacggccgctcgtcccgtgaaaacttggatacctacagacccagatcttactcaccctcccgatcacctccgcgtcgcaatcgaagccggtcccgctcatacgactcacgctcgccatctcctccccgtcgccgaggtgggcgacggagcgaatatgacaatgttcatcccgacagacgtcgaagccctagctatgacagctatcgagaccgcagcccgtctcgtagcccccggtctcccagtcgctcgagaggctatcgttgattgacaacttgaaagtcaaaaggaaatcgagtgagcaggggattgtggatgacgagaagagcgagaagagacgtgcctgattaaagtggattggcgggatatgcggcagaaacggtcgcagacattgggcattgatgttcaattgtcaacttaagactacagcatgcacggccttaggcgaaacgggctgataatggcagcagttgttttaggcttccagccgattatcaaaccctcatggccatacatcagaaagacttctatcggcaatgttgggtcatcacagctgtcctctgaactcatgagtgataggatgggcggtagcgtaatctcatgacccaagactgattgtgcgggtctcaacgagtcgacacccaccagcacaatatatctaggcggaaaggtggctcgcttcagaaggtgacgagcaagccaatatcattccgcgacggtcatggttttgtagaataagggaggacagccaagggcggtgagaattctgtgcgcaaagtcgcaaacatggctgaagaggccaggttcggttcctgcgttccgtacgtcacagtccccctgtgtgtgtttaatgcaaccgcgactagttgttcctaataggctccactaagtatacgaaagtgaataaaaagcctgtttctaatttgccgtagctagagcgggtctgagatcgagaatgccattcttcaagaaactaatgctggtcaagctgtctgtggaggtgtccgaaggtgaccttgggggttactgttgatcagtcagctcgccagggttcccgaatccctgggatccccaagccaaagcccagccagtgggttgcaggacggcgggcgaaattatgcccgcctgtgccccacaatttgttaccttactcaatcaacgggcaattattctcgagcaaacgcacatgtaacgggatgctagcttcaggactgctcgtcctgatattggcatttgagtcgtcataattgaagagctgaataatgaagatcattcgctaaactatttcgagtaagaaagtgcgaaagcagcatacgacctagttacccgtgttacgcagccgacgggcaatctttcaacacatcgcgagaataggatgataaaccttcgtgacagggtcatgggcgccatcgcgatcctcgtcgcctcccgttttgctgctctgttcttttgagaagtacggatcagtcattcaactctttgtcatcaggatgaagatgtcgaacatcatgataatctcctgcagggttgtgatattcatcactcatcaccatgattaagattaatgactagtgttaatttcataaccctgaagtcctgcgatgatgttcacccattcggcaaacgaagcgactcaaaacacaagatgtataaagacacgagatcatgctacttgtaattgagagcatcaaatagtcaaacatctgcaactcgatctattatcaacttcacttcatcaaatcatatcgcactcagcttttgctaaataggaaacaatggcttcttccgctcaacctattcccgctcctcaacgcattactgcgtcaaatctacccatttcagcttcgacggccgcagacccaaaggcagaacctggcgttgaagtcattgtcgataccatctcagtggatcctatccctgggatgactggattggctcgaggacgagtcgcaaccaacaagtctgtaccgactagcaatgatggacatggcaatattccgctagacgatgtccctggtttcggtatcgttctgcccaacgggacccatatgtattacatagacattgccccgcatactgaagggacgatgcatcgtaccacgtcaaccgactacctaattgtcattcagggcaccctgagtttcatgactccctctggtccttttaatatcgcgactggctatggcgaggctaaggaaacgcttgctcatcctggcgcaactgttgttcaacgtggtatcatgcacgctctttccaaccgcaccgatcaatggcttcgtcttcttggggtcgttatatcttcagctcccaatcgcgttccagtttcggccgactcatcttcagcgcagcaagagccccggattttgaacgatgagtggctcgcgtgagctcacgaggacgtcatctgtcattaataaccgtggagttgcaagagacactgcctcaggtgcctcaggtggtaaggcggtttcatacttgatgtaacaccgcacacccccacgcgcttatggcggctgtggccgcgaatggcatcccgcaaaatggcttggctagcgacgaacgtgagttcggactggtcgaactcgcgcgataacaacctgtactactatagttgagtcatttcgtgaaactttagactcagtctgttatcgccaatacagtcagaagtcttac

SEQ ID NO: 31907 - DNA, 612 bp, Muscodor strobelii
  misc_feature: SGI cDNA ID NO. 570990
  misc_feature: Elevated expression when VOC is produced
  misc_feature: Encodes the peptide sequence at SEQ ID NO 31908
atggcttcttccgctcaacctattcccgctcctcaacgcattactgcgtcaaatctacccatttcagcttcgacggccgcagacccaaaggcagaacctggcgttgaagtcattgtcgataccatctcagtggatcctatccctgggatgactggattggctcgaggacgagtcgcaaccaacaagtctgtaccgactagcaatgatggacatggcaatattccgctagacgatgtccctggtttcggtatcgttctgcccaacgggacccatatgtattacatagacattgccccgcatactgaagggacgatgcatcgtaccacgtcaaccgactacctaattgtcattcagggcaccctgagtttcatgactccctctggtccttttaatatcgcgactggctatggcgaggctaaggaaacgcttgctcatcctggcgcaactgttgttcaacgtggtatcatgcacgctctttccaaccgcaccgatcaatggcttcgtcttcttggggtcgttatatcttcagctcccaatcgcgttccagtttcggccgactcatcttcagcgcagcaagagccccggattttgaacgatgagtggctcgcgtga

SEQ ID NO: 31908 - protein, 203 aa, Muscodor strobelii
  misc_feature: SGI Peptide ID NO. 570990
  misc_feature (48)..(178): NCBI GI: 189190976 Blast Desc: cupin domain containing protein [Pyrenophora tritici-repentis Pt-1C-BFP] gi|187973433|gb|EDU40932.1| cupin domain containing protein [Pyrenophora tritici-repentis
  misc_feature (83)..(193): NCBI GI: 242822868 Blast Desc: conserved [Talaromyces stipitatus ATCC 10500] gi|218712896|gb|EED12321.1| conserved [Talaromyces stipitatus ATCC 10500]
  misc_feature (25)..(181): NCBI GI: 169596350 Blast Desc: SNOG_00933 [Phaeosphaeria nodorum SN15] gi|111071308|gb|EAT92428.1| SNOG_00933 [Phaeosphaeria nodorum SN15]
  misc_feature (83)..(178): NCBI GI: 256729592 Blast Desc: NECHADRAFT_83579 [Nectria haematococca mpVI 77-13-4]
  misc_feature (87)..(183): NCBI GI: 169765017 Blast Desc: [Aspergillus oryzae RIB40] gi|238503700|ref|XP_002383082.1| conserved [Aspergillus flavus NRRL3357] gi|83764834|dbj|BAE54978.1| protein product oryzae]
  misc_feature (76)..(178): NCBI GI: 189212065 Blast Desc: cupin domain containing protein [Pyrenophora tritici-repentis Pt-1C-BFP] gi|187979558|gb|EDU46184.1| cupin domain containing protein [Pyrenophora tritici-repentis
  misc_feature (83)..(181): NCBI GI: 189202976 Blast Desc: cupin domain containing protein [Pyrenophora tritici-repentis Pt-1C-BFP] gi|187984923|gb|EDU50411.1| cupin domain containing protein [Pyrenophora tritici-repentis
  misc_feature (83)..(178): NCBI GI: 169607216 Blast Desc: SNOG_06664 [Phaeosphaeria nodorum SN15] gi|160707177|gb|EAT86495.2| SNOG_06664 [Phaeosphaeria nodorum SN15]
  misc_feature (82)..(178): NCBI GI: 259483967 Blast Desc: TPA: uncharacterized protein uncharacterized protein binA ; [Source:UniProtKB/TrEMBL;Acc:O74707] [Aspergillus nidulans FGSC A4]
  misc_feature (83)..(178): NCBI GI: 39968041 Blast Desc: MGG_02113 [Magnaporthe grisea 70-15] gi|145012995|gb|EDJ97636.1| MGG_02113 [Magnaporthe grisea 70-15]
  misc_feature: Useful for introducing or modulating the production of volatile compounds
MASSAQPIPAPQRITASNLPISASTAADPKAEPGVEVIVDTISVDPIPGMTGLARGRVATNKSVPTSNDGHGNIPLDDVPGFGIVLPNGTHMYYIDIAPHTEGTMHRTTSTDYLIVIQGTLSFMTPSGPFNIATGYGEAKETLAHPGATVVQRGIMHALSNRTDQWLRLLGVVISSAPNRVPVSADSSSAQQEPRILNDEWLA

SEQ ID NO: 31909 - DNA, 3624 bp, Muscodor strobelii; identical to SEQ ID NO: 31906
  misc_feature: SGI EST ID NO. CUFF.75468.2
  misc_feature: Variant of the nucleotide sequence at SEQ ID NO 31907

SEQ ID NO: 31910 - DNA, 1431 bp, Muscodor strobelii
  misc_feature: SGI cDNA ID NO. 570991
  misc_feature: Reduced expression when VOC is produced
  misc_feature: Encodes the peptide sequence at SEQ ID NO 31911
atggagcacgatacgagcagtaaccactttgcgactgggagcgcctctttcagtctgcccacaggagatttcccattaagaagtggcacacctaacactgaccgtaatcccttcggagatgagcgcgcagattcaagtgctgcccagcacatcgccgggtccaacccgttcacgtcacccgaaatatctcggcctgcatctagctttgatacttccagtgcaatcggccaaccacgaggtcaacggtatttccattctcgcagaatcaagaagggggaagttgagaagccgtggttggagaagccagaccccaaggagaaatgggtcaccattttgcccatcatcggcatattcgtaggcttggctatttctggcttcctagtgtacgacggtatctcgagtgtcgtccaacacaaatactgcctggtcctcgaagatacgttcagcactttcaacaccgacgtttggacaaaggaggtacaagtcggtgggtttggaaatggcgaatttgagcaaactaccgctggcgacgaaaacgtctacgtcgaaaatgggcacctcttcatcaaacccactcttcaggatgcggacttgatcaacaaggattctacaatcaatctcttgaaggatggaacctgtacctcaaaattgtaccgtgattgtgttgctgcgaccaacaccacgaccggcaatgccactattgtaccgcccaccaggtctggacgtattaacaccaaaaagggtgccactctcaagtatggaagagtcgaagtcacagctaagttgcctcagggtgactggctttggcctgcgatctggatgttacccgtcgatgacaaatatggaccgtggcccacgagcggtgaaatcgatatcatggagagtcgaggcaacaactacacttatgcacaaggcggcaacaacatcatctcatctgcccttcactggggacctgatcaagctaatgatgcatggtggcggactaatgtcaaacgcgaagccctgcacactacgtactcaaaaggcttcaacacttttggcctcgaatggtcgcagaagtacatgtttacctatgtcaacacccgtctccttcaagttctttataccaactttgatgtgcctctctggacacgcggaaacttccccgtcgcagacgcgaacggaactcgttatgccaatccgtgggacacaggtcgcgccaacacacccttcgaccaggaattttatctcatcctgaacgtcgccgtcggcggcacaaatggatggttcagagacggcgcaagcggaaagccatggcttgacagctctcctaacgcaaagaaggacttctggaacgcgcaggactcttggttcccaacatggaagaacccagctatggaagtcagcaaggttgcgatgtggcaacagtgcgatggtaatgaggagctctga

SEQ ID NO: 31911 - protein, 476 aa, Muscodor strobelii
  misc_feature: SGI Peptide ID NO. 570991
  misc_feature (192)..(401): Pfam Id: PF00722 Pfam Desc: Glycosyl hydrolases family 16
  misc_feature (240)..(304): Pfam Id: PF00722 Pfam Desc: Glycosyl hydrolases family 16
  misc_feature (21)..(476): NCBI GI: 149209607 Blast Desc: MGCH7_ch7g286 [Magnaporthe grisea 70-15] gi|86196241|gb|EAQ70879.1| MGCH7_ch7g286 [Magnaporthe grisea 70-15]
  misc_feature (21)..(476): NCBI GI: 145610324 Blast Desc: MGG_02573 [Magnaporthe grisea 70-15] gi|145017646|gb|EDK02009.1| MGG_02573 [Magnaporthe grisea 70-15]
  misc_feature (25)..(474): NCBI GI: 170940373 Blast Desc: protein product [Podospora anserina]
  misc_feature (15)..(476): NCBI GI: 116194045 Blast Desc: CHGG_06740 [Chaetomium globosum CBS 148.51] gi|88182653|gb|EAQ90121.1| CHGG_06740 [Chaetomium globosum CBS 148.51]
  misc_feature (25)..(476): NCBI GI: 85089591 Blast Desc: NCU09904 [Neurospora crassa OR74A] gi|28919326|gb|EAA28783.1| NCU09904 [Neurospora crassa OR74A]
  misc_feature (27)..(476): NCBI GI: 154300088 Blast Desc: BC1G_11233 [Botryotinia fuckeliana B05.10] gi|150856846|gb|EDN32038.1| BC1G_11233 [Botryotinia fuckeliana B05.10]
  misc_feature (57)..(476): NCBI GI: 256733622 Blast Desc: glycoside hydrolase family 16 [Nectria haematococca mpVI 77-13-4]
  misc_feature (57)..(474): NCBI GI: 46128313 Blast Desc: FG08534.1 [Gibberella zeae PH-1]
  misc_feature (27)..(476): NCBI GI: 156055532 Blast Desc: glucan 1,3-beta-glucosidase [Sclerotinia sclerotiorum 1980] gi|154702902|gb|EDO02641.1| glucan 1,3-beta-glucosidase [Sclerotinia sclerotiorum 1980]
  misc_feature (27)..(476): NCBI GI: 261353714 Blast Desc: beta-1,3-glucan-binding protein [Verticillium albo-atrum VaMs.102]
  misc_feature (142)..(418): SWISSPROT Homolog: EC 3.2.1.39 Glucan endo-1,3-beta-D-glucosidase
  misc_feature: Useful for introducing or modulating the production of volatile compounds
MEHDTSSNHFATGSASFSLPTGDFPLRSGTPNTDRNPFGDERADSSAAQHIAGSNPFTSPEISRPASSFDTSSAIGQPRGQRYFHSRRIKKGEVEKPWLEKPDPKEKWVTILPIIGIFVGLAISGFLVYDGISSVVQHKYCLVLEDTFSTFNTDVWTKEVQVGGFGNGEFEQTTAGDENVYVENGHLFIKPTLQDADLINKDSTINLLKDGTCTSKLYRDCVAATNTTTGNATIVPPTRSGRINTKKGATLKYGRVEVTAKLPQGDWLWPAIWMLPVDDKYGPWPTSGEIDIMESRGNNYTYAQGGNNIISSALHWGPDQANDAWWRTNVKREALHTTYSKGFNTFGLEWSQKYMFTYVNTRLLQVLYTNFDVPLWTRGNFPVADANGTRYANPWDTGRANTPFDQEFYLILNVAVGGTNGWFRDGASGKPWLDSSPNAKKDFWNAQDSWFPTWKNPAMEVSKVAMWQQCDGNEEL

SEQ ID NO: 31912 - DNA, 2033 bp, Muscodor strobelii
  misc_feature: SGI EST ID NO. CUFF.75507.0
  misc_feature: Variant of the nucleotide sequence at SEQ ID NO 31910
cttgaggacgagactgttggcgaagcctgagcatgttcgcgttgctttgcgcctggaaatttctgtgcatgctgttgcttcattacttatcaaaacgttggcgcttcagacactcgttcatgaatctccagctttcatcatcatcaactatatcattattgttcctttgctaccttgccatagactttagactgtatatactcagtgtctattcgaccgagttgtatcatacacccctcttgacacagttgattagcaacagtcgcctgtatcaccatcaacaattgcccgtcgactcccaatggagcacgatacgagcagtaaccactttgcgactgggagcgcctctttcagtctgcccacaggagatttcccattaagaagtggcacacctaacactgaccgtaatcccttcggagatgagcgcgcagattcaagtgctgcccagcacatcgccgggtccaacccgttcacgtcacccgaaatatctcggcctgcatctagctttgatacttccagtgcaatcggccaaccacgaggtcaacggtatttccattctcgcagaatcaagaagggggaagttgagaagccgtggttggagaagccagaccccaaggagaaatgggtcaccattttgcccatcatcggcatattcgtaggcttggctatttctggcttcctagtgtacgacggtatctcgagtgtcgtccaacacaaatactgcctggtcctcgaagatacgttcagcactttcaacaccgacgtttggacaaaggaggtacaagtcggtgggtttggaaatggcgaatttgagcaaactaccgctggcgacgaaaacgtctacgtcgaaaatgggcacctcttcatcaaacccactcttcaggatgcggacttgatcaacaaggattctacaatcaatctcttgaaggatggaacctgtacctcaaaattgtaccgtgattgtgttgctgcgaccaacaccacgaccggcaatgccactattgtaccgcccaccaggtctggacgtattaacaccaaaaagggtgccactctcaagtatggaagagtcgaagtcacagctaagttgcctcagggtgactggctttggcctgcgatctggatgttacccgtcgatgacaaatatggaccgtggcccacgagcggtgaaatcgatatcatggagagtcgaggcaacaactacacttatgcacaaggcggcaacaacatcatctcatctgcccttcactggggacctgatcaagctaatgatgcatggtggcggactaatgtcaaacgcgaagccctgcacactacgtactcaaaaggcttcaacacttttggcctcgaatggtcgcagaagtacatgtttacctatgtcaacacccgtctccttcaagttctttataccaactttgatgtgcctctctggacacgcggaaacttccccgtcgcagacgcgaacggaactcgttatgccaatccgtgggacacaggtcgcgccaacacacccttcgaccaggaattttatctcatcctgaacgtcgccgtcggcggcacaaatggatggttcagagacggcgcaagcggaaagccatggcttgacagctctcctaacgcaaagaaggacttctggaacgcgcaggactcttggttcccaacatggaagaacccagctatggaagtcagcaaggttgcgatgtggcaacagtgcgatggtaatgaggagctctgagcgccacaatggttgtttaatccataaatactgccattccgcttgtaagattgcttcggcgttctaggggttggatttcttgggaatcatgatacacttcgtacggacatagacagggttgggcgtctttggataacatttggtcaatctaacgaaggctcttacagcggccaggactgcttcatagtcagcgacctacataattgatgataatacccctcgtatgaagacaacactttgcgaatagtatgctttgcggagtaccataccctgtgtaagacgtcatcttcacccctgtgag

SEQ ID NO: 31913 - DNA, 2658 bp, Muscodor strobelii
  misc_feature: SGI cDNA ID NO. 570992
  misc_feature: Reduced expression when VOC is produced
  misc_feature: Encodes the peptide sequence at SEQ ID NO 31914
atgggaattgggaattacttcaaggctaaaaagcccgagcctgctaagaagcccgcggccaagagagcctcatcatctgctgattttcccatttctgaaaagcgaacttcaaatcaatctattccaaatgatttcgaacttcaagtcccgacgccaaactttggctcgtcgagaaactcactttcagctcgctctgcactttctggacacagctctatgtttctcgacgacatcaagcatgaggttatggtcaactatctgtatcagcagcaatgttcgcacttgtgggttgccgatggctctggcgaagttgaaggtgtcttgctacgtaaaacgcgaggaaactacatggcatgtccgcctcagctagtccactctgcctttgccatggcttgtggtgctttgaatgtgcagtgtgcgatgactgtcaactcccgagtaattaaaaccttcttgaattggtcgccagatgctgttgatgttcccctcatgaacggtcttcgaattcaaattctacctacgatcgatgacttgccgagagcacgaaagcatcagttcgctgccttcattgcatccgaggccctgctcgtcgtttgggatgatgatgcgcttcatcttgttcaacgggcccaggcaatcgaatcggaattgatggaattggtctggcagactggtcaagaagacgaagatgaaacagaaaagaagcaacccatggccgtcgcggaatacgaaattgatgaggagagcggtcagattctacccgagaaacgaccggttcacatgcttaacacctatctcgtttccattgtcctcacaatcgtcacagtttccctaggtgcagcttggagacagcttgcaactgaaatctcggtcgacggcagctatgttcggttagcactgctcgctttgatccctattcaagtcttttttacattgttctttgtacaagtccttgttggttgtttgtgccaaatctttggtccgatccgacaactcaccatcaattcgaaattctactcagctaggcctcccccaagactacaaactgccactctgccgcatgtcactgtccagtgtcccgtctacaaggaaggcctggacgctgttattgctcccacggtcaaatctctcaagcaagctatcagcacatacgagcttcagggtggttctgccaatatcttcatcaatgacgatggtttgcaactggtaccagaagatgagcggcgtgaccgcattgaattctacgctgatcactcgattggctgggttgctcgtcctaaacatggcgagaacggattcttgcgccgtggtaaattcaagaaggcttcgaacatgaactttgccttgatggtatcttgcaaagtggaagaaaagcttagcgcgtataaccgtggccctgagtggattcaaaacgacgaggctttagcatatgaaaaagcgcttaaggaagtacttgttgaggatggaagagcatgggctgatggtaacattcgtgttggtgactacattctgatcatcgattctgatactcgtgtgcctgcggactgcctcatggatgccgtttccgaaatggagcaatcaccggacgttggcattatgcaattctcctctggcgtcatgcaagttgtgcacacctactttgagaacggtattaccttcttcaccaatctcatctacaccgctatccgatacactgtctcaaatggcgacgtcgctccttttgttgggcacaatgctatgctgcgttggagtgctattcaacaggtctcgtacgaggatgaagatggctatgagaagttctggtctgagtcacacgtgtctgaagatttcgatatgtctctgcgtctgcagtgtaacggctacatcattcggctagctgcatgggctggtgaaggcttcaaggaaggtgtctcgctcacggtgtatgacgaactggctcgctgggagaagtatgcatacggatgtaacgaactgctgttccatcccatccgcatgtggatttggaaaggtccatttacccctctcttccgccggttcctgttctccaatatccgcttcacgtcaaaaatcaccgtcatatcctacattggtacttactacgccattggtgctgcgtggatactgacgtcgatcaactacttcgtttacggttggttcaatggctatctcgataagtactacctcgattcgtggaaggtttggttctccatcatcattgttttcaatggtctcggaaacgtcgcacttgctgtgatgcgataccgcgttggggaacgaggattgatatacgctttctacgaaaacttcaaatggacattcctccttgccatcttcctgggtggtctatctctacacgtcagtcaagccattctcgctcacatgtttgagatcgacatgacatggggtgccacatcgaaagaagcagagttctccaacttcttcattgaggtgcccaaggtgctcaagaagttcaaattctcgatgatattctcgctcttcttcatcgttgctctagtcatcttggccgtggcacctttcgtgcctttagactggcgtattacggatttcgtcgctattctgcccatggcgacagtagccgtcagccacttgctgctgccgattgcgttgaacccggctctgatgaccttctcgtggtaa

SEQ ID NO: 31914 - protein, 885 aa, Muscodor strobelii
  misc_feature: SGI Peptide ID NO. 570992
  misc_feature (1)..(885): NCBI GI: 116194047 Blast Desc: conserved [Chaetomium globosum CBS 148.51] gi|88182654|gb|EAQ90122.1| conserved [Chaetomium globosum CBS 148.51]
  misc_feature (1)..(885): NCBI GI: 39970215 Blast Desc: conserved [Magnaporthe grisea 70-15] gi|149209613|ref|XP_001522181.1| MGCH7_ch7g289 [Magnaporthe grisea 70-15] gi|86196244|gb|EAQ70882.1| MGCH7_ch7g289 grisea
  misc_feature (1)..(885): NCBI GI: 170940372 Blast Desc: protein product [Podospora anserina]
  misc_feature (1)..(885): NCBI GI: 85090203 Blast Desc: NCU09906 [Neurospora crassa OR74A] gi|28919654|gb|EAA29069.1| conserved [Neurospora crassa OR74A]
  misc_feature (1)..(885): NCBI GI: 46128311 Blast Desc: FG08533.1 [Gibberella zeae PH-1]
  misc_feature (1)..(885): NCBI GI: 256733623 Blast Desc: NECHADRAFT_35231 [Nectria haematococca mpVI 77-13-4]
  misc_feature (1)..(885): NCBI GI: 156055538 Blast Desc: SS1G_05121 [Sclerotinia sclerotiorum 1980] gi|154702905|gb|EDO02644.1| SS1G_05121 [Sclerotinia sclerotiorum 1980]
  misc_feature (1)..(885): NCBI GI: 154300094 Blast Desc: BC1G_11236 [Botryotinia fuckeliana B05.10] gi|150856849|gb|EDN32041.1| BC1G_11236 [Botryotinia fuckeliana B05.10]
  misc_feature (1)..(885): NCBI GI: 156054130 Blast Desc: SS1G_05913 [Sclerotinia sclerotiorum 1980] gi|154703693|gb|EDO03432.1| SS1G_05913 [Sclerotinia sclerotiorum 1980]
  misc_feature (1)..(885): NCBI GI: 154297245 Blast Desc: BC1G_12458 [Botryotinia fuckeliana B05.10] gi|150842985|gb|EDN18178.1| BC1G_12458 [Botryotinia fuckeliana B05.10]
  misc_feature: Useful for introducing or modulating the production of volatile compounds
MGIGNYFKAKKPEPAKKPAAKRASSSADFPISEKRTSNQSIPNDFELQVPTPNFGSSRNSLSARSALSGHSSMFLDDIKHEVMVNYLYQQQCSHLWVADGSGEVEGVLLRKTRGNYMACPPQLVHSAFAMACGALNVQCAMTVNSRVIKTFLNWSPDAVDVPLMNGLRIQILPTIDDLPRARKHQFAAFIASEALLVVWDDDALHLVQRAQAIESELMELVWQTGQEDEDETEKKQPMAVAEYEIDEESGQILPEKRPVHMLNTYLVSIVLTIVTVSLGAAWRQLATEISVDGSYVRLALLALIPIQVFFTLFFVQVLVGCLCQIFGPIRQLTINSKFYSARPPPRLQTATLPHVTVQCPVYKEGLDAVIAPTVKSLKQAISTYELQGGSANIFINDDGLQLVPEDERRDRIEFYADHSIGWVARPKHGENGFLRRGKFKKASNMNFALMVSCKVEEKLSAYNRGPEWIQNDEALAYEKALKEVLVEDGRAWADGNIRVGDYILIIDSDTRVPADCLMDAVSEMEQSPDVGIMQFSSGVMQVVHTYFENGITFFTNLIYTAIRYTVSNGDVAPFVGHNAMLRWSAIQQVSYEDEDGYEKFWSESHVSEDFDMSLRLQCNGYIIRLAAWAGEGFKEGVSLTVYDELARWEKYAYGCNELLFHPIRMWIWKGPFTPLFRRFLFSNIRFTSKITVISYIGTYYAIGAAWILTSINYFVYGWFNGYLDKYYLDSWKVWFSIIIVFNGLGNVALAVMRYRVGERGLIYAFYENFKWTFLLAIFLGGLSLHVSQAILAHMFEIDMTWGATSKEAEFSNFFIEVPKVLKKFKFSMIFSLFFIVALVILAVAPFVPLDWRITDFVAILPMATVAVSHLLLPIALNPALMTFSW

SEQ ID NO: 31915 - DNA, 3773 bp, Muscodor strobelii
  misc_feature: SGI EST ID NO. CUFF.75906.1
  misc_feature: Variant of the nucleotide sequence at SEQ ID NO 31913
tgttgagaaggcatcacagcaaaggacgcaggaaaatctgaagctaggctggaattttcgccttgacgacatccactcggggtccgccttgagccatgcacccggtcctcatatacacacatcatgatccagatctgtcgttgcatcggagctgatagctcttaccctcgtctattgtcagccactgctgtcgcttttgtccagagctcgactgactgctcttccactcgttctagtcacgaggcccagaacaagatagagtctgtgtcttctttttggctaagtcggagctgagttgctgcttgcctatctcgtctcagcaacactggttttgtgtaataagttctgacttgcctcaaatttcaagtcgtcttattattctttagcctgttcaacaatcgctatctactcctcgattaacactcgcttggtaaatctgaagggacacttgtcgagtgatccgaacgactcgaaagttgcttctttacaggcgttgatctcttctcccacttcgaggccaatctttatacctcattgtgtatctggattccatagaatcacaacgaccggtagcatacggcgcgttgccgcctacaatacttgctgctcagaagttgttaacactctttcatcgtgaagatgggaattgggaattacttcaaggctaaaaagcccgagcctgctaagaagcccgcggccaagagagcctcatcatctgctgattttcccatttctgaaaagcgaacttcaaatcaatctattccaaatgatttcgaacttcaagtcccgacgccaaactttggctcgtcgagaaactcactttcagctcgctctgcactttctggacacagctctatgtttctcgacgacatcaagcatgaggttatggtcaactatctgtatcagcagcaatgttcgcacttgtgggttgccgatggctctggcgaagttgaaggtgtcttgctacgtaaaacgcgaggaaactacatggcatgtccgcctcagctagtccactctgcctttgccatggcttgtggtgctttgaatgtgcagtgtgcgatgactgtcaactcccgagtaattaaaaccttcttgaattggtcgccagatgctgttgatgttcccctcatgaacggtcttcgaattcaaattctacctacgatcgatgacttgccgagagcacgaaagcatcagttcgctgccttcattgcatccgaggccctgctcgtcgtttgggatgatgatgcgcttcatcttgttcaacgggcccaggcaatcgaatcggaattgatggaattggtctggcagactggtcaagaagacgaagatgaaacagaaaagaagcaacccatggccgtcgcggaatacgaaattgatgaggagagcggtcagattctacccgagaaacgaccggttcacatgcttaacacctatctcgtttccattgtcctcacaatcgtcacagtttccctaggtgcagcttggagacagcttgcaactgaaatctcggtcgacggcagctatgttcggttagcactgctcgctttgatccctattcaagtcttttttacattgttctttgtacaagtccttgttggttgtttgtgccaaatctttggtccgatccgacaactcaccatcaattcgaaattctactcagctaggcctcccccaagactacaaactgccactctgccgcatgtcactgtccagtgtcccgtctacaaggaaggcctggacgctgttattgctcccacggtcaaatctctcaagcaagctatcagcacatacgagcttcagggtggttctgccaatatcttcatcaatgacgatggtttgcaactggtaccagaagatgagcggcgtgaccgcattgaattctacgctgatcactcgattggctgggttgctcgtcctaaacatggcgagaacggattcttgcgccgtggtaaattcaagaaggcttcgaacatgaactttgccttgatggtatcttgcaaagtggaagaaaagcttagcgcgtataaccgtggccctgagtggattcaaaacgacgaggctttagcatatgaaaaagcgcttaaggaagtacttgttgaggatggaagagcatgggctgatggtaacattcgtgttggtgactacattctgatcatcgattctgatactcgtgtgcctgcggactgcctcatggatgccgtttccgaaatggagcaatcaccggacgttggcattatgcaattctcctctggcgtcatgcaagttgtgcacacctactttgagaacggtattaccttcttcaccaatctcatctacaccgctatccgatacactgtctcaaatggcgacgtcgctccttttgttgggcacaatgctatgctgcgttggagtgctattcaacaggtctcgtacgaggatgaagatggctatgagaagttctggtctgagtcacacgtgtctgaagatttcgatatgtctctgcgtctgcagtgtaacggctacatcattcggctagctgcatgggctggtgaaggcttcaaggaaggtgtctcgctcacggtgtatgacgaactggctcgctgggagaagtatgcatacggatgtaacgaactgctgttccatcccatccgcatgtggatttggaaaggtccatttacccctctcttccgccggttcctgttctccaatatccgcttcacgtcaaaaatcaccgtcatatcctacattggtacttactacgccattggtgctgcgtggatactgacgtcgatcaactacttcgtttacggttggttcaatggctatctcgataagtactacctcgattcgtggaaggtttggttctccatcatcattgttttcaatggtctcggaaacgtcgcacttgctgtgatgcgataccgcgttggggaacgaggattgatatacgctttctacgaaaacttcaaatggacattcctccttgccatcttcctgggtggtctatctctacacgtcagtcaagccattctcgctcacatgtttgagatcgacatgacatggggtgccacatcgaaagaagcagagttctccaacttcttcattgaggtgcccaaggtgctcaagaaggtaagaaaagccccatcgcttagtacagctacgcaatgagctactgactttgttgttctagttcaaattctcgatgatattctcgctcttcttcatcgttgctctagtcatcttggccgtggcacctttcgtgcctttagactggcgtattacggatttcgtcgctattctgcccatggcgacagtagccgtcagccacttgctgctgccgattgcgttgaacccggctctgatgaccttctcgtggtaaacagcttcgatgtgtcacaattatgttacgaatttccttttggtttctttcttacattgcatcacatgcatatacagtctcgaggcacactcatacccgatgcttttggaaagctttgaagatatcgaggtcttataatcagcgaaatttcgggatacataccgtagacttgggacggagtttggatctggacatagagtccagagtgtatttttgccacatttgagatggatttaattgtgctctccatgagggagtccaagctcagatcccatggagaaaaggaatggaactggacttatctaacagtctatagcacattgggcattatattagacgatatcttaaagctacacataggtaatcatacaaaatcacgtcaacataaggattcacacgaccgtgaaacgcagac

SEQ ID NO: 31916 - DNA, 1617 bp, Muscodor strobelii
  misc_feature: SGI cDNA ID NO. 570993
  misc_feature: Encodes the peptide sequence at SEQ ID NO 31917
atgttgtccaactcggctcgcgcctcggcgctcgccctgctggcatccgtatggatatctccaactctggcccaattgaccacactatgtgacccaatgaataaaacatgtcctgccgatccagcactaggcacttcccacatgttctatttcaacagcacgccaccaaacgcgacttttgatatcgcagctaaccccgtctcgttcgacgagaccgatggcgccgttatcgaaatctcgaaggagggccagtcgccaactttagcctcatatttctactttttcttcggccgtaccgaggttcatatgaaagctgctaaggggcagggtgttattagttccattgtttggggctcggatactcttgacgaagtcgacctggagttcaaaggatccaacgaatcatttgtttttacgaactggtatcgcaatgggaaaggcgataacactactggtggttcgcatcctatccagggcagcatctacgatctgcacaattacacgactacttggtctaaggacgcactctcgtggtatatcgatggccagctacttcgcacactgacgtatgatgttgccgagaagggagtggggtttgttcagacacctatgacacttagacttggcagttgggtggctggtgatccgaagacgcaaaagaacggaaccattgaatgggcgcaaggtataaccaactttgacgacgcccctttcactatgtacgtgcagagcgcgtacgttgaggatgcgtcgagcggaagttattacagctacggtgacaagtcggccacatggcagagtatcaagattgaagcgggaaattcgaccactcttcaaagcatcaacaaggagccagataagtcgctctccgagaaatgggctgaattaccatcgacaacgaagactggtatctatgcggcggccggtgccgttggcggattgctgttcatacttctcgctttctactatttcaagcaacggcgccgaggtgcaaaagaggcagcagcagcacagaaagcgtacgagcaggagcggcacgaacttgagatgttcaagaagtcaggccgtgatcccgacgcactgaccttcagcggttcagagtatggaggcaagggtggtagctcgtatggacctattccagactcggactcaccacctgccagctcccacggcctagctgagaaggcatgggaccctacacactcagctatgccatcaccgatgccgttacttcatcaagactcaacgaaccgcgtggccagtcccgggccccatgggccgtctcgcaatggcagcttcgcttcacctaccgttcgctcacaaagccctgggatgcctccatccttcccgcctcccagttctcctgtaaaccgaggcctttcgaattctccacaagccttatcacgatccatgactggaaattcacagggcggtggctacgctccgattaataggatgaacagtcccatgtcgagccaaggctcactagtcctggcccaaaccgtggcccaaactcatctgggtctcaaggtgattactggagtgctaggtgaaactagtatcctggacgaagcgcctcctagcgacaaaggattctgggagatgtgctgtttttga

SEQ ID NO: 31917 - protein, 538 aa, Muscodor strobelii
  misc_feature: SGI Peptide ID NO. 570993
  misc_feature (45)..(228): Pfam Id: PF00722 Pfam Desc: Glycosyl hydrolases family 16
  misc_feature (10)..(482): NCBI GI: 261353782 Blast Desc: extracellular cell wall glucanase Crf1 [Verticillium albo-atrum VaMs.102]
  misc_feature (1)..(368): NCBI GI: 85068422 Blast Desc: NCU08072 [Neurospora crassa OR74A] gi|28927008|gb|EAA35967.1| [Neurospora crassa OR74A]
  misc_feature (24)..(368): NCBI GI: 256732378 Blast Desc: NECHADRAFT_40651 [Nectria haematococca mpVI 77-13-4]
  misc_feature (1)..(371): NCBI GI: 116194095 Blast Desc: CHGG_06765 [Chaetomium globosum CBS 148.51] gi|88182678|gb|EAQ90146.1| CHGG_06765 [Chaetomium globosum CBS 148.51]
  misc_feature (19)..(359): NCBI GI: 115384742 Blast Desc: conserved [Aspergillus terreus NIH2624] gi|114196610|gb|EAU38310.1| conserved [Aspergillus terreus NIH2624]
  misc_feature (1)..(489): NCBI GI: 149209673 Blast Desc: MGCH7_ch7g319 [Magnaporthe grisea 70-15] gi|86196274|gb|EAQ70912.1| MGCH7_ch7g319 [Magnaporthe grisea 70-15]
  misc_feature (9)..(353): NCBI GI: 156050153 Blast Desc: SS1G_07663 [Sclerotinia sclerotiorum 1980] gi|154692064|gb|EDN91802.1| SS1G_07663 [Sclerotinia sclerotiorum 1980]
  misc_feature (9)..(379): NCBI GI: 169767548 Blast Desc: [Aspergillus oryzae RIB40] gi|238484447|ref|XP_002373462.1| cell wall glucanase, [Aspergillus flavus NRRL3357] gi|83766100|dbj|BAE56243.1| protein
  misc_feature (9)..(462): NCBI GI: 154317898 Blast Desc: BC1G_02932 [Botryotinia fuckeliana B05.10] gi|150843590|gb|EDN18783.1| BC1G_02932 [Botryotinia fuckeliana B05.10]
  misc_feature (8)..(371): NCBI GI: 170940349 Blast Desc: protein product [Podospora anserina]
MLSNSARASALALLASVWISPTLAQLTTLCDPMNKTCPADPALGTSHMFYFNSTPPNATFDIAANPVSFDETDGAVIEISKEGQSPTLASYFYFFFGRTEVHMKAAKGQGVISSIVWGSDTLDEVDLEFKGSNESFVFTNWYRNGKGDNTTGGSHPIQGSIYDLHNYTTTWSKDALSWYIDGQLLRTLTYDVAEKGVGFVQTPMTLRLGSWVAGDPKTQKNGTIEWAQGITNFDDAPFTMYVQSAYVEDASSGSYYSYGDKSATWQSIKIEAGNSTTLQSINKEPDKSLSEKWAELPSTTKTGIYAAAGAVGGLLFILLAFYYFKQRRRGAKEAAAAQKAYEQERHELEMFKKSGRDPDALTFSGSEYGGKGGSSYGPIPDSDSPPASSHGLAEKAWDPTHSAMPSPMPLLHQDSTNRVASPGPHGPSRNGSFASPTVRSQSPGMPPSFPPPSSPVNRGLSNSPQALSRSMTGNSQGGGYAPINRMNSPMSSQGSLVLAQTVAQTHLGLKVITGVLGETSILDEAPPSDKGFWEMCCF

SEQ ID NO: 31918 - DNA, 2660 bp, Muscodor strobelii
  misc_feature: SGI EST ID NO. CUFF.75510.0
  misc_feature: Variant of the nucleotide sequence at SEQ ID NO 31916
cgtgaattgggttgggcttccctgtctatcccttcgctctcctgttcacatcccccttcatctgtctcttatcatcagacaggctgcttgaaacaagcaagacacagcaggccgctctcctgcatgcccttcatttgattccatcgcgattcagtgttttattccctcatttgcatctatctgtccacgcgacagccaccattgctttgttcgattgagtcgacaaccacactcgctatctgccgccctactacgctaacagaaagaccgacgacaaaggcagtcgtctatcaggactgctgaatacactcccttgaaacacgcacaatcacaccctacgaatttgtcctcgagggactctgttggcaactgcatctctcgccatcaaccccacgatcgactatacttctacatcaatcgctctcaagaacatcgcccctggggtgatctgtgagccttggtttgtgttataccctaggatctcgtcgtatattacagctcatcgtgcttatatcgatcactcccaccactgttcactagagatgatgcccacaatctaatcacagtgttatctctgccgaattatctcaacttgtcattcacgtctaccgagcaactcgatcagcgattcatctatccataacatcgaactacacgggttcgaaccgaaacattcaaggcctggtgccttgtggaacatttttgtaaaaatactcaactccaaatgttgtccaactcggctcgcgcctcggcgctcgccctgctggcatccgtatggatatctccaactctggcccaattgaccacactatgtgacccaatgaataaaacatgtcctgccgatccagcactaggcacttcccacatgttctatttcaacagcacgccaccaaacgcgacttttgatatcgcagctaaccccgtctcgttcgacgagaccgatggcgccgttatcgaaatctcgaaggagggccagtcgccaactttagcctcatatttctactttttcttcggccgtaccgaggttcatatgaaagctgctaaggggcagggtgttattagttccattgtttggggctcggatactcttgacgaagtcgacctggagttcaaaggatccaacgaatcatttgtttttacgaactggtatcgcaatgggaaaggcgataacactactggtggttcgcatcctatccagggcagcatctacgatctgcacaattacacgactacttggtctaaggacgcactctcgtggtatatcgatggccagctacttcgcacactgacgtatgatgttgccgagaagggagtggggtttgttcagacacctatgacacttagacttggcagttgggtggctggtgatccgaagacgcaaaagaacggaaccattgaatgggcgcaaggtataaccaactttgacgacgcccctttcactatgtacgtgcagagcgcgtacgttgaggatgcgtcgagcggaagttattacagctacggtgacaagtcggccacatggcagagtatcaagattgaagcgggaaattcgaccactcttcaaagcatcaacaaggagccagataagtcgctctccgagaaatgggctgaattaccatcgacaacgaagactggtatctatgcggcggccggtgccgttggcggattgctgttcatacttctcgctttctactatttcaagcaacggcgccgaggtgcaaaagaggcagcagcagcacagaaagcgtacgagcaggagcggcacgaacttgagatgttcaagaagtcaggccgtgatcccgacgcactgaccttcagcggttcagagtatggaggcaagggtggtagctcgtatggacctattccagactcggactcaccacctgccagctcccacggcctagctgagaaggcatgggaccctacacactcagctatgccatcaccgatgccgttacttcatcaagactcaacgaaccgcgtggccagtcccgggccccatgggccgtctcgcaatggcagcttcgcttcacctaccgttcgctcacaaagccctgggatgcctccatccttcccgcctcccagttctcctgtaaaccgaggcctttcgaattctccacaagccttatcacgatccatgactggaaattcacagggcggtggctacgctccgattaataggatgaacagtcccatgtcgagccaaggctcagttcgtagcccaggttcacccgcaccgcacgacatgtatggaatgtctcggatagctagtcctggcccaaaccgtggcccaaactcatctgggtctcaaggtgattactggagtgctaggtgaaactagtatcctggacgaagcgcctcctagcgacaaaggattctgggagatgtgctgtttttgatgtatatagctgatgactttgttctctcttctgactacttgtgtggtacaatggcgtacgggtctcatttgttgttttctacctactcttggcaacaagcgcgatttgcttggacgatatttctacttttttcacttcaatgtaagatacccttgggaatcgatgacctcaaactccgttaccttgatacatattaagttccatttgcaacgtgaaaatgacttggacatattacagcaatttgatatccagacataagacatg

SEQ ID NO: 31919 - DNA, 1353 bp, Muscodor strobelii
  misc_feature: SGI cDNA ID NO. 570994
  misc_feature: Encodes the peptide sequence at SEQ ID NO 31920
atgtttttccaggggagtctgcaggacggcatcaataccgccgtccaggcttcgaaacaagtcgtttgcttcgtgacggatggcggggatgagagtcagctatgggaaaatgagtttctccaagaagatgcagtcaaatctggattggacagctctgtggtgctgaaactggtagctgagtcgcaagaggccaagttcctcgaagctctgtttccagtccctaagaaacctactatcgttgtcataaaggatggtcaactaaaagagtacattgcagctggggaaacaaaagagaatctccttaggcgactttcgaacaccttccgctcaggagcaaatcaagcacaaccatcagcttcgtcagggtcgggtacttcagcgccaatttcaagtgctccgccggcaactcaaccagctgcatcctcggcaccagccacttctaactctgcgagcgaagaaaagcgcctcgcggaggaaaagaaagtcaaagcacgagcagaagccgaagaagaagcccgcaggagagtagacgagagatgtgcaccatgcgaaccggaaccagctaacccagaacaaaaacacgcgagcaaagtcaagcaagagaagcaaaaagcagccgaggagcgaaagcgcatattacagcgcatcgaggacgacaagatagcgcgtaaggagcgagaagctgaggagcgtaaagcgagacagcttctcaatagtcctgaggcggaagctgaacagtccacgctaagcactctgaacagagcttcgaaagctgtatatggcgatcactgtaatcttcaggtccgtcttttagatgggtcaacgatccggtcgaagtttgagagtgataagacactcggcaaggaagtacggaagtggattgatgagcagcggacagatggcgatgcgccgtatcaattcagagtcgttctcacgccgctacctaatcgagtcatccagcctcaggaggagattaagagtctcttgtctctgaagctggtgccgtctgccacacttgtgctgatccccacaaaattctcgtctgcgtatgcaaatgctggaagtgtagtatcgaggggtataaatcctataattggggtgttttccacgatttacggcgctatcattgccatgtttggtggcatcttcgcgagcctgtttggtgggcgagcgactcctccttcatctggaggagaaaatatacaaatgcagaatctaggggctgtgaggaactcgaggatcagagggtttcagaatcctgatgatcagcgacgggactcgcagttgtataatgggaattcgctcaactttgaaccccgaagagacgacgaggacgaggatgatgtacaataa

SEQ ID NO: 31920 - protein, 450 aa, Muscodor strobelii
  misc_feature: SGI Peptide ID NO. 570994
  misc_feature (258)..(343): Pfam Id: PF00789 Pfam Desc: UBX domain
  misc_feature (1)..(444): NCBI GI: 46129356 Blast Desc: FG08863.1 [Gibberella zeae PH-1]
  misc_feature (1)..(444): NCBI GI: 149210001 Blast Desc: MGCH7_ch7g482 [Magnaporthe grisea 70-15] gi|86196437|gb|EAQ71075.1| MGCH7_ch7g482 [Magnaporthe grisea 70-15]
  misc_feature (1)..(447): NCBI GI: 256733712 Blast Desc: NECHADRAFT_67627 [Nectria haematococca mpVI 77-13-4]
  misc_feature (1)..(448): NCBI GI: 156035943 Blast Desc: SS1G_13176 [Sclerotinia sclerotiorum 1980] gi|154698580|gb|EDN98318.1| SS1G_13176 [Sclerotinia sclerotiorum 1980]
  misc_feature (1)..(446): NCBI GI: 240275177 Blast Desc: UBX domain-containing protein [Ajellomyces capsulatus H143]
  misc_feature (1)..(446): NCBI GI: 261193649 Blast Desc: UBX domain-containing protein [Ajellomyces dermatitidis SLH14081] gi|239588835|gb|EEQ71478.1| UBX domain-containing protein [Ajellomyces dermatitidis SLH14081] UBX
  misc_feature (1)..(446): NCBI GI: 225555233 Blast Desc: UBX domain-containing protein [Ajellomyces capsulatus G186AR]
  misc_feature (1)..(444): NCBI GI: 145610070 Blast Desc: MGG_02734 [Magnaporthe grisea 70-15] gi|145017456|gb|EDK01819.1| MGG_02734 [Magnaporthe grisea 70-15]
  misc_feature (1)..(447): NCBI GI: 240106221 Blast Desc: UBX domain containing protein [Coccidioides posadasii C735 delta SOWgp]
  misc_feature (1)..(446): NCBI GI: 154286694 Blast Desc: [Ajellomyces capsulatus NAm1] gi|150407783|gb|EDN03324.1| [Ajellomyces capsulatus NAm1]
MFFQGSLQDGINTAVQASKQVVCFVTDGGDESQLWENEFLQEDAVKSGLDSSVVLKLVAESQEAKFLEALFPVPKKPTIVVIKDGQLKEYIAAGETKENLLRRLSNTFRSGANQAQPSASSGSGTSAPISSAPPATQPAASSAPATSNSASEEKRLAEEKKVKARAEAEEEARRRVDERCAPCEPEPANPEQKHASKVKQEKQKAAEERKRILQRIEDDKIARKEREAEERKARQLLNSPEAEAEQSTLSTLNRASKAVYGDHCNLQVRLLDGSTIRSKFESDKTLGKEVRKWIDEQRTDGDAPYQFRVVLTPLPNRVIQPQEEIKSLLSLKLVPSATLVLIPTKFSSAYANAGSVVSRGINPIIGVFSTIYGAIIAMFGGIFASLFGGRATPPSSGGENIQMQNLGAVRNSRIRGFQNPDDQRRDSQLYNGNSLNFEPRRDDEDEDDVQ

SEQ ID NO: 31921 - DNA, 1848 bp, Muscodor strobelii
  misc_feature: SGI EST ID NO. CUFF.75513.0
  misc_feature: Variant of the nucleotide sequence at SEQ ID NO 31919
gattaaaccagcgcctagctcaagcatttcctatcacctatttccattcagctcaaagtttgtgcaaacagctgtttcattagcatgctttgcaaacttctcatttgatatttagtctactgtcgtgtgcacgcccgagcgcccacctagcaattgccctcggttttcgccacgtattatcaattgtggcagccttacatggactttcatcctaccaaataaagcgctctatattccgtgtcctcatccattgatcagcattcaacctcagggatgtttttccaggggagtctgcaggacggcatcaataccgccgtccaggcttcgaaacaagtcgtttgcttcgtgacggatggcggggatgagagtcagctatgggaaaatgagtttctccaagaagatgcagtcaaatctggattggacagctctgtggtgctgaaactggtagctgagtcgcaagaggccaagttcctcgaagctctgtttccagtccctaagaaacctactatcgttgtcataaaggatggtcaactaaaagagtacattgcagctggggaaacaaaagagaatctccttaggcgactttcgaacaccttccgctcaggagcaaatcaagcacaaccatcagcttcgtcagggtcgggtacttcagcgccaatttcaagtgctccgccggcaactcaaccagctgcatcctcggcaccagccacttctaactctgcgagcgaagaaaagcgcctcgcggaggaaaagaaagtcaaagcacgagcagaagccgaagaagaagcccgcaggagagtagacgagagatgtgcaccatgcgaaccggaaccagctaacccagaacaaaaacacgcgagcaaagtcaagcaagagaagcaaaaagcagccgaggagcgaaagcgcatattacagcgcatcgaggacgacaagatagcgcgtaaggagcgagaagctgaggagcgtaaagcgagacagcttctcaatagtcctgaggcggaagctgaacagtccacgctaagcactctgaacagagcttcgaaagctgtatatggcgatcactgtaatcttcaggtccgtcttttagatgggtcaacgatccggtcgaagtttgagagtgataagacactcggcaaggaagtacggaagtggattgatgagcagcggacagatggcgatgcgccgtatcaattcagagtcgttctcacgccgctacctaatcgagtcatccagcctcaggaggagattaagagtctcttgtctctgaagctggtgccgtctgccacacttgtgctgatccccacaaaattctcgtctgcgtatgcaaatgctggaagtgtagtatcgaggggtataaatcctataattggggtgttttccacgatttacggcgctatcattgccatgtttggtggcatcttcgcgagcctgtttggtgggcgagcgactcctccttcatctggaggagaaaatatacaaatgcagaatctaggggctgtgaggaactcgaggatcagagggtttcagaatcctgatgatcagcgacgggactcgcagttgtataatgggaattcgctcaactttgaaccccgaagagacgacgaggacgaggatgatgtacaataatgttggcaaaggctgaaattctgcatggtcttgctcccatactgggctcaacattatgggacggtgttattgtatacttaagttgccccttgatataaacactcaatgactccgtgagctttcagagtcttttccaatcggctgttgtacaaggctattctgtacgataagatacattaccgtgtctacaatacaatgcaatcctcctattacttagaccgt

SEQ ID NO: 31922 - DNA, 405 bp, Muscodor strobelii
  misc_feature: SGI cDNA ID NO. 570995
  misc_feature: Encodes the peptide sequence at SEQ ID NO 31923
atggccgacgcagagctagaacagatccgcaaagcccgtctagagcagctgaaggcacagcaaggcggcggatcgtcgagcggaagcgcaggaggaaagaaccaggcagagcagcagcgagaacaagaagccgaagcacgagcctcgatcctcaaccaaatcctccaccccgaagccgccgatcgactgggccgcatacgactcgtcaaagagtcccgcgcaaacgacatcgagaacagactgataacgctcgcgcggacgggccagctgcgctccaaagtcaccgaggcgcagctcaaggagttgctggcggcagtggcggagaaccaggaggaggagaaaatcaaggttgagcgccgcaaggggtgggatgacgaggatgatgatgatttgtttgatctctag

SEQ ID NO: 31923 - protein, 134 aa, Muscodor strobelii
  misc_feature: SGI Peptide ID NO. 570995
  misc_feature (9)..(117): Pfam Id: PF01984 Pfam Desc: Double-stranded DNA-binding domain
  misc_feature (1)..(124): NCBI GI: 171684549 Blast Desc: protein product [Podospora anserina] gi|170942235|emb|CAP67887.1| protein product [Podospora anserina]
  misc_feature (1)..(124): NCBI GI: 149210009 Blast Desc: MGCH7_ch7g486 [Magnaporthe grisea 70-15] gi|86196441|gb|EAQ71079.1| MGCH7_ch7g486 [Magnaporthe grisea 70-15]
  misc_feature (1)..(123): NCBI GI: 226294588 Blast Desc: conserved [Paracoccidioides brasiliensis Pb18]
  misc_feature (1)..(124): NCBI GI: 39970543 Blast Desc: MGG_02738 [Magnaporthe grisea 70-15] gi|145017452|gb|EDK01815.1| MGG_02738 [Magnaporthe grisea 70-15]
  misc_feature (1)..(121): NCBI GI: 154271909 Blast Desc: [Ajellomyces capsulatus NAm1] gi|150408794|gb|EDN04250.1| [Ajellomyces capsulatus NAm1]
  misc_feature (1)..(123): NCBI GI: 212544728 Blast Desc: dsDNA-binding protein PDCD5, [Penicillium marneffei ATCC 18224] gi|210065487|gb|EEA19581.1| dsDNA-binding protein PDCD5, [Penicillium marneffei ATCC 18224]
  misc_feature (1)..(123): NCBI GI: 226279292 Blast Desc: conserved [Paracoccidioides brasiliensis Pb01]
  misc_feature (1)..(128): NCBI GI: 238845617 Blast Desc: conserved [Microsporum canis CBS 113480]
  misc_feature (1)..(123): NCBI GI: 67537176 Blast Desc: AN4758.2 [Aspergillus nidulans FGSC A4] gi|40741610|gb|EAA60800.1| AN4758.2 [Aspergillus nidulans FGSC A4] gi|259482400|tpe|CBF76848.1| TPA: dsDNA-binding protein FGSC
  misc_feature (8)..(123): NCBI GI: 256733713 Blast Desc: NECHADRAFT_35276 [Nectria haematococca mpVI 77-13-4]
MADAELEQIRKARLEQLKAQQGGGSSSGSAGGKNQAEQQREQEAEARASILNQILHPEAADRLGRIRLVKESRANDIENRLITLARTGQLRSKVTEAQLKELLAAVAENQEEEKIKVERRKGWDDEDDDDLFDL

SEQ ID NO: 31924 - DNA, 4358 bp, Muscodor strobelii
  misc_feature: SGI EST ID NO. CUFF.75586.1
  misc_feature: Variant of the nucleotide sequence at SEQ ID NO 31922
ccgccacaaatttctagctgtcgcaaccacacgacatttctgccttgcgtcatacctcaaaccatccaacctgcctatcagcctagggaacacgagcatatctacaatcgcgccgacgacagaacaaataacttagtaaacatggccgacgcagagctagaacagatccgcaaagcccgtctagagcagctgaaggcacagcaaggcggcggatcgtcgagcggaagcgcaggaggaaagaaccaggcagagcagcagcgagaacaagaagccgaagcacgagcctcgatcctcaaccaaatcctccaccccgaagccgccgatcgactgggccgcatacgactcgtcaaagagtcccgcgcaaacgacatcgagaacagactgataacgctcgcgcggacgggccagctgcgctccaaagtcaccgaggcgcagctcaaggagttgctggcggcagtggcggagaaccaggaggaggagaaaatcaaggttgagcgccgcaaggggtgggatgacgaggatgatgatgatttgtttgatctctaggtgtggtagggcgtaggtgtgagaggaagaggagggaaaagaaaaggggggagaggggagagagaaaggaagaattgcattggcatggcgttatggaaacccgaggctgattctgactgaagcgaagcttagggaaggggtattgtgtctatgtacttctatccgcgcgatattgattttacaatgaatagtacaaggccgtacaatatgcatacacatcctaacctcaatcccaccacaactctcgccagctcccatcaaccacacactcctttaaacctgggcagcaacaggctcaccagcagcatccctcaacgccatcttcgcctctttcctcctcttcctctctaatctctcctttttcctaatatccctcaaatcaggcggctgttcaatacccaacctctctctcaactcccgcacatcagtctctagctcctcctcccaataaacattaatcacctcttcacacctcagcccatttctaaccgcccaaggcccataaatactccagaatctctgccgctccgccggtttcatcgtcgccaccgcaaagacactcaatcccgtcataggcaacagcgtattagcaaactcaaaagccttcagcgcaacctctccctccctcaccacggggagtcctgtaagcgcatggtagaaatcgtgagattcgcgatatcgctgtatgacgtatgcttcctcggggtcatccacataacgcacactcacgcgagtgtctggggtgacgccttcgcggtcgagccatttcacgtagttcccaccgacggtcgtctcgggcagggaccgcaggcgtggtaggtcgagggatttggatgttatgcggggtcgatcgcgcaggatacgtcgacctgtgggatgcgagagcatggcgcggcgcagacgggacgcgaagtagggttgggctgttgcttcgccgagcgcggcgatcatgtccgggcgggttgggtcgaagaaggaccacagtgaggacccgactgtgaggccgaggcgctcgaggcgcgttagggggatgtggcctgggtagtttgggggtgggcggttgagtactgagaagtgacggtgaggaggggattgggcgagttgtgacggtggtgatggtgatgatgaggtcgttgtggtgaggagtgaaagtgaggatggtggtgggatgatggagctatggcgggcgcaccgcagggacgattgtaggagcttcattgaagggaatatgtgtatttacagcatttgatgtctataacttgatcattcaaaagataagtgaacaagaatcggggaggtcgaggagatgtccgttgaagctcaaggagcttattgcgaaagtgatcagaaatcatgacatcgaacgattaacatggagttgataatctagtaccaagtcggtgtcgggcgcgggatgtgccgatgcctgtcggcatctttcttggcgttacccgtacctggaactgttatacagtcaagacagtcacatccgatcttagccagttataacgcaaacaccaatgccgggcgttgggcagtgtaattggaggcttagatgcatctatgaaataattgcttcttttggtcccgccctcttaaatgacctatcccaagagaaacgaatctaggagtgatcctctaacctccacataataatatcctctgttaccaggaagcactcatagagctggacttcaccaatccagaacttgatccaaaccattccatccccttaagagccgtgaccttgcgctggttgccaatccacgatgcttgatgcgattcccgaggaagtacttatccaaatcttgacattcgttttgatgagcgactcgccgctcatagtagattatggtttaggagaccaacgagtgccttggtcttcccaagatactatcagaaaaccatcatctctcactgcctcgaaatattttccgcaccctcacgactcgaggaagcaggcctctcacatcaatgactggattattgtgaactctgtttgtcggcgcatccgccgcgttggccgccccttgttcttccaaacgaaaaccatcgccctgaaagactcactaccctggagactttcaacctatcaaccaaatgcatttcatggattctcccgcattctaaagtacgccggatcatcgggagacctcttaccgcatgtgcgcgacgtggtgatattgacggcgctaatgtcctccctcaaccctgccggcgagcccatgatgttctggaagcacgacctgctggaactcctcgagtccatgcctgtggtgcaaagatgtactttctttttcgcgtgcactcattccggtatcgacgccgatagtccggaggagatcacagccgcgctagctaagcgggaaccggctgaagacgaactacgatctcgccttttggctgttgggatttctccacgtatcgaattcttcgaggcgcggggaaaggaatgtgcgtcgttgtttccgaggatgtatatgcgagtaaaaatcttcccggttttggaagcgaaagcgctcgctttgcggcaacgccaagagcgtgaatttaatcaccgagggagatatcgcagtaaaagaccttggcaggcgctggaaagactcgatcgaggataatatatccataggagtaccatacgatctacgatacgttgggagacgcctcggattagtcatttacatgctacgtactcggtaccatccctgacgcatcttcatccttccgcagagcttgcagagctcgtgctttcgactttaaaactcgcaatagtttacccctaaccaacctacgaaactctgtggctgaaaacactttcgcataaaagagttcgacgtgctcaggcacgccaatggctaatattagggaccggatgtcatgctcaagcggctcgcgcagggaaaatgccttagcggtatgctccgagctatacccgtagcgtctttcaaaaaccagcgtgcagctttgtaccgcaggtagccacttgagtatatctggtacgctaagcacccaggtagaactgacagtgattgcctccgccaacgcgatatcacggatacacgactggagccgttccgactcggcgtccttcaagatacgcccgaagccgcggatcgaagatgattcagatcgtgtaaggcgctccggaaaggagatcatcattgcgatgcatcttgtttggaaaaataagacacggccgatgcgacgaataagtcggcatgttgagtttatgaggatccaatctgctacatgcaaatcttgatggtcattaccgatatattttggtaaagggaccgttgtttttgaggttgccgggagtcttgagtgaggtacggccatagattcgggcggtacgtggtctacgacgaaagctgagctacgcttgattgcatagcgaagaatgtgcgtaagaagctcttcggggagtgtctcgagtacagatggcgacattacgacttgcgtatggatatggctaatggagaatctagatgcagagatgggatttgggattggctgtgtggagaagaaggctgcctgcggggctgcctacctatatacttacaatgctgcgccgcagcttgtatcgcattaagcctgcaaggcctactagcattgacatggcacatatatacatcaaaccaggaaaaattggtgttgtgtaaaaggggtagaaaagggggtaaaacaaaacagcggtgattggacgcactccatggttgaaggttcaaacagcttgccgtcgcgaactccgtgcaaagtccgtatgaacaaaacagatagtggcctaaaaaagactgattgatcgagcccag

SEQ ID NO: 31925 - DNA, 945 bp, Muscodor strobelii
  misc_feature: SGI cDNA ID NO. 570996
  misc_feature: Reduced expression when VOC is produced
  misc_feature: Encodes the peptide sequence at SEQ ID NO 31926
atgaagctcctacaatcgtccctgcggtgcgcccgccatagctccatcatcccaccaccatcctcactttcactcctcaccacaacgacctcatcatcaccatcaccaccgtcacaactcgcccaatcccctcctcaccgtcacttctcagtactcaaccgcccacccccaaactacccaggccacatccccctaacgcgcctcgagcgcctcggcctcacagtcgggtcctcactgtggtccttcttcgacccaacccgcccggacatgatcgccgcgctcggcgaagcaacagcccaaccctacttcgcgtcccgtctgcgccgcgccatgctctcgcatcccacaggtcgacgtatcctgcgcgatcgaccccgcataacatccaaatccctcgacctaccacgcctgcggtccctgcccgagacgaccgtcggtgggaactacgtgaaatggctcgaccgcgaaggcgtcaccccagacactcgcgtgagtgtgcgttatgtggatgaccccgaggaagcatacgtcatacagcgatatcgcgaatctcacgatttctaccatgcgcttacaggactccccgtggtgagggagggagaggttgcgctgaaggcttttgagtttgctaatacgctgttgcctatgacgggattgagtgtctttgcggtggcgacgatgaaaccggcggagcggcagagattctggagtatttatgggccttgggcggttagaaatgggctgaggtgtgaagaggtgattaatgtttattgggaggaggagctagagactgatgtgcgggagttgagagagaggttgggtattgaacagccgcctgatttgagggatattaggaaaaaggagagattagagaggaagaggaggaaagaggcgaagatggcgttgagggatgctgctggtgagcctgttgctgcccaggtttaa

SEQ ID NO: 31926 - protein, 314 aa, Muscodor strobelii
  misc_feature: SGI Peptide ID NO. 570996
  misc_feature (60)..(277): Pfam Id: PF05019 Pfam Desc: Coenzyme Q (ubiquinone) biosynthesis protein Coq4
  misc_feature (26)..(306): NCBI GI: 189201918 Blast Desc: ubiquinone biosynthesis protein coq-4 [Pyrenophora tritici-repentis Pt-1C-BFP] gi|263415031|sp|B2WBF0.1|COQ4_PYRTR RecName: Full=Ubiquinone biosynthesis protein coq4, AltName: Q 4;
  misc_feature (31)..(306): NCBI GI: 263416948 Blast Desc: ubiquinone biosynthesis protein coq-4 [Pyrenophora tritici-repentis Pt-1C-BFP] gi|263415031|sp|B2WBF0.1|COQ4_PYRTR RecName: Full=Ubiquinone biosynthesis protein coq4, AltName: Q 4;
  misc_feature (43)..(284): NCBI GI: 256733715 Blast Desc: NECHADRAFT_67636 [Nectria haematococca mpVI 77-13-4]
  misc_feature (47)..(298): NCBI GI: 154290552 Blast Desc: BC1G_15620 [Botryotinia fuckeliana B05.10] gi|263414346|sp|A6SS55.1|COQ4_BOTFB RecName: Full=Ubiquinone biosynthesis protein coq4, mitochondrial; AltName: Full=Coenzyme
  misc_feature (47)..(283): NCBI GI: 39970545 Blast Desc: MGG_02739 [Magnaporthe grisea 70-15] gi|149210011|ref|XP_001522380.1| MGCH7_ch7g487 [Magnaporthe grisea 70-15] gi|263414737|sp|A4RBZ3.1|COQ4_MAGGR RecName: COQ4,
  misc_feature (47)..(298): NCBI GI: 263415834 Blast Desc: MGG_02739 [Magnaporthe grisea 70-15] gi|149210011|ref|XP_001522380.1| MGCH7_ch7g487 [Magnaporthe grisea 70-15] gi|263414737|sp|A4RBZ3.1|COQ4_MAGGR RecName: COQ4,
  misc_feature (17)..(299): NCBI GI: 263414825 Blast Desc: COQ4_PARBD RecName: Full=Ubiquinone biosynthesis protein COQ4, mitochondrial; AltName: Full=Coenzyme Q biosynthesis protein 4; Flags: Precursor ubiquinone biosynthesis
  misc_feature (41)..(298): NCBI GI: 119192114 Blast Desc: CIMG_00434 [Coccidioides immitis RS] gi|121771745|sp|Q1EAH9.1|COQ4_COCIM RecName: Full=Ubiquinone biosynthesis protein COQ4, mitochondrial; AltName: Full=Coenzyme
  misc_feature (17)..(299): NCBI GI: 263415915 Blast Desc: CIMG_00434 [Coccidioides immitis RS] gi|121771745|sp|Q1EAH9.1|COQ4_COCIM RecName: Full=Ubiquinone biosynthesis protein COQ4, mitochondrial; AltName: Full=Coenzyme
  misc_feature (47)..(281): NCBI GI: 85113402 Blast Desc: NCU02157 [Neurospora crassa OR74A] gi|74618246|sp|Q7SEQ9.1|COQ4_NEUCR RecName: Full=Ubiquinone biosynthesis protein coq-4, mitochondrial; AltName: Full=Coenzyme
  misc_feature: Useful for introducing or modulating the production of volatile compounds
MKLLQSSLRCARHSSIIPPPSSLSLLTTTTSSSPSPPSQLAQSPPHRHFSVLNRPPPNYPGHIPLTRLERLGLTVGSSLWSFFDPTRPDMIAALGEATAQPYFASRLRRAMLSHPTGRRILRDRPRITSKSLDLPRLRSLPETTVGGNYVKWLDREGVTPDTRVSVRYVDDPEEAYVIQRYRESHDFYHALTGLPVVREGEVALKAFEFANTLLPMTGLSVFAVATMKPAERQRFWSIYGPWAVRNGLRCEEVINVYWEEELETDVRELRERLGIEQPPDLRDIRKKERLERKRRKEAKMALRDAAGEPVAAQV

SEQ ID NO: 31927 - DNA, 4576 bp, Muscodor strobelii
  misc_feature: SGI EST ID NO. CUFF.75586.2
  misc_feature: Variant of the nucleotide sequence at SEQ ID NO 31925
ctgggctcgatcaatcagtcttttttaggccactatctgttttgttcatacggactttgcacggagttcgcgacggcaagctgtttgaaccttcaaccatggagtgcgtccaatcaccgctgttttgttttacccccttttctaccccttttacacaacaccaatttttcctggtttgatgtatatatgtgccatgtcaatgctagtaggccttgcaggcttaatgcgatacaagctgcggcgcagcattgtaagtatataggtaggcagccccgcaggcagccttcttctccacacagccaatcccaaatcccatctctgcatctagattctccattagccatatccatacgcaagtcgtaatgtcgccatctgtactcgagacactccccgaagagcttcttacgcacattcttcgctatgcaatcaagcgtagctcagctttcgtcgtagaccacgtaccgcccgaatctatggccgtacctcactcaagactcccggcaacctcaaaaacaacggtccctttaccaaaatatatcggtaatgaccatcaagatttgcatgtagcagattggatcctcataaactcaacatgccgacttattcgtcgcatcggccgtgtcttatttttccaaacaagatgcatcgcaatgatgatctcctttccggagcgccttacacgatctgaatcatcttcgatccgcggcttcgggcgtatcttgaaggacgccgagtcggaacggctccagtcgtgtatccgtgatatcgcgttggcggaggcaatcactgtcagttctacctgggtgcttagcgtaccagatatactcaagtggctacctgcggtacaaagctgcacgctggtttttgaaagacgctacgggtatagctcggagcataccgctaaggcattttccctgcgcgagccgcttgagcatgacatccggtccctaatattagccattggcgtgcctgagcacgtcgaactcttttatgcgaaagtgttttcagccacagagtttcgtaggttggttaggggtaaactattgcgagttttaaagtcgaaagcacgagctctgcaagctctgcggaaggatgaagatgcgtcagggatggtaccgagtacgtagcatgtaaatgactaatccgaggcgtctcccaacgtatcgtagatcgtatggtactcctatggatatattatcctcgatcgagtctttccagcgcctgccaaggtcttttactgcgatatctccctcggtgattaaattcacgctcttggcgttgccgcaaagcgagcgctttcgcttccaaaaccgggaagatttttactcgcatatacatcctcggaaacaacgacgcacattcctttccccgcgcctcgaagaattcgatacgtggagaaatcccaacagccaaaaggcgagatcgtagttcgtcttcagccggttcccgcttagctagcgcggctgtgatctcctccggactatcggcgtcgataccggaatgagtgcacgcgaaaaagaaagtacatctttgcaccacaggcatggactcgaggagttccagcaggtcgtgcttccagaacatcatgggctcgccggcagggttgagggaggacattagcgccgtcaatatcaccacgtcgcgcacatgcggtaagaggtctcccgatgatccggcgtactttagaatgcgggagaatccatgaaatgcatttggttgataggttgaaagtctccagggtagtgagtctttcagggcgatggttttcgtttggaagaacaaggggcggccaacgcggcggatgcgccgacaaacagagttcacaataatccagtcattgatgtgagaggcctgcttcctcgagtcgtgagggtgcggaaaatatttcgaggcagtgagagatgatggttttctgatagtatcttgggaagaccaaggcactcgttggtctcctaaaccataatctactatgagcggcgagtcgctcatcaaaacgaatgtcaagatttggataagtacttcctcgggaatcgcatcaagcatcgtggattggcaaccagcgcaaggtcacggctcttaaggggatggaatggtttggatcaagttctggattggtgaagtccagctctatgagtgcttcctggtaacagaggatattattatgtggaggttagaggatcactcctagattcgtttctcttgggataggtcatttaagagggcgggaccaaaagaagcaattatttcatagatgcatctaagcctccaattacactgcccaacgcccggcattggtgtttgcgttataactggctaagatcggatgtgactgtcttgactgtataacagttccaggtacgggtaacgccaagaaagatgccgacaggcatcggcacatcccgcgcccgacaccgacttggtactagattatcaactccatgttaatcgttcgatgtcatgatttctgatcactttcgcaataagctccttgagcttcaacggacatctcctcgacctccccgattcttgttcacttatcttttgaatgatcaagttatagacatcaaatgctgtaaatacacatattcccttcaatgaagctcctacaatcgtccctgcggtgcgcccgccatagctccatcatcccaccaccatcctcactttcactcctcaccacaacgacctcatcatcaccatcaccaccgtcacaactcgcccaatcccctcctcaccgtcacttctcagtactcaaccgcccacccccaaactacccaggccacatccccctaacgcgcctcgagcgcctcggcctcacagtcgggtcctcactgtggtccttcttcgacccaacccgcccggacatgatcgccgcgctcggcgaagcaacagcccaaccctacttcgcgtcccgtctgcgccgcgccatgctctcgcatcccacaggtcgacgtatcctgcgcgatcgaccccgcataacatccaaatccctcgacctaccacgcctgcggtccctgcccgagacgaccgtcggtgggaactacgtgaaatggctcgaccgcgaaggcgtcaccccagacactcgcgtgagtgtgcgttatgtggatgaccccgaggaagcatacgtcatacagcgatatcgcgaatctcacgatttctaccatgcgcttacaggactccccgtggtgagggagggagaggttgcgctgaaggcttttgagtttgctaatacgctgttgcctatgacgggattgagtgtctttgcggtggcgacgatgaaaccggcggagcggcagagattctggagtatttatgggccttgggcggttagaaatgggctgaggtgtgaagaggtgattaatgtttattgggaggaggagctagagactgatgtgcgggagttgagagagaggttgggtattgaacagccgcctgatttgagggatattaggaaaaaggagagattagagaggaagaggaggaaagaggcgaagatggcgttgagggatgctgctggtgagcctgttgctgcccaggtttaaaggagtgtgtggttgatgggagctggcgagagttgtggtgggattgaggttaggatgtgtatgcatattgtacggccttgtactattcattgtaaaatcaatatcgcgcggatagaagtacatagacacaataccccttccctaagcttcgcttcagtcagaatcagcctcgggtttccataacgccatgccaatgcaattcttcctttctctctcccctctccccccttttcttttccctcctcttcctctcacacctacgccctaccacacctagagatcaaacaaatcatcatcatcctcgtcatcccaccccttgcggcgctcaaccttgattttctcctcctcctggttctccgccactgccgccagcaactccttgagctgcgcctcggtgactttggagcgcagctggcccgtccgcgcgagcgttatcagtctgttctcgatgtcgtttgcgcgggactctttgacgagtcgtatgcggcccagtcgatcggcggcttcggggtggaggatttggttgaggatcgaggctcgtgcttcggctgcagggtgcggttagtcggtatctagggaagggaagagtagggtgttgagagggagggtgatattggatgttggagaggatgtttgggtgttgaggtgggtgtggtaccttcttgtctgtagattcggcgttagctacctctacctatctttcacagtagggttttggagcttgatggacatatcgacttactctcgctgctgctctgcctggttctttcctcctgcgcttccgctcgacgatccgccgccttgctgtgccttcagctgctctagacgggctttgcggatctggggtttggtggggttagctggctgttctacagcacgtctcttttcgcattgctatcgcgtgcgcacctgttctagctctgcgtcggccatgtttactaagttatttgttctgtcgtcggcgcgattgtagatatgctcgtgttccctaggctgataggcaggttggatggtttgaggtatgacgcaaggcagaa

SEQ ID NO: 31928 - DNA, 1875 bp, Muscodor strobelii
  misc_feature: SGI cDNA ID NO. 570997
  misc_feature: Encodes the peptide sequence at SEQ ID NO 31929
atgctgcccctcacgtggacgcgatccttggtacgcttcaccgcagcgacctcgttgatatgcgtcgctagcgcggacgtcattgcaccaggaaatgggacagcgaatataagcagcctgaagacatggtggcacgcaacgggagaaatcaactacgagactcccgttaagaaaggaaatgttcgccagtctcatgtctaccagacgtgggtgaagtctaccagtgattcgactaacacatattacaactcgttcgtctacgagactattcctcgcaatgggcagggtaatatcattgtaccgggcgacccatcttcgaccacgacggctgatgatggagtgaccatcgaagagacaatctggatcacgatggcctggacgcaattcctctattcttcggattcctggatcaagatctcacgacgaggtagcactgcgaacgtgaccgcggccgatgtcacgattcggccaactaatctgaatctccaaatttcggacgatggagaaggcaacatctacatcttggtcccttataaagacgcaggcgtacgcttctcagtcgagtttgcggacaacatgtatacataccacgacagctgcgataccacggtatgcgattttgtacaggactggcattctgatgggccgtactattattcgccactcactagtcacaacgcagtaatgggagtcgaacctcatgatgccctactgatcttcgcaagcccgatgccgtcctcgtcactggttcccgacgtgtcagcgcctcaaacatacgtggtgtaccccggtgacgttccggtctccgccctatcatcagtcacaaacaccaacatctacttcatgcccggcgtgcacgaaatgacagcaacacaacacctaatcctctcaagttcggtaaattgggtctacctagcaccaggcgcctacgtaaaaggcgcaatccaattcacaacatccgcctcgtcaataaaagcaaccggtttcggcgtgctctcgggggagaagtacgtctaccaagccaacgtagacaaaggctacacaaacgtgggatccaacggtgcttcactgcgcatctggagcggacgcagcgcatccggcgtacagcaaaccttcacactaacaggcgtaacgacgaacgccccgccattcaacagcatagatttcacgggggacttaaactcgatctcgatctcgcaatgggactacaaacaagtgggcgccttcttcggacaaaccgacggcacaacactctatcccgggtcaaacatccacgatgtattctaccacagcggcgacgacacaatcaagacctacggctcctcaatcacagttcgaaacgtcatagtctggaagacaaaaacagcgccgataatccagtacggctgggcagcacgccaaatggagaacgtcctcgtggacggcgtggacgcgatacacatgcggtattccagtaatggctcacaccccagtatcatcggcgcgaaccaagtcttcgattatctcgagacgcagaccaacactgcggacctatcaaaaacagtgcggaacgttacgtttaggaatattcgcgcggaggggatagggggtaatttgatgaggattgtgccgcttgctaactacgaaaacgtaagaattgagaatgttagtttggagaagtggcctgtgaggactacggggatctatgagagtcagttgccgacttggacggatgggaacgggaagcaggttggtataagtgggtttgttattagtgggtttaccgttggtggtgtcaagatttcgcaggctgccggtaactatggtccgaatgatgctgggggtttgaatatcgcgcctgagtttttggcgaatggacgggttactatcgtttga

SEQ ID NO: 31929 - protein, 624 aa, Muscodor strobelii
  misc_feature: SGI Peptide ID NO. 570997
  misc_feature (19)..(622): Pfam Id: PF03718 Pfam Desc: Glycosyl hydrolase family 49
  misc_feature (34)..(597): NCBI GI: 24637169 Blast Desc: IPUA_ASPNG RecName: Full=Isopullulanase; Flags: Precursor gi|1905759|dbj|BAA19473.1| isopullulanase precursor [Aspergillus niger] gi|1906798|dbj|BAA18971.1| isopullulanase
  misc_feature (42)..(611): NCBI GI: 7801167 Blast Desc: dextranase [Penicillium funiculosum]
  misc_feature (32)..(611): NCBI GI: 186920262 Blast Desc: dextranase precursor [Penicillium pinophilum]
  misc_feature (32)..(611): NCBI GI: 1352244 Blast Desc: DEXT_PENMI RecName: Full=Dextranase; AltName: Full=Alpha-1,6-glucan-6-glucanohydrolase; Flags: Precursor gi|940290|gb|AAB47720.1| dextranase [Penicillium minioluteum]
  misc_feature (38)..(611): NCBI GI: 37927147 Blast Desc: DEXT_PENMI RecName: Full=Dextranase; AltName: Full=Alpha-1,6-glucan-6-glucanohydrolase; Flags: Precursor gi|940290|gb|AAB47720.1| dextranase [Penicillium minioluteum]
  misc_feature (32)..(611): NCBI GI: 212544864 Blast Desc: dextranase precursor, [Penicillium marneffei ATCC 18224] gi|210065555|gb|EEA19649.1| dextranase precursor, [Penicillium marneffei ATCC 18224]
  misc_feature (32)..(595): NCBI GI: 3821901 Blast Desc: dextranase isoform [Penicillium]
  misc_feature (31)..(595): NCBI GI: 88702781 Blast Desc: dextranase [Penicillium minioluteum]
  misc_feature (4)..(608): NCBI GI: 46371989 Blast Desc: dextranase [Lipomyces starkeyi]
  misc_feature (34)..(614): NCBI GI: 1655478 Blast Desc: endodextranase [Arthrobacter globiformis]
  misc_feature (34)..(597): SWISSPROT Homolog: EC 3.2.1.57 Isopullulanase
MLPLTWTRSLVRFTAATSLICVASADVIAPGNGTANISSLKTWWHATGEINYETPVKKGNVRQSHVYQTWVKSTSDSTNTYYNSFVYETIPRNGQGNIIVPGDPSSTTTADDGVTIEETIWITMAWTQFLYSSDSWIKISRRGSTANVTAADVTIRPTNLNLQISDDGEGNIYILVPYKDAGVRFSVEFADNMYTYHDSCDTTVCDFVQDWHSDGPYYYSPLTSHNAVMGVEPHDALLIFASPMPSSSLVPDVSAPQTYVVYPGDVPVSALSSVTNTNIYFMPGVHEMTATQHLILSSSVNWVYLAPGAYVKGAIQFTTSASSIKATGFGVLSGEKYVYQANVDKGYTNVGSNGASLRIWSGRSASGVQQTFTLTGVTTNAPPFNSIDFTGDLNSISISQWDYKQVGAFFGQTDGTTLYPGSNIHDVFYHSGDDTIKTYGSSITVRNVIVWKTKTAPIIQYGWAARQMENVLVDGVDAIHMRYSSNGSHPSIIGANQVFDYLETQTNTADLSKTVRNVTFRNIRAEGIGGNLMRIVPLANYENVRIENVSLEKWPVRTTGIYESQLPTWTDGNGKQVGISGFVISGFTVGGVKISQAAGNYGPNDAGGLNIAPEFLANGRVTIV

SEQ ID NO: 31930 - DNA, 2319 bp, Muscodor strobelii
  misc_feature: SGI EST ID NO. CUFF.75536.0
  misc_feature: Variant of the nucleotide sequence at SEQ ID NO 31928
cccatattgacctaggtccttggatgacacgacaccccgaagcttttgcaccgagagaaacaccgtaaaggtgctagaagcagctaacaatatggttacgacgatggggtctcatgacttgacgtcggcgacttgtcggccatcgtgaatctattttcgaatttctcagactccttctcaatgggcacggtttgcggtaatgacgaatccgagtatgccggctgaaagtggttatctacgtgttctatgagatttcgaatacgcaaggaagataacaattcactacgcatcttagacttatttcccatcgtctccgtcactatgctgcccctcacgtggacgcgatccttggtacgcttcaccgcagcgacctcgttgatatgcgtcgctagcgcggacgtcattgcaccaggaaatgggacagcgaatataagcagcctgaagacatggtggcacgcaacgggagaaatcaactacgagactcccgttaagaaaggaaatgttcgccagtctcatgtctaccagacgtgggtgaagtctaccagtgattcgactaacacatattacaactcgttcgtctacgagactattcctcgcaatgggcagggtaatatcattgtaccgggcgacccatcttcgaccacgacggctgatgatggagtgaccatcgaagagacaatctggatcacgatggcctggacgcaattcctctattcttcggattcctggatcaagatctcacgacgaggtagcactgcgaacgtgaccgcggccgatgtcacgattcggccaactaatctgaatctccaaatttcggacgatggagaaggcaacatctacatcttggtcccttataaagacgcaggcgtacgcttctcagtcgagtttgcggacaacatgtatacataccacgacagctgcgataccacggtatgcgattttgtacaggactggcattctgatgggccgtactattattcgccactcactagtcacaacgcagtaatgggagtcgaacctcatgatgccctactgatcttcgcaagcccgatgccgtcctcgtcactggttcccgacgtgtcagcgcctcaaacatacgtggtgtaccccggtgacgttccggtctccgccctatcatcagtcacaaacaccaacatctacttcatgcccggcgtgcacgaaatgacagcaacacaacacctaatcctctcaagttcggtaaattgggtctacctagcaccaggcgcctacgtaaaaggcgcaatccaattcacaacatccgcctcgtcaataaaagcaaccggtttcggcgtgctctcgggggagaagtacgtctaccaagccaacgtagacaaaggctacacaaacgtgggatccaacggtgcttcactgcgcatctggagcggacgcagcgcatccggcgtacagcaaaccttcacactaacaggcgtaacgacgaacgccccgccattcaacagcatagatttcacgggggacttaaactcgatctcgatctcgcaatgggactacaaacaagtgggcgccttcttcggacaaaccgacggcacaacactctatcccgggtcaaacatccacgatgtattctaccacagcggcgacgacacaatcaagacctacggctcctcaatcacagttcgaaacgtcatagtctggaagacaaaaacagcgccgataatccagtacggctgggcagcacgccaaatggagaacgtcctcgtggacggcgtggacgcgatacacatgcggtattccagtaatggctcacaccccagtatcatcggcgcgaaccaagtcttcgattatctcgagacgcagaccaacactgcggacctatcaaaaacagtgcggaacgttacgtttaggaatattcgcgcggaggggatagggggtaatttgatgaggattgtgccgcttgctaactacgaaaacgtaagaattgagaatgttagtttggagaagtggcctgtgaggactacggggatctatgagagtcagttgccgacttggacggatgggaacgggaagcaggttggtataagtgggtttgttattagtgggtttaccgttggtggtgtcaagatttcgcaggctgccggtaactatggtccgaatgatgctgggggtttgaatatcgcgcctgagtttttggcgaatggacgggttactatcgtttgagatcgagggtttgatgaatacctgagtcgttcattgtctatttgcttctaccctgaatcgagtatcgtgttcattgtgttttcatcttaagtaccgagtaagtcgtgtttgcttatcttggcg

SEQ ID NO: 31931 - DNA, 714 bp, Muscodor strobelii
  misc_feature: SGI cDNA ID NO. 570998
  misc_feature: Encodes the peptide sequence at SEQ ID NO 31932
atgtgttcatccccttccgggagtgggcgccgagcaaacatcagtgacgacagcaacgtgctgcccaacgtgcgctaccccaatagacaaccttcgtattgtgaattgacactaagacataagcgacggcataggggcttcacctgtctagctacgccctatgtggtatacgggtctacttttgtgtgcaactcgcgcattgacgctttcactggccctcaggtgtatatatcgagtggtgccacgttatctaccgaaaccgttacgatttctgccgaacaggtcgccatagcgaatgccttcggagtccagatccaatatcgaatggatgatttcatctcgacaccaacaaccgccccagctccttctagcacgacgtctagtacaacttccagtacccggtccacaagctccggatcgccgactccgagcccgagtccgagccggaaaggcggcctgagcaccggaagtgcgattggcgttggagtgggagttggaattggagctgtgctcattatcggcgtcttgatattcgtggtctgcgtgaggcgccaccgtgcccgaaactcagtgccatcgccgccgcaatatgatggaggaatggaaccgaagtcgccgaagttcgtctctgcggtgacaattgtacaagcggcggagctgcagcagcctccggcggaattagggggtgggtattgggatatgagccatcgttga

SEQ ID NO: 31932 - protein, 237 aa, Muscodor strobelii
  misc_feature: SGI Peptide ID NO. 570998
  misc_feature (103)..(196): NCBI GI: 171683899 Blast Desc: protein product [Podospora anserina] gi|170941910|emb|CAP67562.1| protein product [Podospora anserina]
  misc_feature (104)..(227): NCBI GI: 116198575 Blast Desc: CHGG_07443 [Chaetomium globosum CBS 148.51] gi|88178722|gb|EAQ86190.1| CHGG_07443 [Chaetomium globosum CBS 148.51]
  misc_feature (85)..(237): NCBI GI: 116198577 Blast Desc: CHGG_07444 [Chaetomium globosum CBS 148.51] gi|88178723|gb|EAQ86191.1| CHGG_07444 [Chaetomium globosum CBS 148.51]
  misc_feature (100)..(227): NCBI GI: 240106314 Blast Desc: CPC735_058770 [Coccidioides posadasii C735 delta SOWgp]
  misc_feature (86)..(186): NCBI GI: 242820122 Blast Desc: TSTA_058290 [Talaromyces stipitatus ATCC 10500] gi|218713916|gb|EED13340.1| TSTA_058290 [Talaromyces stipitatus ATCC 10500]
  misc_feature (54)..(211): NCBI GI: 212530452 Blast Desc: kinesin light chain, [Penicillium marneffei ATCC 18224] gi|210074781|gb|EEA28868.1| kinesin light chain, [Penicillium marneffei ATCC 18224]
MCSSPSGSGRRANISDDSNVLPNVRYPNRQPSYCELTLRHKRRHRGFTCLATPYVVYGSTFVCNSRIDAFTGPQVYISSGATLSTETVTISAEQVAIANAFGVQIQYRMDDFISTPTTAPAPSSTTSSTTSSTRSTSSGSPTPSPSPSRKGGLSTGSAIGVGVGVGIGAVLIIGVLIFVVCVRRHRARNSVPSPPQYDGGMEPKSPKFVSAVTIVQAAELQQPPAELGGGYWDMSHR

SEQ ID NO: 31933 - DNA, 1450 bp, Muscodor strobelii
  misc_feature: SGI EST ID NO. CUFF.75530.0
  misc_feature: Variant of the nucleotide sequence at SEQ ID NO 31931
cgcaggcgaagaatggtgattatctatgatgcaacaaattctagaccgccctcgttttggtggttggaccattttcacggtcatgataccggcaacatcatcgctggtgcctattaatgggggactaccctgagtgcattcagccagaatcattcgtggtctcttgataacctcgatgaactctaactcgtgatagttcgaacccattttcctcataatgtcactaggacctttgacgagaacatatgagcctccctcgtcatgtacgtcctcctttctcacggattacaaactcccaggaggatgggatgtcatgggaccccttgatacttctggcgactgtttcccaccgaagtacgatgacgacggagaacagtactattcacccggtatatgcccggctggatacacagcagcatgtgttcatccccttccgggagtgggcgccgagcaaacatcagtgacgacagcaacgtgctgcccaacgggcttcacctgtctagctacgccctatgtggtatacgggtctacttttgtgtgcaactcgcgcattgacgctttcactggccctcaggtgtatatatcgagtggtgccacgttatctaccgaaaccgttacgatttctgccgaacaggtcgccatagcgaatgccttcggagtccagatccaatatcgaatggatgatttcatctcgacaccaacaaccgccccagctccttctagcacgacgtctagtacaacttccagtacccggtccacaagctccggatcgccgactccgagcccgagtccgagccggaaaggcggcctgagcaccggaagtgcgattggcgttggagtgggagttggaattggagctgtgctcattatcggcgtcttgatattcgtggtctgcgtgaggcgccaccgtgcccgaaactcagtgccatcgccgccgcaatatgatggaggaatggaaccgaagtcgccgaagttcgtctctgcggtgacaattgtacaagcggcggagctgcagcagcctccggcggaattagggggtgggtattgggatatgagccatcgttgaacgacaacgttgtacatgtgagtagtcagactaagcgcattgtatcaagatcctcagaagacctaagagataatggtggctattgaataactagcgatcaaatttagggcgacaatgcctgacaagaatcgttgtgactttttagaaaaaataactgagcgtgattctccaagtacagtcaataaatctgaagagagaatagggttgttccatctccccggtgttccttcgccaggtcactccgtatcaaatgacaccttccgttcagtacccttaatgaagaagatcatacggctcacatatatatataagttcggatgggatgacgccatcctcgattatcgggctggcaaattcgatagacagttaaacagttaaaaggtg

SEQ ID NO: 31934 - DNA, 1317 bp, Muscodor strobelii
  misc_feature: SGI cDNA ID NO. 570999
  misc_feature: Reduced expression when VOC is produced
  misc_feature: Encodes the peptide sequence at SEQ ID NO 31935
atgaaaatacaggaagaggagccagatgacagctttgaaaaggccgaccgcaaaatcgagatcggcgtcgacgcatcgaaactgccactcagcggccaaccgcgaaggactgggcgaccgctggccaagaggactagagtgcacttcgacgtggccgcattagctgctgagaatgaagtcgtcgtcctgcgagaacagcttcaagagctcactcacgagatcgagctcttaaaatcagaaaagtcaaaggaaaagcacgccaatatcgagcttgaacccgtccctccgtccgagccagaagaatctcccgcttcaccacaaaagccaccgccagaggagcccgccccttttgtcgaggctgatgacaagcctatacctccactccccttctcgctctctaatcaagtacacattctgggtttcactactcatgccaaatggctcgcctacgctctcgctaacatacctaatgccccaccggtgacaatgcttgtggggcatccgattgctttgcagcaatggggtgaagcagagcgacaaattcgtttgttcgacagtcggggtagatatgtatctgatgctccaataccctacccggagttgataccgaaccggttcgtcaaatacgagggagaagcggaaatgggccccatctataatttaatagtcaacacgacttcaagcacagttatccccaaattagcaagtataagggaacgaatagacagcaggacgaccatctgtctgatcgagcaggggttcggaatggcagagaaaatcatacagcaactgtttcctaaccccatgaaacggcctaatatcgtgctcggtgagagctaccaccgggtctatgcaaattcgaagacaaataaatttcagatcagactcatgaaggcaaagcacttggcgctatgcggctttcccaaatcggcaactaccatggaaggactgccgcagagtctcttgctcgcagcatggggtagacagcagacgcagcacttcatctctatcctaaaggaagctcctggcctaaatccccgtggcttgccggttccagagtttctgctgggtagtttacacaggctgttattctcctccgtggcagataccctgtccgtcattatgggcggtgagtacggcacgctgagacacagcccctacgccatgaaactctggttccaactcgtcgaggagtctatagagatcatctcgaagctccctgagctacagaaatggcgtcgcgctgcaacccgcacgtcccccgggctcctaaaaaaggaaattaaaaatccatctcgatgctatgcgatggcgtag

SEQ ID NO: 31935 - protein, 438 aa, Muscodor strobelii
  misc_feature: SGI Peptide ID NO. 570999
  misc_feature (130)..(428): NCBI GI: 116193441 Blast Desc: CHGG_06438 [Chaetomium globosum CBS 148.51] gi|88182351|gb|EAQ89819.1| CHGG_06438 [Chaetomium globosum CBS 148.51]
  misc_feature (131)..(409): NCBI GI: 156035923 Blast Desc: SS1G_13166 [Sclerotinia sclerotiorum 1980] gi|154698570|gb|EDN98308.1| SS1G_13166 [Sclerotinia sclerotiorum 1980]
  misc_feature (119)..(410): NCBI GI: 164429737 Blast Desc: NCU02155 [Neurospora crassa OR74A] gi|157073598|gb|EAA35278.2| [Neurospora crassa OR74A]
  misc_feature (124)..(428): NCBI GI: 171684547 Blast Desc: protein product [Podospora anserina] gi|170942234|emb|CAP67886.1| protein product [Podospora anserina]
  misc_feature (121)..(375): NCBI GI: 154290550 Blast Desc: BC1G_15619 [Botryotinia fuckeliana B05.10] gi|150847514|gb|EDN22707.1| BC1G_15619 [Botryotinia fuckeliana B05.10]
  misc_feature (136)..(433): NCBI GI: 39970541 Blast Desc: MGG_02737 [Magnaporthe grisea 70-15] gi|149210007|ref|XP_001522378.1| MGCH7_ch7g485 [Magnaporthe grisea 70-15] gi|86196440|gb|EAQ71078.1| MGCH7_ch7g485 grisea
  misc_feature (132)..(428): NCBI GI: 189202794 Blast Desc: conserved [Pyrenophora tritici-repentis Pt-1C-BFP] gi|187984832|gb|EDU50320.1| conserved [Pyrenophora tritici-repentis Pt-1C-BFP]
  misc_feature (132)..(425): NCBI GI: 259482403 Blast Desc: TPA: 2-dehydropantoate 2-reductase, (AFU_orthologue; AFUA_3G06390) [Aspergillus nidulans FGSC A4]
  misc_feature (136)..(410): NCBI GI: 169782199 Blast Desc: [Aspergillus oryzae RIB40] gi|83774305|dbj|BAE64429.1| protein product [Aspergillus oryzae]
  misc_feature (133)..(410): NCBI GI: 145254262 Blast Desc: An18g01140 [Aspergillus niger] gi|134084158|emb|CAK47191.1| protein product [Aspergillus niger]
  misc_feature: Useful for introducing or modulating the production of volatile compounds
MKIQEEEPDDSFEKADRKIEIGVDASKLPLSGQPRRTGRPLAKRTRVHFDVAALAAENEVVVLREQLQELTHEIELLKSEKSKEKHANIELEPVPPSEPEESPASPQKPPPEEPAPFVEADDKPIPPLPFSLSNQVHILGFTTHAKWLAYALANIPNAPPVTMLVGHPIALQQWGEAERQIRLFDSRGRYVSDAPIPYPELIPNRFVKYEGEAEMGPIYNLIVNTTSSTVIPKLASIRERIDSRTTICLIEQGFGMAEKIIQQLFPNPMKRPNIVLGESYHRVYANSKTNKFQIRLMKAKHLALCGFPKSATTMEGLPQSLLLAAWGRQQTQHFISILKEAPGLNPRGLPVPEFLLGSLHRLLFSSVADTLSVIMGGEYGTLRHSPYAMKLWFQLVEESIEIISKLPELQKWRRAATRTSPGLLKKEIKNPSRCYAMA

SEQ ID NO: 31936 - DNA, 2557 bp, Muscodor strobelii
  misc_feature: SGI EST ID NO. CUFF.75538.0
  misc_feature: Variant of the nucleotide sequence at SEQ ID NO 31934
cggcgccgtccctgcaaatccctgcggaaatttcgagacggtagcaagcgcgatgtcgattttttgaaaactgaatgtcttgccgtcatccatgtttctccatctacatacctgtactcattgtaataatccaacagcgccgacgcgattcctctcccacttcgacggttgacgatctttatgagatctgtgcctattcggtcgacattcttctgtttcttgaattttattttttttgatatataatgttgcacgtataaatcctggcacccgtgtcgacccttgcgcctctcgaacactcttgaagcgacgacctatggtccccagagctcgctgctcatgtcgttcattctcttgatgagaccgtgacacctccgctctctcctggtggtcgactgccacccgcttccacgccaccacacatctctggctgggctgtcgccgccatccttcaccctgtattcccagatcgcctaccgaccgctctcgcgggtgctgccgcgggtatctcgtgcgcttgcgagatctccttgtcatgaaccctctgtcgcgcagggccaccatggcgccgccagactctactcctccgataccgacagcaatcctccttcacacaaccaggcttcgacacagccctcatcacaacatcgagctcgacccacccgcacctcacgcgccggtctggataagctgcggcagtatttaatgaaaatacaggaagaggagccagatgacagctttgaaaaggccgaccgcaaaatcgagatcggcgtcgacgcatcgaaactgccactcagcggccaaccgcgaaggactgggcgaccgctggccaagaggactagagtgcacttcgacgtggccgcattagctgctgagaatgaagtcgtcgtcctgcgagaacagcttcaagagctcactcacgagatcgagctcttaaaatcagaaaagtcaaaggaaaagcacgccaatatcgagcttgaacccgtccctccgtccgagccagaagaatctcccgcttcaccacaaaagccaccgccagaggagcccgccccttttgtcgaggctgatgacaagcctatacctccactccccttctcgctctctaatcaagtacacattctgggtttcactactcatgccaaatggctcgcctacgctctcgctaacatacctaatgccccaccggtgacaatgcttgtggggcatccgattgctttgcagcaatggggtgaagcagagcgacaaattcgtttgttcgacagtcggggtagatatgtatctgatgctccaataccctacccggagttgataccgaaccggttcgtcaaatacgagggagaagcggaaatgggccccatctataatttaatagtcaacacgacttcaagcacagttatccccaaattagcaagtataagggaacgaatagacagcaggacgaccatctgtctgatcgagcaggggttcggaatggcagagaaaatcatacagcaactgtttcctaaccccatgaaacggcctaatatcgtgctcggtgagagctaccaccgggtctatgcaaattcgaagacaaataaatttcagatcagactcatgaaggcaaagcacttggcgctatgcggctttcccaaatcggcaactaccatggaaggactgccgcagagtctcttgctcgcagcatggggtagacagcagacgcagcacttcatctctatcctaaaggaagctcctggcctaaatccccgtggcttgccggttccagagtttctgctgggtagtttacacaggctgttattctcctccgtggcagataccctgtccgtcattatgggcggtgagtacggcacgctgagacacagcccctacgccatgaaactctggttccaactcgtcgaggagtctatagagatcatctcgaagctccctgagctacagaaatggcgtcgcgctgcaacccgcacgtcccccgggctcctaaaaaaggaaattaaaaatccatctcgatgctatgcgatggcgtagaagcccttggatcaacgaggtacgggtagggtacgagccgcccgtggacaacttcaacggctacctcgtgcgacgagccaaagagcttggactagatcacaagcacaatacgatggttttaaatctcgtgaaagcgcggcagcaccagcggtcctcggagatccacaatttgataccatggggtgggcaaagaccgtacatgttggaaaatgatcttatcaataccgagcaaggcgaccagtatagagaatttgctgagtatgaggcttgagcgatcaagcgagatgtgtatcctatgggcgagtgatctgtatataatgcccctgtatatttaccaccactcccgactgcgtgatagagagagtctttactgtatattgtcaactgccgtgaggaatagagtccggctgtatatttggagaattaggatacgatagaaatacccaatgtaactttatacagttctgaaggatgataatttgccatgtagggtatccgctgggataagcccaactatcccgaccatactagtaag

SEQ ID NO: 31937 - DNA, 648 bp, Muscodor strobelii
  misc_feature: SGI cDNA ID NO. 571000
  misc_feature: Encodes the peptide sequence at SEQ ID NO 31938
atggatccgacaaacatccttccggccctagagcgcctcgacgatggagtcgacaatcttgaagaggccctagagcctctcatcaagaatgtgtccgaagtagcctcaaagctaccacttctcgacaaagcaaagcttttcgtccttgtcacttactcgatcgagtctatgctcttctcggctcttcgcctgaacggcgtcgatgcgaaagaccatcctgtcttcaaggagctcaccagagtgcggcagtattttgagaagatcaagaatattgagttccctccgcctcctcctcagaaaccggagcagagagttcacaaggaagctgctattcgattcatccgctctgatctcgcagatgacaaggaggtgcactccaaactgactgagatgatcgccaaagagaaggcccaggccagcctgagaaatgccaagatcggcgagaagcgcaaggttgatgagtctgcctcatccgcaagcgaggagagtgaagatgaagatgcagaggagcctactactgaggcagagccagatcaaaggaacaaaaaaccgaagctcgagacgaagaagaaaggcaagaacaaaccaaagcggaccgccaaggacaggagagagaagaaggagaaacacaataaaggcaagaaatga

SEQ ID NO: 31938 - protein, 215 aa, Muscodor strobelii
  misc_feature: SGI Peptide ID NO. 571000
  misc_feature (9)..(87): Pfam Id: PF04000 Pfam Desc: Sas10/Utp3/C1D family
  misc_feature (1)..(132): NCBI GI: 85113388 Blast Desc: NCU02154 [Neurospora crassa OR74A] gi|28926298|gb|EAA35277.1| conserved [Neurospora crassa OR74A]
  misc_feature (1)..(132): NCBI GI: 171684867 Blast Desc: protein product [Podospora anserina] gi|170942394|emb|CAP68046.1| protein product [Podospora anserina]
  misc_feature (1)..(136): NCBI GI: 116193443 Blast Desc: CHGG_06439 [Chaetomium globosum CBS 148.51] gi|88182352|gb|EAQ89820.1| CHGG_06439 [Chaetomium globosum CBS 148.51]
  misc_feature (1)..(184): NCBI GI: 121704786 Blast Desc: exosome-associated protein, [Aspergillus clavatus NRRL 1] gi|119398802|gb|EAW09230.1| exosome-associated protein, [Aspergillus clavatus NRRL 1]
  misc_feature (1)..(162): NCBI GI: 212544740 Blast Desc: exosome-associated family protein [Penicillium marneffei ATCC 18224] gi|210065493|gb|EEA19587.1| exosome-associated family protein [Penicillium marneffei ATCC
  misc_feature (1)..(163): NCBI GI: 242813346 Blast Desc: exosome-associated family protein [Talaromyces stipitatus ATCC 10500] gi|218714487|gb|EED13910.1| exosome-associated family protein [Talaromyces stipitatus ATCC
  misc_feature (2)..(167): NCBI GI: 256734209 Blast Desc: [Nectria haematococca mpVI 77-13-4]
  misc_feature (1)..(150): NCBI GI: 239613840 Blast Desc: exosome-associated family protein [Ajellomyces dermatitidis ER-3]
  misc_feature (1)..(150): NCBI GI: 225685257 Blast Desc: [Paracoccidioides brasiliensis Pb03]
  misc_feature (1)..(185): NCBI GI: 154286698 Blast Desc: [Ajellomyces capsulatus NAm1] gi|150407785|gb|EDN03326.1| [Ajellomyces capsulatus NAm1]
MDPTNILPALERLDDGVDNLEEALEPLIKNVSEVASKLPLLDKAKLFVLVTYSIESMLFSALRLNGVDAKDHPVFKELTRVRQYFEKIKNIEFPPPPPQKPEQRVHKEAAIRFIRSDLADDKEVHSKLTEMIAKEKAQASLRNAKIGEKRKVDESASSASEESEDEDAEEPTTEAEPDQRNKKPKLETKKKGKNKPKRTAKDRREKKEKHNKGKK

SEQ ID NO: 31939 - DNA, 1309 bp, Muscodor strobelii
  misc_feature: SGI EST ID NO. CUFF.75553.0
  misc_feature: Variant of the nucleotide sequence at SEQ ID NO 31937
acgctttctgcccttcattgctcaccaccataattcttcatcgcagtaccccgtgcaacacaaagccgcgttgttgtttgaagtgggtttctcctgggaagctgactacgagaaagttttgaggtgctttctaatcccggcgtgcggtactcattcttgcggacatggatccgacaaacatccttccggccctagagcgcctcgacgatggagtcgacaatcttgaagaggccctagagcctctcatcaagaatgtgtccgaagtagcctcaaagctaccacttctcgacaaagcaaagcttttcgtccttgtcacttactcgatcgagtctatgctcttctcggctcttcgcctgaacggcgtcgatgcgaaagaccatcctgtcttcaaggagctcaccagagtgcggcagtattttgagaagatcaagaatattgagttccctccgcctcctcctcagaaaccggagcagagagttcacaaggaagctgctattcgattcatccgctctgatctcgcagatgacaaggaggtgcactccaaactgactgagatgatcgccaaagagaaggcccaggccagcctgagaaatgccaagatcggcgagaagcgcaaggttgatgagtctgcctcatccgcaagcgaggagagtgaagatgaagatgcagaggagcctactactgaggcagagccagatcaaaggaacaaaaaaccgaagctcgagacgaagaagaaaggcaagaacaaaccaaagcggaccgccaaggacaggagagagaagaaggagaaacacaataaaggcaagaaatgagccatcgacaagcgctctagctgaacaagaaattcactgtcttcagtggaggtgacctggcatagaggagtcatgaaagccattggtcttcttaagcaccacgaagcgcgcgtaatgtcatcggcggccacaatcaacatgccaacatcgtattttgatgagggcccacgatgggagggtcttgtgccaggatgattgcgtacgagtgtctatcaatgtaagatgatatccgacgacgacgatgacgacgactacgacacgacgagacactctccatagtcagacagatctgacaacgagacaggagaagtgttctcacgagtgacctcaccaatcggagaatggtcgctccatcagtcttgtcagaattgacgaacggtgctcggccttaaagagccaagttgacagtatcgattgtgccggcgtagtgaagataaaaatgaagaagaaatcaagtaatcaagagtctagatatacctgtgaagtttatatgtgcg

SEQ ID NO: 31940 - DNA, 3174 bp, Muscodor strobelii
  misc_feature: SGI cDNA ID NO. 571001
  misc_feature: Encodes the peptide sequence at SEQ ID NO 31941
atggatgaaacgttaagcttagtgacggggcagctagtcgaaggaataacagcatgtgtaaaagatcttcgaaagggcaaccatattcaatttgtcaaaggcgacgatgtggataatacagacttcacgtccgcgctggctgcggctatcggaaataatctccagccaattatgcaattcttcaacgaactggagaccaaagctcaggccgcagaaaatagagctcaggacgcagaagaaactctgaaagaacaacggagaaaatacggtctagacggccctggcccccttcaaagaaaaatcacggaacttgaagaggaattggcgggcttaaatgctcagaacaagggtctgaataaaagaattgacgccaagaccgatgccttccagaaagatatcgacgtcaagaatgagataataaacgaccttaaaatatcagaaaaggcggcaacgcaggcgcaaaagagagctgagagcgacagggagaagactcagaaagacttcgacaggtctgagacgtcattggcagaagccaacgaggaattggagaaagttaaaacgggccttcttgaagcgaacgcaaagttcgaagaagaacataagaaatacctggaggaaaaacaaagtgcggaggagctgctcaattctagcgacaagtatgccgaagaggttgaacactacagaggtaaatttgaagctcttgaggcagagcaacagcgatccgacaactggagatcagaaaaagagtcactagtaaaagctgcagaggagcaagcctcccggatcactggactagtaaagaagaacaaagagctccaagaacagcttgaggaagcgaacaagccttctaggccaacaagcattgcaacactgccgactccactatcaggagaaggtgcttcgtttgatacggaacttcagattaagaagttgaaagaagacttagaggagaaaaccaaatacatccaaaagctggaaacagacgcgacagagcgtgtcgaggccgacaacgaaaaggcacgtcagcttggagaactcagggcgcaactagagcagtctgaggagcacaagaagcaacaaaaagacaaggcagaccgagaaactgcagatttgaaagagaaactttccaagcttgcaaccgagaaagaaaacttgaccaagaaacacactttcgacattgacgatcaaaataaccgtattaaagccctggaacaaaaggaactggttggaacagctacaattaagaagcttgaaggacagctcaaggcccgagcaaatacgaccgattcagtgggccagaccactttgacgggatccgatatagatagacaggttaacgatgtagcaagtgcatcggacgcgctaaacagcgagcgtgagaatgcaagaggacttgaaggatattttactaaagagaaagctcgcgcggatgatcttgaaaatcgacttaaccaggccaatgctgaaaataagaaactgaaggaatctcagactgcggacagcagcaatcttgccgacgagcaagctcgagctagtgagcttcgcaccgaacttgaggcggccaaagatcagatctcacaactgaagcaatctcaaaatgaagtcggtgacagccttaagaaggagaaagatcagctacaaaatgaactagaacaggcgaacgctcgaatctcacaactgagcaaatctcagacaacagatagcactgcttttgcatcagagagagctcgtgccgatgagcttgagcgtgaatgctaccaagccgaaaattcacgctaccaagccgaaaacgaaatcaaacaattgaaactcgaaatcgaacaattgaagaagacccaaaaggaactcgagacccaaaaggaaatcaccttgagacgaaaccgcattgacgatattcagaagaaactagacactactgagacagccagcaggaacgcacaggtcaaattggacgaactacagaaggcacataatgagcttggcacaaatcaccacatacttgaagaaactcataagacagtaaaggatcaactggaagagaccaagacgcagcttcagaaggccgaagaagacctcaaagccaaagaagaggaccgctcaggactggaatctcagttgaagcaaaagcaagaagactatgaccggctcaaagatgatgcagtcgaccagggtcatgatgagttagagaaagcccacgacgcaatggaagaggaatgtgtacagctagataagaattacaaggaactccaggctacccacgctgatctcaagtcacgctttgacgctctcatcgagcacgagaaagagctcaacaagacgctgcaagaatgtaaagatagcaaagatcaaaaggtcggcaacgacgacaacaacgacaagccaggaaaccctggagacgacgcagaactgaaggaagaactacaacgttatcgagatgaacatggccgcctcgaagctgaagtccgcagattaaatgcccttgttgctgtaagggacatagatgtcactgatctacaaagccaaattcttgatcgtgatgaaagcatcagaaatatacgacaggaagtcgatacgacgcgaaggtctcttcaacgtcagatcgacgtcttcgaaaagtcacaaaaagacatgaccgatcggatcgcggagataaccaaaaacctcaacgcaagggctcaagattacgaaaacaggaaaaagcaaatagaggcagggaaacgggagatcaagagatacattgatctcgtggagtttctcagggccgagcgtgaccggcttgaagacgccttgcgtgcttccgacgaggcccttcaacgggcccgcgccgcaggaacagcggaaacagccgcgaatcccggcgtcgttcgcggcgcggtgcgcaacttagattgggatcgggttagagccggccttacatgggtcggccgtatgatcaggagatgggagtttgcgagcttctgggtcgttgcaggtctcatcatcatcctcattatcgccatcgtgtctgaaggcatgcaatacagcgcttggaggactgcgaacgcacacacccgcgggctatacatggcggttgaagaacaaggttctctgtgcttaacgcagccacgctttgaatacttctggcatttggtatttgtagtactcctcggaagatgggtatcagtatccctatga

SEQ ID NO: 31941 - protein, 1057 aa, Muscodor strobelii
  misc_feature: SGI Peptide ID NO. 571001
MDETLSLVTGQLVEGITACVKDLRKGNHIQFVKGDDVDNTDFTSALAAAIGNNLQPIMQFFNELETKAQAAENRAQDAEETLKEQRRKYGLDGPGPLQRKITELEEELAGLNAQNKGLNKRIDAKTDAFQKDIDVKNEIINDLKISEKAATQAQKRAESDREKTQKDFDRSETSLAEANEELEKVKTGLLEANAKFEEEHKKYLEEKQSAEELLNSSDKYAEEVEHYRGKFEALEAEQQRSDNWRSEKESLVKAAEEQASRITGLVKKNKELQEQLEEANKPSRPTSIATLPTPLSGEGASFDTELQIKKLKEDLEEKTKYIQKLETDATERVEADNEKARQLGELRAQLEQSEEHKKQQKDKADRETADLKEKLSKLATEKENLTKKHTFDIDDQNNRIKALEQKELVGTATIKKLEGQLKARANTTDSVGQTTLTGSDIDRQVNDVASASDALNSERENARGLEGYFTKEKARADDLENRLNQANAENKKLKESQTADSSNLADEQARASELRTELEAAKDQISQLKQSQNEVGDSLKKEKDQLQNELEQANARISQLSKSQTTDSTAFASERARADELERECYQAENSRYQAENEIKQLKLEIEQLKKTQKELETQKEITLRRNRIDDIQKKLDTTETASRNAQVKLDELQKAHNELGTNHHILEETHKTVKDQLEETKTQLQKAEEDLKAKEEDRSGLESQLKQKQEDYDRLKDDAVDQGHDELEKAHDAMEEECVQLDKNYKELQATHADLKSRFDALIEHEKELNKTLQECKDSKDQKVGNDDNNDKPGNPGDDAELKEELQRYRDEHGRLEAEVRRLNALVAVRDIDVTDLQSQILDRDESIRNIRQEVDTTRRSLQRQIDVFEKSQKDMTDRIAEITKNLNARAQDYENRKKQIEAGKREIKRYIDLVEFLRAERDRLEDALRASDEALQRARAAGTAETAANPGVVRGAVRNLDWDRVRAGLTWVGRMIRRWEFASFWVVAGLIIILIIAIVSEGMQYSAWRTANAHTRGLYMAVEEQGSLCLTQPRFEYFWHLVFVVLLGRWVSVSL

SEQ ID NO: 31942 - DNA, 787 bp, Muscodor strobelii
  misc_feature: SGI EST ID NO. CUFF.75559.0
  misc_feature: Variant of the nucleotide sequence at SEQ ID NO 31940
cttgaagacgccttgcgtgcttccgacgaggcccttcaacgggcccgcgccgcaggaacagcggaaacagccgcgaatcccggcgtcgttcgcggcgcggtgcgcaacttagattgggatcgggttagagccggccttacatgggtcggccgtatgatcaggagatgggagtttgcgagcttctgggtcgttgcaggtctcatcatcatcctcattatcgccatcgtgtctgaaggcatgcaatacagcgcttggaggactgcgaacgcacacacccgcgggctatacatggcggttgaagaacaaggttctctgtgcttaacgcagccacgctttgaatacttctggcatttggtatttgtagtactcctcggaagatgggtatcagtatccctatgagttcggcgtcttcgggacgggtgtgcgggctcgggatgtgcagctactaagatatgggtgatttgggttgcatcaggtaggctctgtcacgtcccgtcatgaatatcatcatttgatgtaggaaatttggaggtaagcatgaggagcacgtcacgtcagcttgaggaagtggttgcctattgctgggcaaattgcgagggctcctgtaaaccaaactgcaggcttgcgccactcttcgacatagatcactcgctacagtaaattgcatcttcaaaagacatgatggattggaacgggatggatcgttcacaacgcaggaatcttttgggggctcatcttggcgttgtgacctcagtttgctagtcgtgaagattgtagaatagtgaca

SEQ ID NO: 31943 - DNA, 831 bp, Muscodor strobelii
  misc_feature: SGI cDNA ID NO. 571002
  misc_feature: Encodes the peptide sequence at SEQ ID NO 31944
atgtctgagaaactcatccccaagaaccctggcgcggtccaggtcatccgcaacatcacacccaatgttgtcaccgtttccgtacccttcttgcgatttgagaaggttcgcattggtggacgtgccactattgtcaaactaacatccggctctatcgctgtcttctccccggttgctctgactgatgaggtcaaggctaaggtcaccgagatgggtggcaacgtcggctaccttattgccggtgatttagagcaccatatcttcctgagcacctggaagaaggcgtaccccaccgccaagcttatcggtcctaagggcctccccgagaagcggaagaccatgaacgaccccttgatcggcaaagaggaattcgacttcgtgtacgatgcctcgaaccagcactccaatgccatcagcgacgagtttgctgccgacttcgaagtcgagcttgtcgacgcccacccaaacaaggagctcgtcctcttctacaagcccgagaaggttctcatcgaggctgatctcatgttcaaccttcccgccatcgagcagtactccaaggtgcctgaggccgagaagaagggcggcggcgtcctccagaagatcttcaactccctgaacagcactgccggtcccgccaagggccacaagcgcctcttatggtatgccgtcagcaacggcggaaagaaccgccccggcttcaacgagagtgtcaagcgcatctacggctgggactgggtcacgctcattccttgccacggtgagactatcgagaacaccggcaaggagaccttcgccaagatcttcgactggcacttgaacggaaagaaataa

SEQ ID NO: 31944 - protein, 276 aa, Muscodor strobelii
  misc_feature: SGI Peptide ID NO. 571002
  misc_feature (1)..(276): NCBI GI: 145615948 Blast Desc: MGG_13484 [Magnaporthe grisea 70-15] gi|145009735|gb|EDJ94391.1| MGG_13484 [Magnaporthe grisea 70-15]
  misc_feature (1)..(272): NCBI GI: 85074863 Blast Desc: NCU00659 [Neurospora crassa OR74A] gi|28927612|gb|EAA36563.1| conserved [Neurospora crassa OR74A]
  misc_feature (1)..(276): NCBI GI: 171684465 Blast Desc: protein product [Podospora anserina] gi|170942193|emb|CAP67845.1| protein product [Podospora anserina]
  misc_feature (1)..(276): NCBI GI: 256733992 Blast Desc: NECHADRAFT_58997 [Nectria haematococca mpVI 77-13-4]
  misc_feature (1)..(276): NCBI GI: 46128293 Blast Desc: FG08524.1 [Gibberella zeae PH-1]
  misc_feature (1)..(276): NCBI GI: 156058346 Blast Desc: SS1G_03184 [Sclerotinia sclerotiorum 1980] gi|154700972|gb|EDO00711.1| SS1G_03184 [Sclerotinia sclerotiorum 1980]
  misc_feature (1)..(276): NCBI GI: 154309248 Blast Desc: BC1G_07518 [Botryotinia fuckeliana B05.10] gi|150852342|gb|EDN27534.1| BC1G_07518 [Botryotinia fuckeliana B05.10]
  misc_feature (1)..(276): NCBI GI: 239612053 Blast Desc: conserved [Ajellomyces dermatitidis ER-3]
  misc_feature (1)..(276): NCBI GI: 261202064 Blast Desc: conserved [Ajellomyces dermatitidis SLH14081] gi|239590343|gb|EEQ72924.1| conserved [Ajellomyces dermatitidis SLH14081]
  misc_feature (1)..(276): NCBI GI: 225554537 Blast Desc: conserved [Ajellomyces capsulatus G186AR]
MSEKLIPKNPGAVQVIRNITPNVVTVSVPFLRFEKVRIGGRATIVKLTSGSIAVFSPVALTDEVKAKVTEMGGNVGYLIAGDLEHHIFLSTWKKAYPTAKLIGPKGLPEKRKTMNDPLIGKEEFDFVYDASNQHSNAISDEFAADFEVELVDAHPNKELVLFYKPEKVLIEADLMFNLPAIEQYSKVPEAEKKGGGVLQKIFNSLNSTAGPAKGHKRLLWYAVSNGGKNRPGFNESVKRIYGWDWVTLIPCHGETIENTGKETFAKIFDWHLNGKK

SEQ ID NO: 31945 - DNA, 3600 bp, Muscodor strobelii
  misc_feature: SGI EST ID NO. CUFF.75625.0
  misc_feature: Variant of the nucleotide sequence at SEQ ID NO 31943
ccggtgtcacattagtattgttagtgctctattgccatatgccgcaacgtatgacgctcctcttcgagcattggagtttcggagttatcagttctttgtcgcgatcagaaaagctattcatgttgcactgactattaattgcatgatgtcatgaaacgaactattgcaaactgtctatggcccctacaacgtaaagaaaaccgcgactgtttgctagacaaaagaaggctcgagataggttggactcgagatccgtcaattgttgtcatttgggggtcgtctaatcaaattatatagtccgcgagccttaccgtacaaaggaggcaaggatcgagacgatcgttctttttgtagtcgtggcataactaaacaccaccagcttactaagtttggttgcgtttaggattgttagataatgcacaatgcgacattacaattccagcaggatacggcccaccaacagtaccgacgaatttcagctcacggatcttcccagtggactctcatcatgcagacctcgaaacctgctgagatagcgcgcgaaatacaatatacttgcatacagaatataggtatttcatagcccgtccccttgcaatttgccttgtgttggttagatcaatgcgcagctaagtctatggcgcgcagcatagcattacctacctgcaccaccccatcctgcctaggtcgggcttctggcaagatcccgccgtcagcctcggacgtcgctttgctctgcctttgtgctgcagcattccaaattttgacaaattcaatttcgggtgccatagctcctgttgtcactccgtcagcaccgccgcttattccatcacccttgacagccaaacagaaaacttgaaacagaggttaccttagatagcaaagagaaaaaagtgtgctagggtgctggacccctgacactgagcatgtcaaatctaccgagagtagtgcttccgtcattgcgccctagatatgatgtgtgttgtcgcctcccaatcctttatattcctgagctcccctctcgttgcatcgagtagcttctgtaacctattcccttcgtatcgcaagccaattcgaacgagaacacagttgtgtcattttctccacccctcgcacattcaacgacgtactatcaccatgtctgagaaactcatccccaagaaccctggcgcggtccaggtcatccgcaacatcacacccaatgttgtcaccgtttccgtacccttcttgcgatttgagaaggttcgcattggtggacgtgccactattgtcaaactaacatccggctctatcgctgtcttctccccggttgctctgactgatgaggtcaaggctaaggtcaccgagatgggtggcaacgtcggctaccttattgccggtgatttagagcaccatatcttcctgagcacctggaagaaggcgtaccccaccgccaagcttatcggtcctaagggcctccccgagaagcggaagaccatgaacgaccccttgatcggcaaagaggaattcgacttcgtgtacgatgcctcgaaccagcactccaatgccatcagcgacgagtttgctgccgacttcgaagtcgagcttgtcgacgcccacccaaacaaggagctcgtcctcttctacaagcccgagaaggttctcatcgaggctgatctcatgttcaaccttcccgccatcgagcagtactccaaggtgcctgaggccgagaagaagggcggcggcgtcctccagaagatcttcaactccctgaacagcactgccggtcccgccaagggccacaagcgcctcttatggtatgccgtcagcaacggcggaaagaaccgccccggcttcaacgagagtgtcaagcgcatctacggctgggactgggtcacgctcattccttgccacggtgagactatcgagaacaccggcaaggagaccttcgccaagatcttcgactggcacttgaacggaaagaaataagcggctcgctcattgcgacgctgttgtgacaataccacgacgctgtttggactttcttatcagaatgaatactcgataccccaaaatgataccaggagatgtaatatgaggacatagacggacggatggatgcagggctgaagttgtgatattagccttgagattagttgcacagctgcatgataccaattgatagattttgttctttttatcatccttcgtcgatgttgttaatgttttcatgttgtgagtgatgatttatcaatcttaccgattttaaaaagtgcggtcaatcggagaacgaatgaggttcaaaatgactgcagagggaatacgattacaaatttctactcgtgcatatcatcggtgaggaccttgagggcatcggcatactatccagctctttcgcggacgaccccttagatcaatatactgacaagttgcacttaggataagagtgtctctatgctttaggtctatcgcttttgtctatccccaacactctatacggcattcttccgaaaaatctcatcacaagttcatgaacctcttcgacgctccgtctccctcccgcggtgctcctcactagcgcttctacttcccccggttgtcgaatgtcctccatcccgaaaggagttgttatcactcttgctgccgtatacacatccatttatttccagttcgcggcgagagtggtgggcgtcggaggatagatcgcgtaggtattggtactctcttgccgatttgccttcgttcataacctaatacattgttaggatggggttacgcagggtgaaatatgtccgacggtgtaggagagtgataagaatgcacatacctcgcatagacgacatcgatctccgaagtgatcaactttattccggcaatttgtcaagctctactcagcaaatcagtgccaatgcatattgtgataatgtcgaccgtgcaataatagtaaggcaacctgtttcctaatattctcttcaagcacgagacattgatgtttcttcgtgctggaacgtacggcagttcgcatacttacgtaaaagttggcacaatatgttcgtttggtgccgacgtaggtatacatattatgatgttcttgactatcgacgattcgcgctggagaacaacccgaggtctagctctcttacaagaccaagctaattaacgagaggatagaagcaaaacaaacaagaggcctacaatacggatgcagcacaatatagacgaagatatgaagcgtagctatttgatcaaagctggctgtctgccttgaattatggtaagacttatcactgtggaaacggacaaggaggaatgaggcgcaaagctatttatacaatggaaaggcaatctacacaccttcatataagcaggcagaacctcaaaaccacaaacatctatcttcatatgagcagagatagagttacatccaaattctcataaatcactcaagtccccattcttttctctttcctccgttgccgcgtgtccctttccaccagatcgatcatcgaagatcattcttcgacaatcaggtcggagaatctcgcctcgagttgcgagcatataaagagttcagacgagcccgatatcatgcattagtattagcacgcaacgtagataagc

SEQ ID NO: 31946 - DNA, 876 bp, Muscodor strobelii
  misc_feature: SGI cDNA ID NO. 571003
  misc_feature: Encodes the peptide sequence at SEQ ID NO 31947
atgtcaggcacccaccgcgccgacgaaaaagccttcctagacgaacgcgggtcctccgcctcgctctgccccaacggtctaaacccctccacaatcctcgagaaagcagtgcgcgagcgcatcgtcgagtcctacttctggaaagaacaatgcttcggtctaaacgaagccgacataatcgaccgggtcgtatcgcacgtatccttcatcgggggcgtagtatccgactcgcaaaagccctcccctttcctctgtctcgcttttaaactcctgcagctcgcgccgcctgacgatgtggtgagggagtatctggagtatggaggggagaagttcaagtatttgagggcgctggcgtgtttttatgtcaggttgacgaggaaggcggaggatgtttatgggatcttggaggggtttttgggggataagaggaagctgagaagacgggggagggcaggggtcgcgttgacgtttgtggatgtttttgtggatgaactgcttacgaaggatagggtttgtgctacgagtctgtggaagatgcctgatagggagattttggaggatttggagaagttggaacccagggttagtccgttgggggatattgaggagttgcttgaggatgaggaggaggatgtggatatgaatggagggagtggcaggggcagtgaaagtgaaggggaggtttcggagggtagtacgaggagcgaaaggaggaggaggtcctactctgggagtgggagtgggagcgagagatctagatccagacgacgagatcgtcgagacagtcgagacagtcggaatccgagacggaggagccagtcgtacgatgacatggacgtcgatggccggagaagagacagaagcgacagccgctaa

SEQ ID NO: 31947 - protein, 291 aa, Muscodor strobelii
  misc_feature: SGI Peptide ID NO. 571003
  misc_feature (13)..(191): Pfam Id: PF03371 Pfam Desc: PRP38 family
  misc_feature (2)..(228): NCBI GI: 164428499 Blast Desc: NCU00662 [Neurospora crassa OR74A] gi|157072170|gb|EAA36566.2| conserved [Neurospora crassa OR74A]
  misc_feature (4)..(227): NCBI GI: 156040690 Blast Desc: SS1G_11323 [Sclerotinia sclerotiorum 1980] gi|154695707|gb|EDN95445.1| SS1G_11323 [Sclerotinia sclerotiorum 1980]
  misc_feature (3)..(224): NCBI GI: 154303776 Blast Desc: BC1G_08772 [Botryotinia fuckeliana B05.10] gi|150854356|gb|EDN29548.1| BC1G_08772 [Botryotinia fuckeliana B05.10]
  misc_feature (2)..(199): NCBI GI: 171684461 Blast Desc: protein product [Podospora anserina] gi|170942191|emb|CAP67843.1| protein product [Podospora anserina]
  misc_feature (1)..(199): NCBI GI: 39943112 Blast Desc: MGG_03636 [Magnaporthe grisea 70-15] gi|145009777|gb|EDJ94433.1| MGG_03636 [Magnaporthe grisea 70-15]
  misc_feature (4)..(199): NCBI GI: 256732274 Blast Desc: NECHADRAFT_41250 [Nectria haematococca mpVI 77-13-4]
  misc_feature (2)..(206): NCBI GI: 261353680 Blast Desc: pre-mRNA-splicing factor 38A [Verticillium albo-atrum VaMs.102]
  misc_feature (4)..(230): NCBI GI: 46124067 Blast Desc: FG06411.1 [Gibberella zeae PH-1]
  misc_feature (5)..(225): NCBI GI: 116193425 Blast Desc: CHGG_06430 [Chaetomium globosum CBS 148.51] gi|88182343|gb|EAQ89811.1| CHGG_06430 [Chaetomium globosum CBS 148.51]
  misc_feature (4)..(227): NCBI GI: 258570857 Blast Desc: conserved [Uncinocarpus reesii 1704] gi|237904502|gb|EEP78903.1| conserved [Uncinocarpus reesii 1704]
MSGTHRADEKAFLDERGSSASLCPNGLNPSTILEKAVRERIVESYFWKEQCFGLNEADIIDRVVSHVSFIGGVVSDSQKPSPFLCLAFKLLQLAPPDDVVREYLEYGGEKFKYLRALACFYVRLTRKAEDVYGILEGFLGDKRKLRRRGRAGVALTFVDVFVDELLTKDRVCATSLWKMPDREILEDLEKLEPRVSPLGDIEELLEDEEEDVDMNGGSGRGSESEGEVSEGSTRSERRRRSYSGSGSGSERSRSRRRDRRDSRDSRNPRRRSQSYDDMDVDGRRRDRSDSR

SEQ ID NO: 31948 - DNA, 3030 bp, Muscodor strobelii
  misc_feature: SGI EST ID NO. CUFF.75571.1
  misc_feature: Variant of the nucleotide sequence at SEQ ID NO 31946
ccaagctcaagctcttatcgataacggcaatgcaaccaaaagttacctttcgatgttgacatccattgcgacacttgagcatctctccaagtctgcgttccaaatttctagcctcgctcttgtagcgccatacgcttacgcacaacattgcaagcgaactcggtcatctctacgagatattcgcatctgcatctccatcaaaccccgcgcccgcgcaatccgcgcctcaatccacccaacacaataccaacatcacccacaccaagtactacccatcacaaccgacgaagatgtcaggcacccaccgcgccgacgaaaaagccttcctagacgaacgcgggtcctccgcctcgctctgccccaacggtctaaacccctccacaatcctcgagaaagcagtgcgcgagcgcatcgtcgagtcctacttctggaaagaacaatgcttcggtctaaacgaagccgacataatcgaccgggtcgtatcgcacgtatccttcatcgggggcgtagtatccgactcgcaaaagccctcccctttcctctgtctcgcttttaaactcctgcagctcgcgccgcctgacgatgtggtgagggagtatctggagtatggaggggagaagttcaagtatttgagggcgctggcgtgtttttatgtcaggttgacgaggaaggcggaggatgtttatgggatcttggaggggtttttgggggataagaggaagctgagaagacgggggagggcaggggtcgcgttgacgtttgtggatgtttttgtggatgaactgcttacgaaggatagggtttgtgctacgagtctgtggaagatgcctgatagggagattttggaggatttggagaagttggaacccagggttagtccgttgggggatattgaggagttgcttgaggatgaggaggaggatgtggatatgaatggagggagtggcaggggcagtgaaagtgaaggggaggtttcggagggtagtacgaggagcgaaaggaggaggaggtcctactctgggagtgggagtgggagcgagagatctagatccagacgacgagatcgtcgagacagtcgagacagtcggaatccgagacggaggagccagtcgtacgatgacatggacgtcgatggccggagaagagacagaagcgacagccgctaagtccctatgttgactttggcaactttcaagggtcgtgaaagggcccgcttgacacttccgaatgattgcacgacagaggacagcaaataccaagctcacagcagatacaagaggcaaggggacataggcaataacgttcacgaccgtccttattcctacaagagtacacagctctcgacaatacatctatggaggcgtcattcacctgtacaacaggcatataggcacgtttggaattacatgctgctccaagcgtgtcacgtcgacgcagagagggacagtctttctgccacagcaagaacacgggcatcgtcccagtactgcccaatgagttgcagtccaccaaaattcaggagcttctgctcttcattgctcggatccacaggtatatccataggaatgctgatcgcggggagtccagcaagactcgcaggaacagtgaagacatcgttcatataagagtcaagtggggtctggttgcgcacttcctcaagcaaaggcggcgtagtcggcgccgtgggacagaccaagaaatccacctgagccggcccaagcttcgtctcgagatcgatcgactcgtccatctcgctgagctcgaagtgctgctcatcgaggagaggattctcgagcttgaagatcctgtcgaagtccctccgcacaagctgccggaccttctgtgcctggatgaagtagttgtctatagcctcggaactcagggtatatgaacctagtaatatacgtcgtttgacttcattgccaaatcccgagccgcgtgttcttgcgtagagaacgccgtcttgggcgtcgttgggcccgtctgtatctcgtcggccgtagcgtatgccgtcgtactttgctaagtttgaagcggcttctgcaggtgcaatcacgtagtatgccgataatgcatttttcgtagatgggagagaaacgggcacaatgcgcccgccgaggctcctgattgtttccatggcgactagccagccttgtcgtatccttggatcgagctcagcgatattgtattccattggtagtccgaatgttaggtcttttagagtctcaacgttgtatcccgtactgtaaccctccctctcagctgtacacctcgctcgcacactagggggtagggacgtgggatccctctcgtcatgctcagcatacagcctcgttccaacaatagtatcccgaatcggagccacagtcttagcgagtaacccgacagtgtccagtgagttggcgtatggcaccacgccccaccgcgacaacatgccgtaactcggcttgaaaccaacgactcctgtgtatgcagcaggcatgcgcacagaaccacctgtatccgttcccagcgctatttcagctttcccttcttttactgctaccgcgcttccacctgacgacccgcctgccgagtataattccaagggagacgcgttgtgaatggtctcgtagtgggaggtggtggagtgcgtgcccatgccgaactcatccatgcccgcttctgatacgacttgcatgccgcgggcttggagctgggacacaatagtcgctgtgaaggggatggtggtcccctcgaggatgagcgaggcgcatgttgttggaaggttgggcgtagatatgttgtcttttacggcgaggcggatcggcggtgacgatttattatcgactggttcttggtgcaacgctctagagaatcggagggatggagatagatatgtgtgggcggtggcccgccatcgtgccgttatggctctttggccggctctgagatgggtgtgtctgacatgtgtcgacatgtgacccgatgttgtcttgtcgtggtgtttgggagctacctccttcgcatcctcaggtccctctctttttt

SEQ ID NO: 31949 - DNA, 1536 bp, Muscodor strobelii
  misc_feature: SGI cDNA ID NO. 571004
  misc_feature: Encodes the peptide sequence at SEQ ID NO 31950
atgtcgacacatgtcagacacacccatctcagagccggccaaagagccataacggcacgatggcgggccaccgcccacacatatctatctccatccctccgattctctagagcgttgcaccaagaaccagtcgataataaatcgtcaccgccgatccgcctcgccgtaaaagacaacatatctacgcccaaccttccaacaacatgcgcctcgctcatcctcgaggggaccaccatccccttcacagcgactattgtgtcccagctccaagcccgcggcatgcaagtcgtatcagaagcgggcatggatgagttcggcatgggcacgcactccaccacctcccactacgagaccattcacaacgcgtctcccttggaattatactcggcaggcgggtcgtcaggtggaagcgcggtagcagtaaaagaagggaaagctgaaatagcgctgggaacggatacaggtggttctgtgcgcatgcctgctgcatacacaggagtcgttggtttcaagccgagttacggcatgttgtcgcggtggggcgtggtgccatacgccaactcactggacactgtcgggttactcgctaagactgtggctccgattcgggatactattgttggaacgaggctgtatgctgagcatgacgagagggatcccacgtccctaccccctagtgtgcgagcgaggtgtacagctgagagggagggttacagtacgggatacaacgttgagactctaaaagacctaacattcggactaccaatggaatacaatatcgctgagctcgatccaaggatacgacaaggctggctagtcgccatggaaacaatcaggagcctcggcgggcgcattgtgcccgtttctctcccatctacgaaaaatgcattatcggcatactacgtgattgcacctgcagaagccgcttcaaacttagcaaagtacgacggcatacgctacggccgacgagatacagacgggcccaacgacgcccaagacggcgttctctacgcaagaacacgcggctcgggatttggcaatgaagtcaaacgacgtatattactaggttcatataccctgagttccgaggctatagacaactacttcatccaggcacagaaggtccggcagcttgtgcggagggacttcgacaggatcttcaagctcgagaatcctctcctcgatgagcagcacttcgagctcagcgagatggacgagtcgatcgatctcgagacgaagcttgggccggctcaggtggatttcttggtctgtcccacggcgccgactacgccgcctttgcttgaggaagtgcgcaaccagaccccacttgactcttatatgaacgatgtcttcactgttcctgcgagtcttgctggactccccgcgatcagcattcctatggatatacctgtggatccgagcaatgaagagcagaagctcctgaattttggtggactgcaactcattgggcagtactgggacgatgcccgtgttcttgctgtggcagaaagactgtccctctctgcgtcgacgtga

SEQ ID NO: 31950 - protein, 511 aa, Muscodor strobelii
  misc_feature: SGI Peptide ID NO. 571004
  misc_feature (4)..(499): Pfam Id: PF01425 Pfam Desc: Amidase
  misc_feature (52)..(499): Pfam Id: PF01425 Pfam Desc: Amidase
  misc_feature (54)..(511): NCBI GI: 171684463 Blast Desc: protein product [Podospora anserina] gi|170942192|emb|CAP67844.1| protein product [Podospora anserina]
  misc_feature (39)..(506): NCBI GI: 116193423 Blast Desc: CHGG_06429 [Chaetomium globosum CBS 148.51] gi|88182342|gb|EAQ89810.1| CHGG_06429 [Chaetomium globosum CBS 148.51]
  misc_feature (6)..(505): NCBI GI: 256731887 Blast Desc: [Nectria haematococca mpVI 77-13-4]
  misc_feature (43)..(507): NCBI GI: 46124065 Blast Desc: FG06410.1 [Gibberella zeae PH-1]
  misc_feature (40)..(506): NCBI GI: 85074865 Blast Desc: NCU00660 [Neurospora crassa OR74A] gi|28927613|gb|EAA36564.1| NCU00660 [Neurospora crassa OR74A]
  misc_feature (46)..(505): NCBI GI: 145615946 Blast Desc: MGG_13483 [Magnaporthe grisea 70-15] gi|145009734|gb|EDJ94390.1| MGG_13483 [Magnaporthe grisea 70-15]
  misc_feature (16)..(507): NCBI GI: 154303802 Blast Desc: BC1G_08785 [Botryotinia fuckeliana B05.10] gi|150854369|gb|EDN29561.1| BC1G_08785 [Botryotinia fuckeliana B05.10]
  misc_feature (54)..(505): NCBI GI: 240110094 Blast Desc: Amidase family protein [Coccidioides posadasii C735 delta SOWgp]
  misc_feature (34)..(505): NCBI GI: 225555144 Blast Desc: glutamyl-tRNA amidotransferase subunit A [Ajellomyces capsulatus G186AR]
  misc_feature (41)..(505): NCBI GI: 240281359 Blast Desc: glutamyl-tRNA(Gln) amidotransferase subunit A [Ajellomyces capsulatus H143]
  misc_feature (54)..(461): SWISSPROT Homolog: EC 3.5.1.4 Amidase
MSTHVRHTHLRAGQRAITARWRATAHTYLSPSLRFSRALHQEPVDNKSSPPIRLAVKDNISTPNLPTTCASLILEGTTIPFTATIVSQLQARGMQVVSEAGMDEFGMGTHSTTSHYETIHNASPLELYSAGGSSGGSAVAVKEGKAEIALGTDTGGSVRMPAAYTGVVGFKPSYGMLSRWGVVPYANSLDTVGLLAKTVAPIRDTIVGTRLYAEHDERDPTSLPPSVRARCTAEREGYSTGYNVETLKDLTFGLPMEYNIAELDPRIRQGWLVAMETIRSLGGRIVPVSLPSTKNALSAYYVIAPAEAASNLAKYDGIRYGRRDTDGPNDAQDGVLYARTRGSGFGNEVKRRILLGSYTLSSEAIDNYFIQAQKVRQLVRRDFDRIFKLENPLLDEQHFELSEMDESIDLETKLGPAQVDFLVCPTAPTTPPLLEEVRNQTPLDSYMNDVFTVPASLAGLPAISIPMDIPVDPSNEEQKLLNFGGLQLIGQYWDDARVLAVAERLSLSAST

SEQ ID NO: 31951 - DNA, 3087 bp, Muscodor strobelii
  misc_feature: SGI EST ID NO. CUFF.75571.0
  misc_feature: Variant of the nucleotide sequence at SEQ ID NO 31949
aaaaaagagagggacctgaggatgcgaaggaggtagctcccaaacaccacgacaagacaacatcgggtcacatgtcgacacatgtcagacacacccatctcagagccggccaaagagccataacggcacgatggcgggccaccgcccacacatatctatctccatccctccgattctctagagcgttgcaccaagaaccagtcgataataaatcgtcaccgccgatccgcctcgccgtaaaagacaacatatctacgcccaaccttccaacaacatgcgcctcgctcatcctcgaggggaccaccatccccttcacagcgactattgtgtcccagctccaagcccgcggcatgcaagtcgtatcagaagcgggcatggatgagttcggcatgggcacgcactccaccacctcccactacgagaccattcacaacgcgtctcccttggaattatactcggcaggcgggtcgtcaggtggaagcgcggtagcagtaaaagaagggaaagctgaaatagcgctgggaacggatacaggtggttctgtgcgcatgcctgctgcatacacaggagtcgttggtttcaagccgagttacggcatgttgtcgcggtggggcgtggtgccatacgccaactcactggacactgtcgggttactcgctaagactgtggctccgattcgggatactattgttggaacgaggctgtatgctgagcatgacgagagggatcccacgtccctaccccctagtgtgcgagcgaggtgtacagctgagagggagggttacagtacgggatacaacgttgagactctaaaagacctaacattcggactaccaatggaatacaatatcgctgagctcgatccaaggatacgacaaggctggctagtcgccatggaaacaatcaggagcctcggcgggcgcattgtgcccgtttctctcccatctacgaaaaatgcattatcggcatactacgtgattgcacctgcagaagccgcttcaaacttagcaaagtacgacggcatacgctacggccgacgagatacagacgggcccaacgacgcccaagacggcgttctctacgcaagaacacgcggctcgggatttggcaatgaagtcaaacgacgtatattactaggttcatataccctgagttccgaggctatagacaactacttcatccaggcacagaaggtccggcagcttgtgcggagggacttcgacaggatcttcaagctcgagaatcctctcctcgatgagcagcacttcgagctcagcgagatggacgagtcgatcgatctcgagacgaagcttgggccggctcaggtggatttcttggtctgtcccacggcgccgactacgccgcctttgcttgaggaagtgcgcaaccagaccccacttgactcttatatgaacgatgtcttcactgttcctgcgagtcttgctggactccccgcgatcagcattcctatggatatacctgtggatccgagcaatgaagagcagaagctcctgaattttggtggactgcaactcattgggcagtactgggacgatgcccgtgttcttgctgtggcagaaagactgtccctctctgcgtcgacgtgacacgcttggagcagcatgtaattccaaacgtgcctatatgcctgttgtacaggtgaatgacgcctccatagatgtattgtcgagagctgtgtactcttgtaggaataaggacggtcgtgaacgttctgttgtatattagtatataccccaattatttagaagaattacttcgctgtacttacattgcctatgtccccttgcctcttgtatctgctgtgagcttggtatttgctgtcctctgtcgtgcaatcattcggaagtgtcaagcgggccctttcacgacccttgaaagttgccaaagtcaacatagggacttagcggctgtcgcttctgtctcttctccggccatcgacgtccatgtcatcgtacgactggctcctccgtctcggattccgactgtctcgactgtctcgacgatctcgtcgtctggatctagatctctcgctcccactcccactcccagagtaggacctcctcctcctttcgctcctcgtactaccctccgaaacctccccttcactttcactgcccctgccactccctccattcatatccacatcctcctcctcatcctcaagcaactcctcaatatcccccaacggactaaccctgggttccaacttctccaaatcctccaaaatctccctatcaggcatcttccacagactcgtagcacaaaccctatccttcgtaagcagttcatccacaaaaacatccacaaacgtcaacgcgacccctgccctcccccgtcttctcagcttcctcttatcccccaaaaacccctccaagatcccataaacatcctccgccttcctcgtcaacctgacataaaaacacgccagcgccctcaaatacttgaacttctcccctccatactccagatactccctcaccacatcgtcaggcggcgcgagctgcaggagtttaaaagcgagacagaggaaaggggagggcttttgcgagtcggatactacgcccccgatgaaggatacgtgcgatacgacccggtcgattatgtcggcttcgtttagaccgaagcattgttctttccagaagtaggactcgacgatgcgctcgcgcactgctttctcgaggattgtggaggggtttagaccgttggggcagagcgaggcggaggacccgcgttcgtctaggaaggctttttcgtcggcgcggtgggtgcctgacatcttcgtcggttgtgatgggtagtacttggtgtgggtgatgttggtattgtgttgggtggattgaggcgcggattgcgcgggcgcggggtttgatggagatgcagatgcgaatatctcgtagagatgaccgagttcgcttgcaatgttgtgcgtaagcgtatggcgctacaagagcgaggctagaaatttggaacgcagacttggagagatgctcaagtgtcgcaatggatgtcaacatcgaaaggtaacttttggttgcattgccgttatcgataagagcttgagcttgg

SEQ ID NO: 31952 - DNA, 1890 bp, Muscodor strobelii
  misc_feature: SGI cDNA ID NO. 571005
  misc_feature: Encodes the peptide sequence at SEQ ID NO 31953
atggtccgtagagctgctgtcgtcgcagcctctttggtgacggctgcccatgcagctcaacctggagctcctcggcctgttgctgctcccatgagagatctcgaatggggccagatcaacttcatacatactacagatacccacggctggctcggtggccatttacaagaagcacaatactccgccgactggggcgactatgtatccttcacccaccacatgcgcaagaaagcagatgaaaaaggcgtcgacctcctcgtaatagacaccggcgaccgcatcgagggcaacgggctctacgacggatcagatcccaagggcaaatacatataccctgtcttcagccagcaaaacatagatatcctgacgacaggcaaccacgagctgtaccacgcagagagcgttgattgggaacacaacacgacggtcccgaactttaagaaacaatacatagcctccaaccttgactacatagaacccgagacgggtaaccaaatcccccaagcccaacgatacatcaagttcaagaccaagaatctaaactacaccgtcgtcgcattcggtttcttattcgacttcgatagaaatgcgaacaatagcgtcgtgcagaatgtcgaggacacgataaaagaagattggttccagaaggcaatcaaagagaagcctgatttatttgtcgtcaccggccatgtcgggttacggatgaaggagtatgagcaggtctttaaggcgatcagggacatgaactggtataccccgattgcctttctaggcggtcacgcgcatgttcgcgacgcgaggaaattcgacgacaaggcatttgctctcgccagtgggcggtattttgagacgatcgggtggatgagtatcgatggaatcaaaaagaagagcaaggacgacgaggagcttgttgttgagaacggacttgagatcttcgatgaggtgtctgcgcaagctagcattactttcaagcgccggtacatcgacaataatctcctcggtttgcaataccacacaggcctcaacgagtctgagttccacactgcacatggtcgaaatgttagcagcatgatcagcgaaggacggaaagcgctaggtctcgacaagaagattggatgctcgccaaaggatttctggatgtcgagggcagagtacccgagcgaagacagtatattcacatggctcgaggagaaagtcatccccgactcaatccacaacgacgatcgggcagataaaccaagacttaccatcgtcaatacgggagcagtccgcttcgacgtgttcaagggcgcatttacacacgactcgacgtatttgatttcgccattcacgagcgtattcaactacatccccgacgtaccatacgacgtcgcgaaacaagtcctccagctcttgaacagcggcagtcaggttctgaaatcgagcctagatagcaaagcccctgaaatcgggtccggtgtcgacgaagaactcgttgctgaacaaccaagagagacattaacactttcccaccctgagttttactccgatactcagcacccacttctcggcgacaacagcaaagacgagccaaagataataaatggatacacgacgaaagacgatctcggcacagacggtgatgatgcagttcactcgccgatcaagttttacgaggtgccgaattgtattcagtctaagattgcgtttcctaagacggaggatgggggggagggggagccggagacggtggatttgacgtttttggattatgtacagccttatgtcttgctggcgctgaagtatgtcggcggtgattataagagtgaggatgtgggtgtttatttggataagacgcttacggatgttattgctgagtgggttgggcagaattgggatggggattgttag

SEQ ID NO: 31953 - protein, 629 aa, Muscodor strobelii
  misc_feature: SGI Peptide ID NO. 571005
  misc_feature (39)..(264): Pfam Id: PF00149 Pfam Desc: Calcineurin-like phosphoesterase
  misc_feature (2)..(629): NCBI GI: 85074875 Blast Desc: NCU00665 [Neurospora crassa OR74A] gi|28927618|gb|EAA36569.1| conserved [Neurospora crassa OR74A]
  misc_feature (20)..(629): NCBI GI: 256732301 Blast Desc: NECHADRAFT_93853 [Nectria haematococca mpVI 77-13-4]
  misc_feature (6)..(629): NCBI GI: 39970705 Blast Desc: MGG_02819 [Magnaporthe grisea 70-15] gi|149210193|ref|XP_001522471.1| MGCH7_ch7g574 [Magnaporthe grisea 70-15] gi|86196529|gb|EAQ71167.1| MGCH7_ch7g574 grisea
  misc_feature (7)..(629): NCBI GI: 261353684 Blast Desc: ser/Thr protein phosphatase family [Verticillium albo-atrum VaMs.102]
  misc_feature (34)..(629): NCBI GI: 154303800 Blast Desc: BC1G_08784 [Botryotinia fuckeliana B05.10] gi|150854368|gb|EDN29560.1| BC1G_08784 [Botryotinia fuckeliana B05.10]
  misc_feature (1)..(625): NCBI GI: 46105262 Blast Desc: FG00259.1 [Gibberella zeae PH-1]
  misc_feature (5)..(629): NCBI GI: 171680101 Blast Desc: protein product [Podospora anserina] gi|170939677|emb|CAP64903.1| protein product [Podospora anserina]
  misc_feature (34)..(629): NCBI GI: 156040708 Blast Desc: SS1G_11332 [Sclerotinia sclerotiorum 1980] gi|154695716|gb|EDN95454.1| SS1G_11332 [Sclerotinia sclerotiorum 1980]
  misc_feature (11)..(625): NCBI GI: 238499017 Blast Desc: Ser/Thr protein phosphatase family [Aspergillus flavus NRRL3357] gi|220692496|gb|EED48842.1| Ser/Thr protein phosphatase family [Aspergillus flavus NRRL3357]
  misc_feature (11)..(625): NCBI GI: 169778588 Blast Desc: [Aspergillus oryzae RIB40] gi|83772497|dbj|BAE62626.1| protein product [Aspergillus oryzae]
MVRRAAVVAASLVTAAHAAQPGAPRPVAAPMRDLEWGQINFIHTTDTHGWLGGHLQEAQYSADWGDYVSFTHHMRKKADEKGVDLLVIDTGDRIEGNGLYDGSDPKGKYIYPVFSQQNIDILTTGNHELYHAESVDWEHNTTVPNFKKQYIASNLDYIEPETGNQIPQAQRYIKFKTKNLNYTVVAFGFLFDFDRNANNSVVQNVEDTIKEDWFQKAIKEKPDLFVVTGHVGLRMKEYEQVFKAIRDMNWYTPIAFLGGHAHVRDARKFDDKAFALASGRYFETIGWMSIDGIKKKSKDDEELVVENGLEIFDEVSAQASITFKRRYIDNNLLGLQYHTGLNESEFHTAHGRNVSSMISEGRKALGLDKKIGCSPKDFWMSRAEYPSEDSIFTWLEEKVIPDSIHNDDRADKPRLTIVNTGAVRFDVFKGAFTHDSTYLISPFTSVFNYIPDVPYDVAKQVLQLLNSGSQVLKSSLDSKAPEIGSGVDEELVAEQPRETLTLSHPEFYSDTQHPLLGDNSKDEPKIINGYTTKDDLGTDGDDAVHSPIKFYEVPNCIQSKIAFPKTEDGGEGEPETVDLTFLDYVQPYVLLALKYVGGDYKSEDVGVYLDKTLTDVIAEWVGQNWDGDC

SEQ ID NO: 31954 - DNA, 3713 bp, Muscodor strobelii
  misc_feature: SGI EST ID NO. CUFF.75621.0
  misc_feature: Variant of the nucleotide sequence at SEQ ID NO 31952
gccgggtggtgggcgcatgcgctatgcaggtgctggacccctgcaacgtcacgctggcacaagtcacaaagagcaccttgggggcactgttgatgctgctgacctgagatgcacgtcaccgacaacacatccgccatcggtgcctgaaatctgttcatctaccgtatctcagtagcaaaataaatctagatctgtcatctcatccctcatcttctgcccctatggtaccgactacctttgcttgtgttttgacttcgggaccaactatactgcactatggtccgtagagctgctgtcgtcgcagcctctttggtgacggctgcccatgcagctcaacctggagctcctcggcctgttgctgctcccatgagagatctcgaatggggccagatcaacttcatacatactacagatacccacggctggctcggtggccatttacaagaagcacaatactccgccgactggggcgactatgtatccttcacccaccacatgcgcaagaaagcagatgaaaaaggcgtcgacctcctcgtaatagacaccggcgaccgcatcgagggcaacgggctctacgacggatcagatcccaagggcaaatacatataccctgtcttcagccagcaaaacatagatatcctgacgacaggcaaccacgagctgtaccacgcagagagcgttgattgggaacacaacacgacggtcccgaactttaagaaacaatacatagcctccaaccttgactacatagaacccgagacgggtaaccaaatcccccaagcccaacgatacatcaagttcaagaccaagaatctaaactacaccgtcgtcgcattcggtttcttattcgacttcgatagaaatgcgaacaatagcgtcgtgcagaatgtcgaggacacgataaaagaagattggttccagaaggcaatcaaagagaagcctgatttatttgtcgtcaccggccatgtcgggttacggatgaaggagtatgagcaggtctttaaggcgatcagggacatgaactggtataccccgattgcctttctaggcggtcacgcgcatgttcgcgacgcgaggaaattcgacgacaaggcatttgctctcgccagtgggcggtattttgagacgatcgggtggatgagtatcgatggaatcaaaaagaagagcaaggacgacgaggagcttgttgttgagaacggacttgagatcttcgatgaggtgtctgcgcaagctagcattactttcaagcgccggtacatcgacaataatctcctcggtttgcaataccacacaggcctcaacgagtctgagttccacactgcacatggtcgaaatgttagcagcatgatcagcgaaggacggaaagcgctaggtctcgacaagaagattggatgctcgccaaaggatttctggatgtcgagggcagagtacccgagcgaagacagtatattcacatggctcgaggagaaagtcatccccgactcaatccacaacgacgatcgggcagataaaccaagacttaccatcgtcaatacgggagcagtccgcttcgacgtgttcaagggcgcatttacacacgactcgacgtatttgatttcgccattcacgagcgtattcaactacatccccgacgtaccatacgacgtcgcgaaacaagtcctccagctcttgaacagcggcagtcaggttctgaaatcgagcctagatagcaaagcccctgaaatcgggtccggtgtcgacgaagaactcgttgctgaacaaccaagagagacattaacactttcccaccctgagttttactccgatactcagcacccacttctcggcgacaacagcaaagacgagccaaagataataaatggatacacgacgaaagacgatctcggcacagacggtgatgatgcagttcactcgccgatcaagttttacgaggtgccgaattgtattcagtctaagattgcgtttcctaagacggaggatgggggggagggggagccggagacggtggatttgacgtttttggattatgtacagccttatgtcttgctggcgctgaagtatgtcggcggtgattataagagtgaggatgtgggtgtttatttggataagacgcttacggatgttattgctgagtgggttgggcagaattgggatggggattgttagacattttgcgaaatggattgggtaaatagagctgaaggataatgtgatatcattagagaacaagcactaaggacatatgggatatatagtatatatacactctggagtttgaggttgggtgtgaattcatatattcatagatgacactactactgatcgagtgtctgggtgatgaactctctctcatcgactgtgagtcctagtacgaaggctaatagactggcctctctcgtctgtcggctctcctctgatatgtatagaagcagtgtctccgtgactgctcgatataaaatgaccttctttctcggtctatcttgccaagtactactctcgggagtgctcgtgttatattatgagcagcttgtttcgagtctgttgcgtaggatgctttctttctccatttaggacttccagctttcgtgtctcgtcccgcccgctgcttgatacggggggctaatttatctcacgatatgtgagccgttcatactgttctctctcacggatcagattttctgacgcttctcgtttcctcgcgctgtgtcgtggataggttcgttggcgagtgccacgaagccctgagtttcgtgaatattgcaatgctgtgtatggacgaatgccagcctgaaggctgacgaaagtgaccaataccccatcacctgatcatctactgaatctgatcaagcaacttccgtctccgtctctccataagctcctcctgaacctcttcaagcgtcggtaactcccatccccgtccatccccggcatcaccaggcaatggttcccaatccgcaggtggtttcgtgcccttaccagcctgcttcatcatcatatcgaaagcctctttctctttcgccttctcatactgcagtaatttctcatcttcctcatcaggcgcatacccataatacttcgcatcgacattcctccttaaatcatcccgtttatcgagcggcttctcggcgtccgctctactctgcttcgcggcatcgaacaactccttgacgcctggtaactcctttgcgcggccgaaatacctgtacccctttccaccaccggggatttccttccctgtctcgtcatacacttttccggcaccgcgcatgtaatttggaccgccgagattccggatttgcacttcccacatgtgtttttcccgcatgagcttgttgatctcgtcgttgaggtcgcggatttggtagtcggagagggccgggtcttggatcttggatactttgcgggagacttctttgagtacttggcctcgccatttttcgcacgattgcacttcttggacgtcaaggatggaacgggggcgtcgcgtgcggcccgcgtcgaggatgcctaggtcggcggcttgtgcttcccggaagcggaagagcattgattgggctttttctgagtttcgcgcctgggagctgttagttaagggctcaggtggggagggagcgcggcgaaagttaccatcttgattgattcgctctggggactgtcggaatgactggttgagagtgtgaaaatgaggcaatgctcgtagacgttgagctggc

SEQ ID NO: 31955 - DNA, 747 bp, Muscodor strobelii
  misc_feature: SGI cDNA ID NO. 571006
  misc_feature: Reduced expression when VOC is produced
  misc_feature: Encodes the peptide sequence at SEQ ID NO 31956
atggcgcgaaactcagaaaaagcccaatcaatgctcttccgcttccgggaagcacaagccgccgacctaggcatcctcgacgcgggccgcacgcgacgcccccgttccatccttgacgtccaagaagtgcaatcgtgcgaaaaatggcgaggccaagtactcaaagaagtctcccgcaaagtatccaagatccaagacccggccctctccgactaccaaatccgcgacctcaacgacgagatcaacaagctcatgcgggaaaaacacatgtgggaagtgcaaatccggaatctcggcggtccaaattacatgcgcggtgccggaaaagtgtatgacgagacagggaaggaaatccccggtggtggaaaggggtacaggtatttcggccgcgcaaaggagttaccaggcgtcaaggagttgttcgatgccgcgaagcagagtagagcggacgccgagaagccgctcgataaacgggatgatttaaggaggaatgtcgatgcgaagtattatgggtatgcgcctgatgaggaagatgagaaattactgcagtatgagaaggcgaaagagaaagaggctttcgatatgatgatgaagcaggctggtaagggcacgaaaccacctgcggattgggaaccattgcctggtgatgccggggatggacggggatgggagttaccgacgcttgaagaggttcaggaggagcttatggagagacggagacggaagttgcttgatcagattcagtag

SEQ ID NO: 31956 - protein, 248 aa, Muscodor strobelii
  misc_feature: SGI Peptide ID NO. 571006
  misc_feature (1)..(248): Pfam Id: PF06246 Pfam Desc: Isy1-like splicing family
  misc_feature (1)..(192): Pfam Id: PF06246 Pfam Desc: Isy1-like splicing family
  misc_feature (1)..(247): NCBI GI: 46105120 Blast Desc: FG00188.1 [Gibberella zeae PH-1]
  misc_feature (1)..(247): NCBI GI: 74646570 Blast Desc: FG00188.1 [Gibberella zeae PH-1]
  misc_feature (1)..(236): NCBI GI: 85074873 Blast Desc: pre-mRNA splicing factor ISY1 [Neurospora crassa OR74A] gi|74619038|sp|Q7SHY8.1|ISY1_NEUCR RecName: Full=Pre-mRNA-splicing factor isy-1 gi|28927617|gb|EAA36568.1|
  misc_feature (1)..(248): NCBI GI: 256731956 Blast Desc: NECHADRAFT_80870 [Nectria haematococca mpVI 77-13-4]
  misc_feature (2)..(248): NCBI GI: 171680103 Blast Desc: protein product [Podospora anserina] gi|170939678|emb|CAP64904.1| protein product [Podospora anserina]
  misc_feature (1)..(247): NCBI GI: 261353641 Blast Desc: pre-mRNA-splicing factor ISY1 [Verticillium albo-atrum VaMs.102]
  misc_feature (11)..(247): NCBI GI: 145609984 Blast Desc: MGG_02820 [Magnaporthe grisea 70-15] gi|145017366|gb|EDK01729.1| MGG_02820 [Magnaporthe grisea 70-15]
  misc_feature (1)..(236): NCBI GI: 156059080 Blast Desc: SS1G_03552 [Sclerotinia sclerotiorum 1980] gi|154701339|gb|EDO01078.1| SS1G_03552 [Sclerotinia sclerotiorum 1980]
  misc_feature (1)..(236): NCBI GI: 154315350 Blast Desc: BC1G_04714 [Botryotinia fuckeliana B05.10] gi|150847677|gb|EDN22870.1| BC1G_04714 [Botryotinia fuckeliana B05.10]
  misc_feature (2)..(236): NCBI GI: 154285720 Blast Desc: HCAG_00701 [Ajellomyces capsulatus NAm1] gi|150407296|gb|EDN02837.1| HCAG_00701 [Ajellomyces capsulatus NAm1]
  misc_feature: Useful for introducing or modulating the production of volatile compounds
MARNSEKAQSMLFRFREAQAADLGILDAGRTRRPRSILDVQEVQSCEKWRGQVLKEVSRKVSKIQDPALSDYQIRDLNDEINKLMREKHMWEVQIRNLGGPNYMRGAGKVYDETGKEIPGGGKGYRYFGRAKELPGVKELFDAAKQSRADAEKPLDKRDDLRRNVDAKYYGYAPDEEDEKLLQYEKAKEKEAFDMMMKQAGKGTKPPADWEPLPGDAGDGRGWELPTLEEVQEELMERRRRKLLDQIQ

SEQ ID NO: 31957 - DNA, 3742 bp, Muscodor strobelii
  misc_feature: SGI EST ID NO. CUFF.75622.1
  misc_feature: Variant of the nucleotide sequence at SEQ ID NO 31955
cgtcgaccagcccgccagctcaacgtctacgagcattgcctcattttcacactctcaaccagtcattccgacagtccccagagcgaatcaatcaagatggcgcgaaactcagaaaaagcccaatcaatgctcttccgcttccgggaagcacaagccgccgacctaggcatcctcgacgcgggccgcacgcgacgcccccgttccatccttgacgtccaagaagtgcaatcgtgcgaaaaatggcgaggccaagtactcaaagaagtctcccgcaaagtatccaagatccaagacccggccctctccgactaccaaatccgcgacctcaacgacgagatcaacaagctcatgcgggaaaaacacatgtgggaagtgcaaatccggaatctcggcggtccaaattacatgcgcggtgccggaaaagtgtatgacgagacagggaaggaaatccccggtggtggaaaggggtacaggtatttcggccgcgcaaaggagttaccaggcgtcaaggagttgttcgatgccgcgaagcagagtagagcggacgccgagaagccgctcgataaacgggatgatttaaggaggaatgtcgatgcgaagtattatgggtatgcgcctgatgaggaagatgagaaattactgcagtatgagaaggcgaaagagaaagaggctttcgatatgatgatgaagcaggctggtaagggcacgaaaccacctgcggattgggaaccattgcctggtgatgccggggatggacggggatgggagttaccgacgcttgaagaggttcaggaggagcttatggagagacggagacggaagttgcttgatcagattcagtagatgatcaggtgatggggtattggtcactttcgtcagccttcaggctggcattcgtccatacacagcattgcaatattcacgaaactcagggcttcgtggcactcgccaacgaacctatccacgacacagcgcgaggaaacgagaagcgtcagaaaatctgatccgtgagagagaacagtatgaacggctcacatatcgtgagataaattagccccccgtatcaagcagcgggcgggacgagacacgaaagctggaagtcctaaatggagaaagaaagcatcctacgcaacagactcgaaacaagctgctcataatataacacgagcactcccgagagtagtacttggcaagatagaccgagaaagaaggtcattttatatcgagcagtcacggagacactgcttctatacatatcagaggagagccgacagacgagagaggccagtctattagccttcgtactaggactcacagtcgatgagagagagttcatcacccagacactcgatcagtagtagtgtcatctatgaatatatgaattcacacccaacctcaaactccagagtgtatatatactatatatcccatatgtccttagtgcttgttctctaatgatatcacattatccttcagctctatttacccaatccatttcgcaaaatgtctaacaatccccatcccaattctgcccaacccactcagcaataacatccgtaagcgtcttatccaaataaacacccacatcctcactcttataatcaccgccgacatacttcagcgccagcaagacataaggctgtacataatccaaaaacgtcaaatccaccgtctccggctccccctcccccccatcctccgtcttaggaaacgcaatcttagactgaatacaattcggcacctcgtaaaacttgatcggcgagtgaactgcatcatcaccgtctgtgccgagatcgtctttcgtcgtgtatccatttattatctttggctcgtctttgctgttgtcgccgagaagtgggtgctgagtatcggagtaaaactcagggtgggaaagtgttaatgtctctcttggttgttcagcaacgagttcttcgtcgacaccggacccgatttcaggggctttgctatctaggctcgatttcagaacctgactgccgctgttcaagagctggaggacttgtttcgcgacgtcgtatggtacgtcggggatgtagttgaatacgctcgtgaatggcgaaatcaaatacgtcgagtcgtgtgtaaatgcgcccttgaacacgtcgaagcggactgctcccgtattgacgatggtaagtcttggtttatctgcccgatcgtcgttgtggattgagtcggggatgactttctcctcgagccatgtgaatatactgtcttcgctcgggtactctgccctcgacatccagaaatcctttggcgagcatccaatcttcttgtcgagacctagcgctttccgtccttcgctgatcatgctgctaacatttcgaccatgtgcagtgtggaactcagactcgttgaggcctgtgtggtattgcaaaccgaggagattattgtcgatgtaccggcgcttgaaagtaatgctagcttgcgcagacacctcatcgaagatctcaagtccgttctcaacaacaagctcctcgtcgtccttgctcttctttttgattccatcgatactcatccacccgatcgtctcaaaataccgcccactggcgagagcaaatgccttgtcgtcgaatttcctcgcgtcgcgaacatgcgcgtgaccgcctagaaaggcaatcggggtataccagttcatgtccctgatcgccttaaagacctgctcatactccttcatccgtaacccgacatggccggtgacgacaaataaatcaggcttctctttgattgccttctggaaccaatcttcttttatcgtgtcctcgacattctgcacgacgctattgttcgcatttctatcgaagtcgaataagaaaccgaatgcgacgacggtgtagtttagattcttggtcttgaacttgatgtatcgttgggcttgggggatttggttacccgtctcgggttctatgtagtcaaggttggaggctatgtattgtttcttaaagttcgggaccgtcgtgttgtgttcccaatcaacgctctctgcgtggtacagctcgtggttgcctgtcgtcaggatatctatgttttgctggctgaagacagggtatatgtatttgcccttgggatctgatccgtcgtagagcccgttgccctcgatgcggtcgccggtgtctattacgaggaggtcgacgcctttttcatctgctttcttgcgcatgtggtgggtgaaggatacatagtcgccccagtcggcggagtattgtgctctgtagatggcggatggattagcaaaatgaaatatcggatgatatcattagagtattggcttgacatactcttgtaaatggccaccgagccagccgtgggtatctgtagtatgtatgaagttgatctggccccattcgagatctctcatgggagcagcaacaggccgaggagctccaggttgagctgcatgggcagccgtcaccaaagaggctgcgacgacagcagctctacggaccatagtgcagtatagttggtcccgaagtcaaaacacaagcaaaggtagtcggtaccataggggcagaagatgagggatgagatgacagatctagatttattttgctactgagatacggtagatgaacagatttcaggcaccgatggcggatgtgttgtcggtgacgtgcatctcaggtcagcagcatcaacagtgcccccaaggtgctctttgtgacttgtgccagcgtgacgttgcaggggtccagcacctgcatagcgcatgcgcccaccacccggc

SEQ ID NO: 31958 - DNA, 798 bp, Muscodor strobelii
  misc_feature: SGI cDNA ID NO. 571007
  misc_feature: Encodes the peptide sequence at SEQ ID NO 31959
atgctgccacccgtagccgaagaaccgaacgcctcctggacagcaaccgacctggaaacgcagacagcttggaaagaacaaaacactgaatgggatctatcacgtaaaggctggtactacgaggaacgcagaaaatggcataaatcaccatgggggacaccgatcacagtgcgttactcgtttgaaggattcgccaaagccttcgccgccggagatttccaccaggccaggctgactgctatactaatgatagcagccctccccgtccaactcaccacagataccgtagccggccccattgagcccagcatagagcacgtgtgggtcccatccagctcaaccttagagtacggaaaacaacataatatcaatttccaggaccgcatcgaattgacgaggcccccacaattcaaacgacccgcgatctcacagccctacttcgacccattcagcgctacgccaacggctcggatctcccctacccaaatcggccaactagacgttctcgacaagatcatcgactacgtaagacgacacggtggcattgtctccgggccctggttctacgccatcgcgaaatcggccgcgtctatacgacaggagcgagagcagattatcagagatcacccaaacgatcacttgggtcgagcgatagctaagtgggagttcacatttccggattacgatcctcagaatatgaggtggatgagcttcaatcctgttacaggacagcctgtgtacgtccaggagttctcaccaccacttcgggatccaaatttgatctggagtattgggtag

SEQ ID NO: 31959 - protein, 265 aa, Muscodor strobelii
  misc_feature: SGI Peptide ID NO. 571007
MLPPVAEEPNASWTATDLETQTAWKEQNTEWDLSRKGWYYEERRKWHKSPWGTPITVRYSFEGFAKAFAAGDFHQARLTAILMIAALPVQLTTDTVAGPIEPSIEHVWVPSSSTLEYGKQHNINFQDRIELTRPPQFKRPAISQPYFDPFSATPTARISPTQIGQLDVLDKIIDYVRRHGGIVSGPWFYAIAKSAASIRQEREQIIRDHPNDHLGRAIAKWEFTFPDYDPQNMRWMSFNPVTGQPVYVQEFSPPLRDPNLIWSIG

SEQ ID NO: 31960 - DNA, 1851 bp, Muscodor strobelii
  misc_feature: SGI cDNA ID NO. 571008
  misc_feature: Reduced expression when VOC is produced
  misc_feature: Encodes the peptide sequence at SEQ ID NO 31961
atgcctttcctagcctctgctcgagggcttttgagccgaaagacaatcgccgagcgagcaagtgccaacacttcccctgaacccgaaattcgacccgaagctggaactgaacctatagcggtggctaatgaaaatgaaaagaaagctggaaatgacgatatcaacccggctggcgatgctgcgggggatgatatggagaagccggagacgccaagacccagcgaggacgcccagcgtggtgtccaagatgtcgaggctgtgactttgagttggtcgaagaccgctcttattgctgttttcatcaatatctgggctctttattttgtcaacggtttccagtcctccattttgtacaatctcctcccgtacgcaacgagtgaatttgaatctcactcgctgttgaacgtcatttacgttgtgggtgattcgttctctgctgctgtctttatccccttatccaagatcttggatgtttggggaagagcagagggtttcctcatcatgacggtttttgcgacactggggctagtcatcatggccgctagtgatgggattgctactttttgtgctgcttatgttttctacctgactggttttagtggtatgacatattgcgtggatgtcatcactgccgatgcctcgaagcttaagaacagaggtctggcgtatgctttcactagctcaccgtatatcatcatagctttcgcaggtccaactgcatcgcaagatttctacgaaaaatacggctggagatggggcttcggtgccttttcgatcgtgttccctatcgttgccgcacctctatattttatcctcaaggcaaatctccgaaaggccaagaatcatggcgtgttgatccgagagaagagtagtcggacactgcctcagagtatctggcattacactatggagttcgatatcgtcggcgtcgttctcttttccgccggtctcgtcgtatttttcctccccttcgacattgctacatccgctccctatggttggcgcacaccatacattatcgcaatgatcgtcgttgggttcctgaccttatttctattcgcagcgtgggagaagttcttcgcccctgcacccatgttcaaagtcaagttcctcaaggaccgcacagtcatcgctgcatgtctccttgatgcaacttatcagatctcttactactgttgggacaactacttctcgtctttcctgcaagtcgtcaatgatgtaacagttgcgcaagcaggatacatcgtcaatattttcgatattgtctccggtctactcctgatcggaacaggatatttgatccgcagaacaggtcgttataagtggacactctacatcggtgtacccctgtatatcttcgcacagggcttgatgatatacttccgtcgtccgaaccagtcaattggatatttgatcttcttgcaagtcctgatctctatcggtggcagtgtcttcatcatctgtgagcagctcgctgttctcgcagctgtcgaccatcaacacgtcgctactgctctcgctctactgaacgttgtcggtactgttggtggcgcgctaggtgctacgatttctggcgcgatctggaccaataccttccctattgcattgttgcgtaatctccctgctgatgctctggagaactttgatcttatctatgaagatctggcaacgcaaacaagctatgctgttggaacaccaacaagactcgcaattcagaagtcgtacggttatgcgcagactattatgttggctgctggaactggtatcatggctctgtcgttgatttggatggcaatgtttagaaatatcaaccttaaagagaagccacaggtcaagggtatggtgttctag

SEQ ID NO: 31961 - protein, 616 aa, Muscodor strobelii
  misc_feature: SGI Peptide ID NO. 571008
  misc_feature (103)..(521): Pfam Id: PF07690 Pfam Desc: Major Facilitator Superfamily
  misc_feature (332)..(521): Pfam Id: PF07690 Pfam Desc: Major Facilitator Superfamily
  misc_feature (103)..(321): Pfam Id: PF07690 Pfam Desc: Major Facilitator Superfamily
  misc_feature (1)..(613): NCBI GI: 67902756 Blast Desc: AN8365.2 [Aspergillus nidulans FGSC A4] gi|40747771|gb|EAA66927.1| AN8365.2 [Aspergillus nidulans FGSC A4] gi|259484293|tpe|CBF80391.1| TPA: MFS siderochrome iron MirB
  misc_feature (28)..(616): NCBI GI: 212544560 Blast Desc: MFS siderophore iron transporter, [Penicillium marneffei ATCC 18224] gi|210065403|gb|EEA19497.1| MFS siderophore iron transporter, [Penicillium marneffei ATCC 18224]
  misc_feature (39)..(616): NCBI GI: 255950338 Blast Desc: Pc22g20360 [Penicillium chrysogenum Wisconsin 54-1255] gi|211592953|emb|CAP99324.1| Pc22g20360 [Penicillium chrysogenum Wisconsin 54-1255]
  misc_feature (40)..(616): NCBI GI: 242812731 Blast Desc: MFS siderophore iron transporter, [Talaromyces stipitatus ATCC 10500] gi|218714357|gb|EED13780.1| MFS siderophore iron transporter, [Talaromyces stipitatus ATCC 10500]
  misc_feature (8)..(616): NCBI GI: 154299402 Blast Desc: BC1G_10963 [Botryotinia fuckeliana B05.10] gi|150857305|gb|EDN32497.1| BC1G_10963 [Botryotinia fuckeliana B05.10]
  misc_feature (40)..(616): NCBI GI: 242812736 Blast Desc: MFS siderophore iron transporter, [Talaromyces stipitatus ATCC 10500] gi|218714358|gb|EED13781.1| MFS siderophore iron transporter, [Talaromyces stipitatus ATCC 10500]
  misc_feature (78)..(616): NCBI GI: 145235179 Blast Desc: An03g03560 [Aspergillus niger] gi|134057919|emb|CAK47796.1| protein product [Aspergillus niger]
  misc_feature (5)..(616): NCBI GI: 116203173 Blast Desc: CHGG_09471 [Chaetomium globosum CBS 148.51] gi|88177989|gb|EAQ85457.1| CHGG_09471 [Chaetomium globosum CBS 148.51]
  misc_feature (43)..(615): NCBI GI: 156042155 Blast Desc: SS1G_11628 [Sclerotinia sclerotiorum 1980] gi|154696011|gb|EDN95749.1| SS1G_11628 [Sclerotinia sclerotiorum 1980]
  misc_feature (41)..(612): NCBI GI: 115388767 Blast Desc: siderophore iron transporter mirB [Aspergillus terreus NIH2624] gi|114195973|gb|EAU37673.1| siderophore iron transporter mirB [Aspergillus terreus NIH2624]
  misc_feature: Useful for introducing or modulating the production of volatile compounds
MPFLASARGLLSRKTIAERASANTSPEPEIRPEAGTEPIAVANENEKKAGNDDINPAGDAAGDDMEKPETPRPSEDAQRGVQDVEAVTLSWSKTALIAVFINIWALYFVNGFQSSILYNLLPYATSEFESHSLLNVIYVVGDSFSAAVFIPLSKILDVWGRAEGFLIMTVFATLGLVIMAASDGIATFCAAYVFYLTGFSGMTYCVDVITADASKLKNRGLAYAFTSSPYIIIAFAGPTASQDFYEKYGWRWGFGAFSIVFPIVAAPLYFILKANLRKAKNHGVLIREKSSRTLPQSIWHYTMEFDIVGVVLFSAGLVVFFLPFDIATSAPYGWRTPYIIAMIVVGFLTLFLFAAWEKFFAPAPMFKVKFLKDRTVIAACLLDATYQISYYCWDNYFSSFLQVVNDVTVAQAGYIVNIFDIVSGLLLIGTGYLIRRTGRYKWTLYIGVPLYIFAQGLMIYFRRPNQSIGYLIFLQVLISIGGSVFIICEQLAVLAAVDHQHVATALALLNVVGTVGGALGATISGAIWTNTFPIALLRNLPADALENFDLIYEDLATQTSYAVGTPTRLAIQKSYGYAQTIMLAAGTGIMALSLIWMAMFRNINLKEKPQVKGMVF

SEQ ID NO: 31962 - DNA, 2377 bp, Muscodor strobelii
  misc_feature: SGI EST ID NO. CUFF.75596.1
  misc_feature: Variant of the nucleotide sequence at SEQ ID NO 31960
cagatgaaccgatccaccatctcacgcgagatggccccgtttggaaccggggttcgcgggagaaaaatgacccagtcgaggactcgagacctagggatggtgcttctcgatgcgcctgcaggtctggggcgttacttttggaccatggcaaaacgccgagctcgggaaaatcattgcagatcctgtcgctgagatgtcactttaaaaggctcatgatcaccttggccacgtgggtcccttaacgttctgttttcattgtacatgataatcgagtctcttggcagccaggcttagaatcgatgcctttcctagcctctgctcgagggcttttgagccgaaagacaatcgccgagcgagcaagtgccaacacttcccctgaacccgaaattcgacccgaagctggaactgaacctatagcggtggctaatgaaaatgaaaagaaagctggaaatgacgatatcaacccggctggcgatgctgcgggggatgatatggagaagccggagacgccaagacccagcgaggacgcccagcgtggtgtccaagatgtcgaggctgtgactttgagttggtcgaagaccgctcttattgctgttttcatcaatatctgggctctttattttgtcaacggtttccagtcctccattttgtacaatctcctcccgtacgcaacgagtgaatttgaatctcactcgctgttgaacgtcatttacgttgtgggtgattcgttctctgctgctgtctttatccccttatccaagatcttggatgtttggggaagagcagagggtttcctcatcatgacggtttttgcgacactggggctagtcatcatggccgctagtgatgggattgctactttttgtgctgcttatgttttctacctgactggttttagtggtatgacatattgcgtggatgtcatcactgccgatgcctcgaagcttaagaacagaggtctggcgtatgctttcactagctcaccgtatatcatcatagctttcgcaggtccaactgcatcgcaagatttctacgaaaaatacggctggagatggggcttcggtgccttttcgatcgtgttccctatcgttgccgcacctctatattttatcctcaaggcaaatctccgaaaggccaagaatcatggcgtgttgatccgagagaagagtagtcggacactgcctcagagtatctggcattacactatggagttcgatatcgtcggcgtcgttctcttttccgccggtctcgtcgtatttttcctccccttcgacattgctacatccgctccctatggttggcgcacaccatacattatcgcaatgatcgtcgttgggttcctgaccttatttctattcgcagcgtgggagaagttcttcgcccctgcacccatgttcaaagtcaagttcctcaaggaccgcacagtcatcgctgcatgtctccttgatgcaacttatcagatctcttactactgttgggacaactacttctcgtctttcctgcaagtcgtcaatgatgtaacagttgcgcaagcaggatacatcgtcaatattttcgatattgtctccggtctactcctgatcggaacaggatatttgatccgcagaacaggtcgttataagtggacactctacatcggtgtacccctgtatatcttcgcacagggcttgatgatatacttccgtcgtccgaaccagtcaattggatatttgatcttcttgcaagtcctgatctctatcggtggcagtgtcttcatcatctgtgagcagctcgctgttctcgcagctgtcgaccatcaacacgtcgctactgctctcgctctactgaacgttgtcggtactgttggtggcgcgctaggtgctacgatttctggcgcgatctggaccaataccttccctattgcattgttgcgtaatctccctgctgatgctctggagaactttgatcttatctatgaagatctggcaacgcaaacaagctatgctgttggaacaccaacaagactcgcaattcagaagtcgtacggttatgcgcagactattatgttggctgctggaactggtatcatggctctgtcgttgatttggatggcaatgtttagaaatatcaaccttaaagagaagccacaggtcaagggtatggtgttctagaaccagaaatttccatggtcacacaatacaggcgttgcagagtttggctatcatagtgaattagtctataagagaaactaagaattagtagtgcggtaagcgtatattaggtgttgcattacaacgtggcgatgattctccatctcttctatatgaggtcgaacagagggcccaggtatatgcccatatgggccctatgaccctaataaatgattatttcagagaac

SEQ ID NO: 31963 - DNA, 258 bp, Muscodor strobelii
  misc_feature: SGI cDNA ID NO. 571009
  misc_feature: Reduced expression when VOC is produced
  misc_feature: Encodes the peptide sequence at SEQ ID NO 31964
atgtctaaatggtggccaaagaatggcgacacgggcatactacaccactacaccgagagtcttgtaacatttgaatacaccaacggcacagttcctaagccacacagcatcctcttcataggtgggctctcagacggactcgcaacaacatcctacacagcagacatcgttaccgccatagcgtccacaaaatggtcactcttcaccccggttctcagctcttcatacagcctggggaagcggccatctcgaccgtga

SEQ ID NO: 31964 - protein, 85 aa, Muscodor strobelii
  misc_feature: SGI Peptide ID NO. 571009
  misc_feature (1)..(77): Pfam Id: PF08538 Pfam Desc: Domain of function (DUF1749)
  misc_feature (2)..(77): NCBI GI: 212544570 Blast Desc: siderophore biosynthesis lipase/esterase, [Penicillium marneffei ATCC 18224] gi|210065408|gb|EEA19502.1| siderophore biosynthesis lipase/esterase, [Penicillium marneffei ATCC 18224]
  misc_feature (2)..(77): NCBI GI: 154299400 Blast Desc: BC1G_10962 [Botryotinia fuckeliana B05.10] gi|150857304|gb|EDN32496.1| BC1G_10962 [Botryotinia fuckeliana B05.10]
  misc_feature (1)..(77): NCBI GI: 255950348 Blast Desc: Pc22g20410 [Penicillium chrysogenum Wisconsin 54-1255] gi|211592958|emb|CAP99329.1| Pc22g20410 [Penicillium chrysogenum Wisconsin 54-1255]
  misc_feature (2)..(77): NCBI GI: 121711908 Blast Desc: siderophore biosynthesis lipase/esterase, [Aspergillus clavatus NRRL 1] gi|119401721|gb|EAW12143.1| siderophore biosynthesis lipase/esterase, [Aspergillus clavatus NRRL 1]
  misc_feature (2)..(77): NCBI GI: 169784610 Blast Desc: [Aspergillus oryzae RIB40] gi|83775513|dbj|BAE65633.1| protein product [Aspergillus oryzae]
  misc_feature (2)..(77): NCBI GI: 242812760 Blast Desc: siderophore biosynthesis lipase/esterase, [Talaromyces stipitatus ATCC 10500] gi|218714363|gb|EED13786.1| siderophore biosynthesis lipase/esterase, [Talaromyces stipitatus ATCC 10500]
  misc_feature (2)..(77): NCBI GI: 67540138 Blast Desc: AN6239.2 [Aspergillus nidulans FGSC A4] gi|40739433|gb|EAA58623.1| AN6239.2 [Aspergillus nidulans FGSC A4] gi|259479553|tpe|CBF69881.1| TPA: siderophore biosynthesis
  misc_feature (2)..(77): NCBI GI: 159128198 Blast Desc: siderophore biosynthesis lipase/esterase, [Aspergillus fumigatus A1163]
  misc_feature (2)..(77): NCBI GI: 70986330 Blast Desc: siderophore biosynthesis lipase/esterase [Aspergillus fumigatus Af293] gi|66846288|gb|EAL86621.1| siderophore biosynthesis lipase/esterase, [Aspergillus fumigatus Af293]
  misc_feature (2)..(77): NCBI GI: 119474429 Blast Desc: siderophore biosynthesis lipase/esterase, [Neosartorya fischeri NRRL 181] gi|119407243|gb|EAW17193.1| siderophore biosynthesis lipase/esterase, [Neosartorya fischeri NRRL 181]
  misc_feature: Useful for introducing or modulating the production of volatile compounds
MSKWWPKNGDTGILHHYTESLVTFEYTNGTVPKPHSILFIGGLSDGLATTSYTADIVTAIASTKWSLFTPVLSSSYSLGKRPSRP

SEQ ID NO: 31965 - DNA, 1812 bp, Muscodor strobelii
  misc_feature: SGI EST ID NO. CUFF.75598.0
  misc_feature: Variant of the nucleotide sequence at SEQ ID NO 31963
cttcggtcccgtagaccacaagtggcctgacacaaatgtgaagtttggtagcgagggaaatagagcgatgttgggatttgtcgcgtgacggctgggaaaaacgatcttgaacgcatgttgcaacatcgcacaattagatgcatgctggtgatgatcgccggtagaggcatttgagcaggcagctgttaatccagatccaggctcaaaatcacataacatgtctaaatggtggccaaagaatggcgacacgggcatactacaccactacgtaggtatattcaaacttcactccatacactcacaaatatttaatccaatatctaatccgaactttagaccgagagtcttgtaacatttgaatacaccaacggcacagttcctaagccacacagcatcctcttcataggtgggctctcagacggactcgcaacaacatcctacacagcagacatcgttaccgccatagcgtccacaaaatggtcactcttcaccccggttctcagctcttcatacagcctggggaagcggccatctcgaccgtgacacggatgaaatcgcacaatgcctgtcctatatatcctcccacaaacgcagcctataccctaacactatatgtaaactttcgataatggggcactcaacagggagccagtgcgttttacactacatctaccgcccaaacccgcaccttcctactccccctttcgatcacgatctccaacatgtgacacgaccggtgatagacggagcaataatgcaagctccggtatcagacagagaagcgatcctctcagtttgtgaagaaggcatgggctcaatatctgcaagttctatatgcgcaacatacgacaaattactcattctagcaaaagacggtattcgagaaaatcgcctcgataccttcttgccaatgtccctgacatcacaattcggctttggagaaacaacaccaatatcctgtcgccgatggctcagtctcgctagtccagacagtcctggctctccaagcgaagatgatttattcagttctgatttatctgatgaacaattatttgggacctttgggatgatcaaagaacgggggcttttgcgacagtcattactagtgttgatatctggagcggaccagtcgatgccggactggattgataaggaagagttgataactaggtgggaaacagctactaatcatgatcatgacggtagggtgaagacttggaacaaggggagttgcttgataccaaatgcttctcatggcttgagtaacgatgatcaggcggagccgaggagatttctcgctaataaggtgttgaactatctacaagagttggagactgaggactcttctggagggtgttgtcaggtcgctcagtaagagtcatgccacatgcatgatataatctgattattgctagcagacccatagcacgctaatgatcttgttgctttttactgaccgtcaatgcggtgcgtttacatatcattataccagtacattcggtgcatatcaatacttggatcgtagagagtgcatgggtcgcgaatcgttgatcgactgctaaatatgctttggatcttgatcaacttccttccgtataatgatcagctgcccaggtcttgagcgcctcaaagtttgaacaactttgcacggcaccctccccaagttcggtattctctaacttccccatcagggtcgtgtcgggatggcacatcaatctctgtcgtattgctccgacgcagtgtctggcatgtctccaattcccatcagtcatcatataatcgccctcgtgtttttgagatgtccgaatcaag

SEQ ID NO: 31966 - DNA, 342 bp, Muscodor strobelii
  misc_feature: SGI cDNA ID NO. 571010
  misc_feature: Elevated expression when VOC is produced
  misc_feature: Encodes the peptide sequence at SEQ ID NO 31967
atgcaactcatcaatacttcgattttcatcgctacgatagtcagtcttgccactagtcttgcattgccacgagctgtcaccctcgtcaagaaagacatggcaacagttgctagcaatgaggttcatctcagcttctacgagaaggctacgcagcacggctcgcttgacgatataacaatcgatgctcgcgatgacactcgcagagacttcatcgaggttgcacaacacggttcgctcgatgacagagcaaccgttgctggtaaaaagcttcgtcttagcttttacgagaaggccacgcaacccgtcctagtcgccgacgtgccatctgatgacgatgcttaa

SEQ ID NO: 31967 - protein, 113 aa, Muscodor strobelii
  misc_feature: SGI Peptide ID NO. 571010
  misc_feature: Useful for introducing or modulating the production of volatile compounds
MQLINTSIFIATIVSLATSLALPRAVTLVKKDMATVASNEVHLSFYEKATQHGSLDDITIDARDDTRRDFIEVAQHGSLDDRATVAGKKLRLSFYEKATQPVLVADVPSDDDA

SEQ ID NO: 31968 - DNA, 1038 bp, Muscodor strobelii
  misc_feature: SGI EST ID NO. CUFF.75618.1
  misc_feature: Variant of the nucleotide sequence at SEQ ID NO 31966
gtttgacctctgctgactcccaacggccaaagttatatataaaagacagacttctcgttcaacattgatatcgttctggtgccgcccgccagcacttaggtctattgaagagaaagctgatcacatctcctcaagaattgatagagcttagccgcagttctaccttgccagttctagaaattatgcaactcatcaatacttcgattttcatcgctacgatagtcagtcttgccactagtcttgcattgccacgagctgtcaccctcgtcaagaaagacatggcaacagttgctagcaatgaggttcatctcagcttctacgagaaggctacgcagcacggctcgcttgacgatataacaatcgatgctcgcgatgacactcgcagagacttcatcgaggttgcacaacacggttcgctcgatgacagagcaaccgttgctggtaaaaagcttcgtcttagcttttacgagaaggccacgcaacccgtcctagtcgccgacgtgccatctgatgacgatgcttaagttacgctggattctttcaattggtgacgcaagatagattggagaataacctggccatttactcaataaaaattctttatggtgggaataagttgcgggctgggcagtgattttacagctattactacacgccaagtaatgatatgaaaggcacttgacgtacgactagcacttaaaagtagcaataggttgatcatggttgctgttacaatgcctggccatagatcgatacagaaatggaaacgacgaaacccaaaacaacacgcaatcggagactcaggtacttccccaatggtgtacgcatttggatacatgtatacagcagttttagtctgatagcagcattccgttgcttcaatattcgattttcgagtatttctggatgcaaatatttgcagttcaggtatcgggaattgtagcataacgagaagctctgggcggcaattacgaggagtggaaaatttgcaattgtgatgctacgtcaatggctacaaataccgcgaggccaatggac

SEQ ID NO: 31969 - DNA, 543 bp, Muscodor strobelii
  misc_feature: SGI cDNA ID NO. 571011
  misc_feature: Encodes the peptide sequence at SEQ ID NO 31970
atgctcttaacatcatcgcaagtctcggtgctgatcacgtcaacgatagtcgttctctgcacatctgctctttttctaagcggctacgtaattcaacagcgcacacttcaagatctacggacagcgataaaaccaaaacacatctcgcgtccgaagcctcacgtctatgcctttgacgcagctctgacagatcccgagtcgctgataccaaccgaaagcaaagttcagattgcgattgaaaattcagatcccggttccgatacgagctcgaaagctgaagaggggattacaatcgaagttcggccatcaatccaagaaccagagcggaaccccaaggccgccgctccatcgccagcacagaaggccgaagaaataccagatgatacgccggaattgaagaagagagatccggagaagcaatgggacggtgtgcaagagggcggacagccacttacccggcttgagaggaggaagcgcatcaaggccgagatacagagactttcgcagggcgaacctgtctactatcagagacgactatggtga

SEQ ID NO: 31970 - protein, 180 aa, Muscodor strobelii
  misc_feature: SGI Peptide ID NO. 571011
  misc_feature (1)..(180): NCBI GI: 256731888 Blast Desc: NECHADRAFT_80712 [Nectria haematococca mpVI 77-13-4]
  misc_feature (1)..(179): NCBI GI: 46124069 Blast Desc: FG06412.1 [Gibberella zeae PH-1]
  misc_feature (1)..(47): NCBI GI: 156040688 Blast Desc: [Sclerotinia sclerotiorum 1980] gi|154695706|gb|EDN95444.1| [Sclerotinia sclerotiorum 1980]
  misc_feature (1)..(43): NCBI GI: 189207204 Blast Desc: [Pyrenophora tritici-repentis Pt-1C-BFP] gi|187976029|gb|EDU42655.1| [Pyrenophora tritici-repentis Pt-1C-BFP]
  misc_feature (1)..(54): NCBI GI: 255955917 Blast Desc: Pc21g17130 [Penicillium chrysogenum Wisconsin 54-1255] gi|211590422|emb|CAP96610.1| Pc21g17130 [Penicillium chrysogenum Wisconsin 54-1255]
  misc_feature (1)..(86): NCBI GI: 159126534 Blast Desc: conserved [Aspergillus fumigatus A1163]
  misc_feature (1)..(86): NCBI GI: 70997996 Blast Desc: conserved [Aspergillus fumigatus Af293] gi|66851366|gb|EAL91692.1| conserved [Aspergillus fumigatus Af293]
  misc_feature (1)..(51): NCBI GI: 119479505 Blast Desc: NFIA_078240 [Neosartorya fischeri NRRL 181] gi|119407935|gb|EAW17884.1| conserved [Neosartorya fischeri NRRL 181]
  misc_feature (1)..(44): NCBI GI: 238505156 Blast Desc: conserved [Aspergillus flavus NRRL3357] gi|220689921|gb|EED46271.1| conserved [Aspergillus flavus NRRL3357]
  misc_feature (1)..(45): NCBI GI: 154285638 Blast Desc: [Ajellomyces capsulatus NAm1] gi|150407255|gb|EDN02796.1| [Ajellomyces capsulatus NAm1]
MLLTSSQVSVLITSTIVVLCTSALFLSGYVIQQRTLQDLRTAIKPKHISRPKPHVYAFDAALTDPESLIPTESKVQIAIENSDPGSDTSSKAEEGITIEVRPSIQEPERNPKAAAPSPAQKAEEIPDDTPELKKRDPEKQWDGVQEGGQPLTRLERRKRIKAEIQRLSQGEPVYYQRRLW

SEQ ID NO: 31971 - DNA, 4415 bp, Muscodor strobelii
  misc_feature: SGI EST ID NO. CUFF.75608.0
  misc_feature: Variant of the nucleotide sequence at SEQ ID NO 31969
ttcgaatagatcacgatttatttcgagacttttaagttttcacacctggtagcagtgctactaccagcgacttccacaatgtggcaagtttggaagaggtcgcttcctataatcataatgtcataatgtcataaacaggattagactgaagcaatttccttggtatcaggcgttttgatcaagagaattcaaatcttccctttactgctttaattattgtgagtaggcacgctggtgaaaacgacgagagtgagttggggactaaatgcctggacagggatcgtcgccaagacatgacgacgatcgatcgttgccctgtcaacaggcatcgggacgaaacaggaaatcgggatgttggattcgtcatgcgcattcatttgtgagacaatctaatccaacaatgaaaactgcatgaccgtcaattgaaacccttttgcaaaggttaaatgcggatttacgattgttcagaatttattaatcagatttgtgacttgcacaagttgcatcgcttgctatcgtcaatagagtcgccattaccactttgaagactagacaatgctcttaacatcatcgcaagtctcggtgctgatcacgtcaacgatagtcgttctctgcacatctgctctttttctaagcggctacgtaattcaacagcgcacacttcaagatctacggacagcgataaaaccaaaacacatctcgcgtccgaagcctcacgtctatgcctttgacgcagctctgacagatcccgagtcgctgataccaaccgaaagcaaagttcagattgcgattgaaaattcagatcccggttccgatacgagctcgaaagctgaagaggggattacaatcgaagttcggccatcaatccaagaaccagagcggaaccccaaggccgccgctccatcgccagcacagaaggccgaagaaataccagatgatacgccggaattgaagaagagagatccggagaagcaatgggacggtgtgcaagagggcggacagccacttacccggcttgagaggaggaagcgcatcaaggccgagatacagagactttcgcagggcgaacctgtctactatcagagacgactatggtgaaatgccatgggttgaacactgggaatgattcgcaatggagttttgcatccgccccgagcattggtctctgggcttcacgaatactaatgacggatttgtgcatgtaacattacgatgagatcaggctcaccttcatgactgcggactgggtgtatggtatatatggaattggtatttttagaggtactttctcggacatatggcacctatgggcaaggctttgaataatgatgttggtatggcggagctggagttacggcattgtacaatggaaggaaatgatttactctgactacgattcttagctgaatctatgcccaaagagcgctgagtgtaaaggcgtgatttgtatttcatacaagccaaccgcattgaatagacatattatagaacagaggcggctcgcctctttttgcgcgccaagaattggtgcttttacagagatcccagcatccagctatagtccacgcccatgatgattttgcaaacacttccgttacttcccagcaactagcatcccatggctcaccccatacgagaaacccagcgctctgccgatcacctcggcctctcatagcgtgacatagttcataatcgtcgaaatcatcaacaccacgcaaaaacaaattatcccgcatctgagccagtggtagtaaatcaaaccatggatgatgcacagtccggagctgtagcttagttggtttgaggtgagtgggcaatgtatcgacctctttagtgcctatcctgagtggaccttctatattgaagttagagagtgcgtcgtcatcttgcagttgtccatccgttaggttaaggacctcggcatttcgaaacaacgccttgataaagttgaactgcattagacttggtatcaagtcgggtctcggagctctaactagccaattcttgcgcatgaagacttcgagagcatcgatgagagacctgttgtataatgaagtgcagttgagaatactaattgcctcaacaacccttttaacgtcgacatcatttgccgaattggtaagtagccctagtagggtatgtaatgggttattgcgaacaatgttatcgtgataagaaatgtaagaggctggagatgtcgcagagacttgaaccgtagagacctgtggcgtctttcgagcgcgattccctaataatagaattaggaaagttgatgttactctgatattggattgcggcttgcagctttgacttacgtcgtgctctctgattcacacgattctgtatccttctcctctcacgagcactcgatagtccgtgccaatcgtctacatacggcgggtagagatcggcgttatcattcggagaaacgggcatgactatggtaccaaggtcgaatctgcttactaacacacgaaaagcttgtcgcttagttaatacaatacaacatctagtatgcacatagatgacgggtgcagatatagcttcatgtctaccgtatgttttgccgatgcgtaagtgccgtggacggagattatcacggattttaccaaggttcaaacacaactgactcgaccacccgagccgcctcagctggttcaacggagataacatataaccccacctacggaccttcatgcacctgtcatcaacatgcatgaactagtccaagtttgttctgcctgcacggctaatagtttcatatccgttggtattggcgctcaaggcaatgatgctgaaaatctagcttcatatcgccgaaaaatagcaatgaagctcgcgcgggggcaagagagacagttggtgattatgtcacgcaaccgagtaatgacaccgatgataactgagacgacaagagcgatagcaatcaatataaatatgttgagcctcccaaggaagaatactaactaactaaccatcgatttcattgcggcgtcgtgtccgtaaacccttgaacatcataaaactttatttcttgactccgatatcaatcacttatcatcgcaaaaatgtctctatgggtagccgctcctcctcccgagaccgagcttggtcgttatcgggtcctttgcccatctgctggtattcgagtttctcctcttcagctaggtggcatgtctttaggagatgcgtggagtgatttcatgggtagcatgaataaggaggactccttcaaactgcttgatgcttatttcgagaaaggcggcaacttcatcgatacagcaaacaattaccaggacgaacaatctgagaagtggattggcgagtggcttaccgctcgcaagaaccgagaccaaatcgttctagctacaaaattcaccaccgactacagatctcacgatgctggcaagggaaaagtagtgaataattgtggcaatcacaaaaagagtctgcatatgtctctgagagactctctcgccaagttgcagaccgattacgtcgacattctctaccttcattggtgggactggaccacatctatcgaggaggtcatggatgcattgcacatcatggtacagcaaggaaaagtgttatacctcggtgtttccgatacccccgcgtgggttgttagcgccgctaacacatatgcaaaagcgtccggcaagacgccgttttcaatttaccaaggccggtggaacgtgatgcgccgggattttgagcgagacattattccaatggcccgacaattcgggatggctcttgcgccttgggacgtcctgggtcaaggcaaattccagacgaccaaagagatcgaaacacgcaaaaagaacggcgagcccctccgaagtctgcgtggcaaagagcagaccgaggacgaaataaaggtcagctctgccctggctaaggtggccgaggagcacggcatcgagtccgtcacagccgtggcgttggcctatgtaatggccaagttcccctatgtctatccgattgtgggtggcaggaaaattcatcatcttgaggacaacatcaagggactctctattcagttgactgataagcaaattgaggacctcgagtctgtcacatctttcgatattggattccctatgaacttcgtcggacgggaattgagagagacagcgaagcctcagccattgatggcaacggcaggaaccttggctgtggtccggaatgctcagccgattcagcacgctagctcataagctaacagagtactgattcgtactataaggctataagcttttgcttcatggggttgacgactttggcttagtcaagtatcaatcatcagcatggttatttcatgtctcagctagattcggattggagatcttgatttgtattcattggcccctaattcatatgttgagtgaactcgaaaaagtaacatccct

SEQ ID NO: 31972 - DNA, 918 bp, Muscodor strobelii
  misc_feature: SGI cDNA ID NO. 571012
  misc_feature: Encodes the peptide sequence at SEQ ID NO 31973
atgcccgtttctccgaatgataacgccgatctctacccgccgtatgtagacgattggcacggactatcgagtgctcgtgagaggagaaggatacagaatcgtgtgaatcagagagcacgacggaatcgcgctcgaaagacgccacaggtctctacggttcaagtctctgcgacatctccagcctcttacatttcttatcacgataacattgttcgcaataacccattacataccctactagggctacttaccaattcggcaaatgatgtcgacgttaaaagggttgttgaggcaattagtattctcaactgcacttcattatacaacaggtctctcatcgatgctctcgaagtcttcatgcgcaagaattggctagttagagctccgagacccgacttgataccaagtctaatgcagttcaactttatcaaggcgttgtttcgaaatgccgaggtccttaacctaacggatggacaactgcaagatgacgacgcactctctaacttcaatatagaaggtccactcaggataggcactaaagaggtcgatacattgcccactcacctcaaaccaactaagctacagctccggactgtgcatcatccatggtttgatttactaccactggctcagatgcgggataatttgtttttgcgtggtgttgatgatttcgacgattatgaactatgtcacgctatgagaggccgaggtgatcggcagagcgctgggtttctcgtatggggtgagccatgggatgctagttgctgggaagtaacggaagtgtttgcaaaatcatcatgggcgtggactatagctggatgctgggatctctgtaaaagcaccaattcttggcgcgcaaaaagaggcgagccgcctctgttctataatatgtctattcaatgcggttggcttgtatga

SEQ ID NO: 31973 - protein, 305 aa, Muscodor strobelii
  misc_feature: SGI Peptide ID NO. 571012
  misc_feature (9)..(294): NCBI GI: 256727244 Blast Desc: NECHADRAFT_34162 [Nectria haematococca mpVI 77-13-4]
  misc_feature (17)..(296): NCBI GI: 256735570 Blast Desc: NECHADRAFT_90484 [Nectria haematococca mpVI 77-13-4]
  misc_feature (16)..(297): NCBI GI: 242801658 Blast Desc: conserved [Talaromyces stipitatus ATCC 10500] gi|218717157|gb|EED16578.1| conserved [Talaromyces stipitatus ATCC 10500]
  misc_feature (17)..(294): NCBI GI: 154294835 Blast Desc: BC1G_13540 [Botryotinia fuckeliana B05.10] gi|150844498|gb|EDN19691.1| BC1G_13540 [Botryotinia fuckeliana B05.10]
  misc_feature (112)..(295): NCBI GI: 145249138 Blast Desc: An14g02830 [Aspergillus niger] gi|134081585|emb|CAK41994.1| protein product [Aspergillus niger]
  misc_feature (16)..(294): NCBI GI: 212540482 Blast Desc: PMAA_055810 [Penicillium marneffei ATCC 18224] gi|210067695|gb|EEA21787.1| PMAA_055810 [Penicillium marneffei ATCC 18224]
  misc_feature (17)..(297): NCBI GI: 156036494 Blast Desc: SS1G_12936 [Sclerotinia sclerotiorum 1980] gi|154698341|gb|EDN98079.1| SS1G_12936 [Sclerotinia sclerotiorum 1980]
  misc_feature (17)..(293): NCBI GI: 259486268 Blast Desc: TPA: conserved [Aspergillus nidulans FGSC A4]
  misc_feature (126)..(296): NCBI GI: 154311578 Blast Desc: BC1G_06248 [Botryotinia fuckeliana B05.10] gi|150850759|gb|EDN25952.1| BC1G_06248 [Botryotinia fuckeliana B05.10]
  misc_feature (17)..(289): NCBI GI: 261352674 Blast Desc: conserved [Verticillium albo-atrum VaMs.102]
MPVSPNDNADLYPPYVDDWHGLSSARERRRIQNRVNQRARRNRARKTPQVSTVQVSATSPASYISYHDNIVRNNPLHTLLGLLTNSANDVDVKRVVEAISILNCTSLYNRSLIDALEVFMRKNWLVRAPRPDLIPSLMQFNFIKALFRNAEVLNLTDGQLQDDDALSNFNIEGPLRIGTKEVDTLPTHLKPTKLQLRTVHHPWFDLLPLAQMRDNLFLRGVDDFDDYELCHAMRGRGDRQSAGFLVWGEPWDASCWEVTEVFAKSSWAWTIAGCWDLCKSTNSWRAKRGEPPLFYNMSIQCGWLV

SEQ ID NO: 31974 - DNA, 3746 bp, Muscodor strobelii
  misc_feature: SGI EST ID NO. CUFF.75609.1
  misc_feature: Variant of the nucleotide sequence at SEQ ID NO 31972
gttactttttcgagttcactcaacatatgaattaggggccaatgaatacaaatcaagatctccaatccgaatctagctgagacatgaaataaccatgctgatgattgatacttgactaagccaaagtcgtcaaccccatgaagcaaaagcttatagccttatagtacgaatcagtactctgttagcttatgagctagcgtgctgaatcggctgagcattccggaccacagccaaggttcctgccgttgccatcaatggctgaggcttcgctgtctctctcaattcccgtccgacgaagttcatagggaatccaatatcgaaagatgtgacagactcgaggtcctcaatttgcttatcagtcaactgaatagagagtcccttgatgttgtcctcaagatgatgaattttcctgccacccacaatcggatagacataggggaacttggccattacataggccaacgccacggctgtgacggactcgatgccgtgctcctcggccaccttagccagggcagagctgacctttatttcgtcctcggtctgctctttgccacgcagacttcggaggggctcgccgttctttttgcgtgtttcgatctctttggtcgtctggaatttgccttgacccaggacgtcccaaggcgcaagagccatcccgaattgtcgggccattggaataatgtctcgctcaaaatcccggcgcatcacgttccaccggccttggtaaattgaaaacggcgtcttgccggacgcttttgcatatgtgttagcggcgctaacaacccacgcgggggtatcggaaacaccgaggtataacacttttccttgctgtaccatgatgtgcaatgcatccatgacctcctcgatagatgtggtccagtcccaccaatgaaggtagagaatgtcgacgtaatcggtctgcaacttggcgagagagtctctcagagacatatgcagactctttttgtgattgccacaattattcactacttttcccttgccagcatcgtgagatctgtagtcggtggtgaattttgtagctagaacgatttggtctcggttcttgcgagcggtaagccactcgccaatccacttctcagattgttcgtcctggtaattgtttgctgtatcgatgaagttgccgcctttctcgaaataagcatcaagcagtttgaaggagtcctccttattcatgctacccatgaaatcactccacgcatctcctaaagacatgccacctagctgaagaggagaaactcgaataccagcagatgggcaaaggacccgataacgaccaagctcggtctcgggaggaggagcggctacccatagagacatttttgcgatgataagtgattgatatcggagtcaagaaataaagttttatgatgttcaagggtttacggacacgacgccgcaatgaaatcgatggttagttagttagtattcttccttgggaggctcaacatatttatattgattgctatcgctcttgtcgtctcagttatcatcggtgtcattactcggttgcgtgacataatcaccaactgtctctcttgcccccgcgcgagcttcattgctatttttcggcgatatgaagctagattttcagcatcattgccttgagcgccaataccaacggatatgaaactattagccgtgcaggcagaacaaacttggactagttcatgcatgttgatgacaggtgcatgaaggtccgtaggtggggttatatgttatctccgttgaaccagctgaggcggctcgggtggtcgagtcagttgtgtttgaaccttggtaaaatccgtgataatctccgtccacggcacttacgcatcggcaaaacatacggtagacatgaagctatatctgcacccgtcatctatgtgcatactagatgttgtattgtattaactaagcgacaagcttttcgtgtgttagtaagcagattcgaccttggtaccatagtcatgcccgtttctccgaatgataacgccgatctctacccgccgtatgtagacgattggcacggactatcgagtgctcgtgagaggagaaggatacagaatcgtgtgaatcagagagcacgacggaatcgcgctcgaaagacgccacaggtctctacggttcaagtctctgcgacatctccagcctcttacatttcttatcacgataacattgttcgcaataacccattacataccctactagggctacttaccaattcggcaaatgatgtcgacgttaaaagggttgttgaggcaattagtattctcaactgcacttcattatacaacaggtctctcatcgatgctctcgaagtcttcatgcgcaagaattggctagttagagctccgagacccgacttgataccaagtctaatgcagttcaactttatcaaggcgttgtttcgaaatgccgaggtccttaacctaacggatggacaactgcaagatgacgacgcactctctaacttcaatatagaaggtccactcaggataggcactaaagaggtcgatacattgcccactcacctcaaaccaactaagctacagctccggactgtgcatcatccatggtttgatttactaccactggctcagatgcgggataatttgtttttgcgtggtgttgatgatttcgacgattatgaactatgtcacgctatgagaggccgaggtgatcggcagagcgctgggtttctcgtatggggtgagccatgggatgctagttgctgggaagtaacggaagtgtttgcaaaatcatcatgggcgtggactatagctggatgctgggatctctgtaaaagcaccaattcttggcgcgcaaaaagaggcgagccgcctctgttctataatatgtctattcaatgcggttggcttgtatgaaatacaaatcacgcctttacactcagcgctctttgggcatagattcagctaagaatcgtagtcagagtaaatcatttccttccattgtacaatgccgtaactccagctccgccataccaacatcattattcaaagccttgcccataggtgccatatgtccgagaaagtacctctaaaaataccaattccatatataccatacacccagtccgcagtcatgaaggtgagcctgatctcatcgtaatgttacatgcacaaatccgtcattagtattcgtgaagcccagagaccaatgctcggggcggatgcaaaactccattgcgaatcattcccagtgttcaacccatggcatttcaccatagtcgtctctgatagtagacaggttcgccctgcgaaagtctctgtatctcggccttgatgcgcttcctcctctcaagccgggtaagtggctgtccgccctcttgcacaccgtcccattgcttctccggatctctcttcttcaattccggcgtatcatctggtatttcttcggccttctgtgctggcgatggagcggcggccttggggttccgctctggttcttggattgatggccgaacttcgattgtaatcccctcttcagctttcgagctcgtatcggaaccgggatctgaattttcaatcgcaatctgaactttgctttcggttggtatcagcgactcgggatctgtcagagctgcgtcaaaggcatagacgtgaggcttcggacgcgagatgtgttttggttttatcgctgtccgtagatcttgaagtgtgcgctgttgaattacgtagccgcttagaaaaagagcagatgtgcagagaacgactaacgat

SEQ ID NO: 31975 - DNA, 1155 bp, Muscodor strobelii
  misc_feature: SGI cDNA ID NO. 571013
  misc_feature: Encodes the peptide sequence at SEQ ID NO 31976
atgtctctatgggtagccgctcctcctcccgagaccgagcttggtcgttatcgggtcctttgcccatctgctggtattcgagtttctcctcttcagctaggtggcatgtctttaggagatgcgtggagtgatttcatgggtagcatgaataaggaggactccttcaaactgcttgatgcttatttcgagaaaggcggcaacttcatcgatacagcaaacaattaccaggacgaacaatctgagaagtggattggcgagtggcttaccgctcgcaagaaccgagaccaaatcgttctagctacaaaattcaccaccgactacagatctcacgatgctggcaagggaaaagtagtgaataattgtggcaatcacaaaaagagtctgcatatgtctctgagagactctctcgccaagttgcagaccgattacgtcgacattctctaccttcattggtgggactggaccacatctatcgaggaggtcatggatgcattgcacatcatggtacagcaaggaaaagtgttatacctcggtgtttccgatacccccgcgtgggttgttagcgccgctaacacatatgcaaaagcgtccggcaagacgccgttttcaatttaccaaggccggtggaacgtgatgcgccgggattttgagcgagacattattccaatggcccgacaattcgggatggctcttgcgccttgggacgtcctgggtcaaggcaaattccagacgaccaaagagatcgaaacacgcaaaaagaacggcgagcccctccgaagtctgcgtggcaaagagcagaccgaggacgaaataaaggtcagctctgccctggctaaggtggccgaggagcacggcatcgagtccgtcacagccgtggcgttggcctatgtaatggccaagttcccctatgtctatccgattgtgggtggcaggaaaattcatcatcttgaggacaacatcaagggactctctattcagttgactgataagcaaattgaggacctcgagtctgtcacatctttcgatattggattccctatgaacttcgtcggacgggaattgagagagacagcgaagcctcagccattgatggcaacggcaggaaccttggctgtggtccggaatgctcagccgattcagcacgctagctcataa

SEQ ID NO: 31976 - protein, 384 aa, Muscodor strobelii
  misc_feature: SGI Peptide ID NO. 571013
  misc_feature (22)..(340): Pfam Id: PF00248 Pfam Desc: Aldo/keto reductase family
  misc_feature (7)..(382): NCBI GI: 71001554 Blast Desc: aryl-alcohol dehydrogenase Aad14 [Aspergillus fumigatus Af293] gi|66853096|gb|EAL93420.1| aryl-alcohol dehydrogenase Aad14, [Aspergillus fumigatus Af293] aryl-alcohol
  misc_feature (3)..(379): NCBI GI: 238496373 Blast Desc: aryl-alcohol dehydrogenase Aad14, [Aspergillus flavus NRRL3357] gi|220694302|gb|EED50646.1| aryl-alcohol dehydrogenase Aad14, [Aspergillus flavus NRRL3357]
  misc_feature (7)..(382): NCBI GI: 119481133 Blast Desc: aryl-alcohol dehydrogenase (AAD), [Neosartorya fischeri NRRL 181] gi|119408749|gb|EAW18698.1| aryl-alcohol dehydrogenase (AAD), [Neosartorya fischeri NRRL 181]
  misc_feature (2)..(379): NCBI GI: 115384538 Blast Desc: aryl-alcohol dehydrogenase [Aspergillus terreus NIH2624] gi|114196508|gb|EAU38208.1| aryl-alcohol dehydrogenase [Aspergillus terreus NIH2624]
  misc_feature (7)..(379): NCBI GI: 121715614 Blast Desc: aryl-alcohol dehydrogenase (AAD), [Aspergillus clavatus NRRL 1] gi|119403573|gb|EAW13990.1| aryl-alcohol dehydrogenase (AAD), [Aspergillus clavatus NRRL 1]
  misc_feature (3)..(384): NCBI GI: 255950956 Blast Desc: Pc22g23540 [Penicillium chrysogenum Wisconsin 54-1255] gi|211593262|emb|CAP99642.1| Pc22g23540 [Penicillium chrysogenum Wisconsin 54-1255]
  misc_feature (1)..(379): NCBI GI: 115436968 Blast Desc: aryl-alcohol dehydrogenase [Aspergillus terreus NIH2624] gi|114188506|gb|EAU30206.1| aryl-alcohol dehydrogenase [Aspergillus terreus NIH2624]
  misc_feature (7)..(372): NCBI GI: 67539434 Blast Desc: AN5887.2 [Aspergillus nidulans FGSC A4] gi|40739206|gb|EAA58396.1| AN5887.2 [Aspergillus nidulans FGSC A4] gi|259479946|tpe|CBF70633.1| TPA: aryl alcohol dehydrogenase
  misc_feature (2)..(379): NCBI GI: 255954449 Blast Desc: Pc21g09380 [Penicillium chrysogenum Wisconsin 54-1255] gi|211589688|emb|CAP95835.1| Pc21g09380 [Penicillium chrysogenum Wisconsin 54-1255]
  misc_feature (1)..(380): NCBI GI: 238500493 Blast Desc: aryl-alcohol dehydrogenase, [Aspergillus flavus NRRL3357] gi|220693234|gb|EED49580.1| aryl-alcohol dehydrogenase, [Aspergillus flavus NRRL3357]
  misc_feature (1)..(351): SWISSPROT Homolog: EC 1.1.1.91 Aryl-alcohol dehydrogenase (NADP(+))
MSLWVAAPPPETELGRYRVLCPSAGIRVSPLQLGGMSLGDAWSDFMGSMNKEDSFKLLDAYFEKGGNFIDTANNYQDEQSEKWIGEWLTARKNRDQIVLATKFTTDYRSHDAGKGKVVNNCGNHKKSLHMSLRDSLAKLQTDYVDILYLHWWDWTTSIEEVMDALHIMVQQGKVLYLGVSDTPAWVVSAANTYAKASGKTPFSIYQGRWNVMRRDFERDIIPMARQFGMALAPWDVLGQGKFQTTKEIETRKKNGEPLRSLRGKEQTEDEIKVSSALAKVAEEHGIESVTAVALAYVMAKFPYVYPIVGGRKIHHLEDNIKGLSIQLTDKQIEDLESVTSFDIGFPMNFVGRELRETAKPQPLMATAGTLAVVRNAQPIQHASS

SEQ ID NO: 31977 - DNA, 4415 bp, Muscodor strobelii; identical to SEQ ID NO: 31971
  misc_feature: SGI EST ID NO. CUFF.75608.0
  misc_feature: Variant of the nucleotide sequence at SEQ ID NO 31975

SEQ ID NO: 31978 - DNA, 765 bp, Muscodor strobelii
  misc_feature: SGI cDNA ID NO. 571014
  misc_feature: Encodes the peptide sequence at SEQ ID NO 31979
atggctacgatggctacgatggctaccgactcaatcatcttccacgggccgacccgtatggagcgcatgaaccccgaagacttcgagacagcttcgattcgctctgccgcaccgtcttatacttccgaggcaccttcgtaccatacactgccaccgaacgagtcagtcccagcctacacgccaccagccacaacaacaaacaacacagtagcaccacgacgccagatttcatccatgattccaccctcggtagcaccacgatcgacattcgccccaggtgccggtctgccacccatcccacggcgaacggagagcccagtgctcccatcactcgatcgattccgcatcccctcctggtcctcagtgggcgcaggcaaccctcaagcccggcactaccagagcgtcgcgaaccggcgtgtggccgcggcttcggcgtcgaactcgacgctcaacgtagagggtgcgttacgcgccgccatggaccgtgtgagcgctgctaacgcggatgcgggccaggaggacgcagacgatggacgcattcgtccgctcgaagacccttatctcgttggtgaggaggccgcggcgcggaaccgcaacgcgaggctcgcgaagttgaatggtgatgagattctgatccgcgaggatcggcggtgggattggtggcatgcccaaatggcgcacatgcaacagcgcgaagcaagctggaacgcattccgctccaacatggagaataaccgcgggcgcagattccgcttcggtcgatga

SEQ ID NO: 31979 - protein, 254 aa, Muscodor strobelii
  misc_feature: SGI Peptide ID NO. 571014
  misc_feature (16)..(243): NCBI GI: 256733496 Blast Desc: NECHADRAFT_99586 [Nectria haematococca mpVI 77-13-4]
  misc_feature (1)..(229): NCBI GI: 39971199 Blast Desc: MGG_03066 [Magnaporthe grisea 70-15] gi|149210789|ref|XP_001522769.1| MGCH7_ch7g867 [Magnaporthe grisea 70-15] gi|86196822|gb|EAQ71460.1| MGCH7_ch7g867 grisea
  misc_feature (22)..(239): NCBI GI: 46128393 Blast Desc: FG08574.1 [Gibberella zeae PH-1]
  misc_feature (63)..(253): NCBI GI: 85074877 Blast Desc: NCU00666 [Neurospora crassa OR74A] gi|28927619|gb|EAA36570.1| [Neurospora crassa OR74A]
  misc_feature (4)..(221): NCBI GI: 116193311 Blast Desc: [Chaetomium globosum CBS 148.51] gi|88182286|gb|EAQ89754.1| [Chaetomium globosum CBS 148.51]
  misc_feature (27)..(144): NCBI GI: 225555693 Blast Desc: conserved [Ajellomyces capsulatus G186AR]
  misc_feature (27)..(147): NCBI GI: 240276513 Blast Desc: conserved [Ajellomyces capsulatus H143]
  misc_feature (29)..(205): NCBI GI: 258577041 Blast Desc: UREG_02218 [Uncinocarpus reesii 1704] gi|237902968|gb|EEP77369.1| UREG_02218 [Uncinocarpus reesii 1704]
  misc_feature (27)..(144): NCBI GI: 154271091 Blast Desc: [Ajellomyces capsulatus NAm1] gi|150409622|gb|EDN05066.1| [Ajellomyces capsulatus NAm1]
  misc_feature (29)..(146): NCBI GI: 240104757 Blast Desc: CPC735_019800 [Coccidioides posadasii C735 delta SOWgp]
MATMATMATDSIIFHGPTRMERMNPEDFETASIRSAAPSYTSEAPSYHTLPPNESVPAYTPPATTTNNTVAPRRQISSMIPPSVAPRSTFAPGAGLPPIPRRTESPVLPSLDRFRIPSWSSVGAGNPQARHYQSVANRRVAAASASNSTLNVEGALRAAMDRVSAANADAGQEDADDGRIRPLEDPYLVGEEAAARNRNARLAKLNGDEILIREDRRWDWWHAQMAHMQQREASWNAFRSNMENNRGRRFRFGR

SEQ ID NO: 31980 - DNA, 2159 bp, Muscodor strobelii
  misc_feature: SGI EST ID NO. CUFF.76130.4
  misc_feature: Variant of the nucleotide sequence at SEQ ID NO 31978
ggaacactggtgtcacttaagctcggttgagctactccaaaaaccacattacccgacgttgcctgatttctaccaactttcagaccagtcatatagcctcacggctcatcttacactctgaagcagacctaaagtgaataggatatattcacgtctgcagtaatcgtgacgtactgagaagccttctcgaacagacactgttctgtttcctatcgctcggaaacgtatttaagtatatccacttagcagattaccggcgagtcgtacatttgccacgatggctacgatggctacgatggctaccgactcaatcatcttccacgggccgacccgtatggagcgcatgaaccccgaagacttcgagacagcttcgattcgctctgccgcaccgtcttatacttccgaggcaccttcgtaccatacactgccaccgaacgagtcagtcccagcctacacgccaccagccacaacaacaaacaacacagtagcaccacgacgccagatttcatccatgattccaccctcggtagcaccacgatcgacattcgccccaggtgccggtctgccacccatcccacggcgaacggagagcccagtgctcccatcactcgatcgattccgcatcccctcctggtcctcagtgggcgcaggcaaccctcaagcccggcactaccagagcgtcgcgaaccggcgtgtggccgcggcttcggcgtcgaactcgacgctcaacgtagagggtgcgttacgcgccgccatggaccgtgtgagcgctgctaacgcggatgcgggccaggaggacgcagacgatggacgcattcgtccgctcgaagacccttatctcgttggtgaggaggccgcggcgcggaaccgcaacgcgaggctcgcgaagttgaatggtgatgagattctgatccgcgaggatcggcggtgggattggtggcatgcccaaatggcgcacatgcaacagcgcgaagcaagctggaacgcattccgctccaacatggagaataaccgcgggcgcagattccgcttcggtcgatgaacggctagttcatcctttcccttgaccattaccatctccccacctcaactacgctgcatctttccggcgtatctggcattctctcccctcatttgtgataattatggttccacctcatagcatcgacggatctctgattttgggagccaatttggtttcttctcctttgcactggtttgacgtccatagaatgagatctttttttctaacgacatttcatgaggatatgtggatatgaaatagtagtggtggacgttaaagcagtcgggcgtgcatgggagtgatatagtacttagctatactagtagcactgagattgaagaaatctaacgcactctactatactttatgtggcatctcattggtcctaggcaaccagctagcttgagtccgcgggatatcagtgagatcgaatagcacctaatcaacccgtgctagaaattgtacgatatacctggtcctcttaccaaaaccttcgataatattggctatatgtgcattgagtccggatctattacaacaacgagctatttagactatgctgcgcctgtgatttcgccgtctgtccatgactcttacagtcagtccgtccttagtgctatatttattcccgtaaacgccacgaaaatgcagaaccaaagcagctcaactattgcgtattgtacactctttggacctcgtcgccctattccttcctcgcagtatcttctcgcatattgctctttaggctttaaccctcttcgattcaagcgatagttatctttggttttagttgacggtcgtggtatggtgatcatcccttgctctttgtgttgaggataagcgcaacgatgagactatggatttcgttagctgctttactccactgcatgatcatgtgtatcaggttgggctttagagaggtcatatcgtacccgtagagacccaagacttcgccgaaaatgagaatcagaaccatgccgacgaatactctagactgctccatgaaggcgcgcacgcccttgtcgccgacgatgccgatgcagtatccagcagcgagacccgtaagaccgactgagagaccgcagcttaggtgcatgaatccgctattatcttgttagtatgctcttatgaattt

SEQ ID NO: 31981 - DNA, 495 bp, Muscodor strobelii
  misc_feature: SGI cDNA ID NO. 571015
  misc_feature: Encodes the peptide sequence at SEQ ID NO 31982
atggacgagtcggagctggcgcctaagttcgcgcctttcataggcatgggcggcatagctgctgcgatgatcttcggaagtatcggagctgcttatggcactgccaagtccggaataggtattgctggtgtgggaacattcagacctgacctgattatgaagtgtctcatccccgtcgtcatgtccggtatcatcgccgtctactccctcgtcatcgccgtcctgatcgccgaagacatgcggcctcccggaaacgagggacaaacttacagcttgttcaacggattcatgcacctaagctgcggtctctcagtcggtcttacgggtctcgctgctggatactgcatcggcatcgtcggcgacaagggcgtgcgcgccttcatggagcagtctagagtattcgtcggcatggttctgattctcattttcggcgaagtcttgggtctctacggtctcatcgttgcgcttatcctcaacacaaagagcaagggatga

SEQ ID NO: 31982 - protein, 164 aa, Muscodor strobelii
  misc_feature: SGI Peptide ID NO. 571015
  misc_feature (96)..(161): Pfam Id: PF00137 Pfam Desc: ATP synthase subunit C
  misc_feature (11)..(79): Pfam Id: PF00137 Pfam Desc: ATP synthase subunit C
  misc_feature (1)..(164): NCBI GI: 85074879 Blast Desc: vacuolar ATP synthase 16 kDa proteolipid subunit 2 [Neurospora crassa OR74A] gi|74626388|sp|Q9Y874.2|VATL2_NEUCR RecName: Full=V-type proton ATPase 16 kDa proteolipid subunit 2;
  misc_feature (1)..(164): NCBI GI: 116193309 Blast Desc: conserved [Chaetomium globosum CBS 148.51] gi|88182285|gb|EAQ89753.1| conserved [Chaetomium globosum CBS 148.51]
  misc_feature (1)..(164): NCBI GI: 171684453 Blast Desc: protein product [Podospora anserina] gi|170942187|emb|CAP67839.1| protein product [Podospora anserina]
  misc_feature (1)..(164): NCBI GI: 256733995 Blast Desc: [Nectria haematococca mpVI 77-13-4]
  misc_feature (1)..(164): NCBI GI: 46128391 Blast Desc: FG08573.1 [Gibberella zeae PH-1]
  misc_feature (2)..(163): NCBI GI: 39971197 Blast Desc: MGG_03065 [Magnaporthe grisea 70-15] gi|149210787|ref|XP_001522768.1| MGCH7_ch7g866 [Magnaporthe grisea 70-15] gi|86196821|gb|EAQ71459.1| MGCH7_ch7g866 grisea
  misc_feature (1)..(162): NCBI GI: 261202042 Blast Desc: vacuolar ATPase proteolipid subunit C [Ajellomyces dermatitidis SLH14081] gi|239590332|gb|EEQ72913.1| vacuolar ATPase proteolipid subunit C [Ajellomyces dermatitidis SLH14081]
  misc_feature (1)..(163): NCBI GI: 121713168 Blast Desc: vacuolar ATPase proteolipid subunit c, [Aspergillus clavatus NRRL 1] gi|119402348|gb|EAW12769.1| vacuolar ATPase proteolipid subunit c, [Aspergillus clavatus NRRL 1]
  misc_feature (1)..(163): NCBI GI: 156058336 Blast Desc: SS1G_03179 [Sclerotinia sclerotiorum 1980] gi|154700967|gb|EDO00706.1| SS1G_03179 [Sclerotinia sclerotiorum 1980]
  misc_feature (1)..(162): NCBI GI: 226277430 Blast Desc: PAAG_04049 [Paracoccidioides brasiliensis Pb01]
MDESELAPKFAPFIGMGGIAAAMIFGSIGAAYGTAKSGIGIAGVGTFRPDLIMKCLIPVVMSGIIAVYSLVIAVLIAEDMRPPGNEGQTYSLFNGFMHLSCGLSVGLTGLAAGYCIGIVGDKGVRAFMEQSRVFVGMVLILIFGEVLGLYGLIVALILNTKSKG

SEQ ID NO: 31983 - DNA, 3046 bp, Muscodor strobelii
  misc_feature: SGI EST ID NO. CUFF.76131.2
  misc_feature: Variant of the nucleotide sequence at SEQ ID NO 31981
gagaatattacgtaatgcacgtcacgtgcaccaagcttcagctctcgacccgcagccccctgccggcgaagctggaggcagtcactttagcttcgctcgacatcatcagatatcatctcgactccgcgaacgcggcatacgacagccacttgacaatcatcgcccacccgtcaaaataaaccttcgcattcttcgtagaggacaactcatacaatcatggacgagtcggagctggcgcctaagttcgcgcctttcataggcatgggcggcatagctgctgcgatgatcttcggaagtatcggagctgcttatggcactgccaagtccggaataggtattgctggtgtgggaacattcagacctgacctgattatgaagtgtctcatccccgtcgtcatgtccggtatcatcgccgtctactccctcgtcatcgccgtcctgatcgccgaagacatgcggcctcccggaaacgagggacaaacttacagcttgttcaacggattcatgcacctaagctgcggtctctcagtcggtcttacgggtctcgctgctggatactgcatcggcatcgtcggcgacaagggcgtgcgcgccttcatggagcagtctagagtattcgtcggcatggttctgattctcattttcggcgaagtcttgggtctctacggtctcatcgttgcgcttatcctcaacacaaagagcaagggatgatcaccataccacgaccgtcaactaaaaccaaagataactatcgcttgaatcgaagagggttaaagcctaaagagcaatatgcgagaagatactgcgaggaaggaatagggcgacgaggtccaaagagtgtacaatacgcaatagttgagctgctttggttctgcattttcgtggcgtttacgggaataaatatagcactaaggacggactgactgtaagagtcatggacagacggcgaaatcacaggcgcagcatagtctaaatagctcgttgttgtaatagatccggactcaatgcacatatagccaatattatcgaaggttttggtaagaggaccaggtatatcgtacaatttctagcacgggttgattaggtgctattcgatctcactgatatcccgcggactcaagctagctggttgcctaggaccaatgagatgccacataaagtatagtagagtgcgttagatttcttcaatctcagtgctactagtatagctaagtactatatcactcccatgcacgcccgactgctttaacgtccaccactactatttcatatccacatatcctcatgaaatgtcgttagaaaaaaagatctcattctatggacgtcaaaccagtgcaaaggagaagaaaccaaattggctcccaaaatcagagatccgtcgatgctatgaggtggaaccataattatcacaaatgaggggagagaatgccagatacgccggaaagatgcagcgtagttgaggtggggagatggtaatggtcaagggaaaggatgaactagccgttcatcgaccgaagcggaatctgcgcccgcggttattctccatgttggagcggaatgcgttccagcttgcttcgcgctgttgcatgtgcgccatttgggctgttgtgttatcgtcagcttcatgtacattagtatagatcgagaacgaagactaaccatgccaccaatcccaccgccgatcctcgcggatcagaatctcatcaccattcaacttcgcgagcctcgcgttgcggttccgcgccgcggcctcctcaccaacgagataagggtcttcgagcggacgaatgcgtccatcgtctgcgtcctcctggcccgcatccgcgttagcagcgctcacacggtccatggcggcgcgtaacgcaccctctacgttgagcgtcgagttcgacgccgaagccgcggccacacgccggttcgcgacgctctggtagtgccgggcttgagggttgcctgcgcccactgaggaccaggaggggatgcggaatcgatcgagtgatgggagcactgggctctccgttcgccgtgggatgggtggcagaccggcacctggggcgaatgtcgatcgtggtgctaccgagggtggaatcatggatgaaatctggcgtcgtggtgctactgtgttgtttgttgttgtggctggtggcgtgtaggctgggactgactcgttcggtggcagtgtatggtacgaaggtgcctcggaagctgcagtcgtgttagttattatcattttattcatgcattgcttgaccggtagacagcaagaagataaaccttactataagacggtgcggcagagcgaatcgaagctgtctcgaagtcttcggggttcatgcgctccatacgggtcggcccgtggaagatgattgagtcggtagccatcgtagccatcgtagccatcgtggcaaatgtacgactcgccggtaatctgctaagtggatatacttaaatacgtttccgagcgataggaaacagaacagtgtctgttcgagaaggcttctcagtacgtcacgattactgcagacgtgaatatatcctattcactttaggtctgcttcagagtgtaagatgagccgtgaggctatatgactggtctgaaagttggtagaaatcaggcaacgtcgggtaatgtggtttttggagtagctcaaccgagcttaagtgacaccagtgttccaattaactccaacgttaattgaaacccaatgcgatacgcgcgcagaaacgcactagaagccgtcgaaaagaaggtagactgttcggacggcgacaacttctccaatactagtgaaggcggtacatgtacgctgaagtgaatgatagtgtcacgttgaccctcaaagcgaccctgagctaccacaccggcgctcgtgaagagaggtagaggcgtggtagagataggcagatccgcgtctaggagatatggacagcttttgaaaagtgtccacgtgaggctcgttgaaggaagtgtgtatggtagagcctaagagggtgtggtacttcttaatggatggtgggggaacgatgggataggacgaggagaaag

SEQ ID NO: 31984 - DNA, 3678 bp, Muscodor strobelii
  misc_feature: SGI cDNA ID NO. 571016
  misc_feature: Reduced expression when VOC is produced
  misc_feature: Encodes the peptide sequence at SEQ ID NO 31985
atgaccagctcctcctcctcccccatgatgccgccgcccgaccaccagcagcagcagcgcacccagaccatgtcttccatgtcctccatgtcctccatgtcctccatgtcacaagccggcggaggcggccaccccgacatgcagcgccgcgctcctccgcggccacagcgccccggcggctacgaggatggcacacccaacgttcggacccggacaatggacagcagcatggccaatggctactaccagagccagaggaacccctcgggggggtatccgtcgcagatgcgagacccttatgccagggggccgccgcccggtccgaaccagagaccattcccaggtgctccatcgcaaggcccgccgcggctcgactcgagagggcctccgataccccaaggctatcctccccggaatcccgctcctaggtatcaccagggtcctccgccgcagtcaggtggtgcatttcgggatgacccctatcggtctcagtctctggcgaatacaccacgtcagcccatgtatcagccgccacccggctcatatcaaaatccccagcacaatttccgacatgcgccgacccctaatcatggtcccatgtcgagtactacggcacaagggagaatcgttcctggacgaccagagcgttccgagcaggcggatgatcgttccatgtcgatgacggggtatccacctgaccgcagctcgcaccagacaatgagcggcagggtgattcctaatcgcatgagggcgccgtcaaacgagatgcagcagccgttcctcaataacaacgccgggccgaacgggaacggatatcatccgtacgctgccacgccgggtagcgctacgagaactatgagcatggcgtcttcaaatactgtcgttacggatcacggccggactatgagtatggccagtaccatcgttccagagacgtccgagcaagcaaggcaacagcttgttcacaggccatcgatcagtgcaaaatcgatcgacggtgaacgacctcccactgccaagatacggtcgccaattgtatatcctgcccttctctctcgcgtagctgaatgtttccgccagaagattatcaccggcgagcgcaccaagaacgaattgacgtacaaaaatgcttttagcggttcagaagcggtagatgtgctttcgtacatcatcagaacgacggatagaaatttggcgttgctactgggtcgggcacttgacgcgcagaaattcttccacgatgtcacgtacgagcaccgcctgcgtgactctacctcggagatgtaccagttcagagagacgctgatggacgagcctgaagagaagccggctgtcaatggtgtattcgtcctactgtcggaatgctactcgcccacttgtacgagggatcaactatgctactctattgcttgcccaagaagactggaacaagtctctcgcctcaatctgaaaccacaggttggcttgaagaaggaccaggatgctatactgaacgacgacattgaccagactgacgagcagaaactctggatcaacactgttcccaaggagattgccgaaagtgttagcgatagggagaaaaagagacaagaagtcatatctgaaatctgctatactgagagagatttcgtcaaagatctggaataccttcgagacttctggattctacccctgaggtccaagggttctcctatacctgcgcaaaggagagaacgagtcgtccaaaatatatttagcaatgtcattgaccacccaagcattcactcggtaagctccagatttgcaagagcgttgacagagcgacaacaaagacatcctgtggttaagaatatcggcgacatcttcctggaaatcgtaccccaattcgagccattcattctttacggctccaagcagctggaagcaaaattcgaattcgagaacgaacgttccgtcaacaactatttctccaaattcgtcgatgagattgagcggagaaaggagtccaggaagctggaattgaacggttacctcactaaacctaccactcgtctagcgcgttaccctttgctgctagaaaacgtactgaaatacaccgaagaaggagagtccgacaaggaagatataccaaaagtcttggtcatgatcagagatttgctgagccgcgttaatgcggaatccggaaaggccgagaatcgattcaatctgcggcgtctccacgagcagctcaaatatcgcaacgtgagcgatagagtcgatttgaaactaacggatgacggacgtgaactagttttcaagactcaactgaagaaaacgcccaccgatccgactgatatcaccgcctttttgtttgaccatgctgttttgctagtaaggattaaacaagttggcaccaaagaagacgtaaaggcttatcgaaggcctataccattggagttactgtctatcaaggaaatggaagaagtcattcctcaatctggagtcaaacgcgcctcgtcaaatttgcctttccggggaaacaacagtgataaaaaacttgctgaaggctggcccatcactttccgccaccttggcagaaactattatgagcaagtactgtatgcttctaaccaggcagctagacaaaagtggctcgagttcatcgacaaggctcaggagcgacttcgtggccgcgccgacttcttcaacgtcaatacggtgtctatgaatttcttccaggctgggaacttggtcaatgccgtcactccatatgatggtggccggaaattgatctacggaaccgaccacggcatttatgtgtcggatcgcaaagccaaggatcagccgcccaagcgcgtcatcgaagcccagcatgtcacacaagtggatgttctggaagaatacggccttctactagtactgaccaacaaatcacttgtgacatattctctatcggcgttagatcccaatgaaccggccctatcgaaacggcccaagaagattcagggcaattgcacattcttcaagacgggcatttgtttgggtaggcatttggtgtgttgcgtaaaatcgagcgcactctcgaccacgatcaaagtttacgaacccaacgactctatgagcaagggcaagaagcagaagggattcgggaagatgttcaatgctggccaagacgagctcaaggccttcaaagagttctacatcccgaccgaatcctcgtctgttcacttcctcaagagcaagctttgcgtggcatgtgctagaggcttcgaggtcgtctcgttagaaacgctggagacacaatcattgttggatcaggctgatacgtcactggatttcgtcgctaggaaagaaggagtcaagccaatccacatcgaacgcttgaatggcgagttcttactgaattataccgacttctcgttcttcgtcaacagaaatggctggagggcgagaccggagtggcgcatcgactgggagggtacgccgcagtcttttgcgctgtcgtatccttggattcttgcttttgagcccaattttatcgagctgaggaatatcgagaacggtgctatccacattgttccgcataagaatattaggttgctgcatagcagcacgcacgagatcttatttgcatatgaagatgaaggcggccacgacgtggtcgctacgatcgatttctggaagagtaatcgaaagtccgagatgccggctatacaatga

SEQ ID NO: 31985 - protein, 1225 aa, Muscodor strobelii
  misc_feature: SGI Peptide ID NO. 571016
  misc_feature (903)..(1194): Pfam Id: PF00780 Pfam Desc: CNH domain
  misc_feature (358)..(431): Pfam Id: PF00610 Pfam Desc: Domain found in Dishevelled, Egl-10, and Pleckstrin
  misc_feature (532)..(718): Pfam Id: PF00621 Pfam Desc: RhoGEF domain
  misc_feature (20)..(1221): NCBI GI: 46128389 Blast Desc: FG08572.1 [Gibberella zeae PH-1]
  misc_feature (1)..(1224): NCBI GI: 116193307 Blast Desc: conserved [Chaetomium globosum CBS 148.51] gi|88182284|gb|EAQ89752.1| conserved [Chaetomium globosum CBS 148.51]
  misc_feature (111)..(1222): NCBI GI: 145609674 Blast Desc: MGG_03064 [Magnaporthe grisea 70-15] gi|145017084|gb|EDK01447.1| MGG_03064 [Magnaporthe grisea 70-15]
  misc_feature (1)..(1218): NCBI GI: 164428502 Blast Desc: NCU00668 [Neurospora crassa OR74A] gi|157072171|gb|EAA36572.2| NCU00668 [Neurospora crassa OR74A]
  misc_feature (185)..(1225): NCBI GI: 261353132 Blast Desc: Rho1 guanine nucleotide exchange factor 1 [Verticillium albo-atrum VaMs.102]
  misc_feature (136)..(1223): NCBI GI: 171684455 Blast Desc: protein product [Podospora anserina] gi|170942188|emb|CAP67840.1| protein product [Podospora anserina]
  misc_feature (1)..(1224): NCBI GI: 156058334 Blast Desc: SS1G_03178 [Sclerotinia sclerotiorum 1980] gi|154700966|gb|EDO00705.1| SS1G_03178 [Sclerotinia sclerotiorum 1980]
  misc_feature (1)..(1220): NCBI GI: 154309260 Blast Desc: BC1G_07524 [Botryotinia fuckeliana B05.10] gi|150852348|gb|EDN27540.1| BC1G_07524 [Botryotinia fuckeliana B05.10]
  misc_feature (124)..(1222): NCBI GI: 149210785 Blast Desc: MGCH7_ch7g865 [Magnaporthe grisea 70-15] gi|86196820|gb|EAQ71458.1| MGCH7_ch7g865 [Magnaporthe grisea 70-15]
  misc_feature (11)..(1213): NCBI GI: 115398730 Blast Desc: ATEG_05776 [Aspergillus terreus NIH2624] gi|114191837|gb|EAU33537.1| ATEG_05776 [Aspergillus terreus NIH2624]
  misc_feature: Useful for introducing or modulating the production of volatile compounds
MTSSSSSPMMPPPDHQQQQRTQTMSSMSSMSSMSSMSQAGGGGHPDMQRRAPPRPQRPGGYEDGTPNVRTRTMDSSMANGYYQSQRNPSGGYPSQMRDPYARGPPPGPNQRPFPGAPSQGPPRLDSRGPPIPQGYPPRNPAPRYHQGPPPQSGGAFRDDPYRSQSLANTPRQPMYQPPPGSYQNPQHNFRHAPTPNHGPMSSTTAQGRIVPGRPERSEQADDRSMSMTGYPPDRSSHQTMSGRVIPNRMRAPSNEMQQPFLNNNAGPNGNGYHPYAATPGSATRTMSMASSNTVVTDHGRTMSMASTIVPETSEQARQQLVHRPSISAKSIDGERPPTAKIRSPIVYPALLSRVAECFRQKIITGERTKNELTYKNAFSGSEAVDVLSYIIRTTDRNLALLLGRALDAQKFFHDVTYEHRLRDSTSEMYQFRETLMDEPEEKPAVNGVFVLLSECYSPTCTRDQLCYSIACPRRLEQVSRLNLKPQVGLKKDQDAILNDDIDQTDEQKLWINTVPKEIAESVSDREKKRQEVISEICYTERDFVKDLEYLRDFWILPLRSKGSPIPAQRRERVVQNIFSNVIDHPSIHSVSSRFARALTERQQRHPVVKNIGDIFLEIVPQFEPFILYGSKQLEAKFEFENERSVNNYFSKFVDEIERRKESRKLELNGYLTKPTTRLARYPLLLENVLKYTEEGESDKEDIPKVLVMIRDLLSRVNAESGKAENRFNLRRLHEQLKYRNVSDRVDLKLTDDGRELVFKTQLKKTPTDPTDITAFLFDHAVLLVRIKQVGTKEDVKAYRRPIPLELLSIKEMEEVIPQSGVKRASSNLPFRGNNSDKKLAEGWPITFRHLGRNYYEQVLYASNQAARQKWLEFIDKAQERLRGRADFFNVNTVSMNFFQAGNLVNAVTPYDGGRKLIYGTDHGIYVSDRKAKDQPPKRVIEAQHVTQVDVLEEYGLLLVLTNKSLVTYSLSALDPNEPALSKRPKKIQGNCTFFKTGICLGRHLVCCVKSSALSTTIKVYEPNDSMSKGKKQKGFGKMFNAGQDELKAFKEFYIPTESSSVHFLKSKLCVACARGFEVVSLETLETQSLLDQADTSLDFVARKEGVKPIHIERLNGEFLLNYTDFSFFVNRNGWRARPEWRIDWEGTPQSFALSYPWILAFEPNFIELRNIENGAIHIVPHKNIRLLHSSTHEILFAYEDEGGHDVVATIDFWKSNRKSEMPAIQ

SEQ ID NO: 31986 - DNA, 5301 bp, Muscodor strobelii
  misc_feature: SGI EST ID NO. CUFF.76037.1
  misc_feature: Variant of the nucleotide sequence at SEQ ID NO 31984
gatatcggtacctctgacgaacctctgcggcaatgaatatagcgtgcaacaatgtgcaagaattaccgcgatttaccgtgagcattggtggcctcaacagcaagcgggaccgactatactcgtgactacgtccccattactgtatgtttaagctgggacaggcagttgggacgcgacgctgcaaggttgatggatgttgaataggagcagccgagcagtcggagagttatgtatgaagtatgtagaagcatgtagtcattttcaatgaatccctgaaatgatgttacaaaagccgctaggcctatcctgaccaggaagtgcatccatcctgccaatgcctgccaatgctcaaatgcctatcagcgcctcaccttccgaccaaagtgtcaaatgctaaccactttccttgggtctggtatcgtcgaacagcggcccgacaactcgccaattcctttgctgcatcgtcgcccgcacgccctaccccgaccacaaccgcctctgcgagcaaattcgacccagcccgtgtctctggccggcactatcgggaaggggggcttcgcagaaagttgggaatttaggtaaggtaggtagacttaagggttaagggagacggcgacagagacggagatatctcactgcttcacggctaccgagatacctgcctgtgcctgcctgcctcgccccaacccacacacgggctttttcggaggattgtttgattttatctgcatttaatcggagcctcgctccttttctcctactggctggtcctctcccgccattgcactgcacctctgcagcccttcgacgacaactcgcacacgcgcatcgacgacgacgacaatcctcttcttcttctaccgcccgagccggtggtctcctgtctaggcttgcggccgcctaggttatgcacgagacgccattatggctgattaccagtacgaccaacgccgatacggtccgccgtcgggcacccagcgcgatgccgccttctccaacatcttcggctcccacccgcccccggacgcacaggcaccatgaccagctcctcctcctcccccatgatgccgccgcccgaccaccagcagcagcagcgcacccagaccatgtcttccatgtcctccatgtcctccatgtcctccatgtcacaagccggcggaggcggccaccccgacatgcagcgccgcgctcctccgcggccacagcgccccggcggctacgaggatggcacacccaacgttcggacccggacaatggacagcagcatggccaatggctactaccagagccagaggaacccctcgggggggtatccgtcgcagatgcgagacccttatgccagggggccgccgcccggtccgaaccagagaccattcccaggtgctccatcgcaaggcccgccgcggctcgactcgagagggcctccgataccccaaggctatcctccccggaatcccgctcctaggtatcaccagggtcctccgccgcagtcaggtggtgcatttcgggatgacccctatcggtctcagtctctggcgaatacaccacgtcagcccatgtatcagccgccacccggctcatatcaaaatccccagcacaatttccgacatgcgccgacccctaatcatggtcccatgtcgagtactacggcacaagggagaatcgttcctggacgaccagagcgttccgagcaggcggatgatcgttccatgtcgatgacggggtatccacctgaccgcagctcgcaccagacaatgagcggcagggtgattcctaatcgcatgagggcgccgtcaaacgagatgcagcagccgttcctcaataacaacgccgggccgaacgggaacggatatcatccgtacgctgccacgccgggtagcgctacgagaactatgagcatggcgtcttcaaatactgtcgttacggatcacggccggactatgagtatggccagtaccatcgttccagagacgtccgagcaagcaaggcaacagcttgttcacaggccatcgatcagtgcaaaatcgatcgacggtgaacgacctcccactgccaagatacggtcgccaattgtatatcctgcccttctctctcgcgtagctgaatgtttccgccagaagattatcaccggcgagcgcaccaagaacgaattgacgtacaaaaatgcttttagcggttcagaagcggtagatgtgctttcgtacatcatcagaacgacggatagaaatttggcgttgctactgggtcgggcacttgacgcgcagaaattcttccacgatgtcacgtacgagcaccgcctgcgtgactctacctcggagatgtaccagttcagagagacgctgatggacgagcctgaagagaagccggctgtcaatggtgtattcgtcctactgtcggaatgctactcgcccacttgtacgagggatcaactatgctactctattgcttgcccaagaagactggaacaagtctctcgcctcaatctgaaaccacaggttggcttgaagaaggaccaggatgctatactgaacgacgacattgaccagactgacgagcagaaactctggatcaacactgttcccaaggagattgccgaaagtgttagcgatagggagaaaaagagacaagaagtcatatctgaaatctgctatactgagagagatttcgtcaaagatctggaataccttcgagacttctggattctacccctgaggtccaagggttctcctatacctgcgcaaaggagagaacgagtcgtccaaaatatatttagcaatgtcattgaccacccaagcattcactcggtaagctccagatttgcaagagcgttgacagagcgacaacaaagacatcctgtggttaagaatatcggcgacatcttcctggaaatcgtaccccaattcgagccattcattctttacggctccaagcagctggaagcaaaattcgaattcgagaacgaacgttccgtcaacaactatttctccaaattcgtcgatgagattgagcggagaaaggagtccaggaagctggaattgaacggttacctcactaaacctaccactcgtctagcgcgttaccctttgctgctagaaaacgtactgaaatacaccgaagaaggagagtccgacaaggaagatataccaaaagtcttggtcatgatcagagatttgctgagccgcgttaatgcggaatccggaaaggccgagaatcgattcaatctgcggcgtctccacgagcagctcaaatatcgcaacgtgagcgatagagtcgatttgaaactaacggatgacggacgtgaactagttttcaagactcaactgaagaaaacgcccaccgatccgactgatatcaccgcctttttgtttgaccatgctgttttgctagtaaggattaaacaagttggcaccaaagaagacgtaaaggcttatcgaaggcctataccattggagttactgtctatcaaggaaatggaagaagtcattcctcaatctggagtcaaacgcgcctcgtcaaatttgcctttccggggaaacaacagtgataaaaaacttgctgaaggctggcccatcactttccgccaccttggcagaaactattatgagcaagtactgtatgcttctaaccaggcagctagacaaaagtggctcgagttcatcgacaaggctcaggagcgacttcgtggccgcgccgacttcttcaacgtcaatacggtgtctatgaatttcttccaggctgggaacttggtcaatgccgtcactccatatgatggtggccggaaattgatctacggaaccgaccacggcatttatgtgtcggatcgcaaagccaaggatcagccgcccaagcgcgtcatcgaagcccagcatgtcacacaagtggatgttctggaagaatacggccttctactagtactgaccaacaaatcacttgtgacatattctctatcggcgttagatcccaatgaaccggccctatcgaaacggcccaagaagattcagggcaattgcacattcttcaagacgggcatttgtttgggtaggcatttggtgtgttgcgtaaaatcgagcgcactctcgaccacgatcaaagtttacgaacccaacgactctatgagcaagggcaagaagcagaagggattcgggaagatgttcaatgctggccaagacgagctcaaggccttcaaagagttctacatcccgaccgaatcctcgtctgttcacttcctcaagagcaagctttgcgtggcatgtgctagaggcttcgaggtcgtctcgttagaaacgctggagacacaatcattgttggatcaggctgatacgtcactggatttcgtcgctaggaaagaaggagtcaagccaatccacatcgaacgcttgaatggcgagttcttactgaattataccgacttctcgttcttcgtcaacagaaatggctggagggcgagaccggagtggcgcatcgactgggagggtacgccgcagtcttttgcgctgtcgtatccttggattcttgcttttgagcccaattttatcgagctgaggaatatcgagaacggtgctatccacattgttccgcataagaatattaggttgctgcatagcagcacgcacgagatcttatttgcatatgaagatgaaggcggccacgacgtggtcgctacgatcgatttctggaagagtaatcgaaagtccgagatgccggctatacaatgaagaaagcagagcggagctgagcaaacttctattagcgatacgagctagctgagaggtccctttttaatcacatgtaataatcacattgcctgcctacttacgtacttacatgttgaaggaggaagaggagatggagtggtattgagagttggtgggcatgcacacgaagcgaagtgaggcaaaataaaaatcgatacccttgtagtaccagatatatactggataggcttttgttgtgctgcccagatcgtctttaagtgctgtgagtgtgagataggaacgaggggctggagtaaggcaatgcgctgaaactcgaggacatgagtgaagaaagcaggcgtatcgctgctggtcgtgcgatggcaagcgggagatagcgaggtgacagagaataagagggagagcaagcgagagtagatacatatggattctagacttgtacgaactgtctgctatataacattgagcggcctgcgtacctacctacctcatacatgagatagtattgtaattcgaagatgaagcgctattgcatcgttgaacctttttgtcctcattctgtagttggtaaagtacgcgatatact

SEQ ID NO: 31987 - DNA, 1464 bp, Muscodor strobelii
  misc_feature: SGI cDNA ID NO. 571017
  misc_feature: Reduced expression when VOC is produced
  misc_feature: Encodes the peptide sequence at SEQ ID NO 31988
atgaggtcgctggtgtccctcgccctcgtggccatggccgccgtcgtccatgcgatcagctccagtggcccccgcctgctggtcatcatggacgatgttgccgacaaggccagctactctcagttcttgggtgatctggaaggcagaggctacaagctctcctacgagacccccaagagcgaatccctcaacctcatccacctgggagagagatcatacgaccacatcctgctcttccccatcaagtccaaaggtctcggcccccagttgacacccaacatcctgctcgacttcctcaacctcgacggcaacatccttctcaccctctccggctcccagcccgtacccaccagcatcgtctccctgctcctcgaactcgacatcgagctccccgccgatcgcaatggcttggtcgtcgatcacttcaactatgcagtggatgcgtctccagatgaccacgatgttattgttctgcctgcattacaatcccttgaagctggtgatctgggttttggtgcagtggatctacttcaccgacgatctggacaagaagttcgaggagcgcgaggcggagagacgccaggaggaagccgaggcggggatgagacgtccgcagtcctcgcattcccgcgcggtgtcgcgcagctcctcggatccggcccgcttgtccgtcctatacttcgaggcccacccaccgcgtacagctacaaccccaaatcccgagacgagcctctggacgatctattcggcagtgggccacagctctccctcgtctccgccctccaggcccgcaactccgcgcgattcaccgtctccggctccgcagacatgctgagcgacaagtggctcgacgccaccgtcaagaaggttggtgagaagcaagctgtcaagaccgccaaccgcgactttgccaagcaattatctggctggaccttcaaggagacgggtgttctgcgcgtcaacaacgttgagcaccgcttgaacgagcctggcatgagcaacgagaccaaccctaagctttaccgtattaagaacgacgtcacatactcgatttccttgtccgagtattcatgggacaaatacattcccttcatcgtccccgagggcgacgaactacagctcgagttcagcatgctttcgcctttccatcgccttaacctcaagccaacgatctcaacggaagacagcacgacgtattccgtctcgttcaagctaccggatcagcacggcatcttcaatttcctagtcaactacaagagacctttctttagcaacgtattcgagaagaacactgtttccgtccgacactttgcgcacgacgaatggccccgaagtttcgtcatcagtgccgcttggccctggatcgctggtattggagctactgtcgctggatggcttggtttctgcgctatttggttgtactccgcaccgcctaagacaaaagagagcaagaagacgaggtga

SEQ ID NO: 31988 - protein, 487 aa, Muscodor strobelii
  misc_feature: SGI Peptide ID NO. 571017
  misc_feature (5)..(487): Pfam Id: PF03345 Pfam Desc: Dolichyl-diphosphooligosaccharide-protein glycosyltransferase 48kD subunit
  misc_feature (211)..(487): Pfam Id: PF03345 Pfam Desc: Dolichyl-diphosphooligosaccharide-protein glycosyltransferase 48kD subunit
  misc_feature (5)..(158): Pfam Id: PF03345 Pfam Desc: Dolichyl-diphosphooligosaccharide-protein glycosyltransferase 48kD subunit
  misc_feature (13)..(487): NCBI GI: 39970709 Blast Desc: MGG_02821 [Magnaporthe grisea 70-15] gi|149210197|ref|XP_001522473.1| MGCH7_ch7g576 [Magnaporthe grisea 70-15] gi|86196531|gb|EAQ71169.1| MGCH7_ch7g576 grisea
  misc_feature (1)..(477): NCBI GI: 85074883 Blast Desc: NCU00669 [Neurospora crassa OR74A] gi|28927622|gb|EAA36573.1| NCU00669 [Neurospora crassa OR74A]
  misc_feature (1)..(484): NCBI GI: 156058592 Blast Desc: SS1G_03308 [Sclerotinia sclerotiorum 1980] gi|154701095|gb|EDO00834.1| SS1G_03308 [Sclerotinia sclerotiorum 1980]
  misc_feature (13)..(486): NCBI GI: 171680105 Blast Desc: protein product [Podospora anserina] gi|170939679|emb|CAP64905.1| protein product [Podospora anserina]
  misc_feature (18)..(487): NCBI GI: 256731955 Blast Desc: NECHADRAFT_61480 [Nectria haematococca mpVI 77-13-4]
  misc_feature (16)..(487): NCBI GI: 261353661 Blast Desc: dolichyl-di-phosphooligosaccharide-protein glycotransferase [Verticillium albo-atrum VaMs.102]
  misc_feature (14)..(487): NCBI GI: 154285660 Blast Desc: dolichyl-di-phosphooligosaccharide-protein glycotransferase [Ajellomyces capsulatus NAm1] gi|150407266|gb|EDN02807.1| glycotransferase [Ajellomyces NAm1]
  misc_feature (1)..(487): NCBI GI: 225554491 Blast Desc: dolichyl-diphosphooligosaccharide-protein glycosyltransferase [Ajellomyces capsulatus G186AR]
  misc_feature (14)..(487): NCBI GI: 240277798 Blast Desc: dolichyl-diphosphooligosaccharide-protein glycosyltransferase [Ajellomyces capsulatus H143]
  misc_feature (14)..(487): NCBI GI: 226277491 Blast Desc: dolichyl-di-phosphooligosaccharide-protein glycotransferase [Paracoccidioides brasiliensis Pb01]
  misc_feature (35)..(479): SWISSPROT Homolog: EC 2.4.1.119 Dolichyl-diphosphooligosaccharide--protein glycotransferase
  misc_feature: Useful for introducing or modulating the production of volatile compounds
MRSLVSLALVAMAAVVHAISSSGPRLLVIMDDVADKASYSQFLGDLEGRGYKLSYETPKSESLNLIHLGERSYDHILLFPIKSKGLGPQLTPNILLDFLNLDGNILLTLSGSQPVPTSIVSLLLELDIELPADRNGLVVDHFNYAVDASPDDHDVIVLPALQSLEAGDLGFGAVDLLHRRSGQEVRGARGGETPGGSRGGDETSAVLAFPRGVAQLLGSGPLVRPILRGPPTAYSYNPKSRDEPLDDLFGSGPQLSLVSALQARNSARFTVSGSADMLSDKWLDATVKKVGEKQAVKTANRDFAKQLSGWTFKETGVLRVNNVEHRLNEPGMSNETNPKLYRIKNDVTYSISLSEYSWDKYIPFIVPEGDELQLEFSMLSPFHRLNLKPTISTEDSTTYSVSFKLPDQHGIFNFLVNYKRPFFSNVFEKNTVSVRHFAHDEWPRSFVISAAWPWIAGIGATVAGWLGFCAIWLYSAPPKTKESKKTR

SEQ ID NO: 31989 - DNA, 1942 bp, Muscodor strobelii
  misc_feature: SGI EST ID NO. CUFF.75765.1
  misc_feature: Variant of the nucleotide sequence at SEQ ID NO 31987
aacgggttcactctcgccaataatccaacatcggcgaaccaccaccactgcttgatgttcgccgtagcacgtcttcccacctccactcccaagcgcagctagtctttatatgctgtcgccgaccttctttccttctgctctttgcctgtttctttaattgatcgcttttatagaccatcactcataagatcgccgtcaccatgaggtcgctggtgtccctcgccctcgtggccatggccgccgtcgtccatgcgatcagctccagtggcccccgcctgctggtcatcatggacgatgttgccgacaaggccagctactctcagttcttgggtgatctggaaggcagaggctacaagctctcctacgagacccccaagagcgaatccctcaacctcatccacctgggagagagatcatacgaccacatcctgctcttccccatcaagtccaaaggtctcggcccccagttgacacccaacatcctgctcgacttcctcaacctcgacggcaacatccttctcaccctctccggctcccagcccgtacccaccagcatcgtctccctgctcctcgaactcgacatcgagctccccgccgatcgcaatggcttggtcgtcgatcacttcaactatgcagtggatgcgtctccagatgaccacgatgttattgttctgcctgcattacaatcccttgaagctggtgatctgggttttggtgcagtggatctacttcaccgacgatctggacaagaagttcgaggagcgcgaggcggagagacgccaggaggaagccgaggcggggatgagacgtccgcagtcctcgcattcccgcgcggtgtcgcgcagctcctcggatccggcccgcttgtccgtcctatacttcgaggcccacccaccgcgtacagctacaaccccaaatcccgagacgagcctctggacgatctattcggcagtgggccacagctctccctcgtctccgccctccaggcccgcaactccgcgcgattcaccgtctccggctccgcagacatgctgagcgacaagtggctcgacgccaccgtcaagaaggttggtgagaagcaagctgtcaagaccgccaaccgcgactttgccaagcaattatctggctggaccttcaaggagacgggtgttctgcgcgtcaacaacgttgagcaccgcttgaacgagcctggcatgagcaacgagaccaaccctaagctttaccgtattaagaacgacgtcacatactcgatttccttgtccgagtattcatgggacaaatacattcccttcatcgtccccgagggcgacgaactacagctcgagttcagcatgctttcgcctttccatcgccttaacctcaagccaacgatctcaacggaagacagcacgacgtattccgtctcgttcaagctaccggatcagcacggcatcttcaatttcctagtcaactacaagagacctttctttagcaacgtattcgagaagaacactgtttccgtccgacactttgcgcacgacgaatggccccgaagtttcgtcatcagtgccgcttggccctggatcgctggtattggagctactgtcgctggatggcttggtttctgcgctatttggttgtactccgcaccgcctaagacaaaagagagcaagaagacgaggtgatgagatgaaatttgcgacttgcaggatgaagagaagaaagattcgagagacatcatgtgtaaggatggatggatggacacatgcgcgcgcaatgcgatggtttctctcgagacggtttacgaagcaatcgtgcatggtaagaaggcaacctaaggatataggtagataagtcctttacatactggctatatcggcttgagctgtagagcgaatgagtaaaagtgtttcaaatgttcaaatcagttgtctttaatcgcacgtgttgtgttgcggctgcg

SEQ ID NO: 31990 - DNA, 342 bp, Muscodor strobelii
  misc_feature: SGI cDNA ID NO. 571018
  misc_feature: Encodes the peptide sequence at SEQ ID NO 31991
atggccatcgagacagacttatcacacggtgtgcttgagccacacatcgacgtgaaccgcctggacgtttgcaccctctgtccacactctgcacggtcaattgagatgtccaacccaacaccacgcttctgggctgggcccctccgatactggcgctggtctgcccgcgagcgtcctgccttcttctggtcctgcatcattggtggcatgggccctgtcatgctcctcaccgtccctcccactctcaagaagctcggttacgagcgcgcgaagcccatccccatgacatatccgattcccacgagtcccaggaacaaacaattatctggctacgatgactga

SEQ ID NO: 31991 - protein, 113 aa, Muscodor strobelii
  misc_feature: SGI Peptide ID NO. 571018
  misc_feature (36)..(113): NCBI GI: 1171705 Blast Desc: NDUA3_NEUCR RecName: Full=NADH-ubiquinone oxidoreductase 9.5 kDa subunit; AltName: Full=Complex I-9.5kD; Short=CI-9.5; AltName: Full=Ubiquinone-binding protein reductase
  misc_feature (36)..(113): NCBI GI: 261353662 Blast Desc: NADH-ubiquinone oxidoreductase 9.5 kDa subunit [Verticillium albo-atrum VaMs.102]
  misc_feature (40)..(113): NCBI GI: 39970711 Blast Desc: MGG_02822 [Magnaporthe grisea 70-15] gi|149210199|ref|XP_001522474.1| MGCH7_ch7g577 [Magnaporthe grisea 70-15] gi|86196532|gb|EAQ71170.1| MGCH7_ch7g577 grisea
  misc_feature (40)..(113): NCBI GI: 46105124 Blast Desc: FG00190.1 [Gibberella zeae PH-1]
  misc_feature (28)..(113): NCBI GI: 156058594 Blast Desc: SS1G_03309 [Sclerotinia sclerotiorum 1980] gi|154701096|gb|EDO00835.1| SS1G_03309 [Sclerotinia sclerotiorum 1980]
  misc_feature (40)..(113): NCBI GI: 238505184 Blast Desc: NADH-ubiquinone oxidoreductase 9.5 kDa subunit, [Aspergillus flavus NRRL3357] gi|220689935|gb|EED46285.1| NADH-ubiquinone oxidoreductase 9.5 kDa subunit, [Aspergillus
  misc_feature (40)..(113): NCBI GI: 256732370 Blast Desc: [Nectria haematococca mpVI 77-13-4]
  misc_feature (40)..(113): NCBI GI: 115400317 Blast Desc: NADH-ubiquinone oxidoreductase 9.5 kDa subunit [Aspergillus terreus NIH2624] gi|114191413|gb|EAU33113.1| NADH-ubiquinone oxidoreductase 9.5 kDa subunit [Aspergillus
  misc_feature (36)..(98): NCBI GI: 171680107 Blast Desc: protein product [Podospora anserina] gi|170939680|emb|CAP64906.1| protein product [Podospora anserina]
  misc_feature (40)..(113): NCBI GI: 70998014 Blast Desc: NADH-ubiquinone oxidoreductase 9.5 kDa subunit [Aspergillus fumigatus Af293] gi|119479521|ref|XP_001259789.1| NADH-ubiquinone oxidoreductase 9.5 kDa subunit, [Neosartorya NRRL
MAIETDLSHGVLEPHIDVNRLDVCTLCPHSARSIEMSNPTPRFWAGPLRYWRWSARERPAFFWSCIIGGMGPVMLLTVPPTLKKLGYERAKPIPMTYPIPTSPRNKQLSGYDD

SEQ ID NO: 31992 - DNA, 805 bp, Muscodor strobelii
  misc_feature: SGI EST ID NO. CUFF.75629.0
  misc_feature: Variant of the nucleotide sequence at SEQ ID NO 31990
tggccatcgagacagacttatcacacggtgtgcttgagccacacatcgacgtgaaccgcctggacgtttggtattcgaagagccgcactaccaccagagcttcacttgcgacatccaagccagctctcatcacgcctgaccagcaccctctgtccacactctgcacggtcaattgagatgtccaacccaacaccacgcttctgggctgggcccctccgatactggcgctggtctgcccgcgagcgtcctgccttcttctggtcctgcatcattggtggcatgggccctgtcatgctcctcaccgtccctcccactctcaagaagctcggttacgagcgcgcgaagcccatccccatgacatatccgattcccacgagtcccaggaacaaacaattatctggctacgatgactgagcctgcattgtctgaaccgaaaccaagaaaataccctgaaggaggaggccagacggcgggatgttcaaatagcctcgcgctatctggcccttgtacatatgacgagcgaatattcaagacatagtcgatgggatgactgagctggacgctctgagtggattggggcagtttgaagaaagagtgtatcaccaccgaccaatcatagaggattgtactgtccaattctacaaatcattccagaagagacagcttttctttgttcacgctttgatattgaaagattgatgggttgctttatgtgaacaaacgctcttgaattctcacccagtgatattgtcaacatgaggctttcagtaactgtctcgcgtatcttatgtgaccagcaatatca

SEQ ID NO: 31993 - DNA, 804 bp, Muscodor strobelii
  misc_feature: SGI cDNA ID NO. 571019
  misc_feature: Encodes the peptide sequence at SEQ ID NO 31994
atgcttggcttgctcatcgaatctacgaagatcacggcgacttctaaaggtagagcgtcttccagcccgtcatgggctcttaatttcgactactgtgacgtctcgatcaccaaccaaaatcaaatagccaggggaccaggccaagccaccttgggtgggcttttgtatcaggccagcttcaatgtcaaacttcgaaaagggttggagcgggctcccgttttcgctacgcctagaatccttttctgcgacggcgcctatattgattctatctatgaggcagtgcaaattcctgaccatgactctggtaattcctttatggcgattgcgtcgttagtattcgatatcctccggagttatcgactaaggcatcagactccaatgccgcaccaattcgctaagcatgcagaagacgatccggacaatgaggctcttccattttcttcattgatggccttcttctctctgcattctccggatcatccgttcccagaagcaggaagcacggagttcttcgatctccgtttccaacaaattgctggaaagacttattttatcacaggaaaaggatatgtaggcatcgctacggctccagttcaagatggagactccctttgccttttacatgatgcttccgtctactttgtcctcagacaagtacaggctccggatgaaggaagccaggatggcgtcccggaggcggcagaaagacaccgaatagtagcgcgagcagctatgaaccaggtagggttcgatatggcatcattcgataaatcccttcctcgccgtcgtttccaaatcgtctaa

SEQ ID NO: 31994 - protein, 267 aa, Muscodor strobelii
  misc_feature: SGI Peptide ID NO. 571019
MLGLLIESTKITATSKGRASSSPSWALNFDYCDVSITNQNQIARGPGQATLGGLLYQASFNVKLRKGLERAPVFATPRILFCDGAYIDSIYEAVQIPDHDSGNSFMAIASLVFDILRSYRLRHQTPMPHQFAKHAEDDPDNEALPFSSLMAFFSLHSPDHPFPEAGSTEFFDLRFQQIAGKTYFITGKGYVGIATAPVQDGDSLCLLHDASVYFVLRQVQAPDEGSQDGVPEAAERHRIVARAAMNQVGFDMASFDKSLPRRRFQIV

SEQ ID NO: 31995 - DNA, 290 bp, Muscodor strobelii
  misc_feature: SGI EST ID NO. CUFF.75644.0
  misc_feature: Variant of the nucleotide sequence at SEQ ID NO 31993
tccagttcaagatggagactccctttgccttttacatgatgcttccgtctactttgtcctcagacaagtacaggctccggatgaaggaagccaggatggcgtcccggaggcggcagaaagacaccgaatagtagcgcgagcagctatgaaccaggtagggttcgatatggcatcattcgataaatcccttcctcgccgtcgtttccaaatcgtctaaaacaagaactattagatcgatacaaaatgatagcaaaggatagtagaaataggaaattgtggacgtatcaggc

SEQ ID NO: 31996 - DNA, 3141 bp, Muscodor strobelii
  misc_feature: SGI cDNA ID NO. 571020
  misc_feature: Elevated expression when VOC is produced
  misc_feature: Encodes the peptide sequence at SEQ ID NO 31997
atgactaccactgctcaaagcatttcggccgagggatttacggtgctacacgagaccgagacagttgaagcagatatcgtcttcatacatggcatccaaggtcacccgtatgacacgtggacacggacccgccgaaacccgaaattgaaagcagagaaacgagaaacgaagcgagagaatgacagaaacccattaaggaagctctcaaggaaattattccctcgcgctgccaaagatactccagccgagttcaacaacgagattgaagaatctagtgaaaacgatgcgactgacaggtctgacgtgtattggccgaaagactttttgagcaaggaggactggtgtcaaaccgcccgcattttgacgtacggctatgactctaaagttacgaagggctatgagaagacgaacaagaacaacttgttcagtcacgcgaagggtctgttatatgaccttcggagagagaaacctgcccggcgtcccgtcatcttcatcgtccactcgctcggcgggatcattctaaaggaagctctgcgtcggtctgagcatgcagagcaagacgggttcaaggacatagtccgtagtacgaagggcatcatatttctcggtacccctcatagggggagccctggtctggcgggtcttgcagagactgtccgacggactgttagcatgctagccatggtcgacactaactctactcttttgcgctctcttggcgctgacagtcctgagctggagctcgggcgggaatctttcccagctctatggagagcgcacaactttcaggtcaagacgtttcaggaggcttatggcatctcaggcgtgaatgtgggcccgttcaacgagaaggtcgtaccagatatatcatcgaccctcgacgacccaagggagcattcggagactatatctgccaatcacatggacatgtgccggttcgcaaagattggggatctggggtatcgaaaagtctctgcggagatcaagactatgtttgtgtcatgccagaaaggtcccagcatgacagacgatggaatggcgctcttaaggtctctttatttcgaggagatgtataaccgccaaatgaacatccgcggagcattagctcatacttgcgactggctatttcaaacgcccgaatatgtgagctggaaaggcagagtagatgtgaaaaagagtcgcggcttgttatggatcaaggggaaacccggggccggaaaatcgactctgatgaaaacagccctaagtcaggtcaaggcgaaagataacgcttcgactacatctacggcagcgtttttcttcaacgctagaggcacgcaagctctcgaaaaatccctccttgggctctatagagccctactgcaccaagtgttacagcaggatcttttggctttatcacatatttctcttgattttaagatgaaacgagcggtccagtcaagcattacgtggcacgaagaagaactccaacaatatctcgtcaatatctttgccacgtccgcctcacgccctgcagtattattcatcgatgcgatggacgaatgccgtgaagaagaggtacaaggccttgtcaagttcttcagtgacctatcaaggcaggcactgaaagccggcgcagtgctcaatgtgtgtttctcgagccgccattatcctcagatctccattgaggactgccccgaagttgtcgtggagcaccataactgggaagatatccttcgttatgtcagttcagaagcaacagactatatacttataagagatctccaagaagatatcctggaacgatcgaatagtgttttcttatgggtcgttctggtcattgccatcctgaagaagtccggccgcggaaagtcactaaaatggcttcaacagaagctcgaggccattcctggcgaactagatactctgttcaggcagctgttcaccaacatcgaagaagatgacatcattcgcatcgaacatttaatgcagattatgctgtttagcatgtacccgctgaacctggatgagctacataccgccctcgctttcagttcgagacccttcgtgactatgcaggaatggacaaattcaatagattatcttgaaacggctcaaaagaggcatgaaatgattattgaactctcaagaggcgtgctcgaacccacagcttccacaactatggggtatcaatttatccacgagacggttcgagaatttttcctctccggccagggctttcaactcctcaggcactctaaacttagtatagttggccgtgcgcataataccctcgctatggcatgtgtacgcctcatttctctagaagatgtgtggcataacgatttaaaacattcaagggcgacggacaaatcggcggagaaattccctctgttatactatgctcgacattttctgttctttcacatcgcgtcagccgaggcaaataccatctcccaagaggaacatctcagacttatcgaggaacaagacctactaaggagcatcatttctctgaacggcaaagacgcaatttctgaaggagccagcttgatgtacgcggcagctgagatgggattcatccataccgtgaagcgactgtacagcatgggctacggtattaacatagcttgcagtgcagacagccgctaccctctcctggctgccctgaatgggccattagaatggtacaatacctacggttcttcttatggacgagcgcatgatgttttgtaccgcgaaccacgtctcgacatgatacagtggtttattgagcagggcgcagacgtatctctcaaaaacagacaccaagatacggcactgcacattgcggcaatagaaaatgctgacatcatggaaatgatccttacacggcaaccggaaatcaacgcaagaaatagcgacggcgacacaccacttcacctcgctatgtataatagtgaacctgggcgcgtgatcgagcttcttcttcaacatggagccgacgtgtcactcgtcaaccacgaaggagaaaccgcgctgataaaggcgtgtaatatggttaacaatatttataacgttgattggtcggccaaaaccgaggcggtcgagctcctgattgcggcgggttctccaattaacgtgcagagatctgatggaaagacagcattgcacacgctttaa

SEQ ID NO: 31997 - protein, 1046 aa, Muscodor strobelii
  misc_feature: SGI Peptide ID NO. 571020
  misc_feature (961)..(994): Pfam Id: PF00023 Pfam Desc: Ankyrin repeat
  misc_feature (929)..(960): Pfam Id: PF00023 Pfam Desc: Ankyrin repeat
  misc_feature (15)..(1000): NCBI GI: 116204449 Blast Desc: CHGG_10108 [Chaetomium globosum CBS 148.51] gi|88176236|gb|EAQ83704.1| CHGG_10108 [Chaetomium globosum CBS 148.51]
  misc_feature (8)..(771): NCBI GI: 116197903 Blast Desc: CHGG_07107 [Chaetomium globosum CBS 148.51] gi|88178386|gb|EAQ85854.1| CHGG_07107 [Chaetomium globosum CBS 148.51]
  misc_feature (26)..(776): NCBI GI: 171685416 Blast Desc: protein product [Podospora anserina] gi|170942669|emb|CAP68321.1| protein product [Podospora anserina]
  misc_feature (12)..(771): NCBI GI: 256722577 Blast Desc: NECHADRAFT_96544 [Nectria haematococca mpVI 77-13-4]
  misc_feature (7)..(771): NCBI GI: 46117406 Blast Desc: FG04545.1 [Gibberella zeae PH-1]
  misc_feature (145)..(1041): NCBI GI: 171686926 Blast Desc: protein product [Podospora anserina] gi|170943424|emb|CAP69077.1| protein product [Podospora anserina]
  misc_feature (104)..(826): NCBI GI: 116180342 Blast Desc: CHGG_00799 [Chaetomium globosum CBS 148.51] gi|88185096|gb|EAQ92564.1| CHGG_00799 [Chaetomium globosum CBS 148.51]
  misc_feature (191)..(988): NCBI GI: 238844696 Blast Desc: ankyrin repeat protein [Microsporum canis CBS 113480]
  misc_feature (98)..(832): NCBI GI: 46115934 Blast Desc: FG03809.1 [Gibberella zeae PH-1]
  misc_feature (348)..(1043): NCBI GI: 70990006 Blast Desc: Pfs, NACHT and Ankyrin domain protein [Aspergillus fumigatus Af293] gi|66847484|gb|EAL87814.1| Pfs, NACHT and Ankyrin domain protein [Aspergillus fumigatus Af293]
  misc_feature: Useful for introducing or modulating the production of volatile compounds
MTTTAQSISAEGFTVLHETETVEADIVFIHGIQGHPYDTWTRTRRNPKLKAEKRETKRENDRNPLRKLSRKLFPRAAKDTPAEFNNEIEESSENDATDRSDVYWPKDFLSKEDWCQTARILTYGYDSKVTKGYEKTNKNNLFSHAKGLLYDLRREKPARRPVIFIVHSLGGIILKEALRRSEHAEQDGFKDIVRSTKGIIFLGTPHRGSPGLAGLAETVRRTVSMLAMVDTNSTLLRSLGADSPELELGRESFPALWRAHNFQVKTFQEAYGISGVNVGPFNEKVVPDISSTLDDPREHSETISANHMDMCRFAKIGDLGYRKVSAEIKTMFVSCQKGPSMTDDGMALLRSLYFEEMYNRQMNIRGALAHTCDWLFQTPEYVSWKGRVDVKKSRGLLWIKGKPGAGKSTLMKTALSQVKAKDNASTTSTAAFFFNARGTQALEKSLLGLYRALLHQVLQQDLLALSHISLDFKMKRAVQSSITWHEEELQQYLVNIFATSASRPAVLFIDAMDECREEEVQGLVKFFSDLSRQALKAGAVLNVCFSSRHYPQISIEDCPEVVVEHHNWEDILRYVSSEATDYILIRDLQEDILERSNSVFLWVVLVIAILKKSGRGKSLKWLQQKLEAIPGELDTLFRQLFTNIEEDDIIRIEHLMQIMLFSMYPLNLDELHTALAFSSRPFVTMQEWTNSIDYLETAQKRHEMIIELSRGVLEPTASTTMGYQFIHETVREFFLSGQGFQLLRHSKLSIVGRAHNTLAMACVRLISLEDVWHNDLKHSRATDKSAEKFPLLYYARHFLFFHIASAEANTISQEEHLRLIEEQDLLRSIISLNGKDAISEGASLMYAAAEMGFIHTVKRLYSMGYGINIACSADSRYPLLAALNGPLEWYNTYGSSYGRAHDVLYREPRLDMIQWFIEQGADVSLKNRHQDTALHIAAIENADIMEMILTRQPEINARNSDGDTPLHLAMYNSEPGRVIELLLQHGADVSLVNHEGETALIKACNMVNNIYNVDWSAKTEAVELLIAAGSPINVQRSDGKTALHTL

SEQ ID NO: 31998 - DNA, 1170 bp, Muscodor strobelii
  misc_feature: SGI EST ID NO. CUFF.75651.0
  misc_feature: Variant of the nucleotide sequence at SEQ ID NO 31996
gttgcagagccggacggtcaactgcgttactaatacatcacggatgcaaacgcattccaatgataacaagttcaggacaccggcggatccgtgatcgctgtcatccaaactacggtgcggaaatcgcaaatcatgactaccactgctcaaagcatttcggccgagggatttacggtgctacacgagaccgagacagttgaagcagatatcgtcttcatacatggcatccaaggtcacccgtatgacacgtggacacggacccgccgaaacccgaaattgaaagcagagaaacgagaaacgaagcgagagaatgacagaaacccattaaggaagctctcaaggaaattattccctcgcgctgccaaagatactccagccgagttcaacaacgagattgaagaatctagtgaaaacgatgcgactgacaggtctgacgtgtattggccgaaagactttttgagcaaggaggactggtgtcaaaccgcccgcattttgacgtacggctatgactctaaagttacgaagggctatgagaagacgaacaagaacaacttgttcagtcacgcgaagggtctgttatatgaccttcggagagagaaacctgcccggcgtcccgtcatcttcatcgtccactcgctcggcgggatcattctaaaggaagctctgcgtcggtctgagcatgcagagcaagacgggttcaaggacatagtccgtagtacgaagggcatcatatttctcggtacccctcatagggggagccctggtctggcgggtcttgcagagactgtccgacggactgttagcatgctagccatggtcgacactaactctactcttttgcgctctcttggcgctgacagtcctgagctggagctcgggcgggaatctttcccagctctatggagagcgcacaactttcaggtcaagacgtttcaggaggcttatggcatctcaggcgtgaatgtgggcccgttcaacgagaaggtcgtaccagatatatcatcgaccctcgacgacccaagggagcattcggagactatatctgccaatcacatggacatgtgccggttcgcaaagattggggatctggggtatcgaaaagtctctgcggagatcaagactatgtttgtgtcatgccagaaaggtcccagcatgacagacgatggaatg

SEQ ID NO: 31999 - DNA, 3150 bp, Muscodor strobelii
  misc_feature: SGI cDNA ID NO. 571021
  misc_feature: Encodes the peptide sequence at SEQ ID NO 32000
atgactaccactgctcaaagcatttcggccgagggatttacggtgctacacgagaccgagacagttgaagcagatatcgtcttcatacatggcatccaaggtcacccgtatgacacgtggacacggacccgccgaaacccgaaattgaaagcagagaaacgagaaacgaagcgagagaatgacagaaacccattaaggaagctctcaaggaaattattccctcgcgctgccaaagatactccagccgagttcaacaacgagattgaagaatctagtgaaaacgatgcgactgacaggtctgacgtgtattggccgaaagactttttgagcaaggaggactggtgtcaaaccgcccgcattttgacgtacggctatgactctaaagttacgaagggctatgagaagacgaacaagaacaacttgttcagtcacgcgaagggtctgttatatgaccttcggagagagaaacctgcccggcgtcccgtcatcttcatcgtccactcgctcggcgggatcattctaaaggaagctctgcgtcggtctgagcatgcagagcaagacgggttcaaggacatagtccgtagtacgaagggcatcatatttctcggtacccctcatagggggagccctggtctggcgggtcttgcagagactgtccgacggactgttagcatgctagccatggtcgacactaactctactcttttgcgctctcttggcgctgacagtcctgagctggagctcgggcgggaatctttcccagctctatggagagcgcacaactttcaggtcaagacgtttcaggaggcttatggcatctcaggcgtgaatgtgggcccgttcaacgagaaggtcgtaccagatatatcatcgaccctcgacgacccaagggagcattcggagactatatctgccaatcacatggacatgtgccggttcgcaaagattggggatctggggtatcgaaaagtctctgcggagatcaagactatgtttgtgtcatgccagaaaggtgccggaagtcccagcatgacagacgatggaatggcgctcttaaggtctctttatttcgaggagatgtataaccgccaaatgaacatccgcggagcattagctcatacttgcgactggctatttcaaacgcccgaatatgtgagctggaaaggcagagtagatgtgaaaaagagtcgcggcttgttatggatcaaggggaaacccggggccggaaaatcgactctgatgaaaacagccctaagtcaggtcaaggcgaaagataacgcttcgactacatctacggcagcgtttttcttcaacgctagaggcacgcaagctctcgaaaaatccctccttgggctctatagagccctactgcaccaagtgttacagcaggatcttttggctttatcacatatttctcttgattttaagatgaaacgagcggtccagtcaagcattacgtggcacgaagaagaactccaacaatatctcgtcaatatctttgccacgtccgcctcacgccctgcagtattattcatcgatgcgatggacgaatgccgtgaagaagaggtacaaggccttgtcaagttcttcagtgacctatcaaggcaggcactgaaagccggcgcagtgctcaatgtgtgtttctcgagccgccattatcctcagatctccattgaggactgccccgaagttgtcgtggagcaccataactgggaagatatccttcgttatgtcagttcagaagcaacagactatatacttataagagatctccaagaagatatcctggaacgatcgaatagtgttttcttatgggtcgttctggtcattgccatcctgaagaagtccggccgcggaaagtcactaaaatggcttcaacagaagctcgaggccattcctggcgaactagatactctgttcaggcagctgttcaccaacatcgaagaagatgacatcattcgcatcgaacatttaatgcagattatgctgtttagcatgtacccgctgaacctggatgagctacataccgccctcgctttcagttcgagacccttcgtgactatgcaggaatggacaaattcaatagattatcttgaaacggctcaaaagaggcatgaaatgattattgaactctcaagaggcgtgctcgaacccacagcttccacaactatggggtatcaatttatccacgagacggttcgagaatttttcctctccggccagggctttcaactcctcaggcactctaaacttagtatagttggccgtgcgcataataccctcgctatggcatgtgtacgcctcatttctctagaagatgtgtggcataacgatttaaaacattcaagggcgacggacaaatcggcggagaaattccctctgttatactatgctcgacattttctgttctttcacatcgcgtcagccgaggcaaataccatctcccaagaggaacatctcagacttatcgaggaacaagacctactaaggagcatcatttctctgaacggcaaagacgcaatttctgaaggagccagcttgatgtacgcggcagctgagatgggattcatccataccgtgaagcgactgtacagcatgggctacggtattaacatagcttgcagtgcagacagccgctaccctctcctggctgccctgaatgggccattagaatggtacaatacctacggttcttcttatggacgagcgcatgatgttttgtaccgcgaaccacgtctcgacatgatacagtggtttattgagcagggcgcagacgtatctctcaaaaacagacaccaagatacggcactgcacattgcggcaatagaaaatgctgacatcatggaaatgatccttacacggcaaccggaaatcaacgcaagaaatagcgacggcgacacaccacttcacctcgctatgtataatagtgaacctgggcgcgtgatcgagcttcttcttcaacatggagccgacgtgtcactcgtcaaccacgaaggagaaaccgcgctgataaaggcgtgtaatatggttaacaatatttataacgttgattggtcggccaaaaccgaggcggtcgagctcctgattgcggcgggttctccaattaacgtgcagagatctgatggaaagacagcattgcacacgctttaa

SEQ ID NO: 32000 - protein, 1049 aa, Muscodor strobelii
  misc_feature: SGI Peptide ID NO. 571021
  misc_feature (964)..(997): Pfam Id: PF00023 Pfam Desc: Ankyrin repeat
  misc_feature (932)..(963): Pfam Id: PF00023 Pfam Desc: Ankyrin repeat
  misc_feature (15)..(1003): NCBI GI: 116204449 Blast Desc: CHGG_10108 [Chaetomium globosum CBS 148.51] gi|88176236|gb|EAQ83704.1| CHGG_10108 [Chaetomium globosum CBS 148.51]
  misc_feature (8)..(774): NCBI GI: 116197903 Blast Desc: CHGG_07107 [Chaetomium globosum CBS 148.51] gi|88178386|gb|EAQ85854.1| CHGG_07107 [Chaetomium globosum CBS 148.51]
  misc_feature (26)..(779): NCBI GI: 171685416 Blast Desc: protein product [Podospora anserina] gi|170942669|emb|CAP68321.1| protein product [Podospora anserina]
  misc_feature (12)..(774): NCBI GI: 256722577 Blast Desc: NECHADRAFT_96544 [Nectria haematococca mpVI 77-13-4]
  misc_feature (7)..(774): NCBI GI: 46117406 Blast Desc: FG04545.1 [Gibberella zeae PH-1]
  misc_feature (104)..(829): NCBI GI: 116180342 Blast Desc: CHGG_00799 [Chaetomium globosum CBS 148.51] gi|88185096|gb|EAQ92564.1| CHGG_00799 [Chaetomium globosum CBS 148.51]
  misc_feature (145)..(1044): NCBI GI: 171686926 Blast Desc: protein product [Podospora anserina] gi|170943424|emb|CAP69077.1| protein product [Podospora anserina]
  misc_feature (191)..(991): NCBI GI: 238844696 Blast Desc: ankyrin repeat protein [Microsporum canis CBS 113480]
  misc_feature (98)..(835): NCBI GI: 46115934 Blast Desc: FG03809.1 [Gibberella zeae PH-1]
  misc_feature (351)..(1046): NCBI GI: 70990006 Blast Desc: Pfs, NACHT and Ankyrin domain protein [Aspergillus fumigatus Af293] gi|66847484|gb|EAL87814.1| Pfs, NACHT and Ankyrin domain protein [Aspergillus fumigatus Af293]
MTTTAQSISAEGFTVLHETETVEADIVFIHGIQGHPYDTWTRTRRNPKLKAEKRETKRENDRNPLRKLSRKLFPRAAKDTPAEFNNEIEESSENDATDRSDVYWPKDFLSKEDWCQTARILTYGYDSKVTKGYEKTNKNNLFSHAKGLLYDLRREKPARRPVIFIVHSLGGIILKEALRRSEHAEQDGFKDIVRSTKGIIFLGTPHRGSPGLAGLAETVRRTVSMLAMVDTNSTLLRSLGADSPELELGRESFPALWRAHNFQVKTFQEAYGISGVNVGPFNEKVVPDISSTLDDPREHSETISANHMDMCRFAKIGDLGYRKVSAEIKTMFVSCQKGAGSPSMTDDGMALLRSLYFEEMYNRQMNIRGALAHTCDWLFQTPEYVSWKGRVDVKKSRGLLWIKGKPGAGKSTLMKTALSQVKAKDNASTTSTAAFFFNARGTQALEKSLLGLYRALLHQVLQQDLLALSHISLDFKMKRAVQSSITWHEEELQQYLVNIFATSASRPAVLFIDAMDECREEEVQGLVKFFSDLSRQALKAGAVLNVCFSSRHYPQISIEDCPEVVVEHHNWEDILRYVSSEATDYILIRDLQEDILERSNSVFLWVVLVIAILKKSGRGKSLKWLQQKLEAIPGELDTLFRQLFTNIEEDDIIRIEHLMQIMLFSMYPLNLDELHTALAFSSRPFVTMQEWTNSIDYLETAQKRHEMIIELSRGVLEPTASTTMGYQFIHETVREFFLSGQGFQLLRHSKLSIVGRAHNTLAMACVRLISLEDVWHNDLKHSRATDKSAEKFPLLYYARHFLFFHIASAEANTISQEEHLRLIEEQDLLRSIISLNGKDAISEGASLMYAAAEMGFIHTVKRLYSMGYGINIACSADSRYPLLAALNGPLEWYNTYGSSYGRAHDVLYREPRLDMIQWFIEQGADVSLKNRHQDTALHIAAIENADIMEMILTRQPEINARNSDGDTPLHLAMYNSEPGRVIELLLQHGADVSLVNHEGETALIKACNMVNNIYNVDWSAKTEAVELLIAAGSPINVQRSDGKTALHTL

SEQ ID NO: 32001 - DNA, 1170 bp, Muscodor strobelii; identical to SEQ ID NO: 31998
  misc_feature: SGI EST ID NO. CUFF.75651.0
  misc_feature: Variant of the nucleotide sequence at SEQ ID NO 31999

SEQ ID NO: 32002 - DNA, 7863 bp, Muscodor strobelii
  misc_feature: SGI cDNA ID NO. 571022
  misc_feature: Encodes the peptide sequence at SEQ ID NO 32003
atgtcggcccgcagtcgctatcgttcctcgacgtcggcgtccaaagctcttcccacatccaaagctaccgaagtcctcgagcgcctcctcgatggcctcagcacatctctcacctctccgactgacaatggctacccggaccctgcttcgttagtccaacaagtcacctttattcagcaacacctcgctgctgtttccccaccaagctctgtgcaggacgactttagacacctccgcggcttccagcgcctattcgatgtcttgcggtccttctcagggttctacaacccgcaaaaacgaagccagcctgaaaaggaagacttctttcgtctactggaggcactgctcggagtgctttctgcagcttttaggggtcatccaggaaatcgtcgctatttccgcacaagagtagagggcggagggtgggatgctctggaacagatcattgccagcattggcctcggaggaaccgactcggatctatggacaagttgccagctcttcggcaagctctttgcattcgcattagatgatcctgccctagaccaactatgttccaagatcgtatcgccttctggcagttcgcttagcaccacgaccccaccaatatctgaagatgagcctcacaatggagaattacggccggatgtacttgcgaagattaccactgaccttgccaacaccgtcggcctcacctcgtcattgcaaagtcccgaagctattcgcacaatcgtcgacttctgggaatcgatacctcgagaccaggctgccgcagaaaatgttgcgtcgctcctggtactcaaagtgatacttgctatcgtcaccgcttcaaatgtcaacttatgccaagtacacgagactggtgtgttgtctaggtttttgggtttcgcctttgatgaggcctcagccatcaacaatgtcgaaagagaaatcatcctgtctctttgtcggtctctcatgtccttgggcgtcaacaagcttgcagatgctcagcggttactcctgaatccttcagccgagtcctcggacttctgcttggatatggctaaccgacatagcaatcctcctttcatccagttcgacctctctctacatggccactcgtccattgagctgcctagcctcgggcgggcattccctccccaagcgtccgccggctatagtttcacagcctggatcaaagtagacaaatttgacccacagtctcataccaccctttttggcatctttgatacgacacagacctgtttcttgcttacctatctcgagaaagatacccgcaatttcattttacaaacatcagtcactgcatcgcgtcctagtgttcgtttccgaggcttggcgttcaaagaaaacgtatggtatcacattgcaatagtacatcggcgtccaaaaactttgactgcgagtaaggcatcgctatatgtgaatggagaatttgtcgaacagctaaaggcatcatatcctgcccagtcacctccattaactaccagcaacgctagcacggaaagctttgcttcatttacctcaagtaccaataagactcagcctatccaagccttcctcggaacccctcgagagctgtctccctacaatgggagcgggctcacccattcaaaatggtcgcttgccgcggcccacctgtttgatgatgtactcagtgatgatttcatggcggtcccttatcgacttggtgtgcactaccagggaaatttccaggattgccttgggggcttccagacctatgcggcatcggctgcccttgggcttcgtaacgaagtcgtgaccgcgggcaaggaagaaactgacatcatgaaagtaatcagagatagagcaagtcatttgataccagagcagcgcattctgttcagcttaatgccgtcgtccatattccgggagagggaacatttcggcgaatcacagctctttcggtctttatcccgtggcccggctcatacgttagttcagatggtgctcaaaagcggaaccggtgttgccatcaacactgccatgccttcgatcaatgacgcgcttcttcgctctaatggagtcgccatcctagctggggatcctatcgtcgctgcaccgcaattctttgatgatagtctttggcgacttgccgggttcacgccactcgctcttaagttgatagagcgggcaacttcggccgaggctctcctccgtgctgttgagatggttttcaaatgcattaactccagctggcgcaatagtgaggcaatggaaaaagatggtggttatgcagttctcgcccttctcctcagaacgaaacttggatttgcttttcaaaacggtgtcagtgtgacagaaaaactgatccttccgattgctgaaaaagacaggctatctctgcagctccttggccaggttctcgagttcgtaggatacaaccacagggatcccgtggaatctgtcatcatcaatccactcgcttatcgagtgctggtagtagactttgatgcatggaggcgaagcgcgccaatcgtgcaagagctctactacaagcagtttgtcactttcgcagtaaggagcaagtaccatctgcataatcataggagattattacgaatgaggattgtgaagagacttttggatgccctgaaagccgacccactacccgaaagtgtccttccttttttcttagatgctttagagcagctggtcaagagtagctataataccgaggtccatcgtgctcttgcgcttttcatcacatacgccttgcactcgcctccgcgctcattacctcgcacgccgaagacgtattcgcccggccagcgtcctagagacaattccatacctcggcgcccaacgattgatagcatagctacatcagaagatgcagtacgaaagctcggaaagagagccattgccacccatatcctgagcatgtatagtcagctactctgtgaaaagggaaatctgatcatcattcgcaaattcgccaagacggtgactaataaggtacttgacgctcggctgccacaaaaggattccacgctgacgatggcccagtggctcttatatctcctaactgaggatgatgccgagattgtagtctatggagcaaagattcttgcgcgtctactggttacacatggctcgacctacatcagcaagttttccggtaagactggtgggttttccatcatggcgcacaggctcaaaaggtggtgggatattcctacaatatggcccatttgcttctgtgtcctattcgggtacgacgtcgcagagtttgacttcgataaggatttcgacttttttagtctcttggaaagttttgggacttgtcaggtcgccaaccctgatgtactgccaattattacgtctatgttgcaacatggtctcaaggacattctgaaaaaccaggaagatccagattcaccgcgagtagaaccagaaaatctacgcttatctactgcctcacctgatttattaggtacccgatctcggtcgcggtcgatgtcactcaagaaggagctggaatcacgacgtaagcagtccgatcgtctatcatgtgtcatgctaactgaaggtgaaggcgcaccacggaccagcttagaacggaacacaggcaacgcatcggttcttcaagccgtcatccggttcatggcagatcttcacgcccgatcgcccaactttcgagagtttgcccttacctcagactacgtaaggttacttctatccacgctgtatcccgcacttgtcagcgcagatccggtaaatccggaaacagaactcaattctcgagactcggctctcacctttgagggcgctgatgtaatcttccgtccattcggcaaatcgacggaaccatccgtcatccgtacatctagtgcaacagataccaatgcagtacggcctggaggtccttatagcggaacgcagctacgcaaagcatcatcatttgtgtttctcacatcccaaaagttttctgaagcaagtccagggcggactggtcaagccgacttctttaagaagactgctactcaggatatcggccatgggctaactgaaggtattcttgagcttgtgatcgacgtttttgtagatcaactgctggtgcgcaaagacttttccgggttcagtctcttctctcgggtacctcccggtttccaagaacaccatgcgtatttcgcatcatacgtgctgaaaagtactattgtccacatgactaataggatcaagttggactggaaaattatgagcgaacccaaagtactgacaaatatgtcgcgcttctgtctgcatatggctgaagcaatcttcgaaggctggttcatgaatgggacggagtcgatgctcgacttcgccggtttgctgctagagcatcttcagaagccagaagtcgcgaagatgaagactgttcggctctgtagccaagcggtctctactatacggaactgttttctgagacttattctcctaagactatctgagatggacagctcgtcaacaacgcaaaatgatgcagacgggtcgatgggaaagataatgtactggcagatggtagttctgaactgcctctctatcgatgatgagtacatgaaattactctggtaccagctctaccataagctagtggacgatcgagagtctgtacggccgcttgccgtcaatctctggcgaatcatgcttgtgcaaaaaccagaagaatgcgcctcgctcttccgcttgactatgacatcagaccaagctcagttagcggcgggcttccagaagttaacagaaatagataatgacgctttcttgtcttgggttgatcaacatcgcccatccttggactccctttttctgggcaacatgtctcgaaactgggaagacttcgtcagtattgagaataaccgcacaacagagggcgctcgctcaaagcttagtaaacgaaaagaagtactgagacgatggcataccgaaacacttgaacgagataatttccttctccgacatgacatgtctaacacagcatggatgaaatcaatctacgcttcggaacactttaaatatcagcgagcagtccaggacaaacaagatgattttttgttctcctcgtcacaattttctaagatggaacaagatctgaccagaccaggagcagtgctctacactcctgagcccatcaaatggcagctcgatagaactgagggccgaaatcgtatgcggctcagattattgcctagtgcatctgacaaacgcgagaaataccagccaaaacgacgtccgactgatcaacaatcagcttcgaatttgaagacagatctccctagcggaaccgtcagagtcgatacgcagcggactgctgcacagtcgtctgtggttcctgagattgccggcgtggatggcggtctggatgagccaccagctggcgatagacacgacgcttcgaatgcagagcaatcttctgctgttgacgacgacttcgaattgattgacgaccctaatgatccaaacgaagctgacgacagtttcgaggataagaaccgaagagttatgcgacgcctacaacaaggagatgccgtgcaacaggtgtataatgtttcgcgcatcaatgccctggaagcttgtgaagggatcctactcatcggaaagactcatttatatatcatggacaatttcttccaatgcgaagatggagaaatcgtgaacgttgctgaagcgccagcccaagaacgcgatccattttctcaaatcatcacgggcgtcagacctcaagaccgagaaagtcacggtccgcaaacttctcgctcgtggaaatggcacgacgtcatcagcacatctaagcgccgcttcttattccgtgacgttgcaatcgagatattcttcaccgacggccgcagctatcttctgactgcgaagaattcaacggcgagagacgaggtcttctcgaaacttgcgcacaagacgcctcataccgctggtccgaatttgctccctaatccagaagacgcctggcgtctggagtccttgcggatgtttgaagagtcacagcaaacatttggatccaagtttggtagtattttcaattcttcgccctggaacccggcaatgcgcaaatggcaaagaggcgagatctccaacttccattacctcatgctggtaaatactatggcaggccgaactttcaatgatttgactcagtatccggtattcccatgggttctagcagactataccagcgatgatcttaatctcgaagatcccgcgacgttccgtgatctatctaagcccatgggtgcacagactgcccgtagacaggccgattatcgatccagataccagagtctcgctgaaataggagagacgccatttcattatggtacacactattcctcagccatgattgtcgcttcgtacttgattcgattgcctcccttcgtggactccttcatccttctacaaggtggtcacttcgaccatgctgaccgattgtttttctcaattgagggatcgtggagatctgcctcacaagacaatggatctgacgttcgtgagctgattcccgaatttttctgtcttccggagttcttgactaatgtcaatggttacaactttggcgttcgacaaggagctggtggtcgtgtcaacgacgtgcaattgccgccttgggcgaaaggcgatcccaagatttttattgccaaacatcgtgaagctctcgaatcgccatatgtcactcaaaaccttcatcactggattgatctcgtatttggttacaagcaacgcggcgaagcggctgtggacaacttgaacgtcttccaccacctttcttattatggagccaaagatcttgacaaaatagttgactctgacgagaggacggccacaacaagcatcattcacaactttggccagacgcctcatcaagtattctcgagacctcatcttgcgagagagagcacgtcttatccggtcaagagacttgatacgtcatgctacgcgctctcacgcactcctcatccacttctcgagagccgagaaagagtagcataccttatttactcgccaaagctagaccgcctcctctgttcatctgcatttcgcatcaatctgcctccttcttacgacagatatctcgaatggggctacgcggacaacagcatccggttttttacgacggagaacagaaaaagtgccggtgtgagcgagtgcctccacattgggcaaatttcatgtgttgtggtgccggactctaagactctaatcacggcaggcgaagactgtgtagtgtctgtgttcagtatccaaagccttcctaataagcctgtggagttgatacacaagtcgtcactcttcggtcataaaacacctgtcaacaaaattgccgtgtccaaagcgttcagcacgttggtgacaatttctgaagatggccatgcattcctatgggatctgaatcgcctcgagttcgtgcgcaaactccccaacacgcgtttcgtcgaatgtgcgagcataaatgatgtctcgggcgaaatactcctttgctgtggcaccaatgttgtattgtacactatcaatggcgaactcctattagaccagaatatctgccttgagcaagatgacttcgtgcattcttgcgctttctatgaaggttccggtaacgagtggttggagaactatctcgtctttacgggccataagagaggacgagtcaatatttggaagaggagtgtcaaaaatggaaagtggattttagggttgatcagaagattagaccatgttgacgcacgcagtgagacgggggctaatacagaggcggctataacttgtattacgccaatgccatctctagtgtatacgggagatgatgatgggagggtatacgaatggaacctgattcatagagaaagatag

SEQ ID NO: 32003 - protein, 2620 aa, Muscodor strobelii
  misc_feature: SGI Peptide ID NO. 571022
  misc_feature (2429)..(2467): Pfam Id: PF00400 Pfam Desc: WD domain, G-beta repeat
  misc_feature (2022)..(2302): Pfam Id: PF02138 Pfam Desc: Beige/BEACH domain
  misc_feature (5)..(2620): NCBI GI: 149210201 Blast Desc: MGCH7_ch7g578 [Magnaporthe grisea 70-15] gi|86196533|gb|EAQ71171.1| MGCH7_ch7g578 [Magnaporthe grisea 70-15]
  misc_feature (19)..(2573): NCBI GI: 171680109 Blast Desc: protein product [Podospora anserina] gi|170939681|emb|CAP64907.1| protein product [Podospora anserina]
  misc_feature (127)..(2620): NCBI GI: 261353663 Blast Desc: WD repeat and FYVE domain-containing protein [Verticillium albo-atrum VaMs.102]
  misc_feature (6)..(2612): NCBI GI: 256731954 Blast Desc: [Nectria haematococca mpVI 77-13-4]
  misc_feature (16)..(2612): NCBI GI: 46105126 Blast Desc: FG00191.1 [Gibberella zeae PH-1]
  misc_feature (6)..(2615): NCBI GI: 224551876 Blast Desc: beige/BEACH domain protein [Epichloe festucae]
  misc_feature (304)..(2610): NCBI GI: 116193323 Blast Desc: CHGG_06379 [Chaetomium globosum CBS 148.51] gi|88182292|gb|EAQ89760.1| CHGG_06379 [Chaetomium globosum CBS 148.51]
  misc_feature (72)..(2618): NCBI GI: 261202238 Blast Desc: beige/BEACH domain-containing protein [Ajellomyces dermatitidis SLH14081] gi|239590430|gb|EEQ73011.1| beige/BEACH domain-containing protein [Ajellomyces dermatitidis SLH14081]
  misc_feature (72)..(2618): NCBI GI: 239612141 Blast Desc: beige/BEACH domain-containing protein [Ajellomyces dermatitidis ER-3]
  misc_feature (72)..(2618): NCBI GI: 226277548 Blast Desc: beige/BEACH domain-containing protein [Paracoccidioides brasiliensis Pb01]
MSARSRYRSSTSASKALPTSKATEVLERLLDGLSTSLTSPTDNGYPDPASLVQQVTFIQQHLAAVSPPSSVQDDFRHLRGFQRLFDVLRSFSGFYNPQKRSQPEKEDFFRLLEALLGVLSAAFRGHPGNRRYFRTRVEGGGWDALEQIIASIGLGGTDSDLWTSCQLFGKLFAFALDDPALDQLCSKIVSPSGSSLSTTTPPISEDEPHNGELRPDVLAKITTDLANTVGLTSSLQSPEAIRTIVDFWESIPRDQAAAENVASLLVLKVILAIVTASNVNLCQVHETGVLSRFLGFAFDEASAINNVEREIILSLCRSLMSLGVNKLADAQRLLLNPSAESSDFCLDMANRHSNPPFIQFDLSLHGHSSIELPSLGRAFPPQASAGYSFTAWIKVDKFDPQSHTTLFGIFDTTQTCFLLTYLEKDTRNFILQTSVTASRPSVRFRGLAFKENVWYHIAIVHRRPKTLTASKASLYVNGEFVEQLKASYPAQSPPLTTSNASTESFASFTSSTNKTQPIQAFLGTPRELSPYNGSGLTHSKWSLAAAHLFDDVLSDDFMAVPYRLGVHYQGNFQDCLGGFQTYAASAALGLRNEVVTAGKEETDIMKVIRDRASHLIPEQRILFSLMPSSIFREREHFGESQLFRSLSRGPAHTLVQMVLKSGTGVAINTAMPSINDALLRSNGVAILAGDPIVAAPQFFDDSLWRLAGFTPLALKLIERATSAEALLRAVEMVFKCINSSWRNSEAMEKDGGYAVLALLLRTKLGFAFQNGVSVTEKLILPIAEKDRLSLQLLGQVLEFVGYNHRDPVESVIINPLAYRVLVVDFDAWRRSAPIVQELYYKQFVTFAVRSKYHLHNHRRLLRMRIVKRLLDALKADPLPESVLPFFLDALEQLVKSSYNTEVHRALALFITYALHSPPRSLPRTPKTYSPGQRPRDNSIPRRPTIDSIATSEDAVRKLGKRAIATHILSMYSQLLCEKGNLIIIRKFAKTVTNKVLDARLPQKDSTLTMAQWLLYLLTEDDAEIVVYGAKILARLLVTHGSTYISKFSGKTGGFSIMAHRLKRWWDIPTIWPICFCVLFGYDVAEFDFDKDFDFFSLLESFGTCQVANPDVLPIITSMLQHGLKDILKNQEDPDSPRVEPENLRLSTASPDLLGTRSRSRSMSLKKELESRRKQSDRLSCVMLTEGEGAPRTSLERNTGNASVLQAVIRFMADLHARSPNFREFALTSDYVRLLLSTLYPALVSADPVNPETELNSRDSALTFEGADVIFRPFGKSTEPSVIRTSSATDTNAVRPGGPYSGTQLRKASSFVFLTSQKFSEASPGRTGQADFFKKTATQDIGHGLTEGILELVIDVFVDQLLVRKDFSGFSLFSRVPPGFQEHHAYFASYVLKSTIVHMTNRIKLDWKIMSEPKVLTNMSRFCLHMAEAIFEGWFMNGTESMLDFAGLLLEHLQKPEVAKMKTVRLCSQAVSTIRNCFLRLILLRLSEMDSSSTTQNDADGSMGKIMYWQMVVLNCLSIDDEYMKLLWYQLYHKLVDDRESVRPLAVNLWRIMLVQKPEECASLFRLTMTSDQAQLAAGFQKLTEIDNDAFLSWVDQHRPSLDSLFLGNMSRNWEDFVSIENNRTTEGARSKLSKRKEVLRRWHTETLERDNFLLRHDMSNTAWMKSIYASEHFKYQRAVQDKQDDFLFSSSQFSKMEQDLTRPGAVLYTPEPIKWQLDRTEGRNRMRLRLLPSASDKREKYQPKRRPTDQQSASNLKTDLPSGTVRVDTQRTAAQSSVVPEIAGVDGGLDEPPAGDRHDASNAEQSSAVDDDFELIDDPNDPNEADDSFEDKNRRVMRRLQQGDAVQQVYNVSRINALEACEGILLIGKTHLYIMDNFFQCEDGEIVNVAEAPAQERDPFSQIITGVRPQDRESHGPQTSRSWKWHDVISTSKRRFLFRDVAIEIFFTDGRSYLLTAKNSTARDEVFSKLAHKTPHTAGPNLLPNPEDAWRLESLRMFEESQQTFGSKFGSIFNSSPWNPAMRKWQRGEISNFHYLMLVNTMAGRTFNDLTQYPVFPWVLADYTSDDLNLEDPATFRDLSKPMGAQTARRQADYRSRYQSLAEIGETPFHYGTHYSSAMIVASYLIRLPPFVDSFILLQGGHFDHADRLFFSIEGSWRSASQDNGSDVRELIPEFFCLPEFLTNVNGYNFGVRQGAGGRVNDVQLPPWAKGDPKIFIAKHREALESPYVTQNLHHWIDLVFGYKQRGEAAVDNLNVFHHLSYYGAKDLDKIVDSDERTATTSIIHNFGQTPHQVFSRPHLARESTSYPVKRLDTSCYALSRTPHPLLESRERVAYLIYSPKLDRLLCSSAFRINLPPSYDRYLEWGYADNSIRFFTTENRKSAGVSECLHIGQISCVVVPDSKTLITAGEDCVVSVFSIQSLPNKPVELIHKSSLFGHKTPVNKIAVSKAFSTLVTISEDGHAFLWDLNRLEFVRKLPNTRFVECASINDVSGEILLCCGTNVVLYTINGELLLDQNICLEQDDFVHSCAFYEGSGNEWLENYLVFTGHKRGRVNIWKRSVKNGKWILGLIRRLDHVDARSETGANTEAAITCITPMPSLVYTGDDDGRVYEWNLIHRER

SEQ ID NO: 32004 - DNA, 9058 bp, Muscodor strobelii
  misc_feature: SGI EST ID NO. CUFF.75654.0
  misc_feature: Variant of the nucleotide sequence at SEQ ID NO 32002
cgaatctatagaccatggcccgtgcaggaagctattttcagcacctgttggctctaacgttgcaagacctaggactccgatagggaaggctcgccaagcaaaatcccggcaggctctgtgaatgcacagttgacgtcgtttcaccactgacctctttgagtttcaatatctacacgtgcctgtgcctcacctcaggtatttccatgcctgcatcctctgattttgcgaaatggggcacgcattttactttgcggaaaacaatttgcatgagttgacattgttgaatctcccattgttcaagtctgcatagtctcacgtctgggaacaattgcgcgtgactattgccaacagtcacagcttgcatcgctgtctgcctagctctaggtgctctaacactcgtctggcgcgacccatgcgtccacgcacacgcaaaccttcgatgacctctcgtgttcataacagcctgaaccccgcccgggtgctggcaaacgacaacagtttaatatgaggagaaacagcaaagctccctgcatttcctatcggctatttccctaaacggctgacgtcgccatgtcggcccgcagtcgctatcgttcctcgacgtcggcgtccaaagctcttcccacatccaaagctaccgaagtcctcgagcgcctcctcgatggcctcagcacatctctcacctctccgactgacaatggctacccggaccctgcttcgttagtccaacaagtcacctttattcagcaacacctcgctgctgtttccccaccaagctctgtgcaggacgactttagacacctccgcggcttccagcgcctattcgatgtcttgcggtccttctcagggttctacaacccgcaaaaacgaagccagcctgaaaaggaagacttctttcgtctactggaggcactgctcggagtgctttctgcagcttttaggggtcatccaggaaatcgtcgctatttccgcacaagagtagagggcggagggtgggatgctctggaacagatcattgccagcattggcctcggaggaaccgactcggatctatggacaagttgccagctcttcggcaagctctttgcattcgcattagatgatcctgccctagaccaactatgttccaagatcgtatcgccttctggcagttcgcttagcaccacgaccccaccaatatctgaagatgagcctcacaatggagaattacggccggatgtacttgcgaagattaccactgaccttgccaacaccgtcggcctcacctcgtcattgcaaagtcccgaagctattcgcacaatcgtcgacttctgggaatcgatacctcgagaccaggctgccgcagaaaatgttgcgtcgctcctggtactcaaagtgatacttgctatcgtcaccgcttcaaatgtcaacttatgccaagtacacgagactggtgtgttgtctaggtttttgggtttcgcctttgatgaggcctcagccatcaacaatgtcgaaagagaaatcatcctgtctctttgtcggtctctcatgtccttgggcgtcaacaagcttgcagatgctcagcggttactcctgaatccttcagccgagtcctcggacttctgcttggatatggctaaccgacatagcaatcctcctttcatccagttcgacctctctctacatggccactcgtccattgagctgcctagcctcgggcgggcattccctccccaagcgtccgccggctatagtttcacagcctggatcaaagtagacaaatttgacccacagtctcataccaccctttttggcatctttgatacgacacagacctgtttcttgcttacctatctcgagaaagatacccgcaatttcattttacaaacatcagtcactgcatcgcgtcctagtgttcgtttccgaggcttggcgttcaaagaaaacgtatggtatcacattgcaatagtacatcggcgtccaaaaactttgactgcgagtaaggcatcgctatatgtgaatggagaatttgtcgaacagctaaaggcatcatatcctgcccagtcacctccattaactaccagcaacgctagcacggaaagctttgcttcatttacctcaagtaccaataagactcagcctatccaagccttcctcggaacccctcgagagctgtctccctacaatgggagcgggctcacccattcaaaatggtcgcttgccgcggcccacctgtttgatgatgtactcagtgatgatttcatggcggtcccttatcgacttggtgtgcactaccagggaaatttccaggattgccttgggggcttccagacctatgcggcatcggctgcccttgggcttcgtaacgaagtcgtgaccgcgggcaaggaagaaactgacatcatgaaagtaatcagagatagagcaagtcatttgataccagagcagcgcattctgttcagcttaatgccgtcgtccatattccgggagagggaacatttcggcgaatcacagctctttcggtctttatcccgtggcccggctcatacgttagttcagatggtgctcaaaagcggaaccggtgttgccatcaacactgccatgccttcgatcaatgacgcgcttcttcgctctaatggagtcgccatcctagctggggatcctatcgtcgctgcaccgcaattctttgatgatagtctttggcgacttgccgggttcacgccactcgctcttaagttgatagagcgggcaacttcggccgaggctctcctccgtgctgttgagatggttttcaaatgcattaactccagctggcgcaatagtgaggcaatggaaaaagatggtggttatgcagttctcgcccttctcctcagaacgaaacttggatttgcttttcaaaacggtgtcagtgtgacagaaaaactgatccttccgattgctgaaaaagacaggctatctctgcagctccttggccaggttctcgagttcgtaggatacaaccacagggatcccgtggaatctgtcatcatcaatccactcgcttatcgagtgctggtagtagactttgatgcatggaggcgaagcgcgccaatcgtgcaagagctctactacaagcagtttgtcactttcgcagtaaggagcaagtaccatctgcataatcataggagattattacgaatgaggattgtgaagagacttttggatgccctgaaagccgacccactacccgaaagtgtccttccttttttcttagatgctttagagcagctggtcaagagtagctataataccgaggtccatcgtgctcttgcgcttttcatcacatacgccttgcactcgcctccgcgctcattacctcgcacgccgaagacgtattcgcccggccagcgtcctagagacaattccatacctcggcgcccaacgattgatagcatagctacatcagaagatgcagtacgaaagctcggaaagagagccattgccacccatatcctgagcatgtatagtcagctactctgtgaaaagggaaatctgatcatcattcgcaaattcgccaagacggtgactaataagtggctcttatatctcctaactgaggatgatgccgagattgtagtctatggagcaaagattcttgcgcgtctactggttacacatggctcgacctacatcagcaagttttccggtaagactggtgggttttccatcatggcgcacaggctcaaaaggtggtgggatattcctacaatatggcccatttgcttctgtgtcctattcgggtacgacgtcgcagagtttgacttcgataaggatttcgacttttttagtctcttggaaagttttgggacttgtcaggtcgccaaccctgatgtactgccaattattacgtctatgttgcaacatggtctcaaggacattctgaaaaaccaggaagatccagattcaccgcgagtagaaccagaaaatctacgcttatctactgcctcacctgatttattaggtacccgatctcggtcgcggtcgatgtcactcaagaaggagctggaatcacgacgcgcaccacggaccagcttagaacggaacacaggcaacgcatcggttcttcaagccgtcatccggttcatggcagatcttcacgcccgatcgcccaactttcgagagtttgcccttacctcagactacgtaaggttacttctatccacgctgtatcccgcacttgtcagcgcagatccggtaaatccggaaacagaactcaattctcgagactcggctctcacctttgagggcgctgatgtaatcttccgtccattcggcaaatcgacggaaccatccgtcatccgtacatctagtgcaacagataccaatgcagtacggcctggaggtccttatagcggaacgcagctacgcaaagcatcatcatttgtgtttctcacatcccaaaagttttctgaagcaagtccagggcggactggtcaagccgacttctttaagaagactgctactcaggatatcggccatgggctaactgaaggtattcttgagcttgtgatcgacgtttttgtagatcaactgctggtgcgcaaagacttttccgggttcagtctcttctctcgggtacctcccggtttccaagaacaccatgcgtatttcgcatcatacgtgctgaaaagtactattgtccacatgactaataggatcaagttggactggaaaattatgagcgaacccaaagtactgacaaatatgtcgcgcttctgtctgcatatggctgaagcaatcttcgaaggctggttcatgaatgggacggagtcgatgctcgacttcgccggtttgctgctagagcatcttcagaagccagaagtcgcgaagatgaagactgttcggctctgtagccaagcggtctctactatacggaactgttttctgagacttattctcctaagactatctgagatggacagctcgtcaacaacgcaaaatgatgcagacgggtcgatgggaaagataatgtactggcagatggtagttctgaactgcctctctatcgatgatgagtacatgaaattactctggtaccagctctaccataagctagtggacgatcgagagtctgtacggccgcttgccgtcaatctctggcgaatcatgcttgtgcaaaaaccagaagaatgcgcctcgctcttccgcttgactatgacatcagaccaagctcagttagcggcgggcttccagaagttaacagaaatagataatgacgctttcttgtcttgggttgatcaacatcgcccatccttggactccctttttctgggcaacatgtctcgaaactgggaagacttcgtcagtattgagaataaccgcacaacagagggcgctcgctcaaagcttagtaaacgaaaagaagtactgagacgatggcataccgaaacacttgaacgagataatttccttctccgacatgacatgtctaacacagcatggatgaaatcaatctacgcttcggaacactttaaatatcagcgagcagtccaggacaaacaagatgattttttgttctcctcgtcacaattttctaagatggaacaagatctgaccagaccaggagcagtgctctacactcctgagcccatcaaatggcagctcgatagaactgagggccgaaatcgtatgcggctcagattattgcctagtgcatctgacaaacgcgagaaataccagccaaaacgacgtccgactgatcaacaatcagcttcgaatttgaagacagatctccctagcggaaccgtcagagtcgatacgcagcggactgctgcacagtcgtctgtggttcctgagattgccggcgtggatggcggtctggatgagccaccagctggcgatagacacgacgcttcgaatgcagagcaatcttctgctgttgacgacgacttcgaattgattgacgaccctaatgatccaaacgaagctgacgacagtttcgaggataagaaccgaagagttatgcgacgcctacaacaaggagatgccgtgcaacaggtgtataatgtttcgcgcatcaatgccctggaagcttgtgaagggatcctactcatcggaaagactcatttatatatcatggacaatttcttccaatgcgaagatggagaaatcgtgaacgttgctgaagcgccagcccaagaacgcgatccattttctcaaatcatcacgggcgtcagacctcaagaccgagaaagtcacggtccgcaaacttctcgctcgtggaaatggcacgacgtcatcagcacatctaagcgccgcttcttattccgtgacgttgcaatcgagatattcttcaccgacggccgcagctatcttctgactgcgaagaattcaacggcgagagacgaggtcttctcgaaacttgcgcacaagacgcctcataccgctggtccgaatttgctccctaatccagaagacgcctggcgtctggagtccttgcggatgtttgaagagtcacagcaaacatttggatccaagtttggtagtattttcaattcttcgccctggaacccggcaatgcgcaaatggcaaagaggcgagatctccaacttccattacctcatgctggtaaatactatggcaggccgaactttcaatgatttgactcagtatccggtattcccatgggttctagcagactataccagcgatgatcttaatctcgaagatcccgcgacgttccgtgatctatctaagcccatgggtgcacagactgcccgtagacaggccgattatcgatccagataccagagtctcgctgaaataggagagacgccatttcattatggtacacactattcctcagccatgattgtcgcttcgtacttgattcgattgcctcccttcgtggactccttcatccttctacaaggtggtcacttcgaccatgctgaccgattgtttttctcaattgagggatcgtggagatctgcctcacaagacaatggatctgacgttcgtgagctgattcccgaatttttctgtcttccggagttcttgactaatgtcaatggttacaactttggcgttcgacaaggagctggtggtcgtgtcaacgacgtgcaattgccgccttgggcgaaaggcgatcccaagatttttattgccaaacatcgtgaagctctcgaatcgccatatgtcactcaaaaccttcatcactggattgatctcgtatttggttacaagcaacgcggcgaagcggctgtggacaacttgaacgtcttccaccacctttcttattatggagccaaagatcttgacaaaatagttgactctgacgagaggacggccacaacaagcatcattcacaactttggccagacgcctcatcaagtattctcgagacctcatcttgcgagagagagcacgtcttatccggtcaagagacttgatacgtcatgctacgcgctctcacgcactcctcatccacttctcgagagccgagaaagagtagcataccttatttactcgccaaagctagaccgcctcctctgttcatctgcatttcgcatcaatctgcctccttcttacgacagatatctcgaatggggctacgcggacaacagcatccggttttttacgacggagaacagaaaaagtgccggtgtgagcgagtgcctccacattgggcaaatttcatgtgttgtggtgccggactctaagactctaatcacggcaggcgaagactgtgtagtgtctgtgttcagtatccaaagccttcctaataagcctgtggagttgatacacaagtcgtcactcttcggtcataaaacacctgtcaacaaaattgccgtgtccaaagcgttcagcacgttggtgacaatttctgaagatggccatgcattcctatgggatctgaatcgcctcgagttcgtgcgcaaactccccaacacgcgtttcgtcgaatgtgcgagcataaatgatgtctcgggcgaaatactcctttgctgtggcaccaatgttgtattgtacactatcaatggcgaactcctattagaccagaatatctgccttgagcaagatgacttcgtgcattcttgcgctttctatgaaggttccggtaacgagtggttggagaactatctcgtctttacgggccataagagaggacgagtcaatatttggaagaggagtgtcaaaaatggaaagtggattttagggttgatcagaagattagaccatgttgacgcacgcagtgagacgggggctaatacagaggcggctataacttgtattacgccaatgccatctctagtgtatacgggagatgatgatgggagggtatacgaatggaacctgattcatagagaaagatagggtatttctcatcgagaggagtatccgacgcgaagcaggaccagggccctagatttgggtatatgggaaaggaactttgctggcagatgatgttgcagaatcatccttagcttaaacgaggggatacgcaacggctatgcgtcctgatcaaaaagattagagaaagcggtatacacccgatactaaaatctgatcaagatcagatcaatgtaatgacgagcattcggacccgagccgtattgagtcagacctttgcttatggggaacgatggtggccacttaacttcggtcaacgatggcattatgatcatgattctcgcacacgttgtcggaacaaaatgggacatagctgctaagcagcgaaaagagatgggagagcgatcaaaagttagctagagaagaggcgatgagaaatgtgttgttcatgtagagcatcggcataggcatagcattggcgttgatatttgctctattttgctcgcggaatacaaatcaggagtgtttatttgtttgttcatactttagggttcttttcccccctggcctgtgaacaagtgtcagtgaccaactcaaaagcagccacctccatacacatgaccaaaatgtctcttgagatattgtagtaaggtcagtcgacttttgcgacatgcagcgaacagatcaatgaatccatggcctgatccatttcgcttacgcctgacgaattgcaatcaaagggtttgct

SEQ ID NO: 32005 - DNA, 7815 bp, Muscodor strobelii
  misc_feature: SGI cDNA ID NO. 571023
  misc_feature: Encodes the peptide sequence at SEQ ID NO 32006
atgtcggcccgcagtcgctatcgttcctcgacgtcggcgtccaaagctcttcccacatccaaagctaccgaagtcctcgagcgcctcctcgatggcctcagcacatctctcacctctccgactgacaatggctacccggaccctgcttcgttagtccaacaagtcacctttattcagcaacacctcgctgctgtttccccaccaagctctgtgcaggacgactttagacacctccgcggcttccagcgcctattcgatgtcttgcggtccttctcagggttctacaacccgcaaaaacgaagccagcctgaaaaggaagacttctttcgtctactggaggcactgctcggagtgctttctgcagcttttaggggtcatccaggaaatcgtcgctatttccgcacaagagtagagggcggagggtgggatgctctggaacagatcattgccagcattggcctcggaggaaccgactcggatctatggacaagttgccagctcttcggcaagctctttgcattcgcattagatgatcctgccctagaccaactatgttccaagatcgtatcgccttctggcagttcgcttagcaccacgaccccaccaatatctgaagatgagcctcacaatggagaattacggccggatgtacttgcgaagattaccactgaccttgccaacaccgtcggcctcacctcgtcattgcaaagtcccgaagctattcgcacaatcgtcgacttctgggaatcgatacctcgagaccaggctgccgcagaaaatgttgcgtcgctcctggtactcaaagtgatacttgctatcgtcaccgcttcaaatgtcaacttatgccaagtacacgagactggtgtgttgtctaggtttttgggtttcgcctttgatgaggcctcagccatcaacaatgtcgaaagagaaatcatcctgtctctttgtcggtctctcatgtccttgggcgtcaacaagcttgcagatgctcagcggttactcctgaatccttcagccgagtcctcggacttctgcttggatatggctaaccgacatagcaatcctcctttcatccagttcgacctctctctacatggccactcgtccattgagctgcctagcctcgggcgggcattccctccccaagcgtccgccggctatagtttcacagcctggatcaaagtagacaaatttgacccacagtctcataccaccctttttggcatctttgatacgacacagacctgtttcttgcttacctatctcgagaaagatacccgcaatttcattttacaaacatcagtcactgcatcgcgtcctagtgttcgtttccgaggcttggcgttcaaagaaaacgtatggtatcacattgcaatagtacatcggcgtccaaaaactttgactgcgagtaaggcatcgctatatgtgaatggagaatttgtcgaacagctaaaggcatcatatcctgcccagtcacctccattaactaccagcaacgctagcacggaaagctttgcttcatttacctcaagtaccaataagactcagcctatccaagccttcctcggaacccctcgagagctgtctccctacaatgggagcgggctcacccattcaaaatggtcgcttgccgcggcccacctgtttgatgatgtactcagtgatgatttcatggcggtcccttatcgacttggtgtgcactaccagggaaatttccaggattgccttgggggcttccagacctatgcggcatcggctgcccttgggcttcgtaacgaagtcgtgaccgcgggcaaggaagaaactgacatcatgaaagtaatcagagatagagcaagtcatttgataccagagcagcgcattctgttcagcttaatgccgtcgtccatattccgggagagggaacatttcggcgaatcacagctctttcggtctttatcccgtggcccggctcatacgttagttcagatggtgctcaaaagcggaaccggtgttgccatcaacactgccatgccttcgatcaatgacgcgcttcttcgctctaatggagtcgccatcctagctggggatcctatcgtcgctgcaccgcaattctttgatgatagtctttggcgacttgccgggttcacgccactcgctcttaagttgatagagcgggcaacttcggccgaggctctcctccgtgctgttgagatggttttcaaatgcattaactccagctggcgcaatagtgaggcaatggaaaaagatggtggttatgcagttctcgcccttctcctcagaacgaaacttggatttgcttttcaaaacggtgtcagtgtgacagaaaaactgatccttccgattgctgaaaaagacaggctatctctgcagctccttggccaggttctcgagttcgtaggatacaaccacagggatcccgtggaatctgtcatcatcaatccactcgcttatcgagtgctggtagtagactttgatgcatggaggcgaagcgcgccaatcgtgcaagagctctactacaagcagtttgtcactttcgcagtaaggagcaagtaccatctgcataatcataggagattattacgaatgaggattgtgaagagacttttggatgccctgaaagccgacccactacccgaaagtgtccttccttttttcttagatgctttagagcagctggtcaagagtagctataataccgaggtccatcgtgctcttgcgcttttcatcacatacgccttgcactcgcctccgcgctcattacctcgcacgccgaagacgtattcgcccggccagcgtcctagagacaattccatacctcggcgcccaacgattgatagcatagctacatcagaagatgcagtacgaaagctcggaaagagagccattgccacccatatcctgagcatgtatagtcagctactctgtgaaaagggaaatctgatcatcattcgcaaattcgccaagacggtgactaataaggtacttgacgctcggctgccacaaaaggattccacgctgacgatggcccagtggctcttatatctcctaactgaggatgatgccgagattgtagtctatggagcaaagattcttgcgcgtctactggttacacatggctcgacctacatcagcaagttttccggtaagactggtgggttttccatcatggcgcacaggctcaaaaggtggtgggatattcctacaatatggcccatttgcttctgtgtcctattcgggtacgacgtcgcagagtttgacttcgataaggatttcgacttttttagtctcttggaaagttttgggacttgtcaggtcgccaaccctgatgtactgccaattattacgtctatgttgcaacatggtctcaaggacattctgaaaaaccaggaagatccagattcaccgcgagtagaaccagaaaatctacgcttatctactgcctcacctgatttattaggtacccgatctcggtcgcggtcgatgtcactcaagaaggagctggaatcacgacgcgcaccacggaccagcttagaacggaacacaggcaacgcatcggttcttcaagccgtcatccggttcatggcagatcttcacgcccgatcgcccaactttcgagagtttgcccttacctcagactacgtaaggttacttctatccacgctgtatcccgcacttgtcagcgcagatccggtaaatccggaaacagaactcaattctcgagactcggctctcacctttgagggcgctgatgtaatcttccgtccattcggcaaatcgacggaaccatccgtcatccgtacatctagtgcaacagataccaatgcagtacggcctggaggtccttatagcggaacgcagctacgcaaagcatcatcatttgtgtttctcacatcccaaaagttttctgaagcaagtccagggcggactggtcaagccgacttctttaagaagactgctactcaggatatcggccatgggctaactgaaggtattcttgagcttgtgatcgacgtttttgtagatcaactgctggtgcgcaaagacttttccgggttcagtctcttctctcgggtacctcccggtttccaagaacaccatgcgtatttcgcatcatacgtgctgaaaagtactattgtccacatgactaataggatcaagttggactggaaaattatgagcgaacccaaagtactgacaaatatgtcgcgcttctgtctgcatatggctgaagcaatcttcgaaggctggttcatgaatgggacggagtcgatgctcgacttcgccggtttgctgctagagcatcttcagaagccagaagtcgcgaagatgaagactgttcggctctgtagccaagcggtctctactatacggaactgttttctgagacttattctcctaagactatctgagatggacagctcgtcaacaacgcaaaatgatgcagacgggtcgatgggaaagataatgtactggcagatggtagttctgaactgcctctctatcgatgatgagtacatgaaattactctggtaccagctctaccataagctagtggacgatcgagagtctgtacggccgcttgccgtcaatctctggcgaatcatgcttgtgcaaaaaccagaagaatgcgcctcgctcttccgcttgactatgacatcagaccaagctcagttagcggcgggcttccagaagttaacagaaatagataatgacgctttcttgtcttgggttgatcaacatcgcccatccttggactccctttttctgggcaacatgtctcgaaactgggaagacttcgtcagtattgagaataaccgcacaacagagggcgctcgctcaaagcttagtaaacgaaaagaagtactgagacgatggcataccgaaacacttgaacgagataatttccttctccgacatgacatgtctaacacagcatggatgaaatcaatctacgcttcggaacactttaaatatcagcgagcagtccaggacaaacaagatgattttttgttctcctcgtcacaattttctaagatggaacaagatctgaccagaccaggagcagtgctctacactcctgagcccatcaaatggcagctcgatagaactgagggccgaaatcgtatgcggctcagattattgcctagtgcatctgacaaacgcgagaaataccagccaaaacgacgtccgactgatcaacaatcagcttcgaatttgaagacagatctccctagcggaaccgtcagagtcgatacgcagcggactgctgcacagtcgtctgtggttcctgagattgccggcgtggatggcggtctggatgagccaccagctggcgatagacacgacgcttcgaatgcagagcaatcttctgctgttgacgacgacttcgaattgattgacgaccctaatgatccaaacgaagctgacgacagtttcgaggataagaaccgaagagttatgcgacgcctacaacaaggagatgccgtgcaacaggtgtataatgtttcgcgcatcaatgccctggaagcttgtgaagggatcctactcatcggaaagactcatttatatatcatggacaatttcttccaatgcgaagatggagaaatcgtgaacgttgctgaagcgccagcccaagaacgcgatccattttctcaaatcatcacgggcgtcagacctcaagaccgagaaagtcacggtccgcaaacttctcgctcgtggaaatggcacgacgtcatcagcacatctaagcgccgcttcttattccgtgacgttgcaatcgagatattcttcaccgacggccgcagctatcttctgactgcgaagaattcaacggcgagagacgaggtcttctcgaaacttgcgcacaagacgcctcataccgctggtccgaatttgctccctaatccagaagacgcctggcgtctggagtccttgcggatgtttgaagagtcacagcaaacatttggatccaagtttggtagtattttcaattcttcgccctggaacccggcaatgcgcaaatggcaaagaggcgagatctccaacttccattacctcatgctggtaaatactatggcaggccgaactttcaatgatttgactcagtatccggtattcccatgggttctagcagactataccagcgatgatcttaatctcgaagatcccgcgacgttccgtgatctatctaagcccatgggtgcacagactgcccgtagacaggccgattatcgatccagataccagagtctcgctgaaataggagagacgccatttcattatggtacacactattcctcagccatgattgtcgcttcgtacttgattcgattgcctcccttcgtggactccttcatccttctacaaggtggtcacttcgaccatgctgaccgattgtttttctcaattgagggatcgtggagatctgcctcacaagacaatggatctgacgttcgtgagctgattcccgaatttttctgtcttccggagttcttgactaatgtcaatggttacaactttggcgttcgacaaggagctggtggtcgtgtcaacgacgtgcaattgccgccttgggcgaaaggcgatcccaagatttttattgccaaacatcgtgaagctctcgaatcgccatatgtcactcaaaaccttcatcactggattgatctcgtatttggttacaagcaacgcggcgaagcggctgtggacaacttgaacgtcttccaccacctttcttattatggagccaaagatcttgacaaaatagttgactctgacgagaggacggccacaacaagcatcattcacaactttggccagacgcctcatcaagtattctcgagacctcatcttgcgagagagagcacgtcttatccggtcaagagacttgatacgtcatgctacgcgctctcacgcactcctcatccacttctcgagagccgagaaagagtagcataccttatttactcgccaaagctagaccgcctcctctgttcatctgcatttcgcatcaatctgcctccttcttacgacagatatctcgaatggggctacgcggacaacagcatccggttttttacgacggagaacagaaaaagtgccggtgtgagcgagtgcctccacattgggcaaatttcatgtgttgtggtgccggactctaagactctaatcacggcaggcgaagactgtgtagtgtctgtgttcagtatccaaagccttcctaataagcctgtggagttgatacacaagtcgtcactcttcggtcataaaacacctgtcaacaaaattgccgtgtccaaagcgttcagcacgttggtgacaatttctgaagatggccatgcattcctatgggatctgaatcgcctcgagttcgtgcgcaaactccccaacacgcgtttcgtcgaatgtgcgagcataaatgatgtctcgggcgaaatactcctttgctgtggcaccaatgttgtattgtacactatcaatggcgaactcctattagaccagaatatctgccttgagcaagatgacttcgtgcattcttgcgctttctatgaaggttccggtaacgagtggttggagaactatctcgtctttacgggccataagagaggacgagtcaatatttggaagaggagtgtcaaaaatggaaagtggattttagggttgatcagaagattagaccatgttgacgcacgcagtgagacgggggctaatacagaggcggctataacttgtattacgccaatgccatctctagtgtatacgggagatgatgatgggagggtatacgaatggaacctgattcatagagaaagatag

SEQ ID NO: 32006 - protein, 2604 aa, Muscodor strobelii
  misc_feature: SGI Peptide ID NO. 571023
  misc_feature (2413)..(2451): Pfam Id: PF00400 Pfam Desc: WD domain, G-beta repeat
  misc_feature (2006)..(2286): Pfam Id: PF02138 Pfam Desc: Beige/BEACH domain
  misc_feature (5)..(2604): NCBI GI: 149210201 Blast Desc: MGCH7_ch7g578 [Magnaporthe grisea 70-15] gi|86196533|gb|EAQ71171.1| MGCH7_ch7g578 [Magnaporthe grisea 70-15]
  misc_feature (127)..(2604): NCBI GI: 261353663 Blast Desc: WD repeat and FYVE domain-containing protein [Verticillium albo-atrum VaMs.102]
  misc_feature (19)..(2557): NCBI GI: 171680109 Blast Desc: protein product [Podospora anserina] gi|170939681|emb|CAP64907.1| protein product [Podospora anserina]
  misc_feature (6)..(2596): NCBI GI: 256731954 Blast Desc: [Nectria haematococca mpVI 77-13-4]
  misc_feature (16)..(2596): NCBI GI: 46105126 Blast Desc: FG00191.1 [Gibberella zeae PH-1]
  misc_feature (6)..(2599): NCBI GI: 224551876 Blast Desc: beige/BEACH domain protein [Epichloe festucae]
  misc_feature (304)..(2594): NCBI GI: 116193323 Blast Desc: CHGG_06379 [Chaetomium globosum CBS 148.51] gi|88182292|gb|EAQ89760.1| CHGG_06379 [Chaetomium globosum CBS 148.51]
  misc_feature (72)..(2602): NCBI GI: 261202238 Blast Desc: beige/BEACH domain-containing protein [Ajellomyces dermatitidis SLH14081] gi|239590430|gb|EEQ73011.1| beige/BEACH domain-containing protein [Ajellomyces dermatitidis SLH14081]
  misc_feature (72)..(2602): NCBI GI: 239612141 Blast Desc: beige/BEACH domain-containing protein [Ajellomyces dermatitidis ER-3]
  misc_feature (72)..(2602): NCBI GI: 226277548 Blast Desc: beige/BEACH domain-containing protein [Paracoccidioides brasiliensis Pb01]
MSARSRYRSSTSASKALPTSKATEVLERLLDGLSTSLTSPTDNGYPDPASLVQQVTFIQQHLAAVSPPSSVQDDFRHLRGFQRLFDVLRSFSGFYNPQKRSQPEKEDFFRLLEALLGVLSAAFRGHPGNRRYFRTRVEGGGWDALEQIIASIGLGGTDSDLWTSCQLFGKLFAFALDDPALDQLCSKIVSPSGSSLSTTTPPISEDEPHNGELRPDVLAKITTDLANTVGLTSSLQSPEAIRTIVDFWESIPRDQAAAENVASLLVLKVILAIVTASNVNLCQVHETGVLSRFLGFAFDEASAINNVEREIILSLCRSLMSLGVNKLADAQRLLLNPSAESSDFCLDMANRHSNPPFIQFDLSLHGHSSIELPSLGRAFPPQASAGYSFTAWIKVDKFDPQSHTTLFGIFDTTQTCFLLTYLEKDTRNFILQTSVTASRPSVRFRGLAFKENVWYHIAIVHRRPKTLTASKASLYVNGEFVEQLKASYPAQSPPLTTSNASTESFASFTSSTNKTQPIQAFLGTPRELSPYNGSGLTHSKWSLAAAHLFDDVLSDDFMAVPYRLGVHYQGNFQDCLGGFQTYAASAALGLRNEVVTAGKEETDIMKVIRDRASHLIPEQRILFSLMPSSIFREREHFGESQLFRSLSRGPAHTLVQMVLKSGTGVAINTAMPSINDALLRSNGVAILAGDPIVAAPQFFDDSLWRLAGFTPLALKLIERATSAEALLRAVEMVFKCINSSWRNSEAMEKDGGYAVLALLLRTKLGFAFQNGVSVTEKLILPIAEKDRLSLQLLGQVLEFVGYNHRDPVESVIINPLAYRVLVVDFDAWRRSAPIVQELYYKQFVTFAVRSKYHLHNHRRLLRMRIVKRLLDALKADPLPESVLPFFLDALEQLVKSSYNTEVHRALALFITYALHSPPRSLPRTPKTYSPGQRPRDNSIPRRPTIDSIATSEDAVRKLGKRAIATHILSMYSQLLCEKGNLIIIRKFAKTVTNKVLDARLPQKDSTLTMAQWLLYLLTEDDAEIVVYGAKILARLLVTHGSTYISKFSGKTGGFSIMAHRLKRWWDIPTIWPICFCVLFGYDVAEFDFDKDFDFFSLLESFGTCQVANPDVLPIITSMLQHGLKDILKNQEDPDSPRVEPENLRLSTASPDLLGTRSRSRSMSLKKELESRRAPRTSLERNTGNASVLQAVIRFMADLHARSPNFREFALTSDYVRLLLSTLYPALVSADPVNPETELNSRDSALTFEGADVIFRPFGKSTEPSVIRTSSATDTNAVRPGGPYSGTQLRKASSFVFLTSQKFSEASPGRTGQADFFKKTATQDIGHGLTEGILELVIDVFVDQLLVRKDFSGFSLFSRVPPGFQEHHAYFASYVLKSTIVHMTNRIKLDWKIMSEPKVLTNMSRFCLHMAEAIFEGWFMNGTESMLDFAGLLLEHLQKPEVAKMKTVRLCSQAVSTIRNCFLRLILLRLSEMDSSSTTQNDADGSMGKIMYWQMVVLNCLSIDDEYMKLLWYQLYHKLVDDRESVRPLAVNLWRIMLVQKPEECASLFRLTMTSDQAQLAAGFQKLTEIDNDAFLSWVDQHRPSLDSLFLGNMSRNWEDFVSIENNRTTEGARSKLSKRKEVLRRWHTETLERDNFLLRHDMSNTAWMKSIYASEHFKYQRAVQDKQDDFLFSSSQFSKMEQDLTRPGAVLYTPEPIKWQLDRTEGRNRMRLRLLPSASDKREKYQPKRRPTDQQSASNLKTDLPSGTVRVDTQRTAAQSSVVPEIAGVDGGLDEPPAGDRHDASNAEQSSAVDDDFELIDDPNDPNEADDSFEDKNRRVMRRLQQGDAVQQVYNVSRINALEACEGILLIGKTHLYIMDNFFQCEDGEIVNVAEAPAQERDPFSQIITGVRPQDRESHGPQTSRSWKWHDVISTSKRRFLFRDVAIEIFFTDGRSYLLTAKNSTARDEVFSKLAHKTPHTAGPNLLPNPEDAWRLESLRMFEESQQTFGSKFGSIFNSSPWNPAMRKWQRGEISNFHYLMLVNTMAGRTFNDLTQYPVFPWVLADYTSDDLNLEDPATFRDLSKPMGAQTARRQADYRSRYQSLAEIGETPFHYGTHYSSAMIVASYLIRLPPFVDSFILLQGGHFDHADRLFFSIEGSWRSASQDNGSDVRELIPEFFCLPEFLTNVNGYNFGVRQGAGGRVNDVQLPPWAKGDPKIFIAKHREALESPYVTQNLHHWIDLVFGYKQRGEAAVDNLNVFHHLSYYGAKDLDKIVDSDERTATTSIIHNFGQTPHQVFSRPHLARESTSYPVKRLDTSCYALSRTPHPLLESRERVAYLIYSPKLDRLLCSSAFRINLPPSYDRYLEWGYADNSIRFFTTENRKSAGVSECLHIGQISCVVVPDSKTLITAGEDCVVSVFSIQSLPNKPVELIHKSSLFGHKTPVNKIAVSKAFSTLVTISEDGHAFLWDLNRLEFVRKLPNTRFVECASINDVSGEILLCCGTNVVLYTINGELLLDQNICLEQDDFVHSCAFYEGSGNEWLENYLVFTGHKRGRVNIWKRSVKNGKWILGLIRRLDHVDARSETGANTEAAITCITPMPSLVYTGDDDGRVYEWNLIHRER

SEQ ID NO: 32007 - DNA, 9058 bp, Muscodor strobelii; identical to SEQ ID NO: 32004
  misc_feature: SGI EST ID NO. CUFF.75654.0
  misc_feature: Variant of the nucleotide sequence at SEQ ID NO 32005

SEQ ID NO: 32008 - DNA, 7764 bp, Muscodor strobelii
  misc_feature: SGI cDNA ID NO. 571024
  misc_feature: Encodes the peptide sequence at SEQ ID NO 32009
atgtcggcccgcagtcgctatcgttcctcgacgtcggcgtccaaagctcttcccacatccaaagctaccgaagtcctcgagcgcctcctcgatggcctcagcacatctctcacctctccgactgacaatggctacccggaccctgcttcgttagtccaacaagtcacctttattcagcaacacctcgctgctgtttccccaccaagctctgtgcaggacgactttagacacctccgcggcttccagcgcctattcgatgtcttgcggtccttctcagggttctacaacccgcaaaaacgaagccagcctgaaaaggaagacttctttcgtctactggaggcactgctcggagtgctttctgcagcttttaggggtcatccaggaaatcgtcgctatttccgcacaagagtagagggcggagggtgggatgctctggaacagatcattgccagcattggcctcggaggaaccgactcggatctatggacaagttgccagctcttcggcaagctctttgcattcgcattagatgatcctgccctagaccaactatgttccaagatcgtatcgccttctggcagttcgcttagcaccacgaccccaccaatatctgaagatgagcctcacaatggagaattacggccggatgtacttgcgaagattaccactgaccttgccaacaccgtcggcctcacctcgtcattgcaaagtcccgaagctattcgcacaatcgtcgacttctgggaatcgatacctcgagaccaggctgccgcagaaaatgttgcgtcgctcctggtactcaaagtgatacttgctatcgtcaccgcttcaaatgtcaacttatgccaagtacacgagactggtgtgttgtctaggtttttgggtttcgcctttgatgaggcctcagccatcaacaatgtcgaaagagaaatcatcctgtctctttgtcggtctctcatgtccttgggcgtcaacaagcttgcagatgctcagcggttactcctgaatccttcagccgagtcctcggacttctgcttggatatggctaaccgacatagcaatcctcctttcatccagttcgacctctctctacatggccactcgtccattgagctgcctagcctcgggcgggcattccctccccaagcgtccgccggctatagtttcacagcctggatcaaagtagacaaatttgacccacagtctcataccaccctttttggcatctttgatacgacacagacctgtttcttgcttacctatctcgagaaagatacccgcaatttcattttacaaacatcagtcactgcatcgcgtcctagtgttcgtttccgaggcttggcgttcaaagaaaacgtatggtatcacattgcaatagtacatcggcgtccaaaaactttgactgcgagtaaggcatcgctatatgtgaatggagaatttgtcgaacagctaaaggcatcatatcctgcccagtcacctccattaactaccagcaacgctagcacggaaagctttgcttcatttacctcaagtaccaataagactcagcctatccaagccttcctcggaacccctcgagagctgtctccctacaatgggagcgggctcacccattcaaaatggtcgcttgccgcggcccacctgtttgatgatgtactcagtgatgatttcatggcggtcccttatcgacttggtgtgcactaccagggaaatttccaggattgccttgggggcttccagacctatgcggcatcggctgcccttgggcttcgtaacgaagtcgtgaccgcgggcaaggaagaaactgacatcatgaaagtaatcagagatagagcaagtcatttgataccagagcagcgcattctgttcagcttaatgccgtcgtccatattccgggagagggaacatttcggcgaatcacagctctttcggtctttatcccgtggcccggctcatacgttagttcagatggtgctcaaaagcggaaccggtgttgccatcaacactgccatgccttcgatcaatgacgcgcttcttcgctctaatggagtcgccatcctagctggggatcctatcgtcgctgcaccgcaattctttgatgatagtctttggcgacttgccgggttcacgccactcgctcttaagttgatagagcgggcaacttcggccgaggctctcctccgtgctgttgagatggttttcaaatgcattaactccagctggcgcaatagtgaggcaatggaaaaagatggtggttatgcagttctcgcccttctcctcagaacgaaacttggatttgcttttcaaaacggtgtcagtgtgacagaaaaactgatccttccgattgctgaaaaagacaggctatctctgcagctccttggccaggttctcgagttcgtaggatacaaccacagggatcccgtggaatctgtcatcatcaatccactcgcttatcgagtgctggtagtagactttgatgcatggaggcgaagcgcgccaatcgtgcaagagctctactacaagcagtttgtcactttcgcagtaaggagcaagtaccatctgcataatcataggagattattacgaatgaggattgtgaagagacttttggatgccctgaaagccgacccactacccgaaagtgtccttccttttttcttagatgctttagagcagctggtcaagagtagctataataccgaggtccatcgtgctcttgcgcttttcatcacatacgccttgcactcgcctccgcgctcattacctcgcacgccgaagacgtattcgcccggccagcgtcctagagacaattccatacctcggcgcccaacgattgatagcatagctacatcagaagatgcagtacgaaagctcggaaagagagccattgccacccatatcctgagcatgtatagtcagctactctgtgaaaagggaaatctgatcatcattcgcaaattcgccaagacggtgactaataagtggctcttatatctcctaactgaggatgatgccgagattgtagtctatggagcaaagattcttgcgcgtctactggttacacatggctcgacctacatcagcaagttttccggtaagactggtgggttttccatcatggcgcacaggctcaaaaggtggtgggatattcctacaatatggcccatttgcttctgtgtcctattcgggtacgacgtcgcagagtttgacttcgataaggatttcgacttttttagtctcttggaaagttttgggacttgtcaggtcgccaaccctgatgtactgccaattattacgtctatgttgcaacatggtctcaaggacattctgaaaaaccaggaagatccagattcaccgcgagtagaaccagaaaatctacgcttatctactgcctcacctgatttattaggtacccgatctcggtcgcggtcgatgtcactcaagaaggagctggaatcacgacgcgcaccacggaccagcttagaacggaacacaggcaacgcatcggttcttcaagccgtcatccggttcatggcagatcttcacgcccgatcgcccaactttcgagagtttgcccttacctcagactacgtaaggttacttctatccacgctgtatcccgcacttgtcagcgcagatccggtaaatccggaaacagaactcaattctcgagactcggctctcacctttgagggcgctgatgtaatcttccgtccattcggcaaatcgacggaaccatccgtcatccgtacatctagtgcaacagataccaatgcagtacggcctggaggtccttatagcggaacgcagctacgcaaagcatcatcatttgtgtttctcacatcccaaaagttttctgaagcaagtccagggcggactggtcaagccgacttctttaagaagactgctactcaggatatcggccatgggctaactgaaggtattcttgagcttgtgatcgacgtttttgtagatcaactgctggtgcgcaaagacttttccgggttcagtctcttctctcgggtacctcccggtttccaagaacaccatgcgtatttcgcatcatacgtgctgaaaagtactattgtccacatgactaataggatcaagttggactggaaaattatgagcgaacccaaagtactgacaaatatgtcgcgcttctgtctgcatatggctgaagcaatcttcgaaggctggttcatgaatgggacggagtcgatgctcgacttcgccggtttgctgctagagcatcttcagaagccagaagtcgcgaagatgaagactgttcggctctgtagccaagcggtctctactatacggaactgttttctgagacttattctcctaagactatctgagatggacagctcgtcaacaacgcaaaatgatgcagacgggtcgatgggaaagataatgtactggcagatggtagttctgaactgcctctctatcgatgatgagtacatgaaattactctggtaccagctctaccataagctagtggacgatcgagagtctgtacggccgcttgccgtcaatctctggcgaatcatgcttgtgcaaaaaccagaagaatgcgcctcgctcttccgcttgactatgacatcagaccaagctcagttagcggcgggcttccagaagttaacagaaatagataatgacgctttcttgtcttgggttgatcaacatcgcccatccttggactccctttttctgggcaacatgtctcgaaactgggaagacttcgtcagtattgagaataaccgcacaacagagggcgctcgctcaaagcttagtaaacgaaaagaagtactgagacgatggcataccgaaacacttgaacgagataatttccttctccgacatgacatgtctaacacagcatggatgaaatcaatctacgcttcggaacactttaaatatcagcgagcagtccaggacaaacaagatgattttttgttctcctcgtcacaattttctaagatggaacaagatctgaccagaccaggagcagtgctctacactcctgagcccatcaaatggcagctcgatagaactgagggccgaaatcgtatgcggctcagattattgcctagtgcatctgacaaacgcgagaaataccagccaaaacgacgtccgactgatcaacaatcagcttcgaatttgaagacagatctccctagcggaaccgtcagagtcgatacgcagcggactgctgcacagtcgtctgtggttcctgagattgccggcgtggatggcggtctggatgagccaccagctggcgatagacacgacgcttcgaatgcagagcaatcttctgctgttgacgacgacttcgaattgattgacgaccctaatgatccaaacgaagctgacgacagtttcgaggataagaaccgaagagttatgcgacgcctacaacaaggagatgccgtgcaacaggtgtataatgtttcgcgcatcaatgccctggaagcttgtgaagggatcctactcatcggaaagactcatttatatatcatggacaatttcttccaatgcgaagatggagaaatcgtgaacgttgctgaagcgccagcccaagaacgcgatccattttctcaaatcatcacgggcgtcagacctcaagaccgagaaagtcacggtccgcaaacttctcgctcgtggaaatggcacgacgtcatcagcacatctaagcgccgcttcttattccgtgacgttgcaatcgagatattcttcaccgacggccgcagctatcttctgactgcgaagaattcaacggcgagagacgaggtcttctcgaaacttgcgcacaagacgcctcataccgctggtccgaatttgctccctaatccagaagacgcctggcgtctggagtccttgcggatgtttgaagagtcacagcaaacatttggatccaagtttggtagtattttcaattcttcgccctggaacccggcaatgcgcaaatggcaaagaggcgagatctccaacttccattacctcatgctggtaaatactatggcaggccgaactttcaatgatttgactcagtatccggtattcccatgggttctagcagactataccagcgatgatcttaatctcgaagatcccgcgacgttccgtgatctatctaagcccatgggtgcacagactgcccgtagacaggccgattatcgatccagataccagagtctcgctgaaataggagagacgccatttcattatggtacacactattcctcagccatgattgtcgcttcgtacttgattcgattgcctcccttcgtggactccttcatccttctacaaggtggtcacttcgaccatgctgaccgattgtttttctcaattgagggatcgtggagatctgcctcacaagacaatggatctgacgttcgtgagctgattcccgaatttttctgtcttccggagttcttgactaatgtcaatggttacaactttggcgttcgacaaggagctggtggtcgtgtcaacgacgtgcaattgccgccttgggcgaaaggcgatcccaagatttttattgccaaacatcgtgaagctctcgaatcgccatatgtcactcaaaaccttcatcactggattgatctcgtatttggttacaagcaacgcggcgaagcggctgtggacaacttgaacgtcttccaccacctttcttattatggagccaaagatcttgacaaaatagttgactctgacgagaggacggccacaacaagcatcattcacaactttggccagacgcctcatcaagtattctcgagacctcatcttgcgagagagagcacgtcttatccggtcaagagacttgatacgtcatgctacgcgctctcacgcactcctcatccacttctcgagagccgagaaagagtagcataccttatttactcgccaaagctagaccgcctcctctgttcatctgcatttcgcatcaatctgcctccttcttacgacagatatctcgaatggggctacgcggacaacagcatccggttttttacgacggagaacagaaaaagtgccggtgtgagcgagtgcctccacattgggcaaatttcatgtgttgtggtgccggactctaagactctaatcacggcaggcgaagactgtgtagtgtctgtgttcagtatccaaagccttcctaataagcctgtggagttgatacacaagtcgtcactcttcggtcataaaacacctgtcaacaaaattgccgtgtccaaagcgttcagcacgttggtgacaatttctgaagatggccatgcattcctatgggatctgaatcgcctcgagttcgtgcgcaaactccccaacacgcgtttcgtcgaatgtgcgagcataaatgatgtctcgggcgaaatactcctttgctgtggcaccaatgttgtattgtacactatcaatggcgaactcctattagaccagaatatctgccttgagcaagatgacttcgtgcattcttgcgctttctatgaaggttccggtaacgagtggttggagaactatctcgtctttacgggccataagagaggacgagtcaatatttggaagaggagtgtcaaaaatggaaagtggattttagggttgatcagaagattagaccatgttgacgcacgcagtgagacgggggctaatacagaggcggctataacttgtattacgccaatgccatctctagtgtatacgggagatgatgatgggagggtatacgaatggaacctgattcatagagaaagatag

SEQ ID NO: 32009 - protein, 2587 aa, Muscodor strobelii
  misc_feature: SGI Peptide ID NO. 571024
  misc_feature (2396)..(2434): Pfam Id: PF00400 Pfam Desc: WD domain, G-beta repeat
  misc_feature (1989)..(2269): Pfam Id: PF02138 Pfam Desc: Beige/BEACH domain
  misc_feature (5)..(2587): NCBI GI: 149210201 Blast Desc: MGCH7_ch7g578 [Magnaporthe grisea 70-15] gi|86196533|gb|EAQ71171.1| MGCH7_ch7g578 [Magnaporthe grisea 70-15]
  misc_feature (6)..(2579): NCBI GI: 256731954 Blast Desc: [Nectria haematococca mpVI 77-13-4]
  misc_feature (127)..(2587): NCBI GI: 261353663 Blast Desc: WD repeat and FYVE domain-containing protein [Verticillium albo-atrum VaMs.102]
  misc_feature (19)..(2540): NCBI GI: 171680109 Blast Desc: protein product [Podospora anserina] gi|170939681|emb|CAP64907.1| protein product [Podospora anserina]
  misc_feature (16)..(2579): NCBI GI: 46105126 Blast Desc: FG00191.1 [Gibberella zeae PH-1]
  misc_feature (6)..(2582): NCBI GI: 224551876 Blast Desc: beige/BEACH domain protein [Epichloe festucae]
  misc_feature (304)..(2577): NCBI GI: 116193323 Blast Desc: CHGG_06379 [Chaetomium globosum CBS 148.51] gi|88182292|gb|EAQ89760.1| CHGG_06379 [Chaetomium globosum CBS 148.51]
  misc_feature (72)..(2585): NCBI GI: 261202238 Blast Desc: beige/BEACH domain-containing protein [Ajellomyces dermatitidis SLH14081] gi|239590430|gb|EEQ73011.1| beige/BEACH domain-containing protein [Ajellomyces dermatitidis SLH14081]
  misc_feature (72)..(2585): NCBI GI: 239612141 Blast Desc: beige/BEACH domain-containing protein [Ajellomyces dermatitidis ER-3]
  misc_feature (72)..(2585): NCBI GI: 226277548 Blast Desc: beige/BEACH domain-containing protein [Paracoccidioides brasiliensis Pb01]
MSARSRYRSSTSASKALPTSKATEVLERLLDGLSTSLTSPTDNGYPDPASLVQQVTFIQQHLAAVSPPSSVQDDFRHLRGFQRLFDVLRSFSGFYNPQKRSQPEKEDFFRLLEALLGVLSAAFRGHPGNRRYFRTRVEGGGWDALEQIIASIGLGGTDSDLWTSCQLFGKLFAFALDDPALDQLCSKIVSPSGSSLSTTTPPISEDEPHNGELRPDVLAKITTDLANTVGLTSSLQSPEAIRTIVDFWESIPRDQAAAENVASLLVLKVILAIVTASNVNLCQVHETGVLSRFLGFAFDEASAINNVEREIILSLCRSLMSLGVNKLADAQRLLLNPSAESSDFCLDMANRHSNPPFIQFDLSLHGHSSIELPSLGRAFPPQASAGYSFTAWIKVDKFDPQSHTTLFGIFDTTQTCFLLTYLEKDTRNFILQTSVTASRPSVRFRGLAFKENVWYHIAIVHRRPKTLTASKASLYVNGEFVEQLKASYPAQSPPLTTSNASTESFASFTSSTNKTQPIQAFLGTPRELSPYNGSGLTHSKWSLAAAHLFDDVLSDDFMAVPYRLGVHYQGNFQDCLGGFQTYAASAALGLRNEVVTAGKEETDIMKVIRDRASHLIPEQRILFSLMPSSIFREREHFGESQLFRSLSRGPAHTLVQMVLKSGTGVAINTAMPSINDALLRSNGVAILAGDPIVAAPQFFDDSLWRLAGFTPLALKLIERATSAEALLRAVEMVFKCINSSWRNSEAMEKDGGYAVLALLLRTKLGFAFQNGVSVTEKLILPIAEKDRLSLQLLGQVLEFVGYNHRDPVESVIINPLAYRVLVVDFDAWRRSAPIVQELYYKQFVTFAVRSKYHLHNHRRLLRMRIVKRLLDALKADPLPESVLPFFLDALEQLVKSSYNTEVHRALALFITYALHSPPRSLPRTPKTYSPGQRPRDNSIPRRPTIDSIATSEDAVRKLGKRAIATHILSMYSQLLCEKGNLIIIRKFAKTVTNKWLLYLLTEDDAEIVVYGAKILARLLVTHGSTYISKFSGKTGGFSIMAHRLKRWWDIPTIWPICFCVLFGYDVAEFDFDKDFDFFSLLESFGTCQVANPDVLPIITSMLQHGLKDILKNQEDPDSPRVEPENLRLSTASPDLLGTRSRSRSMSLKKELESRRAPRTSLERNTGNASVLQAVIRFMADLHARSPNFREFALTSDYVRLLLSTLYPALVSADPVNPETELNSRDSALTFEGADVIFRPFGKSTEPSVIRTSSATDTNAVRPGGPYSGTQLRKASSFVFLTSQKFSEASPGRTGQADFFKKTATQDIGHGLTEGILELVIDVFVDQLLVRKDFSGFSLFSRVPPGFQEHHAYFASYVLKSTIVHMTNRIKLDWKIMSEPKVLTNMSRFCLHMAEAIFEGWFMNGTESMLDFAGLLLEHLQKPEVAKMKTVRLCSQAVSTIRNCFLRLILLRLSEMDSSSTTQNDADGSMGKIMYWQMVVLNCLSIDDEYMKLLWYQLYHKLVDDRESVRPLAVNLWRIMLVQKPEECASLFRLTMTSDQAQLAAGFQKLTEIDNDAFLSWVDQHRPSLDSLFLGNMSRNWEDFVSIENNRTTEGARSKLSKRKEVLRRWHTETLERDNFLLRHDMSNTAWMKSIYASEHFKYQRAVQDKQDDFLFSSSQFSKMEQDLTRPGAVLYTPEPIKWQLDRTEGRNRMRLRLLPSASDKREKYQPKRRPTDQQSASNLKTDLPSGTVRVDTQRTAAQSSVVPEIAGVDGGLDEPPAGDRHDASNAEQSSAVDDDFELIDDPNDPNEADDSFEDKNRRVMRRLQQGDAVQQVYNVSRINALEACEGILLIGKTHLYIMDNFFQCEDGEIVNVAEAPAQERDPFSQIITGVRPQDRESHGPQTSRSWKWHDVISTSKRRFLFRDVAIEIFFTDGRSYLLTAKNSTARDEVFSKLAHKTPHTAGPNLLPNPEDAWRLESLRMFEESQQTFGSKFGSIFNSSPWNPAMRKWQRGEISNFHYLMLVNTMAGRTFNDLTQYPVFPWVLADYTSDDLNLEDPATFRDLSKPMGAQTARRQADYRSRYQSLAEIGETPFHYGTHYSSAMIVASYLIRLPPFVDSFILLQGGHFDHADRLFFSIEGSWRSASQDNGSDVRELIPEFFCLPEFLTNVNGYNFGVRQGAGGRVNDVQLPPWAKGDPKIFIAKHREALESPYVTQNLHHWIDLVFGYKQRGEAAVDNLNVFHHLSYYGAKDLDKIVDSDERTATTSIIHNFGQTPHQVFSRPHLARESTSYPVKRLDTSCYALSRTPHPLLESRERVAYLIYSPKLDRLLCSSAFRINLPPSYDRYLEWGYADNSIRFFTTENRKSAGVSECLHIGQISCVVVPDSKTLITAGEDCVVSVFSIQSLPNKPVELIHKSSLFGHKTPVNKIAVSKAFSTLVTISEDGHAFLWDLNRLEFVRKLPNTRFVECASINDVSGEILLCCGTNVVLYTINGELLLDQNICLEQDDFVHSCAFYEGSGNEWLENYLVFTGHKRGRVNIWKRSVKNGKWILGLIRRLDHVDARSETGANTEAAITCITPMPSLVYTGDDDGRVYEWNLIHRER

SEQ ID NO: 32010 - DNA, 9058 bp, Muscodor strobelii; identical to SEQ ID NO: 32004
  misc_feature: SGI EST ID NO. CUFF.75654.0
  misc_feature: Variant of the nucleotide sequence at SEQ ID NO 32008

SEQ ID NO: 32011 - DNA, 1584 bp, Muscodor strobelii
  misc_feature: SGI cDNA ID NO. 571025
  misc_feature: Encodes the peptide sequence at SEQ ID NO 32012
atgaggagcttcgttgctctcctctcactggcatgcgccgccgctgccgcaccctcattcagcgttgagaccatccacaacgatgccgctcccatcctctcctccacatccgccgaagaaatccccaactcttacatcatcaagttcaaggatcacgtcactgagtcatcagcttccgaccatcactcgtggatccagaagctccacggtgaccgcgaagatgagcggatggagctgaagaagcgtggccagctgcccctgggtgtctctgtcgacatcttcactggtctcaagcacaccttgaagatcggctccgaattcctcggctacactggccacttcgatgatgctgtcatcgaggaggtccgaagacaccccgacgttgagtacgtcgagagggatcagatcgtctacgctctcaaggagaccgagcctgagctagagaacaatgccccctggggattggccagactgtcgcatcgcgactccctctctttcggcacctacaacaagtacctctacgccgctgacggtggtgagggtgttgatgtctatgtcattgacactggtaccaacattgagcacgtcgacttcgaaggccgtgctaagtggggcaagaccattcccaacggtgacgaggatgaggatggcaatggccacggcactcactgctccggcaccgttgcgggcaagaagtacggtgttgccaagaaagcccatgtctatgctgtgaaggttcttaggtcgaatggtagtggctcgatggccgacgtcatgagcggcgtcgactgggctgcctcggcacatatggctcaggtcaaggccgctaaggacggcaagcgcaagaacttcaagggttctactgccaacatgtccctcggaggtggcaagtctgtctctctggacgccgccgtcaacgctgctgtcactgctggtctccacttcgctgtcgctgccggcaacgataatgccgatgcttgcaagtactctcctgccgcagctgagaaggctatgacagtcggtgcttctgctctggatgacagccgtgcctacttctccaactggggcaagtgtgttgacattttcggccccggcttgagcattcagtctacctggattggcagcaaacacgccatcaacaccatctccggaacctccatggcctctcctcacttgtgcggtcttactgcctacttcctttctctccagcctgccagctcctctgactacggcatggctgctatcacccccgagaagctcaaggccaacatgatcagcattgctaccaagggcgtcctgtctgacattccttccgacacccccaacttgttggcctggaacggtggcggtgccagcaactacagcgatatcgttgaggctggtggctacactgccaagagcactgagaccactctgacgctggaagatcttgagaaggctatcaaggatgacctcaacatcgtctctggaacaatcgtcaagggtgtatctaccttctctgataaggccgagaagctgtctgagaagatccacgatgtcgttgaccaggagcttaagggcttcttcgaggagcttcgtgcttaa

SEQ ID NO: 32012 - protein, 527 aa, Muscodor strobelii
  misc_feature: SGI Peptide ID NO. 571025
  misc_feature (43)..(140): Pfam Id: PF05922 Pfam Desc: Subtilisin N-terminal Region
  misc_feature (161)..(443): Pfam Id: PF00082 Pfam Desc: Subtilase family
  misc_feature (1)..(527): NCBI GI: 147225254 Blast Desc: subtilisin-like serine protease [Acremonium sp. F11177]
  misc_feature (1)..(526): NCBI GI: 39943180 Blast Desc: conserved [Magnaporthe grisea 70-15] gi|17368236|sp|P58371.1|SPM1_MAGGR RecName: Full=Subtilisin-like proteinase Spm1; AltName: Full=Serine protease of Magnaporthe 1;
  misc_feature (1)..(525): NCBI GI: 110277435 Blast Desc: vacuolar serine protease [Trichoderma atroviride]
  misc_feature (1)..(515): NCBI GI: 156058540 Blast Desc: serine protease [Sclerotinia sclerotiorum 1980] gi|154701069|gb|EDO00808.1| serine protease [Sclerotinia sclerotiorum 1980]
  misc_feature (8)..(507): NCBI GI: 15808807 Blast Desc: AF413106_1 subtilase [Ophiostoma piliferum]
  misc_feature (23)..(515): NCBI GI: 171680111 Blast Desc: protein product [Podospora anserina] gi|7400480|gb|AAC03564.2| subtilisin-like serine protease [Podospora anserina] gi|170939682|emb|CAP64908.1| protein product
  misc_feature (1)..(527): NCBI GI: 116193325 Blast Desc: CHGG_06380 [Chaetomium globosum CBS 148.51] gi|88182293|gb|EAQ89761.1| CHGG_06380 [Chaetomium globosum CBS 148.51]
  misc_feature (1)..(527): NCBI GI: 222090438 Blast Desc: subtilisin serine protease [Chaetomium globosum] gi|222090440|gb|ACM42425.1| subtilisin serine protease [Chaetomium globosum]
  misc_feature (1)..(515): NCBI GI: 154310724 Blast Desc: BC1G_06836 [Botryotinia fuckeliana B05.10] gi|150851376|gb|EDN26569.1| BC1G_06836 [Botryotinia fuckeliana B05.10]
  misc_feature (1)..(527): NCBI GI: 111182171 Blast Desc: serine protease p2 [Chaetomium thermophilum] gi|118498761|gb|ABK96987.1| serine protease p2 [Chaetomium thermophilum]
  misc_feature (26)..(450): SWISSPROT Homolog: EC 3.4.21.48 Cerevisin
MRSFVALLSLACAAAAAPSFSVETIHNDAAPILSSTSAEEIPNSYIIKFKDHVTESSASDHHSWIQKLHGDREDERMELKKRGQLPLGVSVDIFTGLKHTLKIGSEFLGYTGHFDDAVIEEVRRHPDVEYVERDQIVYALKETEPELENNAPWGLARLSHRDSLSFGTYNKYLYAADGGEGVDVYVIDTGTNIEHVDFEGRAKWGKTIPNGDEDEDGNGHGTHCSGTVAGKKYGVAKKAHVYAVKVLRSNGSGSMADVMSGVDWAASAHMAQVKAAKDGKRKNFKGSTANMSLGGGKSVSLDAAVNAAVTAGLHFAVAAGNDNADACKYSPAAAEKAMTVGASALDDSRAYFSNWGKCVDIFGPGLSIQSTWIGSKHAINTISGTSMASPHLCGLTAYFLSLQPASSSDYGMAAITPEKLKANMISIATKGVLSDIPSDTPNLLAWNGGGASNYSDIVEAGGYTAKSTETTLTLEDLEKAIKDDLNIVSGTIVKGVSTFSDKAEKLSEKIHDVVDQELKGFFEELRA

SEQ ID NO: 32013 - DNA, 2266 bp, Muscodor strobelii
  misc_feature: SGI EST ID NO. CUFF.76726.1
  misc_feature: Variant of the nucleotide sequence at SEQ ID NO 32011
cctgaacctgcgcaactggggaaggcagcctccatcggtacgtgctcactctctgggagctgtcgactgtgtccgtccacggccggtttcctttatcagcagcatcatctgtctcgcctcttcccatcttcttcctcttccacttcccaatcccatcctcaccatctccctcccaatccatccatccatcaagtctcccatcaaccatcacccccaaagtatcactagactggtcttgggttgtttcacttcgtatccttcttcttatcgagtcgccggtagactctcgctataaactgggccgcaagtccacacttatccgcgacaccacaacatccgccattcatcatgaggagcttcgttgctctcctctcactggcatgcgccgccgctgccgcaccctcattcagcgttgagaccatccacaacgatgccgctcccatcctctcctccacatccgccgaagaaatccccaactcttacatcatcaagttcaaggatcacgtcactgagtcatcagcttccgaccatcactcgtggatccagaagctccacggtgaccgcgaagatgagcggatggagctgaagaagcgtggccagctgcccctgggtgtctctgtcgacatcttcactggtctcaagcacaccttgaagatcggctccgaattcctcggctacactggccacttcgatgatgctgtcatcgaggaggtccgaagacaccccgacgttgagtacgtcgagagggatcagatcgtctacgctctcaaggagaccgagcctgagctagagaacaatgccccctggggattggccagactgtcgcatcgcgactccctctctttcggcacctacaacaagtacctctacgccgctgacggtggtgagggtgttgatgtctatgtcattgacactggtaccaacattgagcacgtcgacttcgaaggccgtgctaagtggggcaagaccattcccaacggtgacgaggatgaggatggcaatggccacggcactcactgctccggcaccgttgcgggcaagaagtacggtgttgccaagaaagcccatgtctatgctgtgaaggttcttaggtcgaatggtagtggctcgatggccgacgtcatgagcggcgtcgactgggctgcctcggcacatatggctcaggtcaaggccgctaaggacggcaagcgcaagaacttcaagggttctactgccaacatgtccctcggaggtggcaagtctgtctctctggacgccgccgtcaacgctgctgtcactgctggtctccacttcgctgtcgctgccggcaacgataatgccgatgcttgcaagtactctcctgccgcagctgagaaggctatgacagtcggtgcttctgctctggatgacagccgtgcctacttctccaactggggcaagtgtgttgacattttcggccccggcttgagcattcagtctacctggattggcagcaaacacgccatcaacaccatctccggaacctccatggcctctcctcacttgtgcggtcttactgcctacttcctttctctccagcctgccagctcctctgactacggcatggctgctatcacccccgagaagctcaaggccaacatgatcagcattgctaccaagggcgtcctgtctgacattccttccgacacccccaacttgttggcctggaacggtggcggtgccagcaactacagcgatatcgttgaggctggtggctacactgccaagagcactgagaccactctgacgctggaagatcttgagaaggctatcaaggatgacctcaacatcgtctctggaacaatcgtcaagggtgtatctaccttctctgataaggccgagaagctgtctgagaagatccacgatgtcgttgaccaggagcttaagggcttcttcgaggagcttcgtgcttaaagggctgcggtatttagtcgcaaaggtcgtgcttgtagttgtgaatacaagtcctctagaggaactggaactgtgcaaccagcgtggtggaacatggcattagacagttgtctaagctgcatctttaggttatgggttttctacactgtacacagcataggttattaggtgctcggtcccgtattcataggtttctagtgttggcgcaatagccactatttcctaatatcacattgttcagtgacatacatacagttcctatcgtgagatcttgcacgcgctgactcaaaaacctgccatttatcattggaattttttcttgacgatacatggg

SEQ ID NO: 32014 - DNA, 573 bp, Muscodor strobelii
  misc_feature: SGI cDNA ID NO. 571026
  misc_feature: Encodes the peptide sequence at SEQ ID NO 32015
atgacagtcggtgcttctgctctggatgacagccgtgcctacttctccaactggggcaagtgtgttgacattttcggccccggcttgagcattcagtctacctggattggcagcaaacacgccatcaacaccatctccggaacctccatggcctctcctcacttgtgcggtcttactgcctacttcctttctctccagcctgccagctcctctgactacggcatggctgctatcacccccgagaagctcaaggccaacatgatcagcattgctaccaagggcgtcctgtctgacattccttccgacacccccaacttgttggcctggaacggtggcggtgccagcaactacagcgatatcgttgaggctggtggctacactgccaagagcactgagaccactctgacgctggaagatcttgagaaggctatcaaggatgacctcaacatcgtctctggaacaatcgtcaagggtgtatctaccttctctgataaggccgagaagctgtctgagaagatccacgatgtcgttgaccaggagcttaagggcttcttcgaggagcttcgtgcttaa

SEQ ID NO: 32015 - protein, 190 aa, Muscodor strobelii
  misc_feature: SGI Peptide ID NO. 571026
  misc_feature (1)..(106): Pfam Id: PF00082 Pfam Desc: Subtilase family
  misc_feature (1)..(188): NCBI GI: 110277435 Blast Desc: vacuolar serine protease [Trichoderma atroviride]
  misc_feature (1)..(189): NCBI GI: 39943180 Blast Desc: conserved [Magnaporthe grisea 70-15] gi|17368236|sp|P58371.1|SPM1_MAGGR RecName: Full=Subtilisin-like proteinase Spm1; AltName: Full=Serine protease of Magnaporthe 1;
  misc_feature (1)..(170): NCBI GI: 15808807 Blast Desc: AF413106_1 subtilase [Ophiostoma piliferum]
  misc_feature (1)..(177): NCBI GI: 145583575 Blast Desc: serin endopeptidase [Hypocrea lixii]
  misc_feature (1)..(177): NCBI GI: 115111226 Blast Desc: subtilisin-like protease [Hypocrea lixii]
  misc_feature (1)..(188): NCBI GI: 17385556 Blast Desc: serine protease 2 [Pyrenopeziza brassicae]
  misc_feature (1)..(188): NCBI GI: 256732369 Blast Desc: [Nectria haematococca mpVI 77-13-4]
  misc_feature (1)..(188): NCBI GI: 170674491 Blast Desc: vacuolar subtilisin-like protease [Epichloe festucae]
  misc_feature (1)..(188): NCBI GI: 46105128 Blast Desc: FG00192.1 [Gibberella zeae PH-1]
  misc_feature (1)..(190): NCBI GI: 111182171 Blast Desc: serine protease p2 [Chaetomium thermophilum] gi|118498761|gb|ABK96987.1| serine protease p2 [Chaetomium thermophilum]
  misc_feature (1)..(113): SWISSPROT Homolog: EC 3.4.21.48 Cerevisin
MTVGASALDDSRAYFSNWGKCVDIFGPGLSIQSTWIGSKHAINTISGTSMASPHLCGLTAYFLSLQPASSSDYGMAAITPEKLKANMISIATKGVLSDIPSDTPNLLAWNGGGASNYSDIVEAGGYTAKSTETTLTLEDLEKAIKDDLNIVSGTIVKGVSTFSDKAEKLSEKIHDVVDQELKGFFEELRA

SEQ ID NO: 32016 - DNA, 2331 bp, Muscodor strobelii
  misc_feature: SGI EST ID NO. CUFF.76726.0
  misc_feature: Variant of the nucleotide sequence at SEQ ID NO 32014
cctgaacctgcgcaactggggaaggcagcctccatcggtacgtgctcactctctgggagctgtcgactgtgtccgtccacggccggtttcctttatcagcagcatcatctgtctcgcctcttcccatcttcttcctcttccacttcccaatcccatcctcaccatctccctcccaatccatccatccatcaagtctcccatcaaccatcacccccaaagtatcactagactggtcttgggttgtttcacttcgtatccttcttcttatcgagtcgccggtagactctcgctataaactgggccgcaagtccacacttatccgcgacaccacaacatccgccattcatcatgaggagcttcgttgctctcctctcactggcatgcgccgccgctgccgcaccctcattcagcgttgagaccatccacaacgatgccgctcccatcctctcctccacatccgccgaagaaatccccaactcttacatcatcaagttcaaggatcacgtcactgagtcatcagcttccgaccatcactcgtggatccagaagctccacggtgaccgcgaagatgagcggatggagctgaagaagcgtggccagctgcccctgggtgtctctgtcgacatcttcactggtctcaagcacaccttgaagatcggctccgaattcctcggctacactggccacttcgatgatgctgtcatcgaggaggtccgaagacaccccgacgtaagctgattcccaaattcgcctcgcattgcctcagtagacttgctaacactcatcgtcttcaggttgagtacgtcgagagggatcagatcgtctacgctctcaaggagaccgagcctgagctagagaacaatgccccctggggattggccagactgtcgcatcgcgactccctctctttcggcacctacaacaagtacctctacgccgctgacggtggtgagggtgttgatgtctatgtcattgacactggtaccaacattgagcacgtcgacttcgaaggccgtgctaagtggggcaagaccattcccaacggtgacgaggatgaggatggcaatggccacggcactcactgctccggcaccgttgcgggcaagaagtacggtgttgccaagaaagcccatgtctatgctgtgaaggttcttaggtcgaatggtagtggctcgatggccgacgtcatgagcggcgtcgactgggctgcctcggcacatatggctcaggtcaaggccgctaaggacggcaagcgcaagaacttcaagggttctactgccaacatgtccctcggaggtggcaagtctgtctctctggacgccgccgtcaacgctgctgtcactgctggtctccacttcgctgtcgctgccggcaacgataatgccgatgcttgcaagtactctcctgccgcagctgagaaggctatgacagtcggtgcttctgctctggatgacagccgtgcctacttctccaactggggcaagtgtgttgacattttcggccccggcttgagcattcagtctacctggattggcagcaaacacgccatcaacaccatctccggaacctccatggcctctcctcacttgtgcggtcttactgcctacttcctttctctccagcctgccagctcctctgactacggcatggctgctatcacccccgagaagctcaaggccaacatgatcagcattgctaccaagggcgtcctgtctgacattccttccgacacccccaacttgttggcctggaacggtggcggtgccagcaactacagcgatatcgttgaggctggtggctacactgccaagagcactgagaccactctgacgctggaagatcttgagaaggctatcaaggatgacctcaacatcgtctctggaacaatcgtcaagggtgtatctaccttctctgataaggccgagaagctgtctgagaagatccacgatgtcgttgaccaggagcttaagggcttcttcgaggagcttcgtgcttaaagggctgcggtatttagtcgcaaaggtcgtgcttgtagttgtgaatacaagtcctctagaggaactggaactgtgcaaccagcgtggtggaacatggcattagacagttgtctaagctgcatctttaggttatgggttttctacactgtacacagcataggttattaggtgctcggtcccgtattcataggtttctagtgttggcgcaatagccactatttcctaatatcacattgttcagtgacatacatacagttcctatcgtgagatcttgcacgcgctgactcaaaaacctgccatttatcattggaattttttcttgacgatacatggg

SEQ ID NO: 32017 - DNA, 2052 bp, Muscodor strobelii
  misc_feature: SGI cDNA ID NO. 571027
  misc_feature: Encodes the peptide sequence at SEQ ID NO 32018
atggatgacaacgttttcctcggtgtttggaccaactggtctcgaggcccagtatttggtcctactctgacgactacaaaagcatatggtaacgtattgatcgcattgactgctttctatatcgctttcgttgcatctcgcttctggagaatcctggctctcgtccttcataggcattactcggttccacttgctcaacacgctcttcaccaccaaaggcaaatcattttgcgcaatgcctcgagtccagagtctggtttattatatctgttacggttactatgggcctggcgaaaattacctcgcagccgtttattgcctttagtccccgcaatcgctctcacaggaggctgcatcgcggttttcacgactgccggtgcattttcttcgacaatttcaacagctgtgggtgatgaagtgctgcttagaggggacaactgcgcactgattggcaccccggacaatgttaccgaacacaatcttgtgcgtcccttgaaaactcagagacttagtgcggctgcaacttacgctcaacaatgctacgaggatgtcaacatcgggcagaacgcagcatgcaaaaagttcgcaatcgatgagctgccgattaggaagattgatacaaacgccatttgcccgtttcaatcggagatctgtagaactcagaactccaacatctatctcgacacaggatatctcgatagtaacgatcaccttggcattaatgcacccgggtctgataggttcgcgctgagatacaatcttcactgtgctcccctgaaaaccgaaaattatacaagcgctttcacgtaccaaaacttatcatatgtcagatataactacggcaacaccatcattgggtcgtcagatgaagtcattgtgttagatttcgtacaccaggaaaaggatattagcatacagtattcacaggagccttctgttccattagccggaaggagtctcaagctagctagtatcggagatttcgagttcgaccccatcaccgagctgaaggtctcggaagggactctctttctagcttttctatcaggcaatggtgtttctttcacggagtctttggacgacgactggtatcgagcgactgctccctggcgctactcgactgactatcaatccaaagggaacctgacaagttatcgttttcaagacgctgcatctccaatgggctgcattgagaaatggcaatggtgcaacctcgcgtacccaaacatgaccggctgtggaccattaacgggtcccgatgacgccttcagtggtgcggccccctattttaacctcacgagtagcatcatagacgaagacagaccaacttcgaattccaaagtgggaagccgattaatatggtcgcttctgactctgattgatgcacctctcggcctcgagggattatttctatccctaggagcgacatctttgcgatctcaggatcggctttacagtggaattcaatggccgttacccacgaaccaatggcagctcgatgtgacccattggttccaaacgatactcgcgtcgatccagtcgtctatcgtgaacgcagccacaggccctagccccgagtctggtctcgcaaagacggtacagatattaccttcgagtgatggagagagggaaatatgtaacagtcagaaaatccgaagcaccgcgtactcatcgttcagtctttttggcctactcttcactttcattttcggtgctgcgataaccctcgtgtcaattgcgctggaacctctgcttgccttcatttatgcaaagagaccgtcacacaagcaatactatgctcatctggaatggacgtcgaccgacagtctacagctgcacaggttggcctatgatggtgatgggttggtagagtggtcgcagtgcgtcgatcgggttcctaccacgggagctgatgttatgctgagtggacttgacatttctgatcccaagcggccgatgataaaacgacagggcacgttgatgaattatgttcatgatgtaaaagcgcattctgtcaacgttactatggacgaatcccgccgctctgcttag

SEQ ID NO: 32018 - protein, 683 aa, Muscodor strobelii
  misc_feature: SGI Peptide ID NO. 571027
  misc_feature (2)..(655): NCBI GI: 189194015 Blast Desc: conserved [Pyrenophora tritici-repentis Pt-1C-BFP] gi|187978910|gb|EDU45536.1| conserved [Pyrenophora tritici-repentis Pt-1C-BFP]
  misc_feature (4)..(659): NCBI GI: 169615058 Blast Desc: SNOG_10683 [Phaeosphaeria nodorum SN15] gi|111060957|gb|EAT82077.1| SNOG_10683 [Phaeosphaeria nodorum SN15]
  misc_feature (5)..(660): NCBI GI: 115399382 Blast Desc: [Aspergillus terreus NIH2624] gi|114192163|gb|EAU33863.1| [Aspergillus terreus NIH2624]
  misc_feature (5)..(635): NCBI GI: 70986226 Blast Desc: conserved [Aspergillus fumigatus Af293] gi|66846236|gb|EAL86569.1| conserved [Aspergillus fumigatus Af293]
  misc_feature (5)..(635): NCBI GI: 159128250 Blast Desc: conserved [Aspergillus fumigatus A1163]
  misc_feature (5)..(656): NCBI GI: 119474227 Blast Desc: NFIA_004500 [Neosartorya fischeri NRRL 181] gi|119407142|gb|EAW17092.1| conserved [Neosartorya fischeri NRRL 181]
  misc_feature (3)..(633): NCBI GI: 169772941 Blast Desc: [Aspergillus oryzae RIB40] gi|83768800|dbj|BAE58937.1| protein product [Aspergillus oryzae]
  misc_feature (4)..(622): NCBI GI: 121699395 Blast Desc: ACLA_082720 [Aspergillus clavatus NRRL 1] gi|119396149|gb|EAW06581.1| ACLA_082720 [Aspergillus clavatus NRRL 1]
  misc_feature (4)..(622): NCBI GI: 169618215 Blast Desc: SNOG_12297 [Phaeosphaeria nodorum SN15] gi|160703576|gb|EAT80110.2| SNOG_12297 [Phaeosphaeria nodorum SN15]
  misc_feature (5)..(633): NCBI GI: 256723662 Blast Desc: NECHADRAFT_86728 [Nectria haematococca mpVI 77-13-4]
MDDNVFLGVWTNWSRGPVFGPTLTTTKAYGNVLIALTAFYIAFVASRFWRILALVLHRHYSVPLAQHALHHQRQIILRNASSPESGLLYLLRLLWAWRKLPRSRLLPLVPAIALTGGCIAVFTTAGAFSSTISTAVGDEVLLRGDNCALIGTPDNVTEHNLVRPLKTQRLSAAATYAQQCYEDVNIGQNAACKKFAIDELPIRKIDTNAICPFQSEICRTQNSNIYLDTGYLDSNDHLGINAPGSDRFALRYNLHCAPLKTENYTSAFTYQNLSYVRYNYGNTIIGSSDEVIVLDFVHQEKDISIQYSQEPSVPLAGRSLKLASIGDFEFDPITELKVSEGTLFLAFLSGNGVSFTESLDDDWYRATAPWRYSTDYQSKGNLTSYRFQDAASPMGCIEKWQWCNLAYPNMTGCGPLTGPDDAFSGAAPYFNLTSSIIDEDRPTSNSKVGSRLIWSLLTLIDAPLGLEGLFLSLGATSLRSQDRLYSGIQWPLPTNQWQLDVTHWFQTILASIQSSIVNAATGPSPESGLAKTVQILPSSDGEREICNSQKIRSTAYSSFSLFGLLFTFIFGAAITLVSIALEPLLAFIYAKRPSHKQYYAHLEWTSTDSLQLHRLAYDGDGLVEWSQCVDRVPTTGADVMLSGLDISDPKRPMIKRQGTLMNYVHDVKAHSVNVTMDESRRSA

SEQ ID NO: 32019 - DNA, 2716 bp, Muscodor strobelii
  misc_feature: SGI EST ID NO. CUFF.75674.1
  misc_feature: Variant of the nucleotide sequence at SEQ ID NO 32017
gacatggatgacaacgttttcctcggtgtttggaccaactggtctcgaggcccagtatttggtcctactctgacgactacaaaagcatatggtaacgtattgatcgcattgactgctttctatatcgctttcgttgcatctcgcttctggagaatcctggctctcgtccttcataggcattactcggttccacttgctcaacacgctcttcaccaccaaaggcaaatcattttgcgcaatgcctcgagtccagagtctggtttattatatctgttacggttactatgggcctggcgaaaattacctcgcagccgtttattgcctttagtccccgcaatcgctctcacaggaggctgcatcgcggttttcacgactgccggtgcattttcttcgacaatttcaacagctgtgggtgatgaagtgctgcttagaggggacaactgcgcactgattggcaccccggacaatgttaccgaacacaatcttgtgcgtcccttgaaaactcagagacttagtgcggctgcaacttacgctcaacaatgctacgaggatgtcaacatcgggcagaacgcagcatgcaaaaagttcgcaatcgatgagctgccgattaggaagattgatacaaacgccatttgcccgtttcaatcggagatctgtagaactcagaactccaacatctatctcgacacaggatatctcgatagtaacgatcaccttggcattaatgcacccgggtctgatagatataactacggcaacaccatcattgggtcgtcagatgaagtcattgtgttagatttcgtacaccaggaaaaggatattagcatacagtattcacaggagccttctgttccattagccggaaggagtctcaagctagctagtatcggagatttcgagttcgaccccatcaccgagctgaaggtctcggaagggactctctttctagcttttctatcaggcaatggtgtttctttcacggagtctttggacgacgactggtatcgagcgactgctccctggcgctactcgactgactatcaatccaaagggaacctgacaagttatcgttttcaagacgctgcatctccaatgggctgcattgagaaatggcaatggtgcaacctcgcgtacccaaacatgaccggctgtggaccattaacgggtcccgatgacgccttcagtggtgcggccccctattttaacctcacgagtagcatcatagacgaagacagaccaacttcgaattccaaagtgggaagccgattaatatggtcgcttctgactctgattgatgcacctctcggcctcgagggattatttctatccctaggagcgacatctttgcgatctcaggatcggctttacagtggaattcaatggccgttacccacgaaccaatggcagctcgatgtgacccattggttccaaacgatactcgcgtcgatccagtcgtctatcgtgaacgcagccacaggccctagccccgagtctggtctcgcaaagacggtacagatattaccttcgagtgatggagagagggaaatatgtaacagtcagaaaatccgaagcaccgcgtactcatcgttcagtctttttggcctactcttcactttcattttcggtgctgcgataaccctcgtgtcaattgcgctggaacctctgcttgccttcatttatgcaaagagaccgtcacacaagcaatactatgctcatctggaatggacgtcgaccgacagtctacagctgcacaggttggcctatgatggtgatgggttggtagagtggtcgcagtgcgtcgatcgggttcctaccacgggagctgatgttatgctgagtggacttgacatttctgatcccaagcggccgatgataaaacgacagggcacgttgatgaattatgttcatgatgtaaaagcgcattctgtcaacgttactatggacgaatcccgccgctctgcttagccacgagacttatgtcgtctttgcgattcgagatgtagcctagaaggtccctggtcactcgatcctagagttctagcattctatacaaacagtatctcacgatttttaacgcgacgtggaattctggggaaccggactctacacgtcgaacgggattcgaaaagaaccccaagtcgacttcttcctactcatgatctcagactcgctgtgagccgtgtgttccaactctggtgctggcattgcagccagtggaaggcgtcgaagggattatttgccacttgacgaatcatatataatgatgcactgatgtaacaatggatactgatcgtccatagagctgactattcagctgtggcggagaaccaaggaataacgtggcagcccccaactgtcgcggagggaacgaaggtaacattaatagagccgattgggcaacgcattaaattgacaggaacagcaaggtccctcgaatcacacccaagggcgccgcagtgttgggggtgtaacaccaagccctaccccgaatggctcttctgagccctgaatctgatatagtgcattcacataggcgacttacgcaagtccccggaaaacaggtggcagcgattcacagtcctgctgatctcggtccattctaagttatacctaaaaggctagtgagtttcgattgttgcgccttgtcagctaggtcgttcttgagaatcaatggtaccgctttccttacgttaataaatataattttagactatct

SEQ ID NO: 32020 - DNA, 1962 bp, Muscodor strobelii
  misc_feature: SGI cDNA ID NO. 571028
  misc_feature: Encodes the peptide sequence at SEQ ID NO 32021
atggatgacaacgttttcctcggtgtttggaccaactggtctcgaggcccagtatttggtcctactctgacgactacaaaagcatatggtaacgtattgatcgcattgactgctttctatatcgctttcgttgcatctcgcttctggagaatcctggctctcgtccttcataggcattactcggttccacttgctcaacacgctcttcaccaccaaaggcaaatcattttgcgcaatgcctcgagtccagagtctggtttattatatctgttacggttactatgggcctggcgaaaattacctcgcagccgtttattgcctttagtccccgcaatcgctctcacaggaggctgcatcgcggttttcacgactgccggtgcattttcttcgacaatttcaacagctgtgggtgatgaagtgctgcttagaggggacaactgcgcactgattggcaccccggacaatgttaccgaacacaatcttgtgcgtcccttgaaaactcagagacttagtgcggctgcaacttacgctcaacaatgctacgaggatgtcaacatcgggcagaacgcagcatgcaaaaagttcgcaatcgatgagctgccgattaggaagattgatacaaacgccatttgcccgtttcaatcggagatctgtagaactcagaactccaacatctatctcgacacaggatatctcgatagtaacgatcaccttggcattaatgcacccgggtctgatagatataactacggcaacaccatcattgggtcgtcagatgaagtcattgtgttagatttcgtacaccaggaaaaggatattagcatacagtattcacaggagccttctgttccattagccggaaggagtctcaagctagctagtatcggagatttcgagttcgaccccatcaccgagctgaaggtctcggaagggactctctttctagcttttctatcaggcaatggtgtttctttcacggagtctttggacgacgactggtatcgagcgactgctccctggcgctactcgactgactatcaatccaaagggaacctgacaagttatcgttttcaagacgctgcatctccaatgggctgcattgagaaatggcaatggtgcaacctcgcgtacccaaacatgaccggctgtggaccattaacgggtcccgatgacgccttcagtggtgcggccccctattttaacctcacgagtagcatcatagacgaagacagaccaacttcgaattccaaagtgggaagccgattaatatggtcgcttctgactctgattgatgcacctctcggcctcgagggattatttctatccctaggagcgacatctttgcgatctcaggatcggctttacagtggaattcaatggccgttacccacgaaccaatggcagctcgatgtgacccattggttccaaacgatactcgcgtcgatccagtcgtctatcgtgaacgcagccacaggccctagccccgagtctggtctcgcaaagacggtacagatattaccttcgagtgatggagagagggaaatatgtaacagtcagaaaatccgaagcaccgcgtactcatcgttcagtctttttggcctactcttcactttcattttcggtgctgcgataaccctcgtgtcaattgcgctggaacctctgcttgccttcatttatgcaaagagaccgtcacacaagcaatactatgctcatctggaatggacgtcgaccgacagtctacagctgcacaggttggcctatgatggtgatgggttggtagagtggtcgcagtgcgtcgatcgggttcctaccacgggagctgatgttatgctgagtggacttgacatttctgatcccaagcggccgatgataaaacgacagggcacgttgatgaattatgttcatgatgtaaaagcgcattctgtcaacgttactatggacgaatcccgccgctctgcttag

SEQ ID NO: 32021 - protein, 653 aa, Muscodor strobelii
  misc_feature: SGI Peptide ID NO. 571028
  misc_feature (2)..(625): NCBI GI: 189194015 Blast Desc: conserved [Pyrenophora tritici-repentis Pt-1C-BFP] gi|187978910|gb|EDU45536.1| conserved [Pyrenophora tritici-repentis Pt-1C-BFP]
  misc_feature (4)..(629): NCBI GI: 169615058 Blast Desc: SNOG_10683 [Phaeosphaeria nodorum SN15] gi|111060957|gb|EAT82077.1| SNOG_10683 [Phaeosphaeria nodorum SN15]
  misc_feature (5)..(630): NCBI GI: 115399382 Blast Desc: [Aspergillus terreus NIH2624] gi|114192163|gb|EAU33863.1| [Aspergillus terreus NIH2624]
  misc_feature (4)..(592): NCBI GI: 121699395 Blast Desc: ACLA_082720 [Aspergillus clavatus NRRL 1] gi|119396149|gb|EAW06581.1| ACLA_082720 [Aspergillus clavatus NRRL 1]
  misc_feature (5)..(605): NCBI GI: 70986226 Blast Desc: conserved [Aspergillus fumigatus Af293] gi|66846236|gb|EAL86569.1| conserved [Aspergillus fumigatus Af293]
  misc_feature (5)..(605): NCBI GI: 159128250 Blast Desc: conserved [Aspergillus fumigatus A1163]
  misc_feature (5)..(626): NCBI GI: 119474227 Blast Desc: NFIA_004500 [Neosartorya fischeri NRRL 181] gi|119407142|gb|EAW17092.1| conserved [Neosartorya fischeri NRRL 181]
  misc_feature (3)..(603): NCBI GI: 169772941 Blast Desc: [Aspergillus oryzae RIB40] gi|83768800|dbj|BAE58937.1| protein product [Aspergillus oryzae]
  misc_feature (5)..(603): NCBI GI: 256723662 Blast Desc: NECHADRAFT_86728 [Nectria haematococca mpVI 77-13-4]
  misc_feature (4)..(592): NCBI GI: 169618215 Blast Desc: SNOG_12297 [Phaeosphaeria nodorum SN15] gi|160703576|gb|EAT80110.2| SNOG_12297 [Phaeosphaeria nodorum SN15]
MDDNVFLGVWTNWSRGPVFGPTLTTTKAYGNVLIALTAFYIAFVASRFWRILALVLHRHYSVPLAQHALHHQRQIILRNASSPESGLLYLLRLLWAWRKLPRSRLLPLVPAIALTGGCIAVFTTAGAFSSTISTAVGDEVLLRGDNCALIGTPDNVTEHNLVRPLKTQRLSAAATYAQQCYEDVNIGQNAACKKFAIDELPIRKIDTNAICPFQSEICRTQNSNIYLDTGYLDSNDHLGINAPGSDRYNYGNTIIGSSDEVIVLDFVHQEKDISIQYSQEPSVPLAGRSLKLASIGDFEFDPITELKVSEGTLFLAFLSGNGVSFTESLDDDWYRATAPWRYSTDYQSKGNLTSYRFQDAASPMGCIEKWQWCNLAYPNMTGCGPLTGPDDAFSGAAPYFNLTSSIIDEDRPTSNSKVGSRLIWSLLTLIDAPLGLEGLFLSLGATSLRSQDRLYSGIQWPLPTNQWQLDVTHWFQTILASIQSSIVNAATGPSPESGLAKTVQILPSSDGEREICNSQKIRSTAYSSFSLFGLLFTFIFGAAITLVSIALEPLLAFIYAKRPSHKQYYAHLEWTSTDSLQLHRLAYDGDGLVEWSQCVDRVPTTGADVMLSGLDISDPKRPMIKRQGTLMNYVHDVKAHSVNVTMDESRRSA

SEQ ID NO: 32022 - DNA, 2716 bp, Muscodor strobelii; identical to SEQ ID NO: 32019
  misc_feature: SGI EST ID NO. CUFF.75674.1
  misc_feature: Variant of the nucleotide sequence at SEQ ID NO 32020

SEQ ID NO: 32023 - DNA, 1161 bp, Muscodor strobelii
  misc_feature: SGI cDNA ID NO. 571029
  misc_feature: Encodes the peptide sequence at SEQ ID NO 32024
atgcttcccgcatcttctgtaacatctcagcagtgctcacatctggtacagccgacaatcatggggcctcccggtggcagtgaaaatgtgcgcccaataatgaagagtcaccattccatgagtgtgctgccaaagttgcggcagaagcttagttcatttagtttcaatccccagtcaacagactcggcgggcgagaaagttattgcgcttcaaccgagctgcccacagagtgttacaaggagccctcagcttttccagtcaccgcgtggtatagaattccagcttgagcagaagcatcctgaaaagcacgagaagaagacaaaacgtctccgttcaaaaccgtcggcgatggtcctaggcttcaagaagacgatgcgcagaagccccagcaacagatttcctggcagcttccgcagtcaggctcggaaagtatctcaaggcatgaaggatacactgaaaggtcttatgtcgttcaatgcagccagaagcgatacaggtagtgtggatcaaaccacaccaattccggcacaacacgtcgaagcacggagatcacactgcacaagcacaatagacatgggagatggtctgcaagccgaaactgactatgtatcttttaatgaccgaagttcgatttcgcaagtcacctcggccgtgccgtctgtgcaaaacgtgtcttctcatcagcaaccacagtctcgatgtggtagtatggagagctacagaagcgggagcctacaatctagtgaaagatctcgcgtaactagctggtccaattcagacgccaacactcttgccagcgcgtgtaacgagtttcagcccggaaatcggttgtcaatcgttgatgaatgtggaagaaatgattcttcctcgccaacggctgagactacgctaaatctacgcatgcagcaacctgaaggccactgtcgccagagactcttctctgctctcgtaaagcggggcattcaaactgctaataatcaaggaagcgagcgcggtacgactaccaatatcgacgcacagagcggcattcaaaacgtccagagacctccttatgaagtttggggcagtccccagaaacccaccattcgctgtatcacgccttctaacagtggtgttgatgactccctttttgatgcaacgatcgacagacgaaatttgtag

SEQ ID NO: 32024 - protein, 386 aa, Muscodor strobelii
  misc_feature: SGI Peptide ID NO. 571029
  misc_feature (93)..(319): NCBI GI: 154310722 Blast Desc: BC1G_06835 [Botryotinia fuckeliana B05.10] gi|150851375|gb|EDN26568.1| BC1G_06835 [Botryotinia fuckeliana B05.10]
  misc_feature (135)..(284): NCBI GI: 156058538 Blast Desc: SS1G_03281 [Sclerotinia sclerotiorum 1980] gi|154701068|gb|EDO00807.1| SS1G_03281 [Sclerotinia sclerotiorum 1980]
  misc_feature (134)..(327): NCBI GI: 171680113 Blast Desc: protein product [Podospora anserina] gi|170939683|emb|CAP64909.1| protein product [Podospora anserina]
  misc_feature (136)..(373): NCBI GI: 39943184 Blast Desc: MGG_03672 [Magnaporthe grisea 70-15] gi|145009736|gb|EDJ94392.1| MGG_03672 [Magnaporthe grisea 70-15]
  misc_feature (124)..(327): NCBI GI: 164428511 Blast Desc: NCU00674 [Neurospora crassa OR74A] gi|157072175|gb|EAA36578.2| [Neurospora crassa OR74A]
  misc_feature (109)..(337): NCBI GI: 256732366 Blast Desc: NECHADRAFT_80865 [Nectria haematococca mpVI 77-13-4]
  misc_feature (137)..(284): NCBI GI: 46105130 Blast Desc: FG00193.1 [Gibberella zeae PH-1]
  misc_feature (108)..(259): NCBI GI: 261353674 Blast Desc: conserved [Verticillium albo-atrum VaMs.102]
  misc_feature (136)..(331): NCBI GI: 116193327 Blast Desc: CHGG_06381 [Chaetomium globosum CBS 148.51] gi|88182294|gb|EAQ89762.1| CHGG_06381 [Chaetomium globosum CBS 148.51]
MLPASSVTSQQCSHLVQPTIMGPPGGSENVRPIMKSHHSMSVLPKLRQKLSSFSFNPQSTDSAGEKVIALQPSCPQSVTRSPQLFQSPRGIEFQLEQKHPEKHEKKTKRLRSKPSAMVLGFKKTMRRSPSNRFPGSFRSQARKVSQGMKDTLKGLMSFNAARSDTGSVDQTTPIPAQHVEARRSHCTSTIDMGDGLQAETDYVSFNDRSSISQVTSAVPSVQNVSSHQQPQSRCGSMESYRSGSLQSSERSRVTSWSNSDANTLASACNEFQPGNRLSIVDECGRNDSSSPTAETTLNLRMQQPEGHCRQRLFSALVKRGIQTANNQGSERGTTTNIDAQSGIQNVQRPPYEVWGSPQKPTIRCITPSNSGVDDSLFDATIDRRNL

SEQ ID NO: 32025 - DNA, 302 bp, Muscodor strobelii
  misc_feature: SGI EST ID NO. CUFF.75689.0
  misc_feature: Variant of the nucleotide sequence at SEQ ID NO 32023
gcgcagaagccccagcaacagatttcctggcagcttccgcagtcaggctcggaaagtatctcaaggcatgaaggatacactgaaaggtcttatgtcgttcaatgcagccagaagcgatacaggtagtgtggatcaaaccacaccaattccggcacaacacgtcgaagcacggagatcacactgcacaagcacaatagacatgggagatggtctgcaagccgaaactgactatgtatcttttaatgaccgaagttcgatttcgcaagtcacctcggccgtgccgtctgtgcaaaacgtgtctt

SEQ ID NO: 32026 - DNA, 2673 bp, Muscodor strobelii
  misc_feature: SGI cDNA ID NO. 571030
  misc_feature: Elevated expression when VOC is produced
  misc_feature: Encodes the peptide sequence at SEQ ID NO 32027
atggcggaagcagtcgcaactttgagcctggcctcttccgttctgcaggtcattgacttcggaaccaaggttgtcacggtcgctttcaaggcgtatacatcatctaaacgcaatggcagggatgtagacgagatttcacagctgcaaactgtgtacaacaatctgtcaaatacagtgcagatcattcagcaacagtctgccgctaccatctcaggccaggggattgaggaaggcatggagactctaacccgggactgttctgagctggcagaggatatgctgcagagacttggaaagattggctttgctaaggtcactagcaagcgcagcgcgttgtgggctgcgttgaagttgacctgggaacaaaaggagctcgcctccctccaagctaggctaggagactttaggtcgcagctgataatgtgcctgctggtctctgtgcgccattacgccagctgctcgctgtcaagacaagatgagatactggcgatactaggcaatagcgaagaacgtcgcatggggatatcggtcgtcgaatatgtaacatccagtttggaccacgtttcgcgtaaagaacaggcaaagtccctccaacacgatcttgcctgtgtaatacaagaccagcaactattatcaccaccaatcagtaggaccgaatcggagcttgaggtaacagaggatacgtataataagtcaatcgagttactccttgccagtctcgaataccgtgggatgaaagatcgagaagacgggattgcggatgcccatgaacagactttccggtggatattcagtgataatagcaacgacaaatggatcagcctcaaacagtggctccattctgacgaaaaactctactggattactggaaaggcaggttcgggcaagagtactctgatgaaatacataagccgcccagtgatgcttccgggacgggaacatcgacgctcacgctgtcgtgactatttggacaactggagaggaacacggaagctcatcattgcatccttttatttctggaactctggactatcagcgcagaccacccagaggggtctgttgacgacgctactccgacagatcttggagagatgtcccgatcttgtgtcgcttgcatctcctcgccggtgggagaacctgtgtttgtttggccacaatcacccatggcaaaacgcagaactgcgcagtttttttcgcctctgtattgagaatctagaacactgcaatgcagccgtggttcttttcgttgatggcctagacgaattcaacggcaacccgcaagatcttcttgcaatattcaaggagatacaggacctgccgagctgtaagctgtgcgtcgcgagccgaccttgggttgaatttgaggatgcatttgatcaaacgccagccctgatgctggagcatctaacctacaacgacattaaaggctttataactgcgaagttcgacagtgacgcgggcttcgcacggctgcgtttgagggagagacagttttctgaccagttggtcgagagtattatttccaaggcatcaggagtcttcctttgggtctcgctggttgtatcatcgcttctggcaggtatgagccacggtgaccgcgtggtagattttcaaaggaggctcgacctacttccgacagatctgagcgatctatacgagaaaatgttgcagaatctcgatccattctatctggaacatgctgcacagctattcgcattagtgggaggtagtggtgagcctatcaaccttctactagcatcatttgcagatgaggatgatccagcattcgcggtggcgatggagacgaagccgcttatggaagaagaagtgagtctccggatggatacaatgcgccgtcgtatcaatagtcgttctaagggattgctggaagtcaaaggaggcatgtcgacaccgcaaggttttagctacgatgcattgagccatagggaggtcacagttcagtatctccaccgcactgtgaaagactacgtggaaagttcaaaagttcaacaaaccctgaaagaggcactgaaatcgccatttgatccacatctgaaactgatggccgggcatctagcttatatcaaagcaacagacctgtcctctcttctgccggaagatttttggagccagcattcggcgcattgctttgcacatgcccgtgttgtcaaaagggaaagtatccctacgatgattattttacttgatagtctcgacaccctgttgaacgacgtgaagttggtgtttccgcctggcgagcgaacttcgtatgatgaatacagctacccatttttgtctgtggcaacaacttgtaacgtgatagagtacgttagggctaagacgtcgggccgctgcattacagtacggcaggatgggagccaatggcccttacttaaagatactgtccgtgtgtacgaccacgatccttgcccagcctccctcacgggttccactttggacaattcaatggataaaaacgaaatgatcagaatgctcctggacaaaggagcagatcctaagctcgccccggactcaatggagcatcccacgtcagctttggtacttgcggtagttcgatatatgagtaccaattgtgcgccagatgctgacacgttgggcgatctatggaaggtccacactcaagatcgaattcaaccgtctaactcggtataa

SEQ ID NO: 32027 - protein, 890 aa, Muscodor strobelii
  misc_feature: SGI Peptide ID NO. 571030
  misc_feature (1)..(790): NCBI GI: 46116306 Blast Desc: FG03995.1 [Gibberella zeae PH-1]
  misc_feature (3)..(758): NCBI GI: 169768460 Blast Desc: [Aspergillus oryzae RIB40] gi|238497764|ref|XP_002380117.1| conserved [Aspergillus flavus NRRL3357] gi|83766558|dbj|BAE56698.1| protein product oryzae]
  misc_feature (3)..(702): NCBI GI: 225684243 Blast Desc: conserved [Paracoccidioides brasiliensis Pb03]
  misc_feature (3)..(708): NCBI GI: 226293863 Blast Desc: conserved [Paracoccidioides brasiliensis Pb18]
  misc_feature (3)..(839): NCBI GI: 261190024 Blast Desc: conserved [Ajellomyces dermatitidis SLH14081] gi|239591250|gb|EEQ73831.1| conserved [Ajellomyces dermatitidis SLH14081]
  misc_feature (16)..(840): NCBI GI: 238501160 Blast Desc: conserved [Aspergillus flavus NRRL3357] gi|220692051|gb|EED48398.1| conserved [Aspergillus flavus NRRL3357]
  misc_feature (215)..(697): NCBI GI: 171682584 Blast Desc: protein product [Podospora anserina] gi|170941251|emb|CAP66901.1| protein product [Podospora anserina]
  misc_feature (15)..(687): NCBI GI: 116195412 Blast Desc: CHGG_04304 [Chaetomium globosum CBS 148.51] gi|88180217|gb|EAQ87685.1| CHGG_04304 [Chaetomium globosum CBS 148.51]
  misc_feature (22)..(716): NCBI GI: 46139445 Blast Desc: FG11237.1 [Gibberella zeae PH-1]
  misc_feature (1)..(701): NCBI GI: 154293653 Blast Desc: BC1G_14084 [Botryotinia fuckeliana B05.10] gi|150845240|gb|EDN20433.1| BC1G_14084 [Botryotinia fuckeliana B05.10]
  misc_feature: Useful for introducing or modulating the production of volatile compounds
MAEAVATLSLASSVLQVIDFGTKVVTVAFKAYTSSKRNGRDVDEISQLQTVYNNLSNTVQIIQQQSAATISGQGIEEGMETLTRDCSELAEDMLQRLGKIGFAKVTSKRSALWAALKLTWEQKELASLQARLGDFRSQLIMCLLVSVRHYASCSLSRQDEILAILGNSEERRMGISVVEYVTSSLDHVSRKEQAKSLQHDLACVIQDQQLLSPPISRTESELEVTEDTYNKSIELLLASLEYRGMKDREDGIADAHEQTFRWIFSDNSNDKWISLKQWLHSDEKLYWITGKAGSGKSTLMKYISRPVMLPGREHRRSRCRDYLDNWRGTRKLIIASFYFWNSGLSAQTTQRGLLTTLLRQILERCPDLVSLASPRRWENLCLFGHNHPWQNAELRSFFRLCIENLEHCNAAVVLFVDGLDEFNGNPQDLLAIFKEIQDLPSCKLCVASRPWVEFEDAFDQTPALMLEHLTYNDIKGFITAKFDSDAGFARLRLRERQFSDQLVESIISKASGVFLWVSLVVSSLLAGMSHGDRVVDFQRRLDLLPTDLSDLYEKMLQNLDPFYLEHAAQLFALVGGSGEPINLLLASFADEDDPAFAVAMETKPLMEEEVSLRMDTMRRRINSRSKGLLEVKGGMSTPQGFSYDALSHREVTVQYLHRTVKDYVESSKVQQTLKEALKSPFDPHLKLMAGHLAYIKATDLSSLLPEDFWSQHSAHCFAHARVVKRESIPTMIILLDSLDTLLNDVKLVFPPGERTSYDEYSYPFLSVATTCNVIEYVRAKTSGRCITVRQDGSQWPLLKDTVRVYDHDPCPASLTGSTLDNSMDKNEMIRMLLDKGADPKLAPDSMEHPTSALVLAVVRYMSTNCAPDADTLGDLWKVHTQDRIQPSNSV

SEQ ID NO: 32028 - DNA, 2980 bp, Muscodor strobelii
  misc_feature: SGI EST ID NO. CUFF.75704.0
  misc_feature: Variant of the nucleotide sequence at SEQ ID NO 32026
gcgcgatttgcatctcagtacaaaatgaggttcatccaatttcatattcggtcagtgtcaattgattgatatggcaattcccgccctattttgctggtagcatcatggcggaagcagtcgcaactttgagcctggcctcttccgttctgcaggtcattgacttcggaaccaaggttgtcacggtcgctttcaaggcgtatacatcatctaaacgcaatggcagggatgtagacgagatttcacagctgcaaactgtgtacaacaatctgtcaaatacagtgcagatcattcagcaacagtctgccgctaccatctcaggccaggggattgaggaaggcatggagactctaacccgggactgttctgagctggcagaggatatgctgcagagacttggaaagattggctttgctaaggtcactagcaagcgcagcgcgttgtgggctgcgttgaagttgacctgggaacaaaaggagctcgcctccctccaagctaggctaggagactttaggtcgcagctgataatgtgcctgctggtctctgtgcgccattacgccagctgctcgctgtcaagacaagatgagatactggcgatactaggcaatagcgaagaacgtcgcatggggatatcggtcgtcgaatatgtaacatccagtttggaccacgtttcgcgtaaagaacaggcaaagtccctccaacacgatcttgcctgtgtaatacaagaccagcaactattatcaccaccaatcagtaggaccgaatcggagcttgaggtaacagaggatacgtataataagtcaatcgagttactccttgccagtctcgaataccgtgggatgaaagatcgagaagacgggattgcggatgcccatgaacagactttccggtggatattcagtgataatagcaacgacaaatggatcagcctcaaacagtggctccattctgacgaaaaactctactggattactggaaaggcaggttcgggcaagagtactctgatgaaatacataagccgcccagtgatgcttccgggacgggaacatcgacgctcacgctgtcgtgactatttggacaactggagaggaacacggaagctcatcattgcatccttttatttctggaactctggactatcagcgcagaccacccagaggggtctgttgacgacgctactccgacagatcttggagagatgtcccgatcttgtgtcgcttgcatctcctcgccggtgggagaacctgtgtttgtttggccacaatcacccatggcaaaacgcagaactgcgcagtttttttcgcctctgtattgagaatctagaacactgcaatgcagccgtggttcttttcgttgatggcctagacgaattcaacggcaacccgcaagatcttcttgcaatattcaaggagatacaggacctgccgagctgtaagctgtgcgtcgcgagccgaccttgggttgaatttgaggatgcatttgatcaaacgccagccctgatgctggagcatctaacctacaacgacattaaaggctttataactgcgaagttcgacagtgacgcgggcttcgcacggctgcgtttgagggagagacagttttctgaccagttggtcgagagtattatttccaaggcatcaggagtcttcctttgggtctcgctggttgtatcatcgcttctggcaggtatgagccacggtgaccgcgtggtagattttcaaaggaggctcgacctacttccgacagatctgagcgatctatacgagaaaatgttgcagaatctcgatccattctatctggaacatgctgcacagctattcgcattagtgggaggtagtggtgagcctatcaaccttctactagcatcatttgcagatgaggatgatccagcattcgcggtggcgatggagacgaagccgcttatggaagaagaagtgagtctccggatggatacaatgcgccgtcgtatcaatagtcgttctaagggattgctggaagtcaaaggaggcatgtcgacaccgcaaggttttagctacgatgcattgagccatagggaggtcacagttcagtatctccaccgcactgtgaaagactacgtggaaagttcaaaagttcaacaaaccctgaaagaggcactgaaatcgccatttgatccacatctgaaactgatggccgggcatctagcttatatcaaagcaacagacctgtcctctcttctgccggaagatttttggagccagcattcggcgcattgctttgcacatgcccgtgttgtcaaaagggaaagtatccctacgatgattattttacttgatagtctcgacaccctgttgaacgacgtgaagttggtgtttccgcctggcgagcgaacttcgtatgatgaatacagctacccatttttgtctgtggcaacaacttgtaacgtgatagagtacgttagggctaagacgtcgggccgctgcattacagtacggcaggatgggagccaatggcccttacttaaagatactgtccgtgtgtacgaccacgatccttgcccagcctccctcacgggttccactttggacaattcaatggataaaaacgaaatgatcagaatgctcctggacaaaggagcagatcctaagctcgccccggactcaatggagcatcccacgtcagctttggtacttgcggtagttcgatatatgagtaccaattgtgcgccagatgctgacacggtgcgtctgcttgcgaagggctgtacatatgattctacgaccatcgatcgcatcatgtctgtctatctttctgagcatgggtatagttgggcgatctatggaaggtccacactcaagatcgaattcaaccgtctaactcggtataatctaacttggtttcgtatgaagagtcgaattcgcaaggctctcaaagatcttaataaaggggctttgccaaatttctcagagatttgggcagagttgactcacaagcaccacatata

SEQ ID NO: 32029 - DNA, 834 bp, Muscodor strobelii
  misc_feature: SGI cDNA ID NO. 571031
  misc_feature: Encodes the peptide sequence at SEQ ID NO 32030
atgagtatgcagcgacacccacctagccctccgcaggtcgccatacacaaatcagcatctttaatcgaatcgcaaccgttcgatatacatgtagcactaatgtcaaactgcgaaaccctagccaacctcagcgctgttattcatgcctctcccgtcctgtacggctcgtttctaatagcaaaatccaccattcttctcgcgtttctcgtgcgagatctcggctgtggaattcgagatgcggtggccttggcgctcaccgacaagctggacattcaccatgacggatacgctgaacaagcagagcaggcaatccaacaatatgctagccttccttcagctacaattgcaacgaggagaatcacgactgatactatcgtcaaaatgattcagatcaatcgagcgattcaattctggaccgaccggtatgcgtttgcaaaactatcgagcgtcgaggtcaaagcgaccactggcgcgtatcccatcactgtacacgaacgccagcgcatcgcccaagcccttctccgctaccagatcatgatgaacatccatgaaggctacatacatccaggtcgacccatacagcttcatgacaacttatcgctcaactttcgccaagtgctccgcaaattttctgagctgttccacggttgggagatggagcaagtgtggcaaatgcacatttttctgcaccagctgggactccaagagcacccggacttccgtagccaaggccatcaacggctcagacagtacaatcgtgacgtgcaagacatcattgcctatagacatcgcatgttagcgaaaggaaatgtgcatcaatctcaaacagtgtag

SEQ ID NO: 32030 - protein, 277 aa, Muscodor strobelii
  misc_feature: SGI Peptide ID NO. 571031
  misc_feature (15)..(246): NCBI GI: 238504638 Blast Desc: conserved [Aspergillus flavus NRRL3357] gi|220691021|gb|EED47370.1| conserved [Aspergillus flavus NRRL3357]
  misc_feature (17)..(228): NCBI GI: 115449853 Blast Desc: [Aspergillus terreus NIH2624] gi|114187662|gb|EAU29362.1| [Aspergillus terreus NIH2624]
  misc_feature (45)..(235): NCBI GI: 145228595 Blast Desc: An01g01670 [Aspergillus niger] gi|134054697|emb|CAK43538.1| protein product [Aspergillus niger]
MSMQRHPPSPPQVAIHKSASLIESQPFDIHVALMSNCETLANLSAVIHASPVLYGSFLIAKSTILLAFLVRDLGCGIRDAVALALTDKLDIHHDGYAEQAEQAIQQYASLPSATIATRRITTDTIVKMIQINRAIQFWTDRYAFAKLSSVEVKATTGAYPITVHERQRIAQALLRYQIMMNIHEGYIHPGRPIQLHDNLSLNFRQVLRKFSELFHGWEMEQVWQMHIFLHQLGLQEHPDFRSQGHQRLRQYNRDVQDIIAYRHRMLAKGNVHQSQTV

SEQ ID NO: 32031 - DNA, 413 bp, Muscodor strobelii
  misc_feature: SGI EST ID NO. CUFF.75713.0
  misc_feature: Variant of the nucleotide sequence at SEQ ID NO 32029
ctccgctaccagatcatgatgaacatccatgaaggctacatacatccaggtcgacccatacagcttcatgacaacttatcgctcaactttcgccaagtgctccgcaaattttctgagctgttccacggttgggagatggagcaagtgtggcaaatgcacatttttctgcaccagctgggactccaagagcacccggacttccgtagccaaggccatcaacggctcagacagtacaatcgtgacgtgcaagacatcattgcctatagacatcgcatgttagcgaaaggaaatgtgcatcaatctcaaacagtgtagcactgtttcaaaaaccaatccgcacccatgtggttttggctcagaggcagccatggcttcccgcttgatccggcttcctggactcaccccgacgtagg

SEQ ID NO: 32032 - DNA, 498 bp, Muscodor strobelii
  misc_feature: SGI cDNA ID NO. 571032
  misc_feature: Encodes the peptide sequence at SEQ ID NO 32033
atggcgagaccagagcgtatcttgcgtctttcgggccactaccgccgccttcccggaaaaacagaggagcaatttcacgccttctcaagagaccacgccgtcaaatgtgctaaaattcacgagagatacggcgttctcaaataccaaattgtgcgtaaccaagcctctcacacggcgagtgctcgagctctagcagagagcatcaagaccccatatgcgatcaacacacacgatctggagattgaataccacttcaaagacaccgcctcgctcattgccgtgtctaacgacaaggagttcatagctcttcaccaggattcaaaagacttcgttgatcatgataatgctactgtcactctgacgtggatcgaggtgtatctggaaaatggcaaactggtgaatgtcgattcggctggggagagcacgtatgcttcatttgctgagctggctgatatcaaattgtctgaggtgccggctggtaaatatcacgaggcatga

SEQ ID NO: 32033 - protein, 165 aa, Muscodor strobelii
  misc_feature: SGI Peptide ID NO. 571032
  misc_feature (2)..(160): NCBI GI: 121707242 Blast Desc: conserved [Aspergillus clavatus NRRL 1] gi|119399923|gb|EAW10349.1| conserved [Aspergillus clavatus NRRL 1]
  misc_feature (5)..(154): NCBI GI: 145236906 Blast Desc: An07g00070 [Aspergillus niger] gi|134075565|emb|CAK39231.1| protein product [Aspergillus niger]
  misc_feature (5)..(150): NCBI GI: 70983267 Blast Desc: conserved [Aspergillus fumigatus Af293] gi|66844786|gb|EAL85123.1| conserved [Aspergillus fumigatus Af293] gi|159124047|gb|EDP49166.1| conserved [Aspergillus A1163]
  misc_feature (5)..(161): NCBI GI: 145236894 Blast Desc: An07g00010 [Aspergillus niger] gi|134075559|emb|CAK39225.1| protein product [Aspergillus niger]
  misc_feature (4)..(155): NCBI GI: 255941832 Blast Desc: Pc16g13860 [Penicillium chrysogenum Wisconsin 54-1255] gi|211586308|emb|CAP94056.1| Pc16g13860 [Penicillium chrysogenum Wisconsin 54-1255]
  misc_feature (5)..(149): NCBI GI: 115491577 Blast Desc: [Aspergillus terreus NIH2624] gi|114197276|gb|EAU38976.1| [Aspergillus terreus NIH2624]
  misc_feature (5)..(160): NCBI GI: 145244250 Blast Desc: An11g06450 [Aspergillus niger] gi|134079314|emb|CAK96943.1| protein product [Aspergillus niger]
  misc_feature (7)..(148): NCBI GI: 145233179 Blast Desc: An02g08300 [Aspergillus niger] gi|134056889|emb|CAK37792.1| protein product [Aspergillus niger]
  misc_feature (5)..(135): NCBI GI: 154322709 Blast Desc: [Botryotinia fuckeliana B05.10] gi|150848031|gb|EDN23224.1| [Botryotinia fuckeliana B05.10]
  misc_feature (5)..(139): NCBI GI: 169768776 Blast Desc: [Aspergillus oryzae RIB40] gi|238498112|ref|XP_002380291.1| conserved [Aspergillus flavus NRRL3357] gi|83766716|dbj|BAE56856.1| protein product oryzae]
MARPERILRLSGHYRRLPGKTEEQFHAFSRDHAVKCAKIHERYGVLKYQIVRNQASHTASARALAESIKTPYAINTHDLEIEYHFKDTASLIAVSNDKEFIALHQDSKDFVDHDNATVTLTWIEVYLENGKLVNVDSAGESTYASFAELADIKLSEVPAGKYHEA

SEQ ID NO: 32034 - DNA, 2958 bp, Muscodor strobelii
  misc_feature: SGI cDNA ID NO. 571033
  misc_feature: Encodes the peptide sequence at SEQ ID NO 32035
atgtcttcacgtaatgcgtacctcgcttacaagagagacaccggacacttggtgtactgggtgattcacgcctccaacagtgtaatcaagtcacttcaagcgtctaaacacgaagatgcatcatcttttggtacgctaaacacgacgggacaaatgacagtctccgaacttgtgttgttatcgaagctcatcgcaaagcacattgacccgatcccaaacgcaatttacactcttttccagtcagtaatcgaggctaggagcgcctcccatcagttcttccagcaagctgtcgtcgagaaccctgatccagatgtcgagaagcgcaatgcctcccacaagcacttcattgacgctcttaccgaagcattcaacgccctcggagatcccaggtggatgtctttgatacagaagtccgagaatgagcgcacaaccgccgaggatgacactgaaagcgtcgtattttcgaaccaattctccctactcaatatcggaaattgccacgacagtgatgatgcgggaagcgaggagacacaaaatcataattcctccactgccgcgctggctccggtacctcaacgtcaacaaaggaaatcttcgagcaaaggaaagaaggggaagaaggggaagaaaggaaagaggcaaaacacgaaatccagacttccaaccgattccgacttgcataaagttcctttggagaactatggtatcattgatgacgaagatggaattgctgagaagtatcgactggccgtttatgcatttactcgacaatcatgcaagctccgtacttatctacagaacctctggcaagacgtggcctatgcaggtctcaacagtgccgtcgcagcggaagtctccaaagttgcaatcaaaatgatcaagaagacagagtcagccgtcttcattgactttccaggacgtgagaactatgaaaccatgctgcacacgttgacttctggggacatagataaagcacagggcagattgaagattgggatattacatagggacaggacggatccatcgaagcctccaacttggcaagagatagcattcgacgtcagagaacaattcatgatacatgcctaccaggatcttgtcgatttcatcgtcgactttcaaaaatctcaaaatggcaagccgacaaaatctatgacgagggagaccaataagtgggatccagcctttgacctcgagcaagcgactaaggaggagcggatccaatttcgacgatcctacaccatcaactggctctatgatctagtcaatgttttttcatccgtggtggtacaagacaaagaatctaatgtgaagtatgaagaagtcgattactccagccgcccaccgcttggtgaccaccggatgttctatgggccgactgagctcgccggattcattacttcattggctatgcagaagcaaggcacagaagttcgcaaaaagatcatgccacatcacgttctcgagcttcaatgccttgttgactcattcacggtatcgagaggctggtccacaagcgtcctcagaggccatattcttcaaaaacctgcgactgccttttgtccaaggagagacatcgatcttttcttagatagtaacaatgagagtcacggtcgtggctgtttacaaggtctcgatgctctgaaagaatgtcttctgcaagacggtattaatggtggagatcctgatcggcacaagctgctatacgatgtcgcaaacaagttgttcacggaatttaaacacggactgggcgagtcacagtatatgcatagccttaacacagtccctctctcacgatttgctcagccgaacggtctatgggaatactcgccatatctttgcggcgtaggtcttatggagggactcgaattggcttattgcgtcggcatgttcatctgggatcgtattccggaaatactaatgctcgtccatctacacaacatgcttgtctgcaaaggctatattggtcgacccattgacttatacggtatgctggactatctatttgtggaagtatggttcagcggcaagcgatttcttcgactagattttcaccaagttcttctcgacgagctccagcaattggatcgcctgaaactggctcgggcgcgggaagctgcgcgagcgaaggctgggtggcttatccggccagagatactgtctccagagcataacatcaaattcaagaagaagtctgatatgacactctatcgcattgccgagtgggatccggaacgtatttcaaacgaggaaatctacgtgagatcggggttaagcttcattcgcatactgcagacaaaacgcctggtcgatgttgatagcggcgaggagcggatcatggagacgactctaacccgccgctggaaagaagtaggtgtggatgataagactctactagagatgtcatcgatggccctagccggcaaaaggaagcgcccccgtcgccggataccccaaagctgtgtgcctgagggatacaaggtaggggatattccagaaattgaagctgcaaggactgcaaagctcagttccagggataaaagccataatggagttgaatttgtggaccgcgatattcttgattggattaaggtcgacttcaacgacgagatttgcgggacaatcagacctatcacaagtctgaactacgcacaggtaactgcggatatgctgatggtcttcgctcaaatggaagaagcactcaaatccgctcgaaatcctatttatacagaggcttacgagggtcacgaacaaagacgcaaagatcaacgcgctcgtctgataacactcgcaatgacggacaagaatccggcttgctgccgaattctggcagatgtcttagagagttcaagatccagctttgtcgaccgtacttactggggagaattgcgaaacatctcgccggtgaaacaaagtcgacctgacaagccccaggaagattcttgttcggtgatgtag

SEQ ID NO: 32035 - protein, 985 aa, Muscodor strobelii
  misc_feature: SGI Peptide ID NO. 571033
  misc_feature (48)..(967): NCBI GI: 85084286 Blast Desc: NCU00400 [Neurospora crassa OR74A] gi|28918375|gb|EAA28050.1| [Neurospora crassa OR74A]
  misc_feature (1)..(985): NCBI GI: 256722034 Blast Desc: NECHADRAFT_101973 [Nectria haematococca mpVI 77-13-4]
  misc_feature (70)..(985): NCBI GI: 258573721 Blast Desc: [Uncinocarpus reesii 1704] gi|237901308|gb|EEP75709.1| [Uncinocarpus reesii 1704]
  misc_feature (1)..(985): NCBI GI: 255937535 Blast Desc: Pc13g13850 [Penicillium chrysogenum Wisconsin 54-1255] gi|211584414|emb|CAP92454.1| Pc13g13850 [Penicillium chrysogenum Wisconsin 54-1255]
  misc_feature (1)..(711): NCBI GI: 116202973 Blast Desc: CHGG_09371 [Chaetomium globosum CBS 148.51] gi|88177889|gb|EAQ85357.1| CHGG_09371 [Chaetomium globosum CBS 148.51]
  misc_feature (7)..(974): NCBI GI: 9368554 Blast Desc: [Neurospora crassa]
  misc_feature (1)..(960): NCBI GI: 145614084 Blast Desc: MGG_08979 [Magnaporthe grisea 70-15] gi|145021062|gb|EDK05191.1| MGG_08979 [Magnaporthe grisea 70-15]
  misc_feature (5)..(762): NCBI GI: 145615259 Blast Desc: MGG_13075 [Magnaporthe grisea 70-15] gi|145022129|gb|EDK06149.1| MGG_13075 [Magnaporthe grisea 70-15]
  misc_feature (231)..(974): NCBI GI: 164427410 Blast Desc: NCU03437 [Neurospora crassa OR74A] gi|157071731|gb|EAA27487.2| NCU03437 [Neurospora crassa OR74A]
  misc_feature (1)..(960): NCBI GI: 46109890 Blast Desc: FG01827.1 [Gibberella zeae PH-1]
MSSRNAYLAYKRDTGHLVYWVIHASNSVIKSLQASKHEDASSFGTLNTTGQMTVSELVLLSKLIAKHIDPIPNAIYTLFQSVIEARSASHQFFQQAVVENPDPDVEKRNASHKHFIDALTEAFNALGDPRWMSLIQKSENERTTAEDDTESVVFSNQFSLLNIGNCHDSDDAGSEETQNHNSSTAALAPVPQRQQRKSSSKGKKGKKGKKGKRQNTKSRLPTDSDLHKVPLENYGIIDDEDGIAEKYRLAVYAFTRQSCKLRTYLQNLWQDVAYAGLNSAVAAEVSKVAIKMIKKTESAVFIDFPGRENYETMLHTLTSGDIDKAQGRLKIGILHRDRTDPSKPPTWQEIAFDVREQFMIHAYQDLVDFIVDFQKSQNGKPTKSMTRETNKWDPAFDLEQATKEERIQFRRSYTINWLYDLVNVFSSVVVQDKESNVKYEEVDYSSRPPLGDHRMFYGPTELAGFITSLAMQKQGTEVRKKIMPHHVLELQCLVDSFTVSRGWSTSVLRGHILQKPATAFCPRRDIDLFLDSNNESHGRGCLQGLDALKECLLQDGINGGDPDRHKLLYDVANKLFTEFKHGLGESQYMHSLNTVPLSRFAQPNGLWEYSPYLCGVGLMEGLELAYCVGMFIWDRIPEILMLVHLHNMLVCKGYIGRPIDLYGMLDYLFVEVWFSGKRFLRLDFHQVLLDELQQLDRLKLARAREAARAKAGWLIRPEILSPEHNIKFKKKSDMTLYRIAEWDPERISNEEIYVRSGLSFIRILQTKRLVDVDSGEERIMETTLTRRWKEVGVDDKTLLEMSSMALAGKRKRPRRRIPQSCVPEGYKVGDIPEIEAARTAKLSSRDKSHNGVEFVDRDILDWIKVDFNDEICGTIRPITSLNYAQVTADMLMVFAQMEEALKSARNPIYTEAYEGHEQRRKDQRARLITLAMTDKNPACCRILADVLESSRSSFVDRTYWGELRNISPVKQSRPDKPQEDSCSVM

SEQ ID NO: 32036 - DNA, 1173 bp, Muscodor strobelii
  misc_feature: SGI cDNA ID NO. 571034
  misc_feature: Encodes the peptide sequence at SEQ ID NO 32037
atggctgatcaattacttcaggatatcgctgcgaatggaaagttgttcctcgactccaaggacaacgatgcgagacagaagatcatcgctgctgccggtgcgctgatccaggagttggaaaatcctggggagcagatggcgagaattggatggggagagccgagtaggactgcggctttgagaactgcgtttgagcttgggttgtttaagaagctgatgactgagccgatgagtagctctgagttggctgctgggacggaggctgatccttcgcttgtcgcgcgaacactgaaacacctcgccgcaaatggcatcatcaaagaagtgagcgtagacaaatatgtcggcacgccgttctctatggcgactaatgaccctacgatagccgcggggctgatatacagcttcgagggcatgatcccgactttcaatggccttcctgagtttctagccaagaccaagtatcaggagccaagtgatgggaataatggtcctgtgcaatatggcttgaagaccgaaaagccgtttttcggtgtgcttcaggataatcccagacttggcgctgcattcaacgatttcatgacgggatacgcgaaagtccgaccgcgatgggttgatttctaccccgtaaccgaacgtctaagcggtggcgatgcacaatccggtgtcttactagtcgacgtcggcggcggcgtaggtcacgaactctccgaccttcacgaaaaatatccagaacttccgggaaaactagtattacaagaccaaccatcagtcatctcgcaagctcaacaatccggcaaccttccgtcatcgatcgaagcagtctcgcacgacttcttcgaagcgcaaccagagcaatatcggggcgcgagagcatatttcatgcgtctaatcatgcacgattggccggacgccaagtgtgctgtgatattgggtcatctgagagatgcgatggtgaggggtcactcgaaactcttgattaatgaggcggtactcagagatacgggggcgccgtggcagcagactagtctggattggaccatgatgggtatgcttgttagtcgcgaacggacggagagacagtggaggacgttgcttgagagggttggattgagggttacgggggtttggagtagggagaatgagagtgttattgaggctgagcttgagtaa

SEQ ID NO: 32037 - protein, 390 aa, Muscodor strobelii
  misc_feature: SGI Peptide ID NO. 571034
  misc_feature (108)..(367): Pfam Id: PF00891 Pfam Desc: O-methyltransferase
  misc_feature (160)..(367): Pfam Id: PF00891 Pfam Desc: O-methyltransferase
  misc_feature (1)..(390): NCBI GI: 256734271 Blast Desc: NECHADRAFT_36367 [Nectria haematococca mpVI 77-13-4]
  misc_feature (12)..(389): NCBI GI: 145235619 Blast Desc: An03g05790 [Aspergillus niger] gi|134058145|emb|CAK38339.1| protein product [Aspergillus niger]
  misc_feature (4)..(389): NCBI GI: 242783242 Blast Desc: O-methyltransferase, [Talaromyces stipitatus ATCC 10500] gi|218720295|gb|EED19714.1| O-methyltransferase, [Talaromyces stipitatus ATCC 10500]
  misc_feature (5)..(389): NCBI GI: 67541563 Blast Desc: AN6945.2 [Aspergillus nidulans FGSC A4] gi|40738510|gb|EAA57700.1| AN6945.2 [Aspergillus nidulans FGSC A4] gi|259480556|tpe|CBF71797.1| TPA: O-methyltransferase, FGSC
  misc_feature (5)..(389): NCBI GI: 255933237 Blast Desc: Pc12g12810 [Penicillium chrysogenum Wisconsin 54-1255] gi|211582708|emb|CAP80908.1| Pc12g12810 [Penicillium chrysogenum Wisconsin 54-1255]
  misc_feature (19)..(389): NCBI GI: 115395870 Blast Desc: conserved [Aspergillus terreus NIH2624] gi|114193143|gb|EAU34843.1| conserved [Aspergillus terreus NIH2624]
  misc_feature (5)..(389): NCBI GI: 255943319 Blast Desc: Pc18g06010 [Penicillium chrysogenum Wisconsin 54-1255] gi|211587161|emb|CAP94825.1| Pc18g06010 [Penicillium chrysogenum Wisconsin 54-1255]
  misc_feature (5)..(389): NCBI GI: 121709769 Blast Desc: o-methyltransferase [Aspergillus clavatus NRRL 1] gi|119400664|gb|EAW11089.1| o-methyltransferase [Aspergillus clavatus NRRL 1]
  misc_feature (5)..(389): NCBI GI: 115390997 Blast Desc: conserved [Aspergillus terreus NIH2624] gi|114193927|gb|EAU35627.1| conserved [Aspergillus terreus NIH2624]
  misc_feature (36)..(389): NCBI GI: 242771728 Blast Desc: hydroxyindole O-methyltransferase, [Talaromyces stipitatus ATCC 10500] gi|218721521|gb|EED20939.1| hydroxyindole O-methyltransferase, [Talaromyces stipitatus ATCC 10500]
  misc_feature (57)..(382): SWISSPROT Homolog: EC 2.1.1.110 Sterigmatocystin 8-O-methyltransferase
MADQLLQDIAANGKLFLDSKDNDARQKIIAAAGALIQELENPGEQMARIGWGEPSRTAALRTAFELGLFKKLMTEPMSSSELAAGTEADPSLVARTLKHLAANGIIKEVSVDKYVGTPFSMATNDPTIAAGLIYSFEGMIPTFNGLPEFLAKTKYQEPSDGNNGPVQYGLKTEKPFFGVLQDNPRLGAAFNDFMTGYAKVRPRWVDFYPVTERLSGGDAQSGVLLVDVGGGVGHELSDLHEKYPELPGKLVLQDQPSVISQAQQSGNLPSSIEAVSHDFFEAQPEQYRGARAYFMRLIMHDWPDAKCAVILGHLRDAMVRGHSKLLINEAVLRDTGAPWQQTSLDWTMMGMLVSRERTERQWRTLLERVGLRVTGVWSRENESVIEAELE

SEQ ID NO: 32038 - DNA, 1446 bp, Muscodor strobelii
  misc_feature: SGI EST ID NO. CUFF.75738.0
  misc_feature: Variant of the nucleotide sequence at SEQ ID NO 32036
caaacacttattatatagcgacaatggctgatcaattacttcaggatatcgctgcgaatggaaagttgttcctcgactccaaggacaacgatgcgagacagaagatcatcgctgctgccggtgcgctgatccaggagttggaaaatcctggggagcagatggcgagaattggatggggagagccgagtaggactgcggctttgagaactgcgtttgagcttgggttgtttaagaagctgatgactgagccgatgagtagctctgagttggctgctgggacggaggctgatccttcgcttgtcgcgcgaacactgaaacacctcgccgcaaatggcatcatcaaagaagtgagcgtagacaaatatgtcggcacgccgttctctatggcgactaatgaccctacgatagccgcggggctgatatacagcttcgagggcatgatcccgactttcaatggccttcctgagtttctagccaagaccaagtatcaggagccaagtgatgggaataatggtcctgtgcaatatggcttgaagaccgaaaagccgtttttcggtgtgcttcaggataatcccagacttggcgctgcattcaacgatttcatgacgggatacgcgaaagtccgaccgcgatgggttgatttctaccccgtaaccgaacgtctaagcggtggcgatgcacaatccggtgtcttactagtcgacgtcggcggcggcgtaggtcacgaactctccgaccttcacgaaaaatatccagaacttccgggaaaactagtattacaagaccaaccatcagtcatctcgcaagctcaacaatccggcaaccttccgtcatcgatcgaagcagtctcgcacgacttcttcgaagcgcaaccagagcaatatcggggcgcgagagcatatttcatgcgtctaatcatgcacgattggccggacgccaagtgtgctgtgatattgggtcatctgagagatgcgatggtgaggggtcactcgaaactcttgattaatgaggcggtactcagagatacgggggcgccgtggcagcagactagtctggattggaccatgatgggtatgcttgttagtcgcgaacggacggagagacagtggaggacgttgcttgagagggttggattgagggttacgggggtttggagtagggagaatgagagtgttattgaggctgagcttgagtaagttgtagatagagtgtgatatcgatgtaccacggggccgaccgtggtagattctatacaggagagggctggagctgataggaaaagcatttatcggtccatatatgccggtttcatctcgcgtgatacaccaattgcagatccttctcgctctcaagcctttggttgatggaatggtaccctagttaactggacagtacgccagtgttagcaggagttgatgaagatggtctacggtacctcatttcgaa

SEQ ID NO: 32039 - DNA, 996 bp, Muscodor strobelii
  misc_feature: SGI cDNA ID NO. 571035
  misc_feature: Reduced expression when VOC is produced
  misc_feature: Encodes the peptide sequence at SEQ ID NO 32040
atggcgaaaggtcgaaggccaggatatggccgggcgtctcgcgccaaggggaatgtcacgagttccactcccatggcctctgcctcgaccacatccaccatcacaacgatttccacccctctcagctcggttgctccctctacaaatgcatcagatgtcgagcatgatatcagtgaagccgtcagaaagcttgccattggttcaacggctctggagctaaatacattaacagcaccaaggacaaaggccaagcgcaccagactagagccctttcgatttctcgagcttccctccgaactgcgcatcaaagtctacgagcatcactttgccaatgctgcgggcgaggtgctcgacctggacccagacaactataagacataccaccaaagactggcgatactgcgaacctgtcgcatcatttacagggaagcaatgtactacttctatagcacacacccggttcgcgtcttcccgtgccattggggacgccatttcaagaccaagaagcctttgctcgcccgattgaagccgggccagcgagcttgcatcacgactctcgatttccgtctagggccaggctggagcgatccgcctcctggatgggtggtgaaacccatactgggactggaccagtgtactaatgtcacgaaattgacgatatacgctgaaattgatccaagcgaccccacgttcaaagacttccggcgaaacaacgggtactacacagcattcacagtgaaccttctcaatggcattctcgatcaaatgccctggatcaaacgcattgagtttgacgcttggacagtcgtaaggaaatcaggatctcttatgcagggtctcattagtgtggctcagtcccgtggtttaaagatcacttggggtcctgataaaggatggaccgatgccgatgaagtagagcccccagctgccgtggtcaactgggcacctttgagcagcgttgtgcctactactagcaacattgtggcggtggcgtaa

SEQ ID NO: 32040 - protein, 331 aa, Muscodor strobelii
  misc_feature: SGI Peptide ID NO. 571035
  misc_feature (38)..(331): NCBI GI: 171694546 Blast Desc: protein product [Podospora anserina] gi|170947515|emb|CAP59676.1| protein product [Podospora anserina]
  misc_feature (35)..(306): NCBI GI: 85119332 Blast Desc: NCU02942 [Neurospora crassa OR74A] gi|28927435|gb|EAA36388.1| conserved [Neurospora crassa OR74A]
  misc_feature (68)..(306): NCBI GI: 261361393 Blast Desc: conserved [Verticillium albo-atrum VaMs.102]
  misc_feature (47)..(311): NCBI GI: 256720590 Blast Desc: NECHADRAFT_49842 [Nectria haematococca mpVI 77-13-4]
  misc_feature (37)..(306): NCBI GI: 46135689 Blast Desc: FG09360.1 [Gibberella zeae PH-1]
  misc_feature (12)..(330): NCBI GI: 145607401 Blast Desc: MGG_12179 [Magnaporthe grisea 70-15] gi|145014966|gb|EDJ99534.1| MGG_12179 [Magnaporthe grisea 70-15]
  misc_feature (28)..(299): NCBI GI: 156040565 Blast Desc: SS1G_12299 [Sclerotinia sclerotiorum 1980] gi|154696355|gb|EDN96093.1| SS1G_12299 [Sclerotinia sclerotiorum 1980]
  misc_feature (34)..(299): NCBI GI: 154320870 Blast Desc: BC1G_01907 [Botryotinia fuckeliana B05.10] gi|150853596|gb|EDN28788.1| BC1G_01907 [Botryotinia fuckeliana B05.10]
  misc_feature (86)..(306): NCBI GI: 189209293 Blast Desc: conserved [Pyrenophora tritici-repentis Pt-1C-BFP] gi|187977072|gb|EDU43698.1| conserved [Pyrenophora tritici-repentis Pt-1C-BFP]
  misc_feature (57)..(306): NCBI GI: 145238430 Blast Desc: An07g07870 [Aspergillus niger] gi|134076347|emb|CAK39603.1| protein product [Aspergillus niger]
  misc_feature: Useful for introducing or modulating the production of volatile compounds
MAKGRRPGYGRASRAKGNVTSSTPMASASTTSTITTISTPLSSVAPSTNASDVEHDISEAVRKLAIGSTALELNTLTAPRTKAKRTRLEPFRFLELPSELRIKVYEHHFANAAGEVLDLDPDNYKTYHQRLAILRTCRIIYREAMYYFYSTHPVRVFPCHWGRHFKTKKPLLARLKPGQRACITTLDFRLGPGWSDPPPGWVVKPILGLDQCTNVTKLTIYAEIDPSDPTFKDFRRNNGYYTAFTVNLLNGILDQMPWIKRIEFDAWTVVRKSGSLMQGLISVAQSRGLKITWGPDKGWTDADEVEPPAAVVNWAPLSSVVPTTSNIVAVA

SEQ ID NO: 32041 - DNA, 2874 bp, Muscodor strobelii
  misc_feature: SGI cDNA ID NO. 571036
  misc_feature: Encodes the peptide sequence at SEQ ID NO 32042
atgaggcgagctcgaccctctcactcccccccatcgccctatagggcgttggcgcaccatccagcaaacgtccagataccggattccgcttccttgattaggtctttcaatgttgaaaccaatccgacacggcctatacggccatcccctctcacagcatcgacgattccagatatgccactggatctgatggatcgcatgagatcgtttccgctcttcatgtcagccccagaagagtttcttatcgctattggaaagcatttaagaccccaagtgcactcggcgaatgatcatattctgaccgagggagatggcgcaaaatccatgtactggctggtccgcggcgttgtagccgttgcatctagagacggagaagcaatatacgccgagctgaaacctggttgtttcttcggcgagattggcgtcctcatgaacatgcctcgaacggccaccgttatcgctcggacaaaatgtctcctgctggtgctgaagaaggaagatttgcagcaggagcttcctagattccctgagatggaaaaagccatccgccatgaagcccatgagcgattgacaattttaaagaagaagcgccaagaaagcggtcatggccttaaaccaacggacggccagacagcggcgcgagaagccgcacctggagaggtcttaactggagacgagggcatcatcaaagagggagtcgtgttgaacactaaaaagaggaagtcacctagtcccggaggcattgaggatcccgctgctggaagcgctttgggcagtggtttggtcaatgtcagacagacgctgagagaactcccactgttttccgcccttcctccagatattctccacttccttggcatgagtgcaattcccaagacataccctcccttcacagatattgtgcagcaaggcgcgcctggtaatgaaattttcttcattgtccgtggcgaagcagaagtaatacacgaagtcacagaaagccaaatgcagaagaggataacccgatcgtcgctaatccgacctcgattgaaacaaggacagtattttggtgaggttgtcagtctcggcctttcggttaagcgtactgcgaccgtcaagtcgataacaacagtcgagtgtctcatgatcagtggtgaggctcttgatgaactgtggcaacgctgccctagtaatatcagggagcaggttgaagaaacagcaagaaataggattaggcgagcagatgcggaagatgttgatatggcagacgtgggaaaggtggaggacattactaccaatatctcgttgagacccgctccccaagttacgttcacaacgccgtcaatgccagcatctcctatcaaagacgaatcggatcaattaagacccagagatcctgacccgtacctcagtgttgacatggaaaatctgagaaaccggcggagagcatcccttgctcctcctaccgactctacaagtactacaagcgggaatggtgtacaattgcacgcaaacaatgccaacgcgccaatcaaagtctcaattccgacagagccctcgttggattgggaagaaggtccagcgaagagggcgaaattagtggacaggaccactgatttggagatcgaggagaccacgtcgcttcctcatgatatcctcatgtcggtgtttcaacagctagatgccgtagaattataccgtctcaggggactttcctcacactggcgcagtgttttctcaacctcgccgaaactgggccattcagtggatttgtcagcctacaaccgccggattaccgatgatattcttatcaaaagattcgcgcccttccttggtcaccggcctctctatgtcgacgtaagcaactgctttcatattaccgatgaaggcttctcgacgttctggaaactctgtggaaagaacgttaaaatatggagaatgaagtcagtctgggatgtctcggccaaccagattctcgagatgagtgacaatgcaaagagcttggaggaggttgactggagcaactgccgtaaagtcggtgacaatctcttagctcgtgtcgtgggctgggtagtgccagatcatcccccgcagaagcaacaggttgttattacaaactccgctgcacgccttcgaggccagagacctcagacgcaggttgttacgctcccaccacctgggacagtcattggctgtccgaaactcaagaaactaaacctttcatattgcaaacatatcacagatcggtctatggctcatatggccgcgcatgcttcgaatcgtctgcagtctttatctttgactcgctgtacatcgatcaccgatgctggttttcaagcctgggcgcctttccgattttccaacctgactaacttgtgtcttgctgattgcacatatctgtcggataatgcaatcgtgtctcttgttaatgccgccaaaagtctgactcatcttgatctgtctttctgttgtgcattatcagacactgctacagaggttgtcgcgctcggtctcccgcgcttgaaagaactcaagatggccttctgcggtagcgcagtgagcgataacagcctggcctgtattgcattacatctcaacgacttggaagggttgagcgtcagaggatgtgtaagggttacggccatgggtatcgaaagtgttcttgaaggatgcagtcgtctggcttggacggacatcagccagtgtcgcaacgtcgaaggctggatcaatggtggtggtgtcacccgatggggctacgatgatcgatgcgctcgcatcactggactcgacatcaaaaatctgagtctcgccaccacacgtactactcgcaaccgaaaccgtgcgagacgacctgttgcatttatcgtggagaaaggacccggtggtctacgatga

SEQ ID NO: 32042 - protein, 957 aa, Muscodor strobelii
  misc_feature: SGI Peptide ID NO. 571036
  misc_feature (536)..(583): Pfam Id: PF00646 Pfam Desc: F-box domain
  misc_feature (90)..(177): Pfam Id: PF00027 Pfam Desc: Cyclic nucleotide-binding domain
  misc_feature (291)..(390): Pfam Id: PF00027 Pfam Desc: Cyclic nucleotide-binding domain
  misc_feature (1)..(918): NCBI GI: 46107866 Blast Desc: FG00816.1 [Gibberella zeae PH-1]
  misc_feature (1)..(918): NCBI GI: 256735524 Blast Desc: [Nectria haematococca mpVI 77-13-4]
  misc_feature (1)..(923): NCBI GI: 85115276 Blast Desc: NCU08642 [Neurospora crassa OR74A] gi|28926645|gb|EAA35614.1| NCU08642 [Neurospora crassa OR74A]
  misc_feature (1)..(915): NCBI GI: 171694804 Blast Desc: protein product [Podospora anserina] gi|170947644|emb|CAP59806.1| protein product [Podospora anserina]
  misc_feature (1)..(915): NCBI GI: 116182790 Blast Desc: CHGG_02023 [Chaetomium globosum CBS 148.51] gi|88186320|gb|EAQ93788.1| CHGG_02023 [Chaetomium globosum CBS 148.51]
  misc_feature (26)..(957): NCBI GI: 154321497 Blast Desc: BC1G_01623 [Botryotinia fuckeliana B05.10] gi|150852161|gb|EDN27353.1| BC1G_01623 [Botryotinia fuckeliana B05.10]
  misc_feature (1)..(957): NCBI GI: 261361421 Blast Desc: cyclic nucleotide-binding domain-containing protein [Verticillium albo-atrum VaMs.102]
  misc_feature (1)..(907): NCBI GI: 189208586 Blast Desc: cyclic nucleotide-binding domain containing protein [Pyrenophora tritici-repentis Pt-1C-BFP] gi|187976719|gb|EDU43345.1| cyclic nucleotide-binding domain
  misc_feature (26)..(910): NCBI GI: 121710500 Blast Desc: cyclic nucleotide-binding domain protein [Aspergillus clavatus NRRL 1] gi|119401016|gb|EAW11440.1| cyclic nucleotide-binding domain protein [Aspergillus clavatus NRRL 1]
  misc_feature (1)..(907): NCBI GI: 169595482 Blast Desc: SNOG_00480 [Phaeosphaeria nodorum SN15] gi|160701102|gb|EAT91975.2| SNOG_00480 [Phaeosphaeria nodorum SN15]
MRRARPSHSPPSPYRALAHHPANVQIPDSASLIRSFNVETNPTRPIRPSPLTASTIPDMPLDLMDRMRSFPLFMSAPEEFLIAIGKHLRPQVHSANDHILTEGDGAKSMYWLVRGVVAVASRDGEAIYAELKPGCFFGEIGVLMNMPRTATVIARTKCLLLVLKKEDLQQELPRFPEMEKAIRHEAHERLTILKKKRQESGHGLKPTDGQTAAREAAPGEVLTGDEGIIKEGVVLNTKKRKSPSPGGIEDPAAGSALGSGLVNVRQTLRELPLFSALPPDILHFLGMSAIPKTYPPFTDIVQQGAPGNEIFFIVRGEAEVIHEVTESQMQKRITRSSLIRPRLKQGQYFGEVVSLGLSVKRTATVKSITTVECLMISGEALDELWQRCPSNIREQVEETARNRIRRADAEDVDMADVGKVEDITTNISLRPAPQVTFTTPSMPASPIKDESDQLRPRDPDPYLSVDMENLRNRRRASLAPPTDSTSTTSGNGVQLHANNANAPIKVSIPTEPSLDWEEGPAKRAKLVDRTTDLEIEETTSLPHDILMSVFQQLDAVELYRLRGLSSHWRSVFSTSPKLGHSVDLSAYNRRITDDILIKRFAPFLGHRPLYVDVSNCFHITDEGFSTFWKLCGKNVKIWRMKSVWDVSANQILEMSDNAKSLEEVDWSNCRKVGDNLLARVVGWVVPDHPPQKQQVVITNSAARLRGQRPQTQVVTLPPPGTVIGCPKLKKLNLSYCKHITDRSMAHMAAHASNRLQSLSLTRCTSITDAGFQAWAPFRFSNLTNLCLADCTYLSDNAIVSLVNAAKSLTHLDLSFCCALSDTATEVVALGLPRLKELKMAFCGSAVSDNSLACIALHLNDLEGLSVRGCVRVTAMGIESVLEGCSRLAWTDISQCRNVEGWINGGGVTRWGYDDRCARITGLDIKNLSLATTRTTRNRNRARRPVAFIVEKGPGGLR

SEQ ID NO: 32043 - DNA, 4015 bp, Muscodor strobelii
  misc_feature: SGI EST ID NO. CUFF.75770.2
  misc_feature: Variant of the nucleotide sequence at SEQ ID NO 32041
gtcgaaacacaaacgcgatctagcgcggcaccaatccaccactttgaacatattccccttcacattcattttgattttgtaaaatccaggccggttgcgtcatgggctgaacttgaagaccgttccatctgatgagtgtgtaatcaaaactgaacggcgggacattctggacacagcttgttcgaaaattacccctgggaccgaggtctacgcggctgatcgtaggcgtgtgcgcagggtcggttcgccgtgcaaacttgattgcaatcgactgacagcttcgaattagcctcacctgccaccgtccgaaacgaagaggagagagaccgatacggctgctcaaccagctccgacgtcgtcatcttcctagaccaatatatcaccccaaccccgcttgttgatgctcccctcgatattggatattcgaacttgatcgcgtgccgtttcatactacctacgagtcttcagttcgaacagtttcagcttgttgcgtaatcaatccacgactgcccaatcgttgtgccgaggccctttcccgctcgaggctggcagcccatgcgggttgacctatttcgaagcgtttgaataagatctgctcactgctattgcttatggttttggtcgagcgatcagagaggaaacacggcatcatacccccacattgcaaccttgacgcgttggagacgagatcgccgtagggtatagcatgaactgctgcttgcctgcgtgtttctcacggccgtcttcccctcacgatctgagggatcggaacaactgaaccgatcgagcatctacgtttggagtaacgagaagtcgtcatcgaaatctgagattcgcattactgggcattgctggagcataatccccatcaggggcttgtaagcgacatgaggcgagctcgaccctctcactcccccccatcgccctatagggcgttggcgcaccatccagcaaacgtccagataccggattccgcttccttgattaggtctttcaatgttgaaaccaatccgacacggcctatacggccatcccctctcacagcatcgacgattccagatatgccactggatctgatggatcgcatgagatcgtttccgctcttcatgtcagccccagaagagtttcttatcgctattggaaagcatttaagaccccaagtgcactcggcgaatgatcatattctgaccgagggagatggcgcaaaatccatgtactggctggtccgcggcgttgtagccgttgcatctagagacggagaagcaatatacgccgagctgaaacctggttgtttcttcggcgagattggcgtcctcatgaacatgcctcgaacggccaccgttatcgctcggacaaaatgtctcctgctggtgctgaagaaggaagatttgcagcaggagcttcctagattccctgagatggaaaaagccatccgccatgaagcccatgagcgattgacaattttaaagaagaagcgccaagaaagcggtcatggccttaaaccaacggacggccagacagcggcgcgagaagccgcacctggagaggtcttaactggagacgagggcatcatcaaagagggagtcgtgttgaacactaaaaagaggaagtcacctagtcccggaggcattgaggatcccgctgctggaagcgctttgggcagtggtttggtcaatgtcagacagacgctgagagaactcccactgttttccgcccttcctccagatattctccacttccttggcatgagtgcaattcccaagacataccctcccttcacagatattgtgcagcaaggcgcgcctggtaatgaaattttcttcattgtccgtggcgaagcagaagtaatacacgaagtcacagaaagccaaatgcagaagaggataacccgatcgtcgctaatccgacctcgattgaaacaaggacagtattttggtgaggttgtcagtctcggcctttcggttaagcgtactgcgaccgtcaagtcgataacaacagtcgagtgtctcatgatcagtggtgaggctcttgatgaactgtggcaacgctgccctagtaatatcagggagcaggttgaagaaacagcaagaaataggattaggcgagcagatgcggaagatgttgatatggcagacgtgggaaaggtggaggacattactaccaatatctcgttgagacccgctccccaagttacgttcacaacgccgtcaatgccagcatctcctatcaaagacgaatcggatcaattaagacccagagatcctgacccgtacctcagtgttgacatggaaaatctgagaaaccggcggagagcatcccttgctcctcctaccgactctacaagtactacaagcgggaatggtgtacaattgcacgcaaacaatgccaacgcgccaatcaaagtctcaattccgacagagccctcgttggattgggaagaaggtccagcgaagagggcgaaattagtggacaggaccactgatttggagatcgaggagaccacgtcgcttcctcatgatatcctcatgtcggtgtttcaacagctagatgccgtagaattataccgtctcaggggactttcctcacactggcgcagtgttttctcaacctcgccgaaactgggccattcagtggatttgtcagcctacaaccgccggattaccgatgatattcttatcaaaagattcgcgcccttccttggtcaccggcctctctatgtcgacgtaagcaactgctttcatattaccgatgaaggcttctcgacgttctggaaactctgtggaaagaacgttaaaatatggagaatgaagtcagtctgggatgtctcggccaaccagattctcgagatgagtgacaatgcaaagagcttggaggaggttgactggagcaactgccgtaaagtcggtgacaatctcttagctcgtgtcgtgggctgggtagtgccagatcatcccccgcagaagcaacaggttgttattacaaactccgctgcacgccttcgaggccagagacctcagacgcaggttgttacgctcccaccacctgggacagtcattggctgtccgaaactcaagaaactaaacctttcatattgcaaacatatcacagatcggtctatggctcatatggccgcgcatgcttcgaatcgtctgcagtctttatctttgactcgctgtacatcgatcaccgatgctggttttcaagcctgggcgcctttccgattttccaacctgactaacttgtgtcttgctgattgcacatatctgtcggataatgcaatcgtgtctcttgttaatgccgccaaaagtctgactcatcttgatctgtctttctgttgtgcattatcagacactgctacagaggttgtcgcgctcggtctcccgcgcttgaaagaactcaagatggccttctgcggtagcgcagtgagcgataacagcctggcctgtattgcattacatctcaacgacttggaagggttgagcgtcagaggatgtgtaagggttacggccatgggtatcgaaagtgttcttgaaggatgcagtcgtctggcttggacggacatcagccagtgtcgcaacgtcgaaggctggatcaatggtggtggtgtcacccgatggggctacgatgatcgatgcgctcgcatcactggactcgacatcaaaaatctgagtctcgccaccacacgtactactcgcaaccgaaaccgtgcgagacgacctgttgcatttatcgtggagaaaggacccggtggtctacgatgatcatcacatatgtacaaactgtgtgcgaattatgatttcatgacatcgtggggctcttagcctatgaggcgctaccattttgcaaatttatacccctctgatatcatgtggattctggatagatgtacaaattctgattacgttagtttgatgcatacatgtatgtacttcgaacattcgtcggctgggtagggcgaatttacgattcaacgataaagagatagacaaaacaattgtatcactggacgaaattc

SEQ ID NO: 32044 - DNA, 1236 bp, Muscodor strobelii
  misc_feature: SGI cDNA ID NO. 571037
  misc_feature: Encodes the peptide sequence at SEQ ID NO 32045
atgtcggtgtttcaacagctagatgccgtagaattataccgtctcaggggactttcctcacactggcgcagtgttttctcaacctcgccgaaactgggccattcagtggatttgtcagcctacaaccgccggattaccgatgatattcttatcaaaagattcgcgcccttccttggtcaccggcctctctatgtcgacgtaagcaactgctttcatattaccgatgaaggcttctcgacgttctggaaactctgtggaaagaacgttaaaatatggagaatgaagtcagtctgggatgtctcggccaaccagattctcgagatgagtgacaatgcaaagagcttggaggaggttgactggagcaactgccgtaaagtcggtgacaatctcttagctcgtgtcgtgggctgggtagtgccagatcatcccccgcagaagcaacaggttgttattacaaactccgctgcacgccttcgaggccagagacctcagacgcaggttgttacgctcccaccacctgggacagtcattggctgtccgaaactcaagaaactaaacctttcatattgcaaacatatcacagatcggtctatggctcatatggccgcgcatgcttcgaatcgtctgcagtctttatctttgactcgctgtacatcgatcaccgatgctggttttcaagcctgggcgcctttccgattttccaacctgactaacttgtgtcttgctgattgcacatatctgtcggataatgcaatcgtgtctcttgttaatgccgccaaaagtctgactcatcttgatctgtctttctgttgtgcattatcagacactgctacagaggttgtcgcgctcggtctcccgcgcttgaaagaactcaagatggccttctgcggtagcgcagtgagcgataacagcctggcctgtattgcattacatctcaacgacttggaagggttgagcgtcagaggatgtgtaagggttacggccatgggtatcgaaagtgttcttgaaggatgcagtcgtctggcttggacggacatcagccagtgtcgcaacgtcgaaggctggatcaatggtggtggtgtcacccgatggggctacgatgatcgatgcgctcgcatcactggactcgacatcaaaaatctgagtctcgccaccacacgtactactcgcaaccgaaaccgtgcgagacgacctgttgcatttatcgtggagaaaggacccggtggtctacgatga

SEQ ID NO: 32045 - protein, 411 aa, Muscodor strobelii
  misc_feature: SGI Peptide ID NO. 571037
  misc_feature (3)..(372): NCBI GI: 46107866 Blast Desc: FG00816.1 [Gibberella zeae PH-1]
  misc_feature (3)..(372): NCBI GI: 256735524 Blast Desc: [Nectria haematococca mpVI 77-13-4]
  misc_feature (1)..(372): NCBI GI: 39959815 Blast Desc: MGG_09405 [Magnaporthe grisea 70-15] gi|145014370|gb|EDJ98938.1| MGG_09405 [Magnaporthe grisea 70-15]
  misc_feature (3)..(377): NCBI GI: 85115276 Blast Desc: NCU08642 [Neurospora crassa OR74A] gi|28926645|gb|EAA35614.1| NCU08642 [Neurospora crassa OR74A]
  misc_feature (3)..(369): NCBI GI: 171694804 Blast Desc: protein product [Podospora anserina] gi|170947644|emb|CAP59806.1| protein product [Podospora anserina]
  misc_feature (3)..(361): NCBI GI: 189208586 Blast Desc: cyclic nucleotide-binding domain containing protein [Pyrenophora tritici-repentis Pt-1C-BFP] gi|187976719|gb|EDU43345.1| cyclic nucleotide-binding domain
  misc_feature (3)..(369): NCBI GI: 116182790 Blast Desc: CHGG_02023 [Chaetomium globosum CBS 148.51] gi|88186320|gb|EAQ93788.1| CHGG_02023 [Chaetomium globosum CBS 148.51]
  misc_feature (1)..(411): NCBI GI: 154321497 Blast Desc: BC1G_01623 [Botryotinia fuckeliana B05.10] gi|150852161|gb|EDN27353.1| BC1G_01623 [Botryotinia fuckeliana B05.10]
  misc_feature (3)..(361): NCBI GI: 169595482 Blast Desc: SNOG_00480 [Phaeosphaeria nodorum SN15] gi|160701102|gb|EAT91975.2| SNOG_00480 [Phaeosphaeria nodorum SN15]
  misc_feature (1)..(365): NCBI GI: 145238378 Blast Desc: An07g07610 [Aspergillus niger] gi|134076321|emb|CAK39577.1| protein product [Aspergillus niger]
MSVFQQLDAVELYRLRGLSSHWRSVFSTSPKLGHSVDLSAYNRRITDDILIKRFAPFLGHRPLYVDVSNCFHITDEGFSTFWKLCGKNVKIWRMKSVWDVSANQILEMSDNAKSLEEVDWSNCRKVGDNLLARVVGWVVPDHPPQKQQVVITNSAARLRGQRPQTQVVTLPPPGTVIGCPKLKKLNLSYCKHITDRSMAHMAAHASNRLQSLSLTRCTSITDAGFQAWAPFRFSNLTNLCLADCTYLSDNAIVSLVNAAKSLTHLDLSFCCALSDTATEVVALGLPRLKELKMAFCGSAVSDNSLACIALHLNDLEGLSVRGCVRVTAMGIESVLEGCSRLAWTDISQCRNVEGWINGGGVTRWGYDDRCARITGLDIKNLSLATTRTTRNRNRARRPVAFIVEKGPGGLR

SEQ ID NO: 32046 - DNA, 4015 bp, Muscodor strobelii; identical to SEQ ID NO: 32043
  misc_feature: SGI EST ID NO. CUFF.75770.2
  misc_feature: Variant of the nucleotide sequence at SEQ ID NO 32044

SEQ ID NO: 32047 - DNA, 1065 bp, Muscodor strobelii
  misc_feature: SGI cDNA ID NO. 571038
  misc_feature: Encodes the peptide sequence at SEQ ID NO 32048
atgaaacaatggatcacaaatcaagatgggctcgataagctccgacttgtcggtgtcgctgaaccgaccgacctaaaagaaagcgaggttctcgtgaagatcaatcgtgttgcgctaaattctcgagatacggaggtatgcatgggcgtttacggccatcatagaagtctctccaggggctccaacgagatagttcccacgtccgatatgtgtggaacggttgtgaggctcgggccaggcgcaaacagtcaaatgctcaaggaaggtgatcgggtaatggcgatcttcaaccagacccatcttaccggtcagatcctggagaaagacatggcttctgggctgggactaccgcttcctggtgttctgacggagtttcgcatcttcccggcaagtgggcttgtaaaggtcccagagtatcttacggatgaggaggctgcgtgtttgccgattgctgcggtcacggcgtggatgagtatcaattcttttcaacccattagaagcccgatgagcgggagtgatacagtcgtcctgctccaaggaacgggcggtgtggccattatgggattggtcattgctaaggcgctaggattgacgacaatcgttacatcctcctcagattcgaaattacaacgcgccaaagaactaggtgcagatcatacgataaattacaagacgacgccaaactgggacgaggcggttctggaactaacgggtaaccgtggcgcagacgtgatatttgagtgcggcggcaccgctacacttgcgaagtcattcgaatgcgttgcgtttggcggcgtaatagcggcgattggatacttgtcgggcaagcaggatgcggctggtgggcaggtgaatgcgaatgtgttggcgttgaagcggaatgtcacgttcaagggtattctcaacggaccgaaggataggtttgaagagatgctagcagtcttcgaaagggagaagattcgaccggtcgttgatcgagtgtttacatttgaggaagcggatgaggcgctgaaatatttgtttagtggtgggcactttggtaaagtcgttgtcaaagtgtcttga

SEQ ID NO: 32048 - protein, 354 aa, Muscodor strobelii
  misc_feature: SGI Peptide ID NO. 571038
  misc_feature (27)..(136): Pfam Id: PF08240 Pfam Desc: Alcohol dehydrogenase GroES-like domain
  misc_feature (172)..(317): Pfam Id: PF00107 Pfam Desc: Zinc-binding dehydrogenase
  misc_feature (1)..(353): NCBI GI: 169622404 Blast Desc: SNOG_14424 [Phaeosphaeria nodorum SN15] gi|111057175|gb|EAT78295.1| SNOG_14424 [Phaeosphaeria nodorum SN15]
  misc_feature (1)..(354): NCBI GI: 67901298 Blast Desc: AN7636.2 [Aspergillus nidulans FGSC A4] gi|40742632|gb|EAA61822.1| AN7636.2 [Aspergillus nidulans FGSC A4] gi|259483968|tpe|CBF79791.1| TPA: oxidoreductase (Eurofung)
  misc_feature (2)..(354): NCBI GI: 256730507 Blast Desc: [Nectria haematococca mpVI 77-13-4]
  misc_feature (2)..(354): NCBI GI: 46109496 Blast Desc: FG01630.1 [Gibberella zeae PH-1]
  misc_feature (2)..(354): NCBI GI: 154300608 Blast Desc: BC1G_10892 [Botryotinia fuckeliana B05.10] gi|150856499|gb|EDN31691.1| BC1G_10892 [Botryotinia fuckeliana B05.10]
  misc_feature (1)..(353): NCBI GI: 189191398 Blast Desc: alcohol dehydrogenase [Pyrenophora tritici-repentis Pt-1C-BFP] gi|187973644|gb|EDU41143.1| alcohol dehydrogenase [Pyrenophora tritici-repentis Pt-1C-BFP]
  misc_feature (1)..(353): NCBI GI: 85108405 Blast Desc: NCU06303 [Neurospora crassa OR74A] gi|28924174|gb|EAA33329.1| NCU06303 [Neurospora crassa OR74A]
  misc_feature (1)..(353): NCBI GI: 242783487 Blast Desc: alcohol dehydrogenase, zinc-containing, [Talaromyces stipitatus ATCC 10500] gi|218720344|gb|EED19763.1| alcohol dehydrogenase, zinc-containing, [Talaromyces stipitatus ATCC
  misc_feature (1)..(354): NCBI GI: 115433232 Blast Desc: conserved [Aspergillus terreus NIH2624] gi|114189605|gb|EAU31305.1| conserved [Aspergillus terreus NIH2624]
  misc_feature (3)..(354): NCBI GI: 256728349 Blast Desc: NECHADRAFT_53900 [Nectria haematococca mpVI 77-13-4]
  misc_feature (116)..(353): SWISSPROT Homolog: EC 2.3.1.41 Beta-ketoacyl-acyl-carrier-protein synthase I
  misc_feature (116)..(353): SWISSPROT Homolog: EC 1.3.1.10 Enoyl-[acyl-carrier-protein] reductase (NADPH, B-specific)
  misc_feature (116)..(353): SWISSPROT Homolog: EC 1.1.1.100 3-oxoacyl-[acyl-carrier-protein] reductase
  misc_feature (116)..(353): SWISSPROT Homolog: EC 2.3.1.85 Fatty-acid synthase
  misc_feature (116)..(353): SWISSPROT Homolog: EC 2.3.1.39 [Acyl-carrier-protein] S-malonyltransferase
  misc_feature (116)..(353): SWISSPROT Homolog: EC 2.3.1.38 [Acyl-carrier-protein] S-acetyltransferase
  misc_feature (116)..(353): SWISSPROT Homolog: EC 3.1.2.14 Oleoyl-[acyl-carrier-protein] hydrolase
  misc_feature (116)..(353): SWISSPROT Homolog: EC 4.2.1.61 3-hydroxypalmitoyl-[acyl-carrier-protein] dehydratase
MKQWITNQDGLDKLRLVGVAEPTDLKESEVLVKINRVALNSRDTEVCMGVYGHHRSLSRGSNEIVPTSDMCGTVVRLGPGANSQMLKEGDRVMAIFNQTHLTGQILEKDMASGLGLPLPGVLTEFRIFPASGLVKVPEYLTDEEAACLPIAAVTAWMSINSFQPIRSPMSGSDTVVLLQGTGGVAIMGLVIAKALGLTTIVTSSSDSKLQRAKELGADHTINYKTTPNWDEAVLELTGNRGADVIFECGGTATLAKSFECVAFGGVIAAIGYLSGKQDAAGGQVNANVLALKRNVTFKGILNGPKDRFEEMLAVFEREKIRPVVDRVFTFEEADEALKYLFSGGHFGKVVVKVS

SEQ ID NO: 32049 - DNA, 1269 bp, Muscodor strobelii
  misc_feature: SGI EST ID NO. CUFF.75767.0
  misc_feature: Variant of the nucleotide sequence at SEQ ID NO 32047
gtcgctgtgtctgttactgacctatatattttcgagagggccgacaacattagcaattgacaattcagtctacaatgaaacaatggatcacaaatcaagatgggctcgataagctccgacttgtcggtgtcgctgaaccgaccgacctaaaagaaagcgaggttctcgtgaagatcaatcgtgttgcgctaaattctcgagatacggaggtatgcatgggcgtttacggccatcatagaagtctctccaggggctccaacgagatagttcccacgtccgatatgtgtggaacggttgtgaggctcgggccaggcgcaaacagtcaaatgctcaaggaaggtgatcgggtaatggcgatcttcaaccagacccatcttaccggtcagatcctggagaaagacatggcttctgggctgggactaccgcttcctggtgttctgacggagtttcgcatcttcccggcaagtgggcttgtaaaggtcccagagtatcttacggatgaggaggctgcgtgtttgccgattgctgcggtcacggcgtggatgagtatcaattcttttcaacccattagaagcccgatgagcgggagtgatacagtcgtcctgctccaaggaacgggcggtgtggccattatgggattggtcattgctaaggcgctaggattgacgacaatcgttacatcctcctcagattcgaaattacaacgcgccaaagaactaggtgcagatcatacgataaattacaagacgacgccaaactgggacgaggcggttctggaactaacgggtaaccgtggcgcagacgtgatatttgagtgcggcggcaccgctacacttgcgaagtcattcgaatgcgttgcgtttggcggcgtaatagcggcgattggatacttgtcgggcaagcaggatgcggctggtgggcaggtgaatgcgaatgtgttggcgttgaagcggaatgtcacgttcaagggtattctcaacggaccgaaggataggtttgaagagatgctagcagtcttcgaaagggagaagattcgaccggtcgttgatcgagtgtttacatttgaggaagcggatgaggcgctgaaatatttgtttagtggtgggcactttggtaaagtcgttgtcaaagtgtcttgactacagcagatgacgaggttcgatcgagcttaatgtatgagcaagattggttgcaagtattatttctataatacaatagtccactagaatccgtattggttgccttataactgcgagaataaaatattgc

SEQ ID NO: 32050 - DNA, 1218 bp, Muscodor strobelii
  misc_feature: SGI cDNA ID NO. 571039
  misc_feature: Encodes the peptide sequence at SEQ ID NO 32051
atgaaattccaggtccttattgtcggcgcagggccatctggcctgttgctagctctcttgctatctaaacatgggatcgaagtagaagttttcgaagcatcgcacgaactagacaagcaacctcgggcggcaatttacggaaccgcggcgattccagatttgtatcgcgcaggcatcatcgaagagattcggcgacgaggtatgagcccgacgaagatgtgttggcggcggtttgcagaccattcctacatcactggcgtggacggttcatgcctggcagatgtggatggtcaagacttgcgtttggcttgtctggtcctggatcaactagatgagcttatgctcgaagagtttttgtctaagtataatggtgtgatacattggagacatagggctgttgggactggtcaggacgagaagggcgcttggatcgatgttgagacgccaaaaggaagcaaaaagttccatggagattatgtagttgggtgcgacggcgcgaccagtcaagtacggaagtctttgtttggcgacgaattccccgggatgacttgggaaaggcagattgttgcgacgaatgtatactacgatttctcaaaattcggcttccaagattcaagctttattctacacccggagcatttcttcatggccgctaagctcacgaccgatggactgtatcgagtaacctatggagagactcctggtctatcatgggaggaaatgaaagctcgacagccgatgaagtacgaaatcatgctgccaggtcaccccaaaccaggcgagtacaacttgatcaacatgtcaccatacaaaatgcatcagaggtgtgcacctgcatttcgtgttgggcgaattctgctcgctgcggatgcggcgcatctctgcaatccatggggaggcatggggatcacgggaggttttgttgatgtcgggggcttgtatgattgtttagctggcatatatgacggcaaagctgacgagtcgatcctcgacttgtatagtgaaaagcgtatagagaagtggaaaacgatcatcgatccagtgtcacgagataatttcagacgtgtctcggacagcgatcctgatacgttgctcgagagggatcctgtgatgcaggcatgtaaagctgcagagggtgatgcaaaggctcagaggcaaggggcacttgcgtcctttgctgtaagatatgatttcacacagcattacaaagcgtgttag

SEQ ID NO: 32051 - protein, 405 aa, Muscodor strobelii
  misc_feature: SGI Peptide ID NO. 571039
  misc_feature (2)..(348): Pfam Id: PF01494 Pfam Desc: FAD binding domain
  misc_feature (2)..(28): Pfam Id: PF01494 Pfam Desc: FAD binding domain
  misc_feature (267)..(337): Pfam Id: PF01494 Pfam Desc: FAD binding domain
  misc_feature (3)..(33): Pfam Id: PF03486 Pfam Desc: HI0933-like protein
  misc_feature (9)..(403): NCBI GI: 145607547 Blast Desc: MGG_04334 [Magnaporthe grisea 70-15] gi|145015073|gb|EDJ99641.1| MGG_04334 [Magnaporthe grisea 70-15]
  misc_feature (4)..(403): NCBI GI: 115390933 Blast Desc: conserved [Aspergillus terreus NIH2624] gi|114193895|gb|EAU35595.1| conserved [Aspergillus terreus NIH2624]
  misc_feature (5)..(402): NCBI GI: 212527644 Blast Desc: monooxygenase, [Penicillium marneffei ATCC 18224] gi|210073377|gb|EEA27464.1| monooxygenase, [Penicillium marneffei ATCC 18224]
  misc_feature (3)..(403): NCBI GI: 255956925 Blast Desc: Pc21g22460 [Penicillium chrysogenum Wisconsin 54-1255] gi|211590926|emb|CAP97143.1| Pc21g22460 [Penicillium chrysogenum Wisconsin 54-1255]
  misc_feature (5)..(403): NCBI GI: 212528328 Blast Desc: conserved [Penicillium marneffei ATCC 18224] gi|210073719|gb|EEA27806.1| conserved [Penicillium marneffei ATCC 18224]
  misc_feature (20)..(403): NCBI GI: 256731968 Blast Desc: NECHADRAFT_93926 [Nectria haematococca mpVI 77-13-4]
  misc_feature (4)..(403): NCBI GI: 67527160 Blast Desc: AN4002.2 [Aspergillus nidulans FGSC A4] gi|40740283|gb|EAA59473.1| AN4002.2 [Aspergillus nidulans FGSC A4] gi|259481416|tpe|CBF74912.1| TPA: monooxygenase, [Aspergillus
  misc_feature (20)..(402): NCBI GI: 70999896 Blast Desc: monooxygenase [Aspergillus fumigatus Af293] gi|66852302|gb|EAL92627.1| monooxygenase, [Aspergillus fumigatus Af293] gi|159127679|gb|EDP52794.1| monooxygenase, [Aspergillus
  misc_feature (73)..(404): NCBI GI: 171679978 Blast Desc: protein product [Podospora anserina] gi|170939615|emb|CAP64842.1| protein product [Podospora anserina]
  misc_feature (4)..(404): NCBI GI: 189201295 Blast Desc: conserved [Pyrenophora tritici-repentis Pt-1C-BFP] gi|187984083|gb|EDU49571.1| conserved [Pyrenophora tritici-repentis Pt-1C-BFP]
  misc_feature (4)..(359): SWISSPROT Homolog: EC 1.14.13.9 Kynurenine 3-monooxygenase
MKFQVLIVGAGPSGLLLALLLSKHGIEVEVFEASHELDKQPRAAIYGTAAIPDLYRAGIIEEIRRRGMSPTKMCWRRFADHSYITGVDGSCLADVDGQDLRLACLVLDQLDELMLEEFLSKYNGVIHWRHRAVGTGQDEKGAWIDVETPKGSKKFHGDYVVGCDGATSQVRKSLFGDEFPGMTWERQIVATNVYYDFSKFGFQDSSFILHPEHFFMAAKLTTDGLYRVTYGETPGLSWEEMKARQPMKYEIMLPGHPKPGEYNLINMSPYKMHQRCAPAFRVGRILLAADAAHLCNPWGGMGITGGFVDVGGLYDCLAGIYDGKADESILDLYSEKRIEKWKTIIDPVSRDNFRRVSDSDPDTLLERDPVMQACKAAEGDAKAQRQGALASFAVRYDFTQHYKAC

SEQ ID NO: 32052 - DNA, 4079 bp, Muscodor strobelii
  misc_feature: SGI EST ID NO. CUFF.75872.0
  misc_feature: Variant of the nucleotide sequence at SEQ ID NO 32050
gggccatctggcctgttgctagctctcttgctatctaaacatgggatcgaagtagaagttttcgaagcatcgcacgaactagacaagcaacctcgggcggcaatttacggaaccgcggcgattccagatttgtatcgcgcaggcatcatcgaagagattcggcgacgaggtatgagcccgacgaagatgtgttggcggcggtttgcagaccattcctacatcactggcgtggacggttcatgcctggcagatgtggatggtcaagacttgcgtttggcttgtctggtcctggatcaactagatgagcttatgctcgaagagtttttgtctaagtataatggtgtgatacattggagacatagggctgttgggactggtcaggacgagaagggcgcttggatcgatgttgagacgccaaaaggaagcaaaaagttccatggagattatgtagttgggtgcgacggcgcgaccagtcaagtacggaagtctttgtttggcgacgaattccccgggatgacttgggaaaggcagattgttgcgacgaatgtatactacgatttctcaaaattcggcttccaagattcaagctttattctacacccggagcatttcttcatggccgctaagctcacgaccgatggactgtatcgagtaacctatggagagactcctggtctatcatgggaggaaatgaaagctcgacagccgatgaagtacgaaatcatgctgccaggtcaccccaaaccaggcgagtacaacttgatcaacatgtcaccatacaaaatgcatcagaggtgtgcacctgcatttcgtgttgggcgaattctgctcgctgcggatgcggcgcatctctgcaatccatggggaggcatggggatcacgggaggttttgttgatgtcgggggcttgtatgattgtttagctggcatatatgacggcaaagctgacgagtcgatcctcgacttgtatagtgaaaagcgtatagagaagtggaaaacgatcatcgatccagtgtcacgagataatttcagacgtgtctcggacagcgatcctgatacgttgctcgagagggatcctgtgatgcaggcatgtaaagctgcagagggtgatgcaaaggctcagaggcaaggggcacttgcgtcctttgctgtaagatatgatttcacacagcattacaaagcgtgttagccttcgaacatattattcctcaatatacaatcctaggtactatgcttcagtagaggaagttcataggccggaattcgatgagttgctaacggtcaaatcgcacacgcgtgaagcaagcatttaacctgccacttcgtctctagtacacctaataaactcgttgcctctttccgtccttccgcgacccaagtcacattagggagatattatgtattagaaggtgatgctctctttatgagagttcgatttctgtactgaagacgaagcaccatttgaccaacactatttgagatgtccgattcttcgccgtttagtgattatcgatatatacagagtacatagaccggggtatctagggagctcgctaagacgagtttgaaataaaaatggttaaatgctgagcgaatacgacaagtggctattgattcaaatcaaagactagcctttcctcttgattcaaagggtagagttaggacaaccagaccggcgacgatgaacagagcaccgctcacatacacggggactggcgtgttgagattggcgtacgtagcgatgatgggtgagaagacgccgaatatccggttggaggtagcagtcagagcgttgccagttcctcgatccttggtcggaaagacttccggtgtaaaagcatacagtacggcatacatgatattcgatgtgaatgagtaagcggtgttccatccgagcaatgcgggtgagttcgtggccgttgtgctgccaaacaggaaaacaccagtaaggaccgtgctcacgcacagtgcgccctttcttccaatcttgggtgtctcggctaggacagcacctagtgctgcgccagggacaccggtaacctagagaaaataagaaggttagcatggcttgcctatgacaagttagtaggagatacttactgcaaggatcaaattatttctataagtaatgtaggtcgaaccatcgccaaactcagcaccacgtatagcctggaggtatgggagataagcattgtacaatgggaaggccaagccgatgctgggtttgcaattagtgaccgtcctctataagtgaattatgcccaatcttaagagaatataaaaagttgagaaaagaaccgaagatactaacaaggcccagacgagcatcaaagcgcctgtagaataaccaagtttcttggtcttgaagagcgctttgatatgattgagattgacagcttcgagcttgcgtttgatagcatcactagcggtggcttgttgttcgtatccttctagctcgactgccttaagatgttcgagagtcaaccagctttccttgccatttcttcgcgcgacttcgtgaacagtgcggacggcctcttcatctttgcccttgcccatgagatatttcggcgactcaaagatcgtgaagcagaaaaaccgaatggcgaatgtaatcagagtcaaacccccaatcgtaatcatgaaatagcgccatccgatgttctcagatttggtacaagtttcggcgtcttgctggcaggtgaagttggtaaggagcccccaggcaattagatctgcgataacctgggcgacggcccaatcaatggagagaaccgtcaacagatattggtgtgatgcgggcagaaattccaagaagatggcggagtccacaggcagattacctccaacaccaaaactccagaaagcggcaaagatgccgattgcaacaaagttgggactgccagcagcgacaataccccatagtgctgtgataccgagtgttagattaaatgcccatcgtcggccgaagacatcgcagccaaagccccagaaaatcgcgccagcgaggagacccaggttttgtgacaaactgagaaacgttccgtgtatgggatggaattcgtttacgatgggtgtctaggctactagattagagagactgggtatcaaaggttttgaggctgcgttgtagatgaggatgacctacaagaatgagtccggtgacaatgggccacatgttgtcattcgcccagccgaaaccgacaacaatgaacagctgccattgataccatcccatacctatgtcctggaccgcacgatttaagactgccgctttgcgcgcataagtaggatctatagcatcttttgggatgacgctatcgctgtccaaatctgctaggagctcttcgatcgatggtcctgtggttggctgtcgctctgctacgggagccttctcgtcggttgccgagtttttgtcgcttgctgggacagacatgattgctgttgtgagaccactggactgcttgactttagattaatagaggtaaaacaaaggcgaggaagctaccacgataaagttgaagatcaacattcgttggggtagtcctaaggtcataatacggcccacgcgacatatgctacaccagcgcgaggtgtgtcttatatgatcgctcatacgtacgagagctgtgcagtttccgatctttgaattcgactgtcatttggcatcgacagctaacacttcaatggcgtgataggcgatctttgcctaagtcggcaagctgataggccctggtgcagatcgaagtgctgccggctccatgtccgctatgatccaattggaagcatggtgccctgtcgaaccttatgcgggattctagaagctcgcaaagattgcaccatctccccgtcttgccgattcaaattgagttgacaacgggcatattcgcagctgaattatgtgaatttattcttagttcattgcagttacaatagagaacgatgattagacttgcaataccgcaacgggtcaccgtcggtgagcactgcctttggtgtatcataccagagtctgggacgctgctatgtcgatgaaccactgtgaatcttcagattactccgcagcttgccagggtcgga

SEQ ID NO: 32053 - DNA, 1593 bp, Muscodor strobelii
  misc_feature: SGI cDNA ID NO. 571040
  misc_feature: Encodes the peptide sequence at SEQ ID NO 32054
atgtctgtcccagcaagcgacaaaaactcggcaaccgacgagaaggctcccgtagcagagcgacagccaaccacaggaccatcgatcgaagagctcctagcagatttggacagcgatagcgtcatcccaaaagatgctatagatcctacttatgcgcgcaaagcggcagtcttaaatcgtgcggtccaggacataggtatgggatggtatcaatggcagctgttcattgttgtcggtttcggctgggcgaatgacaacatgtggcccattgtcaccggactcattcttacacccatcgtaaacgaattccatcccatacacggaacgtttctcagtttgtcacaaaacctgggtctcctcgctggcgcgattttctggggctttggctgcgatgtcttcggccgacgatgggcatttaatctaacactcggtatcacagcactatggggtattgtcgctgctggcagtcccaactttgttgcaatcggcatctttgccgctttctggagttttggtgttggaggtaatctgcctgtggactccgccatcttcttggaatttctgcccgcatcacaccaatatctgttgacggttctctccattgattgggccgtcgcccaggttatcgcagatctaattgcctgggggctccttaccaacttcacctgccagcaagacgccgaaacttgtaccaaatctgagaacatcggatggcgctatttcatgattacgattgggggtttgactctgattacattcgccattcggtttttctgcttcacgatctttgagtcgccgaaatatctcatgggcaagggcaaagatgaagaggccgtccgcactgttcacgaagtcgcgcgaagaaatggcaaggaaagctggttgactctcgaacatcttaaggcagtcgagctagaaggatacgaacaacaagccaccgctagtgatgctatcaaacgcaagctcgaagctgtcaatctcaatcatatcaaagcgctcttcaagaccaagaaacttggttattctacaggcgctttgatgctcgtctgggccttcatcggcttggccttcccattgtacaatgcttatctcccatacctccaggctatacgtggtgctgagtttggcgatggttcgacctacattacttatagaaataatttgatccttgcagttaccggtgtccctggcgcagcactaggtgctgtcctagccgagacacccaagattggaagaaagggcgcactgtgcgtgagcacggtccttactggtgttttcctgtttggcagcacaacggccacgaactcacccgcattgctcggatggaacaccgcttactcattcacatcgaatatcatgtatgccgtactgtatgcttttacaccggaagtctttccgaccaaggatcgaggaactggcaacgctctgactgctacctccaaccggatattcggcgtcttctcacccatcatcgctacgtacgccaatctcaacacgccagtccccgtgtatgtgagcggtgctctgttcatcgtcgccggtctggttgtcctaactctaccctttgaatcaagaggaaaggctagtctttga

SEQ ID NO: 32054 - protein, 530 aa, Muscodor strobelii
  misc_feature: SGI Peptide ID NO. 571040
  misc_feature (74)..(489): Pfam Id: PF07690 Pfam Desc: Major Facilitator Superfamily
  misc_feature (44)..(530): NCBI GI: 240108719 Blast Desc: major facilitator superfamily protein [Coccidioides posadasii C735 delta SOWgp]
  misc_feature (6)..(530): NCBI GI: 258578385 Blast Desc: [Uncinocarpus reesii 1704] gi|237903640|gb|EEP78041.1| [Uncinocarpus reesii 1704]
  misc_feature (38)..(530): NCBI GI: 261191510 Blast Desc: sugar transporter [Ajellomyces dermatitidis SLH14081] gi|239589929|gb|EEQ72572.1| sugar transporter [Ajellomyces dermatitidis SLH14081]
  misc_feature (44)..(530): NCBI GI: 119186029 Blast Desc: CIMG_03062 [Coccidioides immitis RS]
  misc_feature (27)..(530): NCBI GI: 169599380 Blast Desc: SNOG_02509 [Phaeosphaeria nodorum SN15] gi|111069601|gb|EAT90721.1| SNOG_02509 [Phaeosphaeria nodorum SN15]
  misc_feature (38)..(530): NCBI GI: 239612663 Blast Desc: sugar transporter [Ajellomyces dermatitidis ER-3]
  misc_feature (30)..(530): NCBI GI: 39975305 Blast Desc: MGG_00201 [Magnaporthe grisea 70-15] gi|145018939|gb|EDK03218.1| MGG_00201 [Magnaporthe grisea 70-15]
  misc_feature (16)..(530): NCBI GI: 238837545 Blast Desc: membrane transporter [Microsporum canis CBS 113480]
  misc_feature (9)..(530): NCBI GI: 240274475 Blast Desc: membrane transporter [Ajellomyces capsulatus H143]
  misc_feature (9)..(530): NCBI GI: 225561370 Blast Desc: membrane transporter [Ajellomyces capsulatus G186AR]
MSVPASDKNSATDEKAPVAERQPTTGPSIEELLADLDSDSVIPKDAIDPTYARKAAVLNRAVQDIGMGWYQWQLFIVVGFGWANDNMWPIVTGLILTPIVNEFHPIHGTFLSLSQNLGLLAGAIFWGFGCDVFGRRWAFNLTLGITALWGIVAAGSPNFVAIGIFAAFWSFGVGGNLPVDSAIFLEFLPASHQYLLTVLSIDWAVAQVIADLIAWGLLTNFTCQQDAETCTKSENIGWRYFMITIGGLTLITFAIRFFCFTIFESPKYLMGKGKDEEAVRTVHEVARRNGKESWLTLEHLKAVELEGYEQQATASDAIKRKLEAVNLNHIKALFKTKKLGYSTGALMLVWAFIGLAFPLYNAYLPYLQAIRGAEFGDGSTYITYRNNLILAVTGVPGAALGAVLAETPKIGRKGALCVSTVLTGVFLFGSTTATNSPALLGWNTAYSFTSNIMYAVLYAFTPEVFPTKDRGTGNALTATSNRIFGVFSPIIATYANLNTPVPVYVSGALFIVAGLVVLTLPFESRGKASL

SEQ ID NO: 32055 - DNA, 3261 bp, Muscodor strobelii
  misc_feature: SGI EST ID NO. CUFF.75873.1
  misc_feature: Variant of the nucleotide sequence at SEQ ID NO 32053
tggcaagctgcggagtaatctgaagattcacagtggttcatcgacatagcagcgtcccagactctggtatgatacaccaaaggcagtgctcaccgacggtgacccgttgcggtattgcaagtctaatcatcgttctctattgtaactgcaatgaactaagaataaattcacataattcagctgcgaatatgcccgttgtcaactcaatttgaatcggcaagacggggagatggtgcaatctttgcgagcttctagaatcccgcataaggttcgacagggcaccatgcttccaattggatcatagcggacatggagccggcagcacttcgatctgcaccagggcctatcagcttgccgacttaggcaaagatcgcctatcacgccattgaagtgttagctgtcgatgccaaatgacagtcgaattcaaagatcggaaactgcacagctctcgtacgtatgagcgatcatataagacacacctcgcgctggtgtagcatatgtcgcgtgggccgtattatgaccttaggactaccccaacgaatgttgatcttcaactttatcgtggtagcttcctcgcctttgttttacctctattaatctaaagtcaagcagtccagtggtctcacaacagcaatcatgtctgtcccagcaagcgacaaaaactcggcaaccgacgagaaggctcccgtagcagagcgacagccaaccacaggaccatcgatcgaagagctcctagcagatttggacagcgatagcgtcatcccaaaagatgctatagatcctacttatgcgcgcaaagcggcagtcttaaatcgtgcggtccaggacataggtatgggatggtatcaatggcagctgttcattgttgtcggtttcggctgggcgaatgacaacatgtggcccattgtcaccggactcattcttacacccatcgtaaacgaattccatcccatacacggaacgtttctcagtttgtcacaaaacctgggtctcctcgctggcgcgattttctggggctttggctgcgatgtcttcggccgacgatgggcatttaatctaacactcggtatcacagcactatggggtattgtcgctgctggcagtcccaactttgttgcaatcggcatctttgccgctttctggagttttggtgttggaggtaatctgcctgtggactccgccatcttcttggaatttctgcccgcatcacaccaatatctgttgacggttctctccattgattgggccgtcgcccaggttatcgcagatctaattgcctgggggctccttaccaacttcacctgccagcaagacgccgaaacttgtaccaaatctgagaacatcggatggcgctatttcatgattacgattgggggtttgactctgattacattcgccattcggtttttctgcttcacgatctttgagtcgccgaaatatctcatgggcaagggcaaagatgaagaggccgtccgcactgttcacgaagtcgcgcgaagaaatggcaaggaaagctggttgactctcgaacatcttaaggcagtcgagctagaaggatacgaacaacaagccaccgctagtgatgctatcaaacgcaagctcgaagctgtcaatctcaatcatatcaaagcgctcttcaagaccaagaaacttggttattctacaggcgctttgatgctcgtctgggccttcatcggcttggccttcccattgtacaatgcttatctcccatacctccaggctatacgtggtgctgagtttggcgatggttcgacctacattacttatagaaataatttgatccttgcagttaccggtgtccctggcgcagcactaggtgctgtcctagccgagacacccaagattggaagaaagggcgcactgtgcgtgagcacggtccttactggtgttttcctgtttggcagcacaacggccacgaactcacccgcattgctcggatggaacaccgcttactcattcacatcgaatatcatgtatgccgtactgtatgcttttacaccggaagtctttccgaccaaggatcgaggaactggcaacgctctgactgctacctccaaccggatattcggcgtcttctcacccatcatcgctacgtacgccaatctcaacacgccagtccccgtgtatgtgagcggtgctctgttcatcgtcgccggtctggttgtcctaactctaccctttgaatcaagaggaaaggctagtctttgatttgaatcaatagccacttgtcgtattcgctcagcatttaaccatttttatttcaaactcgtcttagcgagctccctagataccccggtctatgtactctgtatatatcgataatcactaaacggcgaagaatcggacatctcaaatagtgttggtcaaatggtgcttcgtcttcagtacagaaatcgaactctcataaagagagcatcaccttctaatacataatatctccctaatgtgacttgggtcgcggaaggacggaaagaggcaacgagtttattaggtgtactagagacgaagtggcaggttaaatgcttgcttcacgcgtgtgcgatttgaccgttagcaactcatcgaattccggcctatgaacttcctctactgaagcatagtacctaggattgtatattgaggaataatatgttcgaaggctaacacgctttgtaatgctgtgtgaaatcatatcttacagcaaaggacgcaagtgccccttgcctctgagcctttgcatcaccctctgcagctttacatgcctgcatcacaggatccctctcgagcaacgtatcaggatcgctgtccgagacacgtctgaaattatctcgtgacactggatcgatgatcgttttccacttctctatacgcttttcactatacaagtcgaggatcgactcgtcagctttgccgtcatatatgccagctaaacaatcatacaagcccccgacatcaacaaaacctcccgtgatccccatgcctccccatggattgcagagatgcgccgcatccgcagcgagcagaattcgcccaacacgaaatgcaggtgcacacctctgatgcattttgtatggtgacatgttgatcaagttgtactcgcctggtttggggtgacctggcagcatgatttcgtacttcatcggctgtcgagctttcatttcctcccatgatagaccaggagtctctccataggttactcgatacagtccatcggtcgtgagcttagcggccatctgtaaattgcgtttcagtaaatagtca

SEQ ID NO: 32056 - DNA, 675 bp, Muscodor strobelii
  misc_feature: SGI cDNA ID NO. 571041
  misc_feature: Encodes the peptide sequence at SEQ ID NO 32057
atgtcgctcatcaccgccttagacaacgttgctaatatacccaatccaccagctttcgatggttaccaatctctcgatggtatcattggcaacactttgcggtctgacactatgactagtatcaccaatgagctcgggggttcctttcctggatattataacatctggatgacgaacaacttcaataatgatgctcgcgtgttgacctttgctgcgaacaagcacctagagttcgtgcagcgtatcgagactgctctgtcccgggatagcgattttctcacactttgcatgtttcagccggtgacgaactcaatggttgtacacgcctctgaaaatggaggtaacatcatgggtctcgaggaacatgtagcaatgggcgctggcgccatttttttgatcgtcctcgccacaaagggtgtggataacgaagcaattgcgcgtccgctcgtacaggatttcatggattcagtgaatgagtacgcaacatctatcaatgccaattggaactggaattatctcaactacgctggctccgaacaagatcccatttccacgtttggagaggagcaaatcacgaagttacaagccgtatctgcgaaatatgatcctcatagcgtgttccaaaagctgcgacattcaggcgtcaagattcctcgaattcggaaaaaatcttga

SEQ ID NO: 32057 - protein, 224 aa, Muscodor strobelii
  misc_feature: SGI Peptide ID NO. 571041
  misc_feature (3)..(218): NCBI GI: 256734055 Blast Desc: NECHADRAFT_35620 [Nectria haematococca mpVI 77-13-4]
  misc_feature (3)..(218): NCBI GI: 256723208 Blast Desc: NECHADRAFT_51832 [Nectria haematococca mpVI 77-13-4]
  misc_feature (3)..(218): NCBI GI: 46128063 Blast Desc: FG08409.1 [Gibberella zeae PH-1]
  misc_feature (3)..(218): NCBI GI: 169613583 Blast Desc: SNOG_09922 [Phaeosphaeria nodorum SN15] gi|160707191|gb|EAT82257.2| SNOG_09922 [Phaeosphaeria nodorum SN15]
  misc_feature (3)..(221): NCBI GI: 256732288 Blast Desc: NECHADRAFT_41792 [Nectria haematococca mpVI 77-13-4]
  misc_feature (3)..(219): NCBI GI: 169609567 Blast Desc: SNOG_07875 [Phaeosphaeria nodorum SN15] gi|111063031|gb|EAT84151.1| SNOG_07875 [Phaeosphaeria nodorum SN15]
  misc_feature (3)..(218): NCBI GI: 261361516 Blast Desc: FAD binding domain-containing protein [Verticillium albo-atrum VaMs.102]
  misc_feature (9)..(221): NCBI GI: 46110302 Blast Desc: FG02033.1 [Gibberella zeae PH-1]
  misc_feature (5)..(217): NCBI GI: 171679329 Blast Desc: protein product [Podospora anserina] gi|170939290|emb|CAP64518.1| protein product [Podospora anserina]
  misc_feature (3)..(200): NCBI GI: 46110587 Blast Desc: FG02175.1 [Gibberella zeae PH-1]
MSLITALDNVANIPNPPAFDGYQSLDGIIGNTLRSDTMTSITNELGGSFPGYYNIWMTNNFNNDARVLTFAANKHLEFVQRIETALSRDSDFLTLCMFQPVTNSMVVHASENGGNIMGLEEHVAMGAGAIFLIVLATKGVDNEAIARPLVQDFMDSVNEYATSINANWNWNYLNYAGSEQDPISTFGEEQITKLQAVSAKYDPHSVFQKLRHSGVKIPRIRKKS

SEQ ID NO: 32058 - DNA, 279 bp, Muscodor strobelii
  misc_feature: SGI EST ID NO. CUFF.75780.0
  misc_feature: Variant of the nucleotide sequence at SEQ ID NO 32056
caccgccaaggcaaaatgtcgctcatcaccgccttagacaacgttgctaatatacccaatccaccagctttcgatggttaccaatctctcgatggtatcattggcaacactttgcggtctgacactatgactagtatcaccaatgagctcgggggttcctttcctggatattataacatctggatgacgaacaacttcaataatgatgctcgcgtgttgacctttgctgcgaacaagcacctagagttcgtgcagcgtatcgagactgctctgtcccgg

SEQ ID NO: 32059 - DNA, 849 bp, Muscodor strobelii
  misc_feature: SGI cDNA ID NO. 571042
  misc_feature: Encodes the peptide sequence at SEQ ID NO 32060
atggtcaagtttctgctatggcctttttattctatagccatatggcttaccccaccatgcacgataagtgaacaagtatcagaccagagcgttattggttcctctcatgactgctgtagtcgcctggcttcatctgcggttggagacaaggtcctttacccaagttcggaggcttataatgaacggctttccgcctacttctctgccagcgcggctcttgcaccctggtgcatggccatgccctcaagcgctgaagatgtatctgttattataaaaacattggtaaaataccaatgtccttttggagttactggaggtggtcatgggactttcaagctttctaatagtgtacgaaaaggagtaactattgattttgctcacatgaattctaccacgtacgatcccgagactaatctagcttcctaccagccaggcggtcactggggggacgtatacgatgctcttgcgccattcggcgtaacagtcgcaggaggtcgtgcagacagtgttggtgttggtggttttgtaacaggcggtggtaactcatttcactcggcactctacggttgggcttgcgataccgtccggaacttcgaaattgttcttgccaatggctcaatcataaacgcaaacgcaacttcgaattcagatctctggactgcactcaaaggcagctccggtaatcttggcttaatcacacgcttcgacgtaattgctattccctacgcgaatccttctataccccatatctggggcggtacactagcttgggatctttctagacaagatgcagtcatcaatgcttatgtcaattttgcggagaatgtaccaaatgatactaactcctaa

SEQ ID NO: 32060 - protein, 282 aa, Muscodor strobelii
  misc_feature: SGI Peptide ID NO. 571042
  misc_feature (75)..(211): Pfam Id: PF01565 Pfam Desc: FAD binding domain
  misc_feature (38)..(282): NCBI GI: 116198491 Blast Desc: CHGG_07401 [Chaetomium globosum CBS 148.51] gi|88178680|gb|EAQ86148.1| CHGG_07401 [Chaetomium globosum CBS 148.51]
  misc_feature (38)..(282): NCBI GI: 261355751 Blast Desc: FAD binding domain-containing protein [Verticillium albo-atrum VaMs.102]
  misc_feature (34)..(282): NCBI GI: 46128063 Blast Desc: FG08409.1 [Gibberella zeae PH-1]
  misc_feature (39)..(282): NCBI GI: 256734055 Blast Desc: NECHADRAFT_35620 [Nectria haematococca mpVI 77-13-4]
  misc_feature (37)..(276): NCBI GI: 46118786 Blast Desc: FG04732.1 [Gibberella zeae PH-1]
  misc_feature (39)..(279): NCBI GI: 256723208 Blast Desc: NECHADRAFT_51832 [Nectria haematococca mpVI 77-13-4]
  misc_feature (44)..(279): NCBI GI: 46110587 Blast Desc: FG02175.1 [Gibberella zeae PH-1]
  misc_feature (38)..(278): NCBI GI: 169609567 Blast Desc: SNOG_07875 [Phaeosphaeria nodorum SN15] gi|111063031|gb|EAT84151.1| SNOG_07875 [Phaeosphaeria nodorum SN15]
  misc_feature (24)..(272): NCBI GI: 261358119 Blast Desc: conserved [Verticillium albo-atrum VaMs.102]
  misc_feature (35)..(279): NCBI GI: 67522661 Blast Desc: AN1787.2 [Aspergillus nidulans FGSC A4] gi|40744807|gb|EAA63963.1| AN1787.2 [Aspergillus nidulans FGSC A4]
MVKFLLWPFYSIAIWLTPPCTISEQVSDQSVIGSSHDCCSRLASSAVGDKVLYPSSEAYNERLSAYFSASAALAPWCMAMPSSAEDVSVIIKTLVKYQCPFGVTGGGHGTFKLSNSVRKGVTIDFAHMNSTTYDPETNLASYQPGGHWGDVYDALAPFGVTVAGGRADSVGVGGFVTGGGNSFHSALYGWACDTVRNFEIVLANGSIINANATSNSDLWTALKGSSGNLGLITRFDVIAIPYANPSIPHIWGGTLAWDLSRQDAVINAYVNFAENVPNDTNS

SEQ ID NO: 32061 - DNA, 260 bp, Muscodor strobelii
  misc_feature: SGI EST ID NO. CUFF.75786.0
  misc_feature: Variant of the nucleotide sequence at SEQ ID NO 32059
gtgtattccgatctgagacctaactcacgcaaattgctaacgtctttctttccatgcagtgcatggccatgccctcaagcgctgaagatgtatctgttattataaaaacattggtaaaataccaatgtccttttggagttactggaggtggtcatgggactttcaagctttctaatagtgtacgaaaaggagtaactattgattttgctcacatgaattctaccacgtacgatcccgagactaatctagcttcctaccag

SEQ ID NO: 32062 - DNA, 1344 bp, Muscodor strobelii
  misc_feature: SGI cDNA ID NO. 571043
  misc_feature: Encodes the peptide sequence at SEQ ID NO 32063
atgtctgtcgtgtttccgctgaacgatgccttcagaagcgtggtgcttccagcactagactatgttccagtgcttggtggtttgctgagttcaatcgtcggcattctatggccggaatctagaagaatttacgctaacaagtgccacgatagcaatgacaacatgatcaatgatgttgaaaaatatatggagggcttgctgcagcaattttacgcaagactcctaacggacacactcaagacggatcttcaatctttgaagctcacttgggacgactaccaaaaatacggctccgatgcacaacgcatagacctactcaaagacttgctccgggagtcaagagaggacaagccgcacttcctcccagacgctgtaaaggaccccgaagcatatgccaatatagctgcgctaggttacgtcgtaacctttgccacgatgcgccttgcattgcttgcagaacagaccaaccactacaaggaaatctacactagtgatgatgcaaacgcagatgtacatcgagcggatcttttgaacgagataggcgccttcagggggcgggtcctcgagctgtacaagatgattctcgaccgtcgaactagcgtgactaacggcatgattaacatcgcctctaagaaggtcacggtggataagattgtgaagaccacattcacggtcacggatagtctaaccggctattcgcacgactacgaggagactaaaagtccgtacggcttggatagtcagcgagctgaagcttacagagattatcataaccgactgctcgaggcgaacttggatttcaaattcgaattgaatgatatcattgcctcctccaatttatggtacaggtttgataaactctacgtgagaggcccaccgccgctccggccggtgttcacgtcgaacatcatctccgagggcgtcagcaccaacagcagcgtcgaagacaatatgttcgaagattctaaacagttcggcacatccagcgccatctccgctataacaatctgggggggccagaactgggtcaacggcatcgaggtgtggtacaacggagtgagcagtgggttgcgcggctcagcgaccggcactcagaacaaactaaccctcagccgaggagagaagatcacggagttgggtggtacttggggccaatacatggtcggtttctgggtcaagacagatcttgggcacaaggttggcttctctggccctccgggtaacacagacaacttttacttcacttaccaaggtacctctacttcgttgggatattttgctgggatgtatggaagcaacagggtcgatcagctcagggttgtgtgggtgagatatgaattatga

SEQ ID NO: 32063 - protein, 447 aa, Muscodor strobelii
  misc_feature: SGI Peptide ID NO. 571043
  misc_feature (1)..(443): NCBI GI: 170940124 Blast Desc: protein product [Podospora anserina]
MSVVFPLNDAFRSVVLPALDYVPVLGGLLSSIVGILWPESRRIYANKCHDSNDNMINDVEKYMEGLLQQFYARLLTDTLKTDLQSLKLTWDDYQKYGSDAQRIDLLKDLLRESREDKPHFLPDAVKDPEAYANIAALGYVVTFATMRLALLAEQTNHYKEIYTSDDANADVHRADLLNEIGAFRGRVLELYKMILDRRTSVTNGMINIASKKVTVDKIVKTTFTVTDSLTGYSHDYEETKSPYGLDSQRAEAYRDYHNRLLEANLDFKFELNDIIASSNLWYRFDKLYVRGPPPLRPVFTSNIISEGVSTNSSVEDNMFEDSKQFGTSSAISAITIWGGQNWVNGIEVWYNGVSSGLRGSATGTQNKLTLSRGEKITELGGTWGQYMVGFWVKTDLGHKVGFSGPPGNTDNFYFTYQGTSTSLGYFAGMYGSNRVDQLRVVWVRYEL

SEQ ID NO: 32064 - DNA, 1539 bp, Muscodor strobelii
  misc_feature: SGI cDNA ID NO. 571044
  misc_feature: Encodes the peptide sequence at SEQ ID NO 32065
atgttgtcctcaaatccgcccagcgagcgtgaaaagaatgcccacgcaggcgatgctgaagaacacatcatcgtcgttaaccttgacgaggctaatactagcgactggacgcccgaggaagagaagcgagtgagacgcaagattgactttgttctcttgcctgtattgggactagccttttttgcgctccagctggacagaggaaacatcggtaatgcattgactgctggaatcacgtctggcctaggtgtaagcaccaacgagataaattacggcaacagtatcttgttcgcagggattgtcgtcttcgagataccgtcgaacattgtgctgcaaagagtcgggcctgtcaaatggctgtcatttcaaatcctcgcctggggtctggtcgcaacgctgcaatgtctcattaccaattttggcggatacctcgcaacacgtattctgctcggcatatttgaatccggcttcatcccaggcgcgctctacgtggtgtcaacttggtatacgcgcaatgagactgcactgcgagttgctctcttctttctcggaaaccttcttgcatttgcgctcacgtcgctcattggagcggccattctcaccatagggaatagaaacgggatcgccgaatggagatggctgtttctcagcgaaggcatcatcaccattagtataggacttatgttccttctcctgttgccgcctaaggtcggcaatggtcgccctgttctcagccgagttacggggaactggtcgtattttagcgatcgggagtcatatatcatgacccgccgtgttgttttggatgatcccgcaaaagctcaagatgctatccatattactggtcgtgacgtgtggacgactatctctgacccaggcattgtgcttcacgtcgtaatttctatcacggcaacaactccagtcagcgcaatcaatacctatggccctagtgtcataaagagtcttggctacgggacagtggaagctaatgctctggccagcgttgggtattttcttgccgttccactcgttgtattgcttgggtttgcagcagacaagactggcaagcgcgccccgttcctacttttccaagcaacctggagtctgattgctttcactgcgctttacgagagcaataactggtctagtgagaggcgctatgctgccgtggttttttctctggcctgtaatagcatcgtacacatccttaatgtgagctggttgtcagcgaattgtcgtcgtcctcaggagagaagtgtcgcgatggccatgatcgttatgggggcaaatcttggagcgctcgcgggctctgagatcttccgcgcttatgatgcaccactctatcgccatgccttcagtgcgtgtctggcactgtccgctatcgtgattgccgaagtcatcgttcggggagtgtggtactatttgctcaataaaaagctaaaaagggagggcagaggtctagtgcaggcagggaacacgtccgaaacgcaagatgggcacaaggaagagttgcgcaagcacatatactggatctggtga

SEQ ID NO: 32065 - protein, 512 aa, Muscodor strobelii
  misc_feature: SGI Peptide ID NO. 571044
  misc_feature (56)..(437): Pfam Id: PF07690 Pfam Desc: Major Facilitator Superfamily
  misc_feature (3)..(483): NCBI GI: 212538773 Blast Desc: conserved [Penicillium marneffei ATCC 18224] gi|210069284|gb|EEA23375.1| conserved [Penicillium marneffei ATCC 18224]
  misc_feature (4)..(479): NCBI GI: 242805696 Blast Desc: allantoate permease, [Talaromyces stipitatus ATCC 10500] gi|218715210|gb|EED14632.1| allantoate permease, [Talaromyces stipitatus ATCC 10500]
  misc_feature (2)..(479): NCBI GI: 255939406 Blast Desc: Pc16g00500 [Penicillium chrysogenum Wisconsin 54-1255] gi|211585095|emb|CAP92720.1| Pc16g00500 [Penicillium chrysogenum Wisconsin 54-1255]
  misc_feature (18)..(465): NCBI GI: 67902710 Blast Desc: AN8342.2 [Aspergillus nidulans FGSC A4] gi|40747748|gb|EAA66904.1| AN8342.2 [Aspergillus nidulans FGSC A4]
  misc_feature (29)..(483): NCBI GI: 121714839 Blast Desc: MFS transporter, [Aspergillus clavatus NRRL 1] gi|119403185|gb|EAW13603.1| MFS transporter, [Aspergillus clavatus NRRL 1]
  misc_feature (6)..(481): NCBI GI: 145235759 Blast Desc: An03g06530 [Aspergillus niger] gi|134058217|emb|CAK38409.1| protein product [Aspergillus niger]
  misc_feature (7)..(495): NCBI GI: 169786425 Blast Desc: [Aspergillus oryzae RIB40] gi|83776421|dbj|BAE66540.1| protein product [Aspergillus oryzae]
  misc_feature (47)..(487): NCBI GI: 259484269 Blast Desc: TPA: conserved [Aspergillus nidulans FGSC A4]
  misc_feature (7)..(487): NCBI GI: 238507435 Blast Desc: vitamin H transporter, [Aspergillus flavus NRRL3357] gi|220689632|gb|EED45983.1| vitamin H transporter, [Aspergillus flavus NRRL3357]
  misc_feature (14)..(511): NCBI GI: 254570114 Blast Desc: with similarity to the allantoate permease (Dal5p) subfamily [Pichia pastoris GS115] gi|238031964|emb|CAY69887.1| with similarity to the allantoate permease (Dal5p) subfamily
MLSSNPPSEREKNAHAGDAEEHIIVVNLDEANTSDWTPEEEKRVRRKIDFVLLPVLGLAFFALQLDRGNIGNALTAGITSGLGVSTNEINYGNSILFAGIVVFEIPSNIVLQRVGPVKWLSFQILAWGLVATLQCLITNFGGYLATRILLGIFESGFIPGALYVVSTWYTRNETALRVALFFLGNLLAFALTSLIGAAILTIGNRNGIAEWRWLFLSEGIITISIGLMFLLLLPPKVGNGRPVLSRVTGNWSYFSDRESYIMTRRVVLDDPAKAQDAIHITGRDVWTTISDPGIVLHVVISITATTPVSAINTYGPSVIKSLGYGTVEANALASVGYFLAVPLVVLLGFAADKTGKRAPFLLFQATWSLIAFTALYESNNWSSERRYAAVVFSLACNSIVHILNVSWLSANCRRPQERSVAMAMIVMGANLGALAGSEIFRAYDAPLYRHAFSACLALSAIVIAEVIVRGVWYYLLNKKLKREGRGLVQAGNTSETQDGHKEELRKHIYWIW

SEQ ID NO: 32066 - DNA, 3383 bp, Muscodor strobelii
  misc_feature: SGI EST ID NO. CUFF.75833.0
  misc_feature: Variant of the nucleotide sequence at SEQ ID NO 32064
tgagctttcaaccgcatcaatctgatgttgcacgtgtctaattggcattgtttctaggcgggaacattgctagagaggatgttgtcctcaaatccgcccagcgagcgtgaaaagaatgcccacgcaggcgatgctgaagaacacatcatcgtcgttaaccttgacgaggctaatactagcgactggacgcccgaggaagagaagcgagtgagacgcaagattgactttgttctcttgcctgtattgggactagccttttttgcgctccagctggacagaggaaacatcggtaatgcattgactgctggaatcacgtctggcctaggtgtaagcaccaacgagataaattacggcaacagtatcttgttcgcagggattgtcgtcttcgagataccgtcgaacattgtgctgcaaagagtcgggcctgtcaaatggctgtcatttcaaatcctcgcctggggtctggtcgcaacgctgcaatgtctcattaccaattttggcggatacctcgcaacacgtattctgctcggcatatttgaatccggcttcatcccaggcgcgctctacgtggtgtcaacttggtatacgcgcaatgagactgcactgcgagttgctctcttctttctcggaaaccttcttgcatttgcgctcacgtcgctcattggagcggccattctcaccatagggaatagaaacgggatcgccgaatggagatggctgtttctcagcgaaggcatcatcaccattagtataggacttatgttccttctcctgttgccgcctaaggtcggcaatggtcgccctgttctcagccgagttacggggaactggtcgtattttagcgatcgggagtcatatatcatgacccgccgtgttgttttggatgatcccgcaaaagctcaagatgctatccatattactggtcgtgacgtgtggacgactatctctgacccaggcattgtgcttcacgtcgtaatttctatcacggcaacaactccagtcagcgcaatcaatacctatggccctagtgtcataaagagtcttggctacgggacagtggaagctaatgctctggccagcgttgggtattttcttgccgttccactcgttgtattgcttgggtttgcagcagacaagactggcaagcgcgccccgttcctacttttccaagcaacctggagtctgattgctttcactgcgctttacgagagcaataactggtctagtgagaggcgctatgctgccgtggttttttctctggcctgtaatagcatcgtacacatccttaatgtgagctggttgtcagcgaattgtcgtcgtcctcaggagagaagtgtcgcgatggccatgatcgttatgggggcaaatcttggagcgctcgcgggctctgagatcttccgcgcttatgatgcaccactctatcgccatgccttcagtgcgtgtctggcactgtccgctatcgtgattgccgaagtcatcgttcggggagtgtggtactatttgctcaataaaaagctaaaaagggagggcagaggtctagtgcaggcagggaacacgtccgaaacgcaagatgggcacaaggaagagttgcgcaagcacatatactggatctggtgatttagggcacgtcatgcgaagcatacattataccatttggttcgtcgaaatttggaatattgttcactcataaccggctctacttgcgatatcagaccgcgcttctcgttgcttttccgggcgattgcaccaagtgatgataataagaacgacggtcgtgatagttcagtattctctatgtatgatctatagatggacattccataagttggcctgatgatgcaataaatacagaacagaaataaataaatgctgattaaaatcatagtccagaacccaaactccgttcgctaatgcagtaaaacattctcatatcaaatctaagagctctcggccgtcaggtcgcgcttagcattcttcgtgatgccacatttcttcaggcagctgtcaactcccagagccacgtttgctgggatcatgcccttgaatgtttcgatgtcggcgccgttgatggcgtccacagccaacgcagccttaacaatatcggggcgtaagccgaagaatgtctgggcagtctgctggacaccgggatccacattgttgaagcccgctacgaatacggcatcctcgcagtcgggattaaattcagtgtgcattgcgccttgtgggaagacagtaaactgatacttgttgagcagattctgtacaggggagacaccgttctccataatcatctcgctaacaagtctgccctcgaccacgacgttgagctctgttgctcgcgggtgaacgtgcggcgtattgaaaccacaaggcgaaaggaagcccatggtcatggctccaccgttgccgatcagtgctgggaagatattcgcgtccgccgccacagtgtgcccccccgagcccatggtgactgagcccgaaggggggtcaagaaagtcgaatttgaagtcgccaggttggttaagcagaggattcgcgacttttgtgtgggagcaagttcaagggcttgaatcaaggaagtatcgccagatcgcgggttcgcggccacatcagccgggagcgagtcgtcggtagcgcgtgaaactgtgggagccgcatacaccgatgacccggctgcgaggatagtagataatacaatagcgtactgcatctttgctataatctttgctgcgtgtctgtgtcggagtcgtactcgtagtgacagggaagatccgttcgtagagttctatgtaatgatatgggacgcttgtgtagttgttgacgatgtttctggagtgcaagcagatttccgagtccatggtacgcgtcttctctctttatataatactcatcgaacggccttttgactgactaacaagttctttcgtaagtcagtatctctatcgtggctaagtctttgcaaggtgcaatttagggctactgaaatgagtgtaagctgtgccaagccagactttcagcagatcgcgttagcaacgcaggcatgtaagctcaggactatggcgctcgggaatccccaccaagtggatgacagctatccctagtcgactaatctaagcccctaaccttgagcccaagctggcgttttgtttcctttcgctttgggaaaggcaggtcgcggggtgaggtccgctattcaaacgaggcgcctgttcgttgctattgctggcagcgaacagcgtgctgatggcgtcatccaatcaattcagacatcttgtgctaggtaataccttgcaaaagatgagagagttgaaatgttaacaataatgtgctgtgatatcgcgctaaatttaccgcagatctcttcgccgcatggccgaaatttc

SEQ ID NO: 32067 - DNA, 528 bp, Muscodor strobelii
  misc_feature: SGI cDNA ID NO. 571045
  misc_feature: Encodes the peptide sequence at SEQ ID NO 32068
atgggctcgggggggcacactgtggcggcggacgcgaatatcttcccagcactgatcggcaacggtggagccatgaccatgggcttcctttcgccttgtggtttcaatacgccgcacgttcacccgcgagcaacagagctcaacgtcgtggtcgagggcagacttgttagcgagatgattatggagaacggtgtctcccctgtacagaatctgctcaacaagtatcagtttactgtcttcccacaaggcgcaatgcacactgaatttaatcccgactgcgaggatgccgtattcgtagcgggcttcaacaatgtggatcccggtgtccagcagactgcccagacattcttcggcttacgccccgatattgttaaggctgcgttggctgtggacgccatcaacggcgccgacatcgaaacattcaagggcatgatcccagcaaacgtggctctgggagttgacagctgcctgaagaaatgtggcatcacgaagaatgctaagcgcgacctgacggccgagagctcttag

SEQ ID NO: 32068 - protein, 175 aa, Muscodor strobelii
  misc_feature: SGI Peptide ID NO. 571045
  misc_feature (1)..(125): Pfam Id: PF00190 Pfam Desc: Cupin
  misc_feature (4)..(125): Pfam Id: PF00190 Pfam Desc: Cupin
  misc_feature (2)..(170): NCBI GI: 67539534 Blast Desc: AN5937.2 [Aspergillus nidulans FGSC A4] gi|40738610|gb|EAA57800.1| AN5937.2 [Aspergillus nidulans FGSC A4] gi|259479891|tpe|CBF70529.1| TPA: conserved [Aspergillus FGSC
  misc_feature (2)..(169): NCBI GI: 261354582 Blast Desc: spherulin-1A [Verticillium albo-atrum VaMs.102]
  misc_feature (6)..(170): NCBI GI: 46102638 Blast Desc: FG00023.1 [Gibberella zeae PH-1]
  misc_feature (6)..(171): NCBI GI: 256724103 Blast Desc: [Nectria haematococca mpVI 77-13-4]
  misc_feature (5)..(160): NCBI GI: 189191992 Blast Desc: spherulin-1B precursor [Pyrenophora tritici-repentis Pt-1C-BFP] gi|187973941|gb|EDU41440.1| spherulin-1B precursor [Pyrenophora tritici-repentis Pt-1C-BFP]
  misc_feature (2)..(166): NCBI GI: 256726910 Blast Desc: [Nectria haematococca mpVI 77-13-4]
  misc_feature (3)..(160): NCBI GI: 169600495 Blast Desc: SNOG_03083 [Phaeosphaeria nodorum SN15] gi|111068694|gb|EAT89814.1| SNOG_03083 [Phaeosphaeria nodorum SN15]
  misc_feature (2)..(163): NCBI GI: 134860 Blast Desc: SR1B_PHYPO RecName: Full=Spherulin-1B; Flags: Precursor gi|161256|gb|AAA29979.1| spherulin 1b precursor [Physarum polycephalum] gi|225883|prf||1402254A spherulin 1a
  misc_feature (2)..(163): NCBI GI: 134858 Blast Desc: SR1A_PHYPO RecName: Full=Spherulin-1A; Flags: Precursor gi|161262|gb|AAA29982.1| spherulin 1a precursor [Physarum polycephalum]
  misc_feature (2)..(163): NCBI GI: 225884 Blast Desc: SR1A_PHYPO RecName: Full=Spherulin-1A; Flags: Precursor gi|161262|gb|AAA29982.1| spherulin 1a precursor [Physarum polycephalum]
  misc_feature (4)..(132): SWISSPROT Homolog: EC 1.2.3.4 Oxalate oxidase
MGSGGHTVAADANIFPALIGNGGAMTMGFLSPCGFNTPHVHPRATELNVVVEGRLVSEMIMENGVSPVQNLLNKYQFTVFPQGAMHTEFNPDCEDAVFVAGFNNVDPGVQQTAQTFFGLRPDIVKAALAVDAINGADIETFKGMIPANVALGVDSCLKKCGITKNAKRDLTAESS

SEQ ID NO: 32069 - DNA, 492 bp, Muscodor strobelii
  misc_feature: SGI cDNA ID NO. 571046
  misc_feature: Elevated expression when VOC is produced
  misc_feature: Encodes the peptide sequence at SEQ ID NO 32070
atgcgtttccaggccctctcgcttgtgtccctgctggggcttgcttctgcacagctgacgcccaatcacacgtcagaagcaggtgttgagatctataatccctcaaacttcttcaatacgacgggaccatggagtatcatgtcaaaggcaggggatttcctgtacatcgctggcatgcgcggtatctacagggagaatagcactcttgcaccggttggagaaccgcgcatccgtttggcatttgaaaacatggctcttcttgccaaatgggcaggggcagagattgatgattgtgtgcgcgtcgtcgtctatacaaccgatatgtatagataccggcccatcgccaaccaggtgcagatggatctctggggtaatgacgcgaacaagtatccgccccgcaccatcgtcgaaattgatcgcctgaacgaagacgatattatggaggtcgaggctactttctacgtgccacagaagacatgtgggaaagcttag

SEQ ID NO: 32070 - protein, 163 aa, Muscodor strobelii
  misc_feature: SGI Peptide ID NO. 571046
  misc_feature (34)..(155): Pfam Id: PF01042 Pfam Desc: Endoribonuclease L-PSP
  misc_feature (47)..(157): NCBI GI: 261358042 Blast Desc: conserved [Verticillium albo-atrum VaMs.102]
  misc_feature (13)..(158): NCBI GI: 283841706 Blast Desc: Endoribonuclease L-PSP [Rhodopseudomonas palustris DX-1] gi|283577336|gb|EFC24766.1| Endoribonuclease L-PSP [Rhodopseudomonas palustris DX-1]
  misc_feature (27)..(158): NCBI GI: 192291130 Blast Desc: Endoribonuclease L-PSP [Rhodopseudomonas palustris TIE-1] gi|192284879|gb|ACF01260.1| Endoribonuclease L-PSP [Rhodopseudomonas palustris TIE-1]
  misc_feature (27)..(158): NCBI GI: 39935539 Blast Desc: translation initiation inhibitor [Rhodopseudomonas palustris CGA009] gi|39649392|emb|CAE27914.1| translation initiation inhibitor [Rhodopseudomonas palustris CGA009]
  misc_feature (29)..(155): NCBI GI: 150020419 Blast Desc: endoribonuclease L-PSP [Thermosipho melanesiensis BI429] gi|149792940|gb|ABR30388.1| endoribonuclease L-PSP [Thermosipho melanesiensis BI429]
  misc_feature (30)..(155): NCBI GI: 123968149 Blast Desc: YjgF family translation initiation inhibitor [Prochlorococcus marinus str. AS9601] gi|123198259|gb|ABM69900.1| translation initiation inhibitor, yjgF family [Prochlorococcus
  misc_feature (30)..(154): NCBI GI: 18977040 Blast Desc: PF0668 [Pyrococcus furiosus DSM 3638] gi|18892675|gb|AAL80792.1| PF0668 [Pyrococcus furiosus DSM 3638]
  misc_feature (42)..(154): NCBI GI: 21264533 Blast Desc: PF0668 [Pyrococcus furiosus DSM 3638] gi|18892675|gb|AAL80792.1| PF0668 [Pyrococcus furiosus DSM 3638]
  misc_feature (42)..(154): NCBI GI: 14590714 Blast Desc: PH0854 [Pyrococcus horikoshii OT3] gi|3257265|dbj|BAA29948.1| 137aa long [Pyrococcus horikoshii OT3]
  misc_feature (42)..(157): NCBI GI: 270308309 Blast Desc: translation initiation inhibitor, yjgF family [Dehalococcoides sp. VS] gi|270154201|gb|ACZ62039.1| translation initiation inhibitor, yjgF family [Dehalococcoides sp. VS]
  misc_feature: Useful for introducing or modulating the production of volatile compounds
MRFQALSLVSLLGLASAQLTPNHTSEAGVEIYNPSNFFNTTGPWSIMSKAGDFLYIAGMRGIYRENSTLAPVGEPRIRLAFENMALLAKWAGAEIDDCVRVVVYTTDMYRYRPIANQVQMDLWGNDANKYPPRTIVEIDRLNEDDIMEVEATFYVPQKTCGKA

SEQ ID NO: 32071 - DNA, 1322 bp, Muscodor strobelii
  misc_feature: SGI EST ID NO. CUFF.75851.0
  misc_feature: Variant of the nucleotide sequence at SEQ ID NO 32069
gtcgcctactgtaagtcgttggaacaatgatgtaatgttgtcgcggcctttgttagcagcattgcattattactgattgccagggaggtaccttagaactgttgtttggtagataaaagggttagttgctttctcatagcatatatgcaaactctacaatatttcttgtacgacagacttctatgccgagtccacagcgggaccgcgccgtaccagatcagcgctatatagagcgctacgcgacttaatgcatctagcaattcgcttgagtcgtgactaattctatgcagatggagtaaggatcggggatcatcattaacgaatgttgactagtgttgcccaatctcttggatttagtctactaaaattgccccccggtgaatgagttcgattgctacaaaagactactagctgcacaattcctcccattgtcttggcatatcgttgaacttcttattcatacaccaacatgcgtttccaggccctctcgcttgtgtccctgctggggcttgcttctgcacagctgacgcccaatcacacgtcagaagcaggtgttgagatctataatccctcaaacttcttcaatacgacgggaccatggagtatcatgtcaaaggcaggggatttcctgtacatcgctggcatgcgcggtatctacagggagaatagcactcttgcaccggttggagaaccgcgcatccgtttggcatttgaaaacatggctcttcttgccaaatgggcaggggcagagattgatgattgtgtgcgcgtcgtcgtctatacaaccgatatgtatagataccggcccatcgccaaccaggtgcagatggatctctggggtaatgacgcgaacaagtatccgccccgcaccatcgtcgaaattgatcgcctgaacgaagacgatattatggaggtcgaggctactttctacgtgccacagaagacatgtgggaaagcttagaggcctgcctcatgtcgcgatacgagacgccaatgtacactgaattgaaggcgctttgtgtgccagcctgccaggtgcgtcgctggtcaggaatgcgacgtttccatctccagatccgcacagacggtgatagctgcaggaggcgctcgcaggagtcgatacccggctaccggtccggctaccggttggagcgcttggcaatttcaagttagagcgagttgagttgagttaagagctgaataatacgatggactcattgctggattagaacaatgtaaataactcaattgccttcggtaacactgaaacacattaatatacattctacctgtttaaccaaattgcgactcgttgacagact

SEQ ID NO: 32072 - DNA, 1338 bp, Muscodor strobelii
  misc_feature: SGI cDNA ID NO. 571047
  misc_feature: Encodes the peptide sequence at SEQ ID NO 32073
atgcgaacagcacctgccgaccgagacaagattatcagcaagcttcgagggttgggagctagatatctaaggatatactggcatgactacacctcttcggcgaaatgccgtgtggtgccgattaagagagtgttcacaagtctagccgaatcagatgattatagaatctcgatcacgaaggcgagtctgggcctgctgccaaacgacttcacgattccaggagttaccggaactggatcctacttcctacgggttgactggtctagtctgaagagagggccagcgcctgggcatgtgagctgctatgccttcttcctcgacgagaattcaaacgacgtcccgctctgtcctcgtactattttgcgtaacgctttaagtaatgcctccacttcaaatcttgacttcttgattggcttcgagatggaattcaccgtcctggagcggaccggtgacccaaaaaataaatatcgtatgctctctcatgatggccatgcatggtcaatggcacgcgctcttgcgacctggggcgctgaaggaagcttcaacaccgcggcagacgagatgttatcggagctcgaggcagccgggatagaggttgagcagttccacccggaaggagtaccaggccaatatgagatcgtcctcccccctctcacgccactcgaggcttgtgatacacttcttcacacacgacaaatcgttgaaagtgctgccgcgcgtgctggattccgtgtgacgcttcacccccgtcctttcgtgtccgcgatcggaaatggatcacacgcgcatgtttcaatcacctcgaagaacgggaacgagcctgcagtgtacgagcgcttctacggtggaatcctcaagcattttcgagccatatttgcgttcactgattgtaacatcacaagttacgagcgcatggttgacagcttgtgggctggtgggcggtggattacatggggaacccagaataaggagactcctctccgcaagtgcagcgacagccattgggaagtgaaagttcttgacggaattgctaacccctatctggctatagcagcacttatacttgctggggctcacggtgccgagcttagctggagagactgtgaagttgaccctgcgaaacttgacgaagaggagagaaaagccttgggaatatcagaaagatttcccagcaagctcgaggaggcgcttcaggctctcgaagatgacgaaacaatgatttcgttgcttggacgagaagttgtggaacgttacgtcggcgtcaaaaggggtgagctagcattattgaatcccatgtccgatgaagatagaagaatgtgggtgatggagcggtattaa

SEQ ID NO: 32073 - protein, 445 aa, Muscodor strobelii
  misc_feature: SGI Peptide ID NO. 571047
  misc_feature (114)..(361): Pfam Id: PF00120 Pfam Desc: Glutamine synthetase, catalytic domain
  misc_feature (22)..(445): NCBI GI: 116197801 Blast Desc: CHGG_07056 [Chaetomium globosum CBS 148.51] gi|88178335|gb|EAQ85803.1| CHGG_07056 [Chaetomium globosum CBS 148.51]
  misc_feature (22)..(445): NCBI GI: 85102001 Blast Desc: NCU04264 [Neurospora crassa OR74A] gi|12718441|emb|CAC28748.1| related to fluG protein [Neurospora crassa] gi|28922797|gb|EAA32019.1| conserved [Neurospora crassa
  misc_feature (21)..(445): NCBI GI: 256732067 Blast Desc: NECHADRAFT_41904 [Nectria haematococca mpVI 77-13-4]
  misc_feature (22)..(445): NCBI GI: 171693747 Blast Desc: protein product [Podospora anserina] gi|170946822|emb|CAP73626.1| protein product [Podospora anserina]
  misc_feature (22)..(418): NCBI GI: 261352112 Blast Desc: fluG [Verticillium albo-atrum VaMs.102]
  misc_feature (21)..(445): NCBI GI: 46137055 Blast Desc: FG10043.1 [Gibberella zeae PH-1]
  misc_feature (11)..(445): NCBI GI: 261354425 Blast Desc: fluG [Verticillium albo-atrum VaMs.102]
  misc_feature (19)..(445): NCBI GI: 154321916 Blast Desc: BC1G_01105 [Botryotinia fuckeliana B05.10] gi|150850352|gb|EDN25545.1| BC1G_01105 [Botryotinia fuckeliana B05.10]
  misc_feature (20)..(445): NCBI GI: 156061017 Blast Desc: SS1G_02651 [Sclerotinia sclerotiorum 1980] gi|154700055|gb|EDN99793.1| SS1G_02651 [Sclerotinia sclerotiorum 1980]
  misc_feature (21)..(445): NCBI GI: 258573451 Blast Desc: fluG protein [Uncinocarpus reesii 1704] gi|237901173|gb|EEP75574.1| fluG protein [Uncinocarpus reesii 1704]
  misc_feature (12)..(445): SWISSPROT Homolog: EC 6.3.1.2 Glutamate--ammonia ligase
MRTAPADRDKIISKLRGLGARYLRIYWHDYTSSAKCRVVPIKRVFTSLAESDDYRISITKASLGLLPNDFTIPGVTGTGSYFLRVDWSSLKRGPAPGHVSCYAFFLDENSNDVPLCPRTILRNALSNASTSNLDFLIGFEMEFTVLERTGDPKNKYRMLSHDGHAWSMARALATWGAEGSFNTAADEMLSELEAAGIEVEQFHPEGVPGQYEIVLPPLTPLEACDTLLHTRQIVESAAARAGFRVTLHPRPFVSAIGNGSHAHVSITSKNGNEPAVYERFYGGILKHFRAIFAFTDCNITSYERMVDSLWAGGRWITWGTQNKETPLRKCSDSHWEVKVLDGIANPYLAIAALILAGAHGAELSWRDCEVDPAKLDEEERKALGISERFPSKLEEALQALEDDETMISLLGREVVERYVGVKRGELALLNPMSDEDRRMWVMERY

SEQ ID NO: 32074 - DNA, 2497 bp, Muscodor strobelii
  misc_feature: SGI EST ID NO. CUFF.75854.0
  misc_feature: Variant of the nucleotide sequence at SEQ ID NO 32072
ggagcctctaaagtgaggggtcctaacctagcatctaactcacccgtaaggctacgtcaaattggttcctgaatgctgcctcatgaataataagcactaacggaaagtttcgacttgtatcaccttttgctatcagcgtgagacattgccagattcagtgcgtggtaattcccgacagagtgaaaggtggggatcaggcggtgaggtgacgcagtgctgcctcgcactcagaaatcgtatttcttactcagagacaaatggcacacctcgaatactcttcttccctcttctctcatgaacatatcatcgcttcgcatcggttctttgagcgcagatactcagaatactgatacttacgcaacttcaccatatcatcacgatgcgaacagcacctgccgaccgagacaagattatcagcaagcttcgagggttgggagctagatatctaaggatatactggcatgactacacctcttcggcgaaatgccgtgtggtgccgattaagagagtgttcacaagtctagccgaatcagatgattatagaatctcgatcacgaaggcgagtctgggcctgctgccaaacgacttcacgattccaggagttaccggaactggatcctacttcctacgggttgactggtctagtctgaagagagggccagcgcctgggcatgtgagctgctatgccttcttcctcgacgagaattcaaacgacgtcccgctctgtcctcgtactattttgcgtaacgctttaagtaatgcctccacttcaaatcttgacttcttgattggcttcgagatggaattcaccgtcctggagcggaccggtgacccaaaaaataaatatcgtatgctctctcatgatggccatgcatggtcaatggcacgcgctcttgcgacctggggcgctgaaggaagcttcaacaccgcggcagacgagatgttatcggagctcgaggcagccgggatagaggttgagcagttccacccggaaggagtaccaggccaatatgagatcgtcctcccccctctcacgccactcgaggcttgtgatacacttcttcacacacgacaaatcgttgaaagtgctgccgcgcgtgctggattccgtgtgacgcttcacccccgtcctttcgtgtccgcgatcggaaatggatcacacgcgcatgtttcaatcacctcgaagaacgggaacgagcctgcagtgtacgagcgcttctacggtggaatcctcaagcattttcgagccatatttgcgttcactgattgtaacatcacaagttacgagcgcatggttgacagcttgtgggctggtgggcggtggattacatggggaacccagaataaggagactcctctccgcaagtgcagcgacagccattgggaagtgaaagttcttgacggaattgctaacccctatctggctatagcagcacttatacttgctggggctcacggtgccgagcttagctggagagactgtgaagttgaccctgcgaaacttgacgaagaggagagaaaagccttgggaatatcagaaagatttcccagcaagctcgaggaggcgcttcaggctctcgaagatgacgaaacaatgatttcgttgcttggacgagaagttgtggaacgttacgtcggcgtcaaaaggggtgagctagcattattgaatcccatgtccgatgaagatagaagaatgtgggtgatggagcggtattaaagatcaatttggccccgcccagagaacggttaagaaacatgtctaacggcgatgcgtagcacgtaatgtccattgcttgagaaactccgagtcttcgttgatgtgttggtagcgtagtgtagtcgacaacattttctatctacagataaacatagcaatcgatgctggcattgtgtctgaaactatactagcgcagcccatggcagcataccggcgctacacaacgtcagctgatagtttcatatggaactcccagcccaacgacggcgaatgtagctccgggattctgagtttccgagtcgaagcaacaagaaagatggagagcattgataccgaaaccattcgtagtatcgcagactccatctctctgatgcatatgaactcagtatacctattctacatactattatttcaaaatgcgcttaaactcaccaagatacagacgtctaatgtcttaccaaccgaattacttgggatatctagtgatccggcggcttgtagtccgctcacgttcttcgtagctgtcccgttaattgtcgatgttgcaagctaagccgcttttgaattcgggatcttcagtcaagaaaccccccttaaccgtgtcgaatcttatgcctgtcaggccaggtagtgcgttgacagtagccgtagcaccctgggaaaagccttgtaggataaaggattcactcggagatgagagcatcgaagcgatcttgttgacgatatctctagtctcagcacctgaggtctgcgacaatgttgcagggtacatgatgttca

SEQ ID NO: 32075 - DNA, 1725 bp, Muscodor strobelii
  misc_feature: SGI cDNA ID NO. 571048
  misc_feature: Encodes the peptide sequence at SEQ ID NO 32076
atgtcgagcaccgcttctgtcgattcggcagccacacctgacaaacatgacgagaacgagagagtgacaaagactaccgatcgccagcagctcgaacgcaaagtcagccaggcagcttcagaaggtcatgacgccgatatcccttccagccagggatttgttctggataaggaaggtgaactcaagagaattcggtcgatagaagctcggaagcattctaatgcaacgacggcggataaggtaaatggggacctagagaagggtcagaataagacactggcgaatgacgaagacaacgaccctaacgtggtgttttgggacgggccagacgatccggcaaatccctataactggtctacgtctatgaaatttgtcaattgtggtctcatcagcgcgcaaaccttcttctcaccattggcctcgtcaatcttcgccccaggtgtacccgaggttctcgctgaatttcattctgattctccggagattgcgacttttgtcgtctcagtttatctcctcggattcgtctttggacctttcttcatagctccgctgtcggagatttacggccgcgctcccatataccatatatgcaacatcggatttgtcgcttttagtgtcgcgtgcgcactggctcctaatctgaatgctctcatcgccttccgctttttggccggtgtattcggcgttgcgccgatcacaaacggcggcggtactatagcagacatgatcccacagcaccaacgtggttccatccttgccgtgtatagctgcgggcctctcttaggtcctatagtcggacctatcgcgggcggattcctgtcaagtgctgttggatggcggtggaatttttggcttttggctatcgccgtgggtgtcatcacgatattgatgtttgttttcatacgtgagagctacgcaccggttattttgcaaaggaaggtggaaaggctgcgcaaggagacggggaacaatatgcttcgttcgaagcttgacgcgggcttgtcaccgagtgatttcttcaagcgcagcgctatccgccccattaagatgttcttcatgtcgcctatcatctctattatggccatatacacggctattacatacggctatctgtacttacagttcacgaccatgacacaggtatttgaggagcaatatggattcccaacgtcccttgttggactttcattccttggactgggaatcggaagtttcatcggcatcggcatttatagcgccacttctgacagctacttgaagcgcaaagcagcacaagccgacagagaagccgaggagacaggcggggaaaagaaaggcatgaagccagagtatcggctcccgttgcttcctataggcgcgctattcgtcccagctgggctcttcatctacggttggacagcccagtacaagattcattggatcgtgcccatcatcggtgagggcataggcggtataggcaatatccttgtgtttttggccattcaaacatatttagtagacgcattcacaatctatgctgcttcggcattggctagtaacacgatcatacgatctattgcaggagctctacttcccctagcgggtctcaggctttatgacaagttgggccttggctggggcaatagtctccttgcttttatagctgtcgcgctcttgccagtcgcgctcttccagttcaaatatggcgagtatttacgcgaaaagttcccgattaaggacttataa

SEQ ID NO: 32076 - protein, 574 aa, Muscodor strobelii
  misc_feature: SGI Peptide ID NO. 571048
  misc_feature (130)..(525): Pfam Id: PF07690 Pfam Desc: Major Facilitator Superfamily
  misc_feature (156)..(227): Pfam Id: PF00083 Pfam Desc: Sugar (and other) transporter
  misc_feature (23)..(569): NCBI GI: 145612049 Blast Desc: MGG_08060 [Magnaporthe grisea 70-15] gi|145019297|gb|EDK03525.1| MGG_08060 [Magnaporthe grisea 70-15]
  misc_feature (11)..(574): NCBI GI: 85092504 Blast Desc: NCU06077 [Neurospora crassa OR74A] gi|28920843|gb|EAA30189.1| conserved [Neurospora crassa OR74A]
  misc_feature (6)..(574): NCBI GI: 46126303 Blast Desc: FG07529.1 [Gibberella zeae PH-1]
  misc_feature (73)..(574): NCBI GI: 242763248 Blast Desc: bicyclomycin resistance protein, [Talaromyces stipitatus ATCC 10500] gi|218723733|gb|EED23150.1| bicyclomycin resistance protein, [Talaromyces stipitatus ATCC 10500]
  misc_feature (76)..(574): NCBI GI: 256722065 Blast Desc: NECHADRAFT_51294 [Nectria haematococca mpVI 77-13-4]
  misc_feature (62)..(566): NCBI GI: 240108931 Blast Desc: Major Facilitator Superfamily protein [Coccidioides posadasii C735 delta SOWgp]
  misc_feature (63)..(566): NCBI GI: 119181306 Blast Desc: CIMG_05771 [Coccidioides immitis RS]
  misc_feature (20)..(574): NCBI GI: 256724815 Blast Desc: [Nectria haematococca mpVI 77-13-4]
  misc_feature (86)..(574): NCBI GI: 242827307 Blast Desc: MFS multidrug transporter, [Talaromyces stipitatus ATCC 10500] gi|218712062|gb|EED11490.1| MFS multidrug transporter, [Talaromyces stipitatus ATCC 10500]
  misc_feature (96)..(574): NCBI GI: 212545755 Blast Desc: conserved [Penicillium marneffei ATCC 18224] gi|210064551|gb|EEA18646.1| conserved [Penicillium marneffei ATCC 18224]
MSSTASVDSAATPDKHDENERVTKTTDRQQLERKVSQAASEGHDADIPSSQGFVLDKEGELKRIRSIEARKHSNATTADKVNGDLEKGQNKTLANDEDNDPNVVFWDGPDDPANPYNWSTSMKFVNCGLISAQTFFSPLASSIFAPGVPEVLAEFHSDSPEIATFVVSVYLLGFVFGPFFIAPLSEIYGRAPIYHICNIGFVAFSVACALAPNLNALIAFRFLAGVFGVAPITNGGGTIADMIPQHQRGSILAVYSCGPLLGPIVGPIAGGFLSSAVGWRWNFWLLAIAVGVITILMFVFIRESYAPVILQRKVERLRKETGNNMLRSKLDAGLSPSDFFKRSAIRPIKMFFMSPIISIMAIYTAITYGYLYLQFTTMTQVFEEQYGFPTSLVGLSFLGLGIGSFIGIGIYSATSDSYLKRKAAQADREAEETGGEKKGMKPEYRLPLLPIGALFVPAGLFIYGWTAQYKIHWIVPIIGEGIGGIGNILVFLAIQTYLVDAFTIYAASALASNTIIRSIAGALLPLAGLRLYDKLGLGWGNSLLAFIAVALLPVALFQFKYGEYLREKFPIKDL

SEQ ID NO: 32077 - DNA, 3903 bp, Muscodor strobelii
  misc_feature: SGI EST ID NO. CUFF.75940.1
  misc_feature: Variant of the nucleotide sequence at SEQ ID NO 32075
ctcatattggctaagtcccctgacaagaatgaaagcaacggatggtcggacttttgctctgtgatgtgcaaagaggagcccgtacaatatgatgccttgctgtttcgttgaccagtttaaaaattttcatagacatctaccagcattacaaagcccatcgtcgcatctctgaaatcccacacaacattcatctccttccccaggtcccccagctttatccttgattagggcattcctccgtttcgcttattcacaaatcttgcttgagtggacacttccgccgcgccggcgaagggatttaaacggacttaagcatcccagctactaattcattgctccagcaacttgggcatactgcaacgttgaatatattgtaggcgggaatcctactcacttcgggttatcccttctattagataaaactgggagcgggtgaatcaagacgattagcgctgcctgagaaggaggcatagggagaatatgtcgagcaccgcttctgtcgattcggcagccacacctgacaaacatgacgagaacgagagagtgacaaagactaccgatcgccagcagctcgaacgcaaagtcagccaggcagcttcagaaggtcatgacgccgatatcccttccagccagggatttgttctggataaggaaggtgaactcaagagaattcggtcgatagaagctcggaagcattctaatgcaacgacggcggataaggtaaatggggacctagagaagggtcagaataagacactggcgaatgacgaagacaacgaccctaacgtggtgttttgggacgggccagacgatccggcaaatccctataactggtctacgtctatgaaatttgtcaattgtggtctcatcagcgcgcaaaccttcttctcaccattggcctcgtcaatcttcgccccaggtgtacccgaggttctcgctgaatttcattctgattctccggagattgcgacttttgtcgtctcagtttatctcctcggattcgtctttggacctttcttcatagctccgctgtcggagatttacggccgcgctcccatataccatatatgcaacatcggatttgtcgcttttagtgtcgcgtgcgcactggctcctaatctgaatgctctcatcgccttccgctttttggccggtgtattcggcgttgcgccgatcacaaacggcggcggtactatagcagacatgatcccacagcaccaacgtggttccatccttgccgtgtatagctgcgggcctctcttaggtcctatagtcggacctatcgcgggcggattcctgtcaagtgctgttggatggcggtggaatttttggcttttggctatcgccgtgggtgtcatcacgatattgatgtttgttttcatacgtgagagctacgcaccggttattttgcaaaggaaggtggaaaggctgcgcaaggagacggggaacaatatgcttcgttcgaagcttgacgcgggcttgtcaccgagtgatttcttcaagcgcagcgctatccgccccattaagatgttcttcatgtcgcctatcatctctattatggccatatacacggctattacatacggctatctgtacttacagttcacgaccatgacacaggtatttgaggagcaatatggattcccaacgtcccttgttggactttcattccttggactgggaatcggaagtttcatcggcatcggcatttatagcgccacttctgacagctacttgaagcgcaaagcagcacaagccgacagagaagccgaggagacaggcggggaaaagaaaggcatgaagccagagtatcggctcccgttgcttcctataggcgcgctattcgtcccagctgggctcttcatctacggttggacagcccagtacaagattcattggatcgtgcccatcatcggtgagggcataggcggtataggcaatatccttgtgtttttggccattcaaacatatttagtagacgcattcacaatctatgctgcttcggcattggctagtaacacgatcatacgatctattgcaggagctctacttcccctagcgggtctcaggctttatgacaagttgggccttggctggggcaatagtctccttgcttttatagctgtcgcgctcttgccagtcgcgctcttccagttcaaatatggcgagtatttacgcgaaaagttcccgattaaggacttataaagcaatatttgctcttcgcgatgtacgtagaggttagtcgtgcgatgcgtaattcaaatcctcgaaatccactacttttcttgtccgaccaagactgagtggaaacccgtgaagagtctcgaatgcaaaggcatcacattcagatgccacgatggtgtctagcctgcagattatcgcctaggttctcacggccagaagatcaaatgactatctcttgagacacgcgtcggtaaaatttatattgaagtatttgtcatagatcattgcgcaagcgtatcgaagaacttttatatcttatcgcagcttctttccatttttccacgtcgggtattcccacagttctgagttcccgtaaaatatcttcctgagaggtgtatcgctcaccagtccgcgcaatcagcactagatacgatatcgggaccaagcctggtccgcctagccggagaataggcttcaccactacccattcttcggtcgagatagccgatggtatcaacacctcgcctgcctggcactctaattcgtcggatctctcactcttaaaatcccattgtaccaccattgcaaccattgacttcattccgctcaattggtacgatgtgtccgcatccgagcgccccgaaagtagcattgaaacacgattatcccggggtggtggactgatcggcgcgagtttacgctgccctttaagcccttgccaggtcttcatcacggccgtacggtagggccctgatcccaagagctctccatcaaatttgaaaatcatgctcagccgagacagagtatcagtctggaagctcgtgaaggataaaactgagtctcgatctcgcaaccagagcaaggaagagctgcggtctgctgcagtctctagcactcttacactttctgcgtcattaagcgcagccacttgttcgtcctctcgccccctgccacgccggtcagcaaagattcgacgaaaaatgatgcgcacatacaatgacacgacagagagcaagagctggattgcttgaacctggtcgcgtagagcctctctcatcggcgcgaggtctgattggttaagcgcaaatctcgcccgcgtccaacgactaagacctgtccgcgccggggcggtcgtcgtaacttgagcgacctggtctgaaaggtacagtatgacatcctacaggcattcaaggattgactgagtgcagtgaaaagcgattctcgcgacttgagcgaggcctcgcgagtctttagtatagtttcgagctcctctgttgacgcttccagtgcagataattgtgctgttatagacgagatggcaagttgcgccgtgttgaacttatcatatagtactccgaacgcttgttttacagctataacctgcccaatcaattgagttgtacctgccacaagccctataacagtgatagggtccatattgatgttattgcgatgagtttggtttacactgatggatcgtgttgagtttaacaccgcttcaataacggcaatctacagtatacgcctatgatccgaaatggaggcaacctactcacgtacatcggtaaacccaactgtgaatgcctcgactgcggctgagcgtctcatgcttactcagcgcttcacacacataagaggattgtaaccgaattacaagcctcacatgaatcatccaatcatcgcatcggatttagcacttaaaacagaagcataacgtaa

SEQ ID NO: 32078 - DNA, 903 bp, Muscodor strobelii
  misc_feature: SGI cDNA ID NO. 571049
  misc_feature: Encodes the peptide sequence at SEQ ID NO 32079
atgactgtgtctcccgagacggccccgatcggcggtccagagagtccgaacgtgccaatcaaagtgagcttgacgggtgtcaccgagacgcttcttatcccactgctcgggcgagtcttggacgcagaagcggagcagcccattcttggagacccatatgcgaaggaagtcatccagaaactggactacgacttcgcgaagcttcccgtgccaagttcgcacgcagccggtgttgccttgcgtacctccctgtatgatggttgggcaacatcattcctaagtagatatccttctgcaaccgtgctacacctcgcttgcgggcttgatagtcgaaatcagcgtatcaaatggacaagccccgatgtgagatggattgatgttgagctcccggaggtcgttgcaattcgtcgtcaggtgctccctacaacgctcccggagcaagattaccagttgatcgaggccgacatcaccgatgctgcctggcttgatgaaatcccgaccgacaaaccggttcttgtcatcatggagggactcatttcgtatctcaaagaagacgcggggaagagtctgatcgcccggcttgtcacgaaattgaaggaaggcgagctgcatttcgactgtatgaatgctactgtgctgaaagctagcaacaaaccaggacaggttgcggttagtcagaccggaaccacgtttcaatgggcagtcgacgatccgaagaccctggaggagattgatccgagtcttcaaatgctcgaagtcattcgttacctagacctggtaccgggagtcggccaattcggatggaagactcgagcctcactctatctcttatcttggtttcccagtcttcgtgatagtgttagatttgttcgcttcgggttctcggctcagcagtccgtctag

SEQ ID NO: 32079 - protein, 300 aa, Muscodor strobelii
  misc_feature: SGI Peptide ID NO. 571049
  misc_feature (20)..(114): Pfam Id: PF02409 Pfam Desc: O-methyltransferase N-terminus
  misc_feature (19)..(294): NCBI GI: 169628060 Blast Desc: polyketide synthase protein [Mycobacterium abscessus ATCC 19977] gi|169240027|emb|CAM61055.1| polyketide synthase protein [Mycobacterium abscessus]
  misc_feature (21)..(294): NCBI GI: 256782382 Blast Desc: polyketide synthase protein [Streptomyces hygroscopicus ATCC 53653]
  misc_feature (20)..(295): NCBI GI: 120404097 Blast Desc: O-methyltransferase domain-containing protein [Mycobacterium vanbaalenii PYR-1] gi|119956915|gb|ABM13920.1| O-methyltransferase domain protein [Mycobacterium vanbaalenii
  misc_feature (21)..(294): NCBI GI: 13472774 Blast Desc: mll3178 [Mesorhizobium loti MAFF303099] gi|14023521|dbj|BAB50127.1| mll3178 [Mesorhizobium loti MAFF303099]
  misc_feature (20)..(295): NCBI GI: 260649581 Blast Desc: conserved [Streptomyces scabiei 87.22]
  misc_feature (21)..(295): NCBI GI: 134103106 Blast Desc: O-methyltransferase-like protein [Saccharopolyspora erythraea NRRL 2338] gi|133915729|emb|CAM05842.1| O-methyltransferase-like protein [Saccharopolyspora erythraea
  misc_feature (20)..(296): NCBI GI: 256374565 Blast Desc: O-methyltransferase domain protein [Actinosynnema mirum DSM 43827] gi|255918868|gb|ACU34379.1| O-methyltransferase domain protein [Actinosynnema mirum DSM 43827]
  misc_feature (31)..(258): NCBI GI: 254822367 Blast Desc: O-methyltransferase domain-containing protein [Mycobacterium intracellulare ATCC 13950]
  misc_feature (19)..(263): NCBI GI: 121594461 Blast Desc: O-methyltransferase domain-containing protein [Acidovorax sp. JS42] gi|120606541|gb|ABM42281.1| O-methyltransferase domain protein [Acidovorax sp. JS42]
  misc_feature (15)..(294): NCBI GI: 169629255 Blast Desc: O-methyltransferase [Mycobacterium abscessus ATCC 19977] gi|169241222|emb|CAM62250.1| O-methyltransferase [Mycobacterium abscessus]
  misc_feature: Useful for fungicidal and/or biocontrol applications
MTVSPETAPIGGPESPNVPIKVSLTGVTETLLIPLLGRVLDAEAEQPILGDPYAKEVIQKLDYDFAKLPVPSSHAAGVALRTSLYDGWATSFLSRYPSATVLHLACGLDSRNQRIKWTSPDVRWIDVELPEVVAIRRQVLPTTLPEQDYQLIEADITDAAWLDEIPTDKPVLVIMEGLISYLKEDAGKSLIARLVTKLKEGELHFDCMNATVLKASNKPGQVAVSQTGTTFQWAVDDPKTLEEIDPSLQMLEVIRYLDLVPGVGQFGWKTRASLYLLSWFPSLRDSVRFVRFGFSAQQSV

SEQ ID NO: 32080 - DNA, 1784 bp, Muscodor strobelii
  misc_feature: SGI EST ID NO. CUFF.75882.0
  misc_feature: Variant of the nucleotide sequence at SEQ ID NO 32078
actggatgtctgtcttgatatttctgaccgaatacgtagaaagggtggcgtgatgggtgctcaacgagccaacaataccaaggataggtatgtccgggtatgctacaatgtcagagtcagagtctactggggtttctctgcagactaatacaaatgcttgcactgtcgtaggtacatgtttgtagctcaaacatagggaggtaagtttagggtaggaaaatggtaaatcgcctaaagcacatcattcttatctggagaaacagcgatgtttttgagtatcggaagcatgagcgagcgcgcgcgagataccccagatcacctgacgtaatgcttgcgcactgtacgtgcaacatttgagattcagcaggtcatcacaactgcagacggcgaatcctaatcacatcatatcctctctgttgtcgccgtaacaatagatcataatagcccattatctagcgagccggtattttccaggcatgactgtgtctcccgagacggccccgatcggcggtccagagagtccgaacgtgccaatcaaagtgagcttgacgggtgtcaccgagacgcttcttatcccactgctcgggcgagtcttggacgcagaagcggagcagcccattcttggagacccatatgcgaaggaagtcatccagaaactggactacgacttcgcgaagcttcccgtgccaagttcgcacgcagccggtgttgccttgcgtacctccctgtatgatggttgggcaacatcattcctaagtagatatccttctgcaaccgtgctacacctcgcttgcgggcttgatagtcgaaatcagcgtatcaaatggacaagccccgatgtgagatggattgatgttgagctcccggaggtcgttgcaattcgtcgtcaggtgctccctacaacgctcccggagcaagattaccagttgatcgaggccgacatcaccgatgctgcctggcttgatgaaatcccgaccgacaaaccggttcttgtcatcatggagggactcatttcgtatctcaaagaagacgcggggaagagtctgatcgcccggcttgtcacgaaattgaaggaaggcgagctgcatttcgactgtatgaatgctactgtgctgaaagctagcaacaaaccaggacaggttgcggttagtcagaccggaaccacgtttcaatgggcagtcgacgatccgaagaccctggaggagattgatccgagtcttcaaatgctcgaagtcattcgttacctagacctggtaccgggagtcggccaattcggatggaagactcgagcctcactctatctcttatcttggtttcccagtcttcgtgatagtgttagatttgttcgcttcgggttctcggctcagcagtccgtctagtcatcacggtagcttcgtgtgcggcgctgtcttaggcaatactggtataaccaccgtgacctggcgtcgctatcgtatgcaagctcgtcgaatctcccagaacgtattgagtaagagctctgtcacatcgaatcataggttcatgttatgcactgcatgcgttcttgctcggagaggcacgatgggctgactgagagctggtcgcgcacatacctaaccagggatgcgaatatcagataattaatgctgcgggaagagagtacaagatctcaggcattgaatccagaattgaactatcaatttcaccgaatattgctcaaatgaattcaataaataccgatctatagccatatagatcttctaagatgtttaaagactgaggtagctcctgacatctacccagcg

SEQ ID NO: 32081 - DNA, 1533 bp, Muscodor strobelii
  misc_feature: SGI cDNA ID NO. 571050
  misc_feature: Encodes the peptide sequence at SEQ ID NO 32082
atgtctgcgtcagtctcgtctagattcaccaccaaaaaggctttcgaagcttggggtgctgagatcgtcgttcgtctccctcccatccctcctgacgaaaatgaagacactcgcgtcgctccgaatctctgcaccataccgatcgagatccttctctatattttccgcgacctggataagcaacaacctaggtctagactcatccgcacctgcagaacgctgtcaattgctttgacaggagagctgtacaagtacgacgcccaagaaggggaccaccacgccttaggatggtcatgtctccacggccgtgttaagctgttgcgggatctactacagcgagataagtcggtcgtcgatcgtattttccatcatgacttccaccataaagtgcgactcgcaggagcaggggccactccactctccctcgcgattctaggctcacactacgcttgcgtcgatctgttgctcaagagcggagcggatgcaaatcgagaaactggccatggtccatatatccccagttacccgatcaatattgccgtttctcttcgcaagcctgcctctgtaggtatcatcagcctactgggcagccatggcgccttaatgaaccggcatgtagcgccctatgcaccaatattccaagtcctgactcttgagagacctcgccgatcccgaacgggtatccacagttgtgcagagtataatgaggacctaaaagcattctggactcacaaaaacaatcaactcaaagcactgatcgggtccggggcagatccgaacgccaaacatccaatgactggtcttagtcccgtattctatctcctgaaccagtttgatggatggaatccgtactactacttctacgaaaggtacccctttataagcgcccaggaagaggcagagcaagtggctatcgctaatgagcttgtcatgtcactcttagacacgctcaaggcagccggcgttgacatggttacccagacatgcgatcccgaccttgtccccccagtggatagctattcttttgagacatggcacacgcctattcactacgcatgcgtccttgctgggctgcgcaaagaaattgcaggatggttcttgaagtgtaccagagacgtcgacttatgttcgcagaccggccgcactctcctgatgcagttttgttttgctggtcttcgaagtgatgatcaacttgacggattactgaagcgcaaacctcatctcaacgctcaagacaatgaaggctgcacggcgcttcatctactatgcaatgcggctctagatccggatataaagggtaggaccgcacgtattcgcttagaagcggtcaaaaagctggtgagccgtggggccgaccctggcatcaagaacatcaaagggaagatggcgcaccaaaccataccaaaagcgtatcgattacgagatgaggacgtgattaagtatctgcagtcggaagtcaacaagcgcaaaaacaagttccagaaagacaagaacgatccgagcaagagaaagcagatgatgaagaaggcatag

SEQ ID NO: 32082 - protein, 510 aa, Muscodor strobelii
  misc_feature: SGI Peptide ID NO. 571050
  misc_feature (135)..(167): Pfam Id: PF00023 Pfam Desc: Ankyrin repeat
  misc_feature (414)..(458): Pfam Id: PF00023 Pfam Desc: Ankyrin repeat
  misc_feature (45)..(213): NCBI GI: 225558586 Blast Desc: conserved [Ajellomyces capsulatus G186AR]
  misc_feature (46)..(237): NCBI GI: 240275025 Blast Desc: conserved [Ajellomyces capsulatus H143]
  misc_feature (136)..(457): NCBI GI: 228000124 Blast Desc: ankyrin repeat-containing protein [Brachyspira murdochii DSM 12563] gi|227974102|gb|EEK08752.1| ankyrin repeat-containing protein [Brachyspira murdochii DSM 12563]
  misc_feature (42)..(281): NCBI GI: 226286383 Blast Desc: conserved [Paracoccidioides brasiliensis Pb01]
  misc_feature (249)..(491): NCBI GI: 189502738 Blast Desc: Aasi_1435 [Candidatus Amoebophilus asiaticus 5a2] gi|189498179|gb|ACE06726.1| Aasi_1435 [Candidatus Amoebophilus asiaticus 5a2]
  misc_feature (136)..(482): NCBI GI: 189502738 Blast Desc: Aasi_1435 [Candidatus Amoebophilus asiaticus 5a2] gi|189498179|gb|ACE06726.1| Aasi_1435 [Candidatus Amoebophilus asiaticus 5a2]
  misc_feature (135)..(481): NCBI GI: 156541548 Blast Desc: : similar to ankyrin repeat protein, [Nasonia vitripennis]
  misc_feature (43)..(161): NCBI GI: 115390947 Blast Desc: [Aspergillus terreus NIH2624] gi|114193902|gb|EAU35602.1| [Aspergillus terreus NIH2624]
MSASVSSRFTTKKAFEAWGAEIVVRLPPIPPDENEDTRVAPNLCTIPIEILLYIFRDLDKQQPRSRLIRTCRTLSIALTGELYKYDAQEGDHHALGWSCLHGRVKLLRDLLQRDKSVVDRIFHHDFHHKVRLAGAGATPLSLAILGSHYACVDLLLKSGADANRETGHGPYIPSYPINIAVSLRKPASVGIISLLGSHGALMNRHVAPYAPIFQVLTLERPRRSRTGIHSCAEYNEDLKAFWTHKNNQLKALIGSGADPNAKHPMTGLSPVFYLLNQFDGWNPYYYFYERYPFISAQEEAEQVAIANELVMSLLDTLKAAGVDMVTQTCDPDLVPPVDSYSFETWHTPIHYACVLAGLRKEIAGWFLKCTRDVDLCSQTGRTLLMQFCFAGLRSDDQLDGLLKRKPHLNAQDNEGCTALHLLCNAALDPDIKGRTARIRLEAVKKLVSRGADPGIKNIKGKMAHQTIPKAYRLRDEDVIKYLQSEVNKRKNKFQKDKNDPSKRKQMMKKA

SEQ ID NO: 32083 - DNA, 1185 bp, Muscodor strobelii
  misc_feature: SGI EST ID NO. CUFF.75891.0
  misc_feature: Variant of the nucleotide sequence at SEQ ID NO 32081
cgggtatccacagttgtgcagagtataatgaggacctaaaagcattctggactcacaaaaacaatcaactcaaagcactgatcgggtccggggcagatccgaacgccaaacatccaatgactggtcttagtcccgtattctatctcctgaaccagtttgatggatggaatccgtactactacttctacgaaaggtacccctttataagcgcccaggaagaggcagagcaagtggctatcgctaatgagcttgtcatgtcactcttagacacgctcaaggcagccggcgttgacatggttacccagacatgcgatcccgaccttgtccccccagtggatagctattcttttgagacatggcacacgcctattcactacgcatgcgtccttgctgggctgcgcaaagaaattgcaggatggttcttgaagtgtaccagagacgtcgacttatgttcgcagaccggccgcactctcctgatgcagttttgttttgctggtcttcgaagtgatgatcaacttgacggattactgaagcgcaaacctcatctcaacgctcaagacaatgaaggctgcacggcgcttcatctactatgcaatgcggctctagatccggatataaagggtaggaccgcacgtattcgcttagaagcggtcaaaaagctggtgagccgtggggccgaccctggcatcaagaacatcaaagggaagatggcgcaccaaaccataccaaaagcgtatcgattacgagatgaggacgtgattaagtatctgcagtcggaagtcaacaagcgcaaaaacaagttccagaaagacaagaacgatccgagcaagagaaagcagatgatgaagaaggcatagtcatctccgcgtgcttcttatcggtatagatacttctcggttactctttgtgcgcaagaaagaatcagaggtgatggagagcagataaaggggaaaggcaatactttgccaggggcaaggagcccttaagtctaccatgcaatggataatgcaagtcctaatgaatgaagcttcaattgacagtggcggtaccttgcttggtataatccaaagatcacttgactaaggaatggagggctctctcagaacagcagataggttctatgatgaacataagactcctggaaaatgcgatcctctttgcgttaccttagaaaatggagaaatg

SEQ ID NO: 32084 - DNA, 1290 bp, Muscodor strobelii
  misc_feature: SGI cDNA ID NO. 571051
  misc_feature: Encodes the peptide sequence at SEQ ID NO 32085
atggtgaagctcgcgatcacgttgcagcttgcagctgttgcaacagcttcccttcttgccaggaccgacgacgaccctgagcgttacacgatttgtggtggtgatagaggttatgtcgagaaggactcacttgaagccgccgcaaggctctcggatgtcattgtcacttcagatcagttcctcatcgagcgggacgattgtatctttgcccacgtcaacacgactgtcgtcagtctctgcaatggtaatgctcgtgatcgccatgtcaaccgggccgaagtgaggcgcggaatcaaccagctcattgacgactgtggtcttgatggcggctttactggtgttcacgtcgtgaacaacttgacctttgcggcttatggggttttcggcggcatcaacatcaagccaccatccggctccccagaccctgatctgccaggcggaaacaagaagcgatcgcttcacgaggacctagctcaccaactgcacaaacgcgactgtacaatcggctacgacggcacagagcatactgactgtgattttaagtacacactaaatgatgacggcacctgcggtgagcagaatatcgaaaatgattgccaacaatggtgtgagctgaaacgcatgggtctgcttggccacgaatccgctgcccctggcaagggaggtgaggcacagcctgccaatatcgaactgcagctcgaagatgggctcgaaatttccatcagcaacgggttttctattggtgttgaaggtgtattcaaagaggtcgttggcgcgggactcagttactcttggtcagtcacgacaaccaaatcctatacggtcgtgaagagtagcagcgactacgagggtctcactgacaaggagggtgtctttgctcgatgggtatacttcccgaaactaatcaagagctgcggtactgtcaccaaaacgaatatcgatcaagacatcccgggttgcggaacatccgtatgtcctcctccggtcgaaagctgtggagatgaagttgagactacagaggatgtctgcatactctctccaaagctgaatgatgatggtgatgccgagctatactatgccgtccgctgggaagacaatgaaggcaatccactacctatggacgaacagtctgggagctataagactctgtgcaacaatagtgaggatcctgacggtgatggtgaggacgagtgcctgactcctattgatgcacgcgctatcggcatcaactacaaaaagctcgcggcaaggaaggaagcttatgctgctgctgcccgcgccaatgcttaa

SEQ ID NO: 32085 - protein, 429 aa, Muscodor strobelii
  misc_feature: SGI Peptide ID NO. 571051
MVKLAITLQLAAVATASLLARTDDDPERYTICGGDRGYVEKDSLEAAARLSDVIVTSDQFLIERDDCIFAHVNTTVVSLCNGNARDRHVNRAEVRRGINQLIDDCGLDGGFTGVHVVNNLTFAAYGVFGGINIKPPSGSPDPDLPGGNKKRSLHEDLAHQLHKRDCTIGYDGTEHTDCDFKYTLNDDGTCGEQNIENDCQQWCELKRMGLLGHESAAPGKGGEAQPANIELQLEDGLEISISNGFSIGVEGVFKEVVGAGLSYSWSVTTTKSYTVVKSSSDYEGLTDKEGVFARWVYFPKLIKSCGTVTKTNIDQDIPGCGTSVCPPPVESCGDEVETTEDVCILSPKLNDDGDAELYYAVRWEDNEGNPLPMDEQSGSYKTLCNNSEDPDGDGEDECLTPIDARAIGINYKKLAARKEAYAAAARANA

SEQ ID NO: 32086 - DNA, 1092 bp, Muscodor strobelii
  misc_feature: SGI cDNA ID NO. 571052
  misc_feature: Elevated expression when VOC is produced
  misc_feature: Encodes the peptide sequence at SEQ ID NO 32087
atggacagttcgtcgtgggatatcacacccgagaaagaggcgagtctgttgaacttcttatatagacagttctgcgtccggcctacttccattccgtgcgaacatagggacctcagaggccagacggcgcttgtgacgggtgcgaactcggggattgggttggagacttgtcggcacctgttacgtctgggtgtgagtatgcttgtgcttggggttagggatgtggggaagggtgttgaggctagggattgtcttctggaggagatacgaaggggggagggacaggaggtgggggagggaggagagggaggagagggaggaaagggggtggtgattgtggtttggatgttggatatggggtgttttgactcgataggggcgtttgcggagagagttaaggagttggtgagggtggatgttgtggtgctgaatgcgggttgttcggggcctgtgtggagggtcggaaaagagggacatgaggagacgcttatggttaattattttgggacggggttgcttgttgttttgttgttgggtgtttttagagaaaagactgggaatggggaggaagatgaacctgtgaggattgttgtcgttagttcggatacggcggcttgggcagatattgaaggtgatggtggggatggtgttattgagaggttggagaggaaggagaactatgatcgtcacacgcaatactcgacgtcgaagctcctcttgcagctctttatctacgagcttgcaaagcgtattccgccatcagtggcgatactgactactgctaatccgggactatgctatggcacgggactggatgccaacgggccgcttgttctttcgtggatcgtccaggcgttaaccagacttgtcgggagatcacctgtcgagggcgcggctgtggtgacgaatgctgcgacgagttttggggttgaagctcatggtggatatgtgggagattgtgctttaaaaccgatggcaccgcttgtgtatcaggaacgggggagattgatcactcggacgctgtggcgagagactatggctgctcttagttttgcgagggtggaggatataatcagagaaatgagtctttag

SEQ ID NO: 32087 - protein, 363 aa, Muscodor strobelii
  misc_feature: SGI Peptide ID NO. 571052
  misc_feature (41)..(214): Pfam Id: PF00106 Pfam Desc: short chain dehydrogenase
  misc_feature (41)..(97): Pfam Id: PF00106 Pfam Desc: short chain dehydrogenase
  misc_feature (9)..(361): NCBI GI: 238844730 Blast Desc: retinol dehydrogenase 12 [Microsporum canis CBS 113480]
  misc_feature (1)..(359): NCBI GI: 242773397 Blast Desc: short-chain dehydrogenase, [Talaromyces stipitatus ATCC 10500] gi|218721851|gb|EED21269.1| short-chain dehydrogenase, [Talaromyces stipitatus ATCC 10500]
  misc_feature (1)..(362): NCBI GI: 46138187 Blast Desc: FG10608.1 [Gibberella zeae PH-1]
  misc_feature (13)..(357): NCBI GI: 46103007 Blast Desc: FG00073.1 [Gibberella zeae PH-1]
  misc_feature (13)..(352): NCBI GI: 70986064 Blast Desc: short-chain dehydrogenase/reductase family protein [Aspergillus fumigatus Af293] gi|66846161|gb|EAL86494.1| short-chain dehydrogenase/reductase family protein, [Aspergillus
  misc_feature (13)..(352): NCBI GI: 238492577 Blast Desc: short-chain dehydrogenase/reductase family protein, [Aspergillus flavus NRRL3357] gi|220696019|gb|EED52361.1| short-chain dehydrogenase/reductase family protein, [Aspergillus
  misc_feature (13)..(352): NCBI GI: 159128334 Blast Desc: short-chain dehydrogenase/reductase family protein, [Aspergillus fumigatus A1163]
  misc_feature (2)..(358): NCBI GI: 256725584 Blast Desc: NECHADRAFT_94266 [Nectria haematococca mpVI 77-13-4]
  misc_feature (13)..(359): NCBI GI: 46116774 Blast Desc: FG04229.1 [Gibberella zeae PH-1]
  misc_feature (13)..(355): NCBI GI: 256720903 Blast Desc: NECHADRAFT_50515 [Nectria haematococca mpVI 77-13-4]
  misc_feature: Useful for introducing or modulating the production of volatile compounds
MDSSSWDITPEKEASLLNFLYRQFCVRPTSIPCEHRDLRGQTALVTGANSGIGLETCRHLLRLGVSMLVLGVRDVGKGVEARDCLLEEIRRGEGQEVGEGGEGGEGGKGVVIVVWMLDMGCFDSIGAFAERVKELVRVDVVVLNAGCSGPVWRVGKEGHEETLMVNYFGTGLLVVLLLGVFREKTGNGEEDEPVRIVVVSSDTAAWADIEGDGGDGVIERLERKENYDRHTQYSTSKLLLQLFIYELAKRIPPSVAILTTANPGLCYGTGLDANGPLVLSWIVQALTRLVGRSPVEGAAVVTNAATSFGVEAHGGYVGDCALKPMAPLVYQERGRLITRTLWRETMAALSFARVEDIIREMSL

SEQ ID NO: 32088 - DNA, 1248 bp, Muscodor strobelii
  misc_feature: SGI EST ID NO. CUFF.76333.0
  misc_feature: Variant of the nucleotide sequence at SEQ ID NO 32086
ttcaaacactcgccgtacagttttacaccatacttcaatcatggacagttcgtcgtgggatatcacacccgagaaagaggcgagtctgttgaacttcttatatagacagttctgcgtccggcctacttccattccgtgcgaacatagggacctcagaggccagacggcgcttgtgacgggtgcgaactcggggattgggttggagacttgtcggcacctgttacgtctgggtgtgagtatgcttgtgcttggggttagggatgtggggaagggtgttgaggctagggattgtcttctggaggagatacgaaggggggagggacaggaggtgggggagggaggagagggaggagagggaggaaagggggtggtgattgtggtttggatgttggatatggggtgttttgactcgataggggcgtttgcggagagagttaaggagttggtgagggtggatgttgtggtgctgaatgcgggttgttcggggcctgtgtggagggtcggaaaagagggacatgaggagacgcttatggttaattattttgggacggggttgcttgttgttttgttgttgggtgtttttagagaaaagactgggaatggggaggaagatgaacctgtgaggattgttgtcgttagttcggatacggcggcttgggcagatattgaaggtgatggtggggatggtgttattgagaggttggagaggaaggagaactatgatcgtcacacgcaatactcgacgtcgaagctcctcttgcagctctttatctacgagcttgcaaagcgtattccgccatcagtggcgatactgactactgctaatccgggactatgctatggcacgggactggatgccaacgggccgcttgttctttcgtggatcgtccaggcgttaaccagacttgtcgggagatcacctgtcgagggcgcggctgtggtgacgaatgctgcgacgagttttggggttgaagctcatggtggatatgtgggagattgtgctttaaaaccgatggcaccgcttgtgtatcaggaacgggggagattgatcactcggacgctgtggcgagagactatggctgctcttagttttgcgagggtggaggatataatcagagaaatgagtctttagaatgttgagagaatgatagaaccacagactgtcgatcgtattggcatagttgccttattcgcttttctctaaatgacgggtcgcatctacctatatggtcaacgaacgaatcacgc

SEQ ID NO: 32089 - DNA, 1620 bp, Muscodor strobelii
  misc_feature: SGI cDNA ID NO. 571053
  misc_feature: Encodes the peptide sequence at SEQ ID NO 32090
atggccgctcccattccctttggacataaacgcaccatgtcgatcgccgccaacgccctcgaccacctcagcgtcggcaacaagatcgagtggctcgccgccctcgacacggcctactcgcctgagcacaactaccgccgctcctccatcatctgcaccatcggccccaagactaactcggtcgaggccatcaacaagctgcgcaacgccggtctcaatgtcgtccgcatgaacttctcccacggctcatatgagtaccaccagtccgtcatcgacaatgcccgcgctgccgagaagactcagcccggccgccccgtcgccattgccctcgacaccaagggccctgagatcagaaccggtaacaccaagggcgacgaggacctgcctctctccgctggcaccatcctgaacatcaccaccgatgaccaatatgccacctcatgcgacacccagaacatgtacgtcgactacaagaacatcaccaaggtcatcaggcccggccgcatcatctacgtcgacgacggtattctcgccttcgaagtcgtcgagatcgtcaacgagcagaccatcaaggtcaaggccctgaacaacggcttcatcagctcccgcaagggtgtcaacctgcccaacaccgacgtcgatctccccgctctttccgagaaggacaagaacgacttgagattcggtgtcaagaacaatgttgacatggtcttcgcttccttcatccgacgcggccaggatatccgagacatccgtgaggttctcggcgaggacggcaagcacatccagatcattgccaagatcgagaaccgacagggtctcaacaacttccgcgagatcctgcgcgagaccgacggtgtcatggtcgcccgtggtgacttgggcattgagatccctgccgctgaggttttcgccgcccagaagaagcttattgccatgtgcaacattgccggcaagcctgtcatctgcgctacccaaatgcatgatcaagaacccccgcccacccgcgctgaggtctccgacgttggaaacgccatcacggacggagctgactgtgtcatgttgtctggcgagactgccaagggttcatatcccgatcttgccgtccacgagatgcacgaggcctgcctgaaggccgagaactctatcccctacgtcagccacttcgaggatctgtgctctatcgtgaagcgtcccgtctctgtcaccgagtcctgcgccatggccgccgtccgtgcttccctcgacttgaacgccggaggtatcatagttttgtcgacctctggcgaatctgcccgcctcctcagcaagtaccgcccagtctgccccatcttcatggtgacccgcaatgcctccgccagtagatacagccatctgtatcgtggtgtctatcctttccacttcgccgagtccaagcccgacttcgacaaggtcaactggcaggaggatgtcgatcgccgcatcagctggggtgtcagccaaggtctcaagctcggcgtcctgtctctgggcgactccgttgtcgtcgtccagggctggagaggcggtatgggtaacaccaacaccatccgcattgtcaaggccaaccctgagcatctcggtattggtcagttggagtag

SEQ ID NO: 32090 - protein, 539 aa, Muscodor strobelii
  misc_feature: SGI Peptide ID NO. 571053
  misc_feature (45)..(389): Pfam Id: PF00224 Pfam Desc: Pyruvate kinase, barrel domain
  misc_feature (403)..(527): Pfam Id: PF02887 Pfam Desc: Pyruvate kinase, alpha/beta domain
  misc_feature (19)..(539): NCBI GI: 171679992 Blast Desc: protein product [Podospora anserina] gi|170939622|emb|CAP64849.1| protein product [Podospora anserina]
  misc_feature (11)..(539): NCBI GI: 400142 Blast Desc: KPYK_TRIRE RecName: Full=Pyruvate kinase; Short=PK gi|170553|gb|AAA02922.1| pyruvate kinase [Hypocrea jecorina]
  misc_feature (15)..(537): NCBI GI: 85094167 Blast Desc: pyruvate kinase [Neurospora crassa OR74A] gi|164425652|ref|XP_001728254.1| pyruvate kinase, variant [Neurospora crassa OR74A] gi|54036128|sp|Q7RVA8.1|KPYK_NEUCR
  misc_feature (17)..(537): NCBI GI: 39945886 Blast Desc: pyruvate kinase [Magnaporthe grisea 70-15] gi|145019300|gb|EDK03528.1| pyruvate kinase [Magnaporthe grisea 70-15]
  misc_feature (15)..(538): NCBI GI: 256724688 Blast Desc: [Nectria haematococca mpVI 77-13-4]
  misc_feature (15)..(539): NCBI GI: 46126301 Blast Desc: KPYK_TRIRE Pyruvate kinase [Gibberella zeae PH-1]
  misc_feature (17)..(538): NCBI GI: 156057673 Blast Desc: pyruvate kinase [Sclerotinia sclerotiorum 1980] gi|154702353|gb|EDO02092.1| pyruvate kinase [Sclerotinia sclerotiorum 1980]
  misc_feature (15)..(538): NCBI GI: 261355440 Blast Desc: pyruvate kinase [Verticillium albo-atrum VaMs.102]
  misc_feature (17)..(538): NCBI GI: 154314423 Blast Desc: BC1G_05305 [Botryotinia fuckeliana B05.10] gi|150848950|gb|EDN24143.1| BC1G_05305 [Botryotinia fuckeliana B05.10]
  misc_feature (17)..(537): NCBI GI: 189202850 Blast Desc: pyruvate kinase [Pyrenophora tritici-repentis Pt-1C-BFP] gi|187984860|gb|EDU50348.1| pyruvate kinase [Pyrenophora tritici-repentis Pt-1C-BFP]
  misc_feature (11)..(539): SWISSPROT Homolog: EC 2.7.1.40 Pyruvate kinase
MAAPIPFGHKRTMSIAANALDHLSVGNKIEWLAALDTAYSPEHNYRRSSIICTIGPKTNSVEAINKLRNAGLNVVRMNFSHGSYEYHQSVIDNARAAEKTQPGRPVAIALDTKGPEIRTGNTKGDEDLPLSAGTILNITTDDQYATSCDTQNMYVDYKNITKVIRPGRIIYVDDGILAFEVVEIVNEQTIKVKALNNGFISSRKGVNLPNTDVDLPALSEKDKNDLRFGVKNNVDMVFASFIRRGQDIRDIREVLGEDGKHIQIIAKIENRQGLNNFREILRETDGVMVARGDLGIEIPAAEVFAAQKKLIAMCNIAGKPVICATQMHDQEPPPTRAEVSDVGNAITDGADCVMLSGETAKGSYPDLAVHEMHEACLKAENSIPYVSHFEDLCSIVKRPVSVTESCAMAAVRASLDLNAGGIIVLSTSGESARLLSKYRPVCPIFMVTRNASASRYSHLYRGVYPFHFAESKPDFDKVNWQEDVDRRISWGVSQGLKLGVLSLGDSVVVVQGWRGGMGNTNTIRIVKANPEHLGIGQLE

SEQ ID NO: 32091 - DNA, 4289 bp, Muscodor strobelii
  misc_feature: SGI EST ID NO. CUFF.76695.1
  misc_feature: Variant of the nucleotide sequence at SEQ ID NO 32089
atgagattttcgaaataattagttggattgtcattgaagccctgcctaacgcctttctgcaaaactacctgatcaacagaaattggaggtgcagtctcactaagtggagaactgcactacatgcatatgaacataccaacgtgggcaaaagacattgagttgagttgagaccactttgcggctctgctgtacaatatgccaaaattttgctccggaatcatccgagacatatggtcacggaggatgcgagaggcacagaatcaaagcgcccagggttgccgtctaatgaagctgtgagagactaagcggaggaagcagagcatcaaaagatgcagcgaacaagtggtatggtggtgtaatcgtcggcaattccgcgtcatcggtcatgatttcatgatcgtcccgtcatctgtcgtcgtcggggccctcctcgagatcttccattcgttgtgaggggttattgttctggagagcgcgaacagactatctgtagcgctcgaagtaaccgctggtaccggcgaaggcgacggactgatccatcacccactcgccaacgcccagatacttgttcacccacttgttcatctcgccattttcgcctgtcaacttctcgctcttgaaactgcattgcggatgaagtggtcagcagttatggtctgtagcatcgggaagcccattttcggtatcggtccgtcctctagtatttcgaacttgatcctatcgatgggggtcgaagatcggggcgactcacgtcaggccagtggagcgtctcattccagcgagtatggtcgagactgagcaagagaaatgttagtcgcgcgatacgtgtgcgaagacgcgagataagggctgggggtgcaacgtacggagaacggcatctatggcataatgacccaggcgtccaagctttccccagaggccaaatgtcagcaagttgaggaactgagacgagaggttatgttcagaattcagcgtattcgaaagacgcaagctgagtcaagaaaaacaccgcggcacttgaacgggagcatagggatgggtattgcgattcgggtgtccgagggatcgagggtgtgcacttacaaccatcttgatgcaagttttgaatgatcggtttcgaagattcagtcagtttttcaggatgttcaactgatgactcgtgtggttatcgaatcgatttgacccagaacgtggtcggaatggtggctgagaacaggtggtgatggagaagagtgagtcgacagcgaggttgtttcaacagcaaccatccggtgacgaagccgcctgaagataacagctgattccgctgtggcctgcaggtgtccttccctcaatccactagctgcttccagtttaggctgctgccaggcaagctctgccgcacgagccacatggcgccagatctaaagtgcctcccgagtacctcaggctgcgcaacgcagatgggacaccttccgtctccagcccccacattcacttgtcgagacttcttggatttatcaaggtaggcaaggtaggctgggcgggtctcgggattcggcgccacaacctctcagcgcccaagcacgtctgggccggagcttatcgcccacttgccttatcggtctccggcgcatctcaaccaagcctcgccaagtaccgacgcggccaaaatgggcgggacgctacatgagccgagcatgaggatctagcgtggcagcagcaaacccaatggcgggggtcgcccgccagcacgccgtttcctcactggctgagagaaaacgttgaggggtcttcgagcaaagaggggtccctgaattgttgccctccaggttttttggaggggcaatagtcataacagacaggcgtgggattctgggctggaggggcatcaccgatgcggaaacgcaagatgagagggagtcgagcaggaacgattgtatttgcaatcggtatttccaattactcgggcacttctcccctctctagcggcatctaccaccatcgcatcccacgccgtgcattttctgacagcaggagcccaggaagcttggccatcagcttggacgcgttggacgaataagcagaggcaagcttgcttttgtgaaacccctgtcgacaattcccgcatcctatcctgaccagcattatttactctacggcacctatctatatccgtacatacggtatccatacatatcctactattcttattactcctcgagccccgcggcgagtctcgttgttaattcttcctcccctccaattctcgtgaccatctacgcccacgacccctatcaaagacagggaaatcatattgccaagatataaacaagatcccctccgtttttcccgcgtctctccagacgcagtctcttcatcatggccgctcccattccctttggacataaacgcaccatgtcgatcgccgccaacgccctcgaccacctcagcgtcggcaacaagatcgagtggctcgccgccctcgacacggcctactcgcctgagcacaactaccgccgctcctccatcatctgcaccatcggccccaagactaactcggtcgaggccatcaacaagctgcgcaacgccggtctcaatgtcgtccgcatgaacttctcccacggctcatatgagtaccaccagtccgtcatcgacaatgcccgcgctgccgagaagactcagcccggccgccccgtcgccattgccctcgacaccaagggccctgagatcagaaccggtaacaccaagggcgacgaggacctgcctctctccgctggcaccatcctgaacatcaccaccgatgaccaatatgccacctcatgcgacacccagaacatgtacgtcgactacaagaacatcaccaaggtcatcaggcccggccgcatcatctacgtcgacgacggtattctcgccttcgaagtcgtcgagatcgtcaacgagcagaccatcaaggtcaaggccctgaacaacggcttcatcagctcccgcaagggtgtcaacctgcccaacaccgacgtcgatctccccgctctttccgagaaggacaagaacgacttgagattcggtgtcaagaacaatgttgacatggtcttcgcttccttcatccgacgcggccaggatatccgagacatccgtgaggttctcggcgaggacggcaagcacatccagatcattgccaagatcgagaaccgacagggtctcaacaacttccgcgagatcctgcgcgagaccgacggtgtcatggtcgcccgtggtgacttgggcattgagatccctgccgctgaggttttcgccgcccagaagaagcttattgccatgtgcaacattgccggcaagcctgtcatctgcgctacccaaatgcttgagagcatgatcaagaacccccgcccacccgcgctgaggtctccgacgttggaaacgccatcacggacggagctgactgtgtcatgttgtctggcgagactgccaagggttcatatcccgatcttgccgtccacgagatgcacgaggcctgcctgaaggccgagaactctatcccctacgtcagccacttcgaggatctgtgctctatcgtgaagcgtcccgtctctgtcaccgagtcctgcgccatggccgccgtccgtgcttccctcgacttgaacgccggaggtatcatagttttgtcgacctctggcgaatctgcccgcctcctcagcaagtaccgcccagtctgccccatcttcatggtgacccgcaatgcctccgccagtagatacagccatctgtatcgtggtgtctatcctttccacttcgccgagtccaagcccgacttcgacaaggtcaactggcaggaggatgtcgatcgccgcatcagctggggtgtcagccaaggtctcaagctcggcgtcctgtctctgggcgactccgttgtcgtcgtccagggctggagaggcggtatgggtaacaccaacaccatccgcattgtcaaggccaaccctgagcatctcggtattggtcagttggagtagagtgagatcatttcggaaagcagtcaaaacaccgacatagatcgtttggttcctccacaagaatgcaggtttattcgctgcgcgggagttggggtggtgtgatgaataatgaaggaaagaaagaaagaacgaacgaccatgctcggttaactgggagaggaataaaataccggtttattttggggcgaaacgagagacatgatagctactagactcatgaacgttgattaatacctggcttatagagagaatattaggagtatcctattaattatccctgtcttattggttgcatgcaac

SEQ ID NO: 32092 - DNA, 264 bp, Muscodor strobelii
  misc_feature: SGI cDNA ID NO. 571054
  misc_feature: Encodes the peptide sequence at SEQ ID NO 32093
atggttttcctcaacttgctgacatttggcctctggggaaagcttggacgcctgggtcattatgccatagatgccgttctcctctcgaccatactcgctggaatgagacgctccactggcctgactttcaagagcgagaagttgacaggcgaaaatggcgagatgaacaagtgggtgaacaagtatctgggcgttggcgagtgggtgatggatcagtccgtcgccttcgccggtaccagcggttacttcgagcgctacagatag

SEQ ID NO: 32093 - protein, 87 aa, Muscodor strobelii
  misc_feature: SGI Peptide ID NO. 571054
  misc_feature (15)..(86): Pfam Id: PF08520 Pfam Desc: Fungal protein of function (DUF1748)
  misc_feature (1)..(87): NCBI GI: 46126299 Blast Desc: FG07527.1 [Gibberella zeae PH-1]
  misc_feature (1)..(85): NCBI GI: 145612053 Blast Desc: MGG_08062 [Magnaporthe grisea 70-15] gi|145019299|gb|EDK03527.1| MGG_08062 [Magnaporthe grisea 70-15]
  misc_feature (1)..(87): NCBI GI: 164425654 Blast Desc: NCU06076 [Neurospora crassa OR74A] gi|157071010|gb|EAA30188.2| [Neurospora crassa OR74A]
  misc_feature (2)..(87): NCBI GI: 156057671 Blast Desc: SS1G_04567 [Sclerotinia sclerotiorum 1980] gi|154702352|gb|EDO02091.1| SS1G_04567 [Sclerotinia sclerotiorum 1980]
  misc_feature (1)..(87): NCBI GI: 261355441 Blast Desc: conserved [Verticillium albo-atrum VaMs.102]
  misc_feature (1)..(87): NCBI GI: 171679994 Blast Desc: protein product [Podospora anserina] gi|170939623|emb|CAP64850.1| protein product [Podospora anserina]
  misc_feature (12)..(87): NCBI GI: 256724814 Blast Desc: [Nectria haematococca mpVI 77-13-4]
  misc_feature (15)..(87): NCBI GI: 145238654 Blast Desc: An07g09005 [Aspergillus niger] gi|134076468|emb|CAK45108.1| protein product [Aspergillus niger]
  misc_feature (15)..(87): NCBI GI: 240104848 Blast Desc: CPC735_020710 [Coccidioides posadasii C735 delta SOWgp]
  misc_feature (15)..(87): NCBI GI: 169767992 Blast Desc: [Aspergillus oryzae RIB40] gi|238484931|ref|XP_002373704.1| conserved [Aspergillus flavus NRRL3357] gi|83766322|dbj|BAE56465.1| protein product oryzae]
MVFLNLLTFGLWGKLGRLGHYAIDAVLLSTILAGMRRSTGLTFKSEKLTGENGEMNKWVNKYLGVGEWVMDQSVAFAGTSGYFERYR

SEQ ID NO: 32094 - DNA, 2099 bp, Muscodor strobelii
  misc_feature: SGI EST ID NO. CUFF.76694.4
  misc_feature: Variant of the nucleotide sequence at SEQ ID NO 32092
tgccactctgagtccgtacgaggtgttcgatggccttctagcatgaatttgaccaagaggaaagttaggacaggactcaccttggcaatatgatttccctgtctttgataggggtcgtgggcgtagatggtcacgagaattggaggggaggaagaattaacaacgagactcgccgcggggctcgaggagtaataagaatagtaggatatgtatggataccgtatgtacggatatagataggtgccgtagagtaaataatgctggtcaggataggatgcgggaattgtcgacaggggtttcacaaaagcaagcttgcctctgcttattcgtccaacgcgtccaagctgatggccaagcttcctgggctcctgctgtcagaaaatgcacggcgtgggatgcgatggtggtagatgccgctagagaggggagaagtgcccgagtaattggaaataccgattgcaaatacaatcgttcctgctcgactccctctcatcttgcgtttccgcatcggtgatgcccctccagcccagaatcccacgcctgtctgttatgactattgcccctccaaaaaacctggagggcaacaattcagggacccctctttgctcgaagacccctcaacgttttctctcagccagtgaggaaacggcgtgctggcgggcgacccccgccattgggtttgctgctgccacgctagatcctcatgctcggctcatgtagcgtcccgcccattttggccgcgtcggtacttggcgaggcttggttgagatgcgccggagaccgataaggcaagtgggcgataagctccggcccagacgtgcttgggcgctgagaggttgtggcgccgaatcccgagacccgcccagcctaccttgcctaccttgataaatccaagaagtctcgacaagtgaatgtgggggctggagacggaaggtgtcccatctgcgttgcgcagcctgaggtactcgggaggcactttagatctggcgccatgtggctcgtgcggcagagcttgcctggcagcagcctaaactggaagcagctagtggattgagggaaggacacctgcaggccacagcggaatcagctgttatcttcaggcggcttcgtcaccggatggttgctgttgaaacaacctcgctgtcgactcactcttctccatcaccacctgttctcagccaccattccgaccacgttctgggtcaaatcgattcgataaccacacgagtcatcagttgaacatcctgaaaaactgactgaatcttcgaaaccgatcattcaaaacttgcatcaagatggttcttggacgcctgggtcattatgccatagatgccgttctcctctcgaccatactcgctggaatgagacgctccactggcctgactttcaagagcgagaagttgacaggcgaaaatggcgagatgaacaagtgggtgaacaagtatctgggcgttggcgagtgggtgatggatcagtccgtcgccttcgccggtaccagcggttacttcgagcgctacagatagtctgttcgcgctctccagaacaataacccctcacaacgaatggaagatctcgaggagggccccgacgacgacagatgacgggacgatcatgaaatcatgaccgatgacgcggaattgccgacgattacaccaccataccacttgttcgctgcatcttttgatgctctgcttcctccgcttagtctctcacagcttcattagacggcaaccctgggcgctttgattctgtgcctctcgcatcctccgtgaccatatgtctcggatgattccggagcaaaattttggcatattgtacagcagagccgcaaagtggtctcaactcaactcaatgtcttttgcccacgttggtatgttcatatgcatgtagtgcagttctccacttagtgagactgcacctccaatttctgttgatcaggtagttttgcagaaaggcgttaggcagggcttcaatgacaatccaactaattatttcgaaaatctcataatctatgtgttgagtgtatggtctgtgaaatgcctgggacgatgtctgctccttgggagaatggcagcgacatggggctccgcgttccgccg

SEQ ID NO: 32095 - DNA, 216 bp, Muscodor strobelii
  misc_feature: SGI cDNA ID NO. 571055
  misc_feature: Encodes the peptide sequence at SEQ ID NO 32096
atgcctcattctagtcgcaaccgagcccgtcgactcgcccgcgctcgtacttactactacgatgacgacgacgacaacgatgctgaatttgtgtttgatgccgcacagcttcccacacaaaaccacctgaacactatcacggcccaggtgaacaccttgcagaatggacttgaagcccaaatggaagaggatcgacagcagtgtagcgacggctag

SEQ ID NO: 32096 - protein, 71 aa, Muscodor strobelii
  misc_feature: SGI Peptide ID NO. 571055
MPHSSRNRARRLARARTYYYDDDDDNDAEFVFDAAQLPTQNHLNTITAQVNTLQNGLEAQMEEDRQQCSDG

SEQ ID NO: 32097 - DNA, 1242 bp, Muscodor strobelii
  misc_feature: SGI cDNA ID NO. 571056
  misc_feature: Encodes the peptide sequence at SEQ ID NO 32098
atggaagacatctacaaccgagcgtacgaaggaacccttacagcagatgacctggaaactcatgatgccatcgagtatgtccatccaaaatcgaacttgacgctgttaggtgtttctgtatggcatggtcacgtagatcaggtcaacatgttgctagaaaagggtgcagatccgaacaaaaccgacgactcacggccgcccctttgggtggctgcatcgaaaacaagaaagaatgccggccgcatcatcgacatcctcctgaatcacaacgcagatcctaacttaccatcggaagttgacagcaattcaactccgcttctaagtgcgggggcatcgcctttagctgccaacgcgaagggcgagacgccaacaagtgtagcgacaacgagaaaggaccgtgaccttctacgtgtcatgcgtcctcgagctgacagaaccagcaatcgactaccaactcttctcattctttgcgaaccactactcttcattattgcctgggctaacaagaacgtccgagctgccacaacagtcgcgacagtcacagccgtcacgaccgtcacagctatagctgtgggtgtctttgtgggttctggcgcaatcaaaaagagattcaacatgagtggccggttcgactctgttaatataacatcatcaaatcgaagacctgtggaagattttcagaaagacgtgcgcgattacatcagtcagaccagactagatcgttttttccctccagatagccaaattttacaaaaggtcctcgataaggccgtggaactagacgcggagccaaacaataccctcgacgtacaagactggacgcggcttgccctaatcaacctgtcctttattgcgctagtaccagacagcgaaggcgtcgagttacgattcatcaatcaaaagaccgatgctcgtatgagcaagcccagcctcaaaaccattgcaacaattatggcggacaatccattcaacggatggacagagatcggcaccaaccttaaaaagattctggaacagtgttggtacgctttcagatcagccaagttggttcggatgatgaagcaggcaaatttctgcaaggcctcaggcctcacttcggacacgacgcttcaagatgtcttatactgcactgcagagcgactcgatacagagttcgagaagcttcgtgagaatgacacgaagctagaacaatggcttcttgaactattaatgggtcctatcgtagacagcgatgctgcttag

SEQ ID NO: 32098 - protein, 413 aa, Muscodor strobelii
  misc_feature: SGI Peptide ID NO. 571056
  misc_feature (31)..(63): Pfam Id: PF00023 Pfam Desc: Ankyrin repeat
  misc_feature (4)..(343): NCBI GI: 256725367 Blast Desc: NECHADRAFT_45674 [Nectria haematococca mpVI 77-13-4]
  misc_feature (1)..(410): NCBI GI: 242216096 Blast Desc: [Postia placenta Mad-698-R] gi|220727037|gb|EED80969.1| [Postia placenta Mad-698-R]
  misc_feature (4)..(404): NCBI GI: 67902894 Blast Desc: AN8434.2 [Aspergillus nidulans FGSC A4] gi|40747900|gb|EAA67056.1| AN8434.2 [Aspergillus nidulans FGSC A4] gi|259484375|tpe|CBF80541.1| TPA: ankyrin repeat protein FGSC
  misc_feature (2)..(342): NCBI GI: 255949776 Blast Desc: Pc22g17420 [Penicillium chrysogenum Wisconsin 54-1255] gi|211592672|emb|CAP99030.1| Pc22g17420 [Penicillium chrysogenum Wisconsin 54-1255]
  misc_feature (24)..(143): NCBI GI: 229582572 Blast Desc: Ankyrin [Sulfolobus islandicus Y.N.15.51] gi|228013288|gb|ACP49049.1| Ankyrin [Sulfolobus islandicus Y.N.15.51]
  misc_feature (4)..(166): NCBI GI: 238501250 Blast Desc: ankyrin repeat protein [Aspergillus flavus NRRL3357] gi|220692096|gb|EED48443.1| ankyrin repeat protein [Aspergillus flavus NRRL3357]
  misc_feature (13)..(120): NCBI GI: 123402025 Blast Desc: [Trichomonas vaginalis G3] gi|121883216|gb|EAX89044.1| TVAG_397510 [Trichomonas vaginalis G3]
  misc_feature (34)..(139): NCBI GI: 229582572 Blast Desc: Ankyrin [Sulfolobus islandicus Y.N.15.51] gi|228013288|gb|ACP49049.1| Ankyrin [Sulfolobus islandicus Y.N.15.51]
  misc_feature (18)..(158): NCBI GI: 123469971 Blast Desc: [Trichomonas vaginalis G3] gi|121900947|gb|EAY05971.1| conserved [Trichomonas vaginalis G3]
  misc_feature (33)..(139): NCBI GI: 158298928 Blast Desc: AGAP009937-PA [Anopheles gambiae str. PEST] gi|157014123|gb|EAA14062.4| AGAP009937-PA [Anopheles gambiae str. PEST]
MEDIYNRAYEGTLTADDLETHDAIEYVHPKSNLTLLGVSVWHGHVDQVNMLLEKGADPNKTDDSRPPLWVAASKTRKNAGRIIDILLNHNADPNLPSEVDSNSTPLLSAGASPLAANAKGETPTSVATTRKDRDLLRVMRPRADRTSNRLPTLLILCEPLLFIIAWANKNVRAATTVATVTAVTTVTAIAVGVFVGSGAIKKRFNMSGRFDSVNITSSNRRPVEDFQKDVRDYISQTRLDRFFPPDSQILQKVLDKAVELDAEPNNTLDVQDWTRLALINLSFIALVPDSEGVELRFINQKTDARMSKPSLKTIATIMADNPFNGWTEIGTNLKKILEQCWYAFRSAKLVRMMKQANFCKASGLTSDTTLQDVLYCTAERLDTEFEKLRENDTKLEQWLLELLMGPIVDSDAA

SEQ ID NO: 32099 - DNA, 1161 bp, Muscodor strobelii
  misc_feature: SGI cDNA ID NO. 571057
  misc_feature: Encodes the peptide sequence at SEQ ID NO 32100
atgtcggacgagaaatcccaagtcggaagtcccgatgcagcccaagatctatatggtcttggtgtgcgcgttggtttctatcttcaggcctttggcatggttttctacaacctcggcgataaaaagaactggggcaaaggcttgaagttgacctcagggagcattaccctttcgatcctcgtgtcttggttcatttctgcagccaaccaacaatttagtcctagcgaagcgtacattgtgctcctgatcattacaagcctatgttttccagctagtacgacgctcttgaatccgcggaccatcgtaggcgagacatttggcctattgattgtcctggtcgtctggctcggacattgggttgccctactatggacgtttgctaggcttgtaaaaacactaccgactttagggacgacgaatgtggtgttttttttcgctaaagtagctatcgatggatggtttaggatattttccctgatgctttgtgtgatctcggccgctgccgagtactggattatcgacaagatcatccgcattattgccaaagcttggggccatatgggtggagatcaaccgagagatccagcagtaaacaattctttgcaagtcgaaaccgaaccccagacgagcgtttcagtggtaaacaagattttagaagatgagatagaggagataattggttggggtgacttgaaaagtatcgtagaatgggcacgctcttttatcaagattactacagtggttttcttgatcgtggctattgaactgacgatacgatggaaccatctcacaccctcagcgaacctacaggccccaggacagttgattccgcttgcgactggaactattatcttcattgacagtatcttcgtcgcgggacgccaagtactgcctcgctatcacggattgttcttcgacttccttgctactgttatggacctcataaacagtaatctttacaagatagtcggtatgcgtgggatctttaatgattggcgcagaaatctgctccagtcaaagcttttcacggaagtcaagaactatgcacgggactggcgagtacacaaagcgcgaccaagcagcacttctcgaagtgcctcaacccctatgaacccccttgatgatactcttgaagcaggagcggtacccgcaacgatatga

SEQ ID NO: 32100 - protein, 386 aa, Muscodor strobelii
  misc_feature: SGI Peptide ID NO. 571057
  misc_feature (3)..(299): NCBI GI: 240110220 Blast Desc: CPC735_062520 [Coccidioides posadasii C735 delta SOWgp]
  misc_feature (5)..(278): NCBI GI: 256723586 Blast Desc: NECHADRAFT_81138 [Nectria haematococca mpVI 77-13-4]
MSDEKSQVGSPDAAQDLYGLGVRVGFYLQAFGMVFYNLGDKKNWGKGLKLTSGSITLSILVSWFISAANQQFSPSEAYIVLLIITSLCFPASTTLLNPRTIVGETFGLLIVLVVWLGHWVALLWTFARLVKTLPTLGTTNVVFFFAKVAIDGWFRIFSLMLCVISAAAEYWIIDKIIRIIAKAWGHMGGDQPRDPAVNNSLQVETEPQTSVSVVNKILEDEIEEIIGWGDLKSIVEWARSFIKITTVVFLIVAIELTIRWNHLTPSANLQAPGQLIPLATGTIIFIDSIFVAGRQVLPRYHGLFFDFLATVMDLINSNLYKIVGMRGIFNDWRRNLLQSKLFTEVKNYARDWRVHKARPSSTSRSASTPMNPLDDTLEAGAVPATI

SEQ ID NO: 32101 - DNA, 2061 bp, Muscodor strobelii
  misc_feature: SGI cDNA ID NO. 571058
  misc_feature: Encodes the peptide sequence at SEQ ID NO 32102
atgagctttcccaactctctattctccaagtttggtctaagaggaggcaccatgtcttccttaatcccccaatacatctcgccgccgcagcaaccggtagacgatcatgaccttgccgaactctctcctcgacctgaacacgcgctgcttgcgaacaatcactctccaactagcccgatcgacgagattggcggtgggtcgcgaagccgccgcactactaccaacatgcatcgcagagccgacaacggaaaggcgaaggcatcagtaacgatccaagaaccacctcgctcgccatctagtgtcggcgacgacgctggctatgactatggagtcgggaacagaacgcatcaaaactcgagaagccccgaggtctggcgagcatccgagccgtatcagcgtacacagagtaacgggccccagctatccttcttcgaaagcatgttcatgcctcgaccatcgtattccgaccgctcgccctccgctaaagtcgacaagacattcaagaccattgagcgccaagaacgcagcttggagaaacagctccagagactcctcaatgcccaagactacgccttggagagatctctagcgactgacgagcccgaagacagcgtctctcgatcctcgacccccgactcggtaccaccaaaaggtcacgtcgtgccagtgcgacagccacgaaagagacatctatccaagaaagaggcacgcgtcggtatatcgcattgtctaagccaactatcaaacctgaaaaacgaagaagacgcgtacattgcaaccgcacttgccgagcgcaaatctgcactatcccgcctgcgaaacctatcctctaagagaagtaatatcgtgacggagatggaagctatgaaatcatatcaaccattgaagaacgagatacagaagatggaagaccaacacagaacagtctgctcggatatagagcagctcgaatatcagctacggagtctcaagcagaagaaagcacggcttgaacataaaatcacagaggccaagagcaggcgcgaatccgagctcagtggttatgcaggcgctttgaaggaatgcgacaagaggatcaaagatattatggactttcccagtgtatccgtcctggaagtcgagggtctcttatcgcaagatgctgatctaaaggcactggttggagatcacatgtcagggcttgagttcctttccttgcgcccagaacgccgcacactgccgatggcgaaagactggtgggaaggcgaggtcagaatcctagaaatacgcaagacagcagtggaccgcgagcggactgccctcgatgaaggcgcgcagctctgggcagatgttataggacgcttagaagcgcacgatcagcacctgagtcttgcgatgacggctttggcgagttacgctgcgcagcgtgagaagagaagtggtgaggcagagggtacactgaagaaacagtatgagcttagcaagagcacaacaacggatctggaggagttacagaagtttactgaagctcagggctggaatcttctcgctgcgggattaggcgcagaattgaactatatcacacagcttaaagctagtctcgcagatacgctacgtgttgtcggatgggcagatggagtcgtgacgccgagacctagtacaccgactcggacacccgagacggggaacttgatcggtacccctgagcaagcgcaaaagctcgaagaggatctcacgggcagtgtgatcaggcgatggaatggtaccgaggagagctcgaatcccaataatcctcctgccgacctacttcttgatccaacgcatcacgagagcgacaacgaagttcccccgggcttattaagtgaggtccacgagagcgaggatgaacataacgaggtcccgcccgagttcctttctatgcatagtccgaatcggaataaaggcaaggagaaggacgttatcaactttgaacctctgaaggatgagaaacctgtggatgatgaagagcatcatgagttgagcagagagagcagtgcgaatgaggttccgcctgacttgttggctgagagccatgttgattag

SEQ ID NO: 32102 - protein, 686 aa, Muscodor strobelii
  misc_feature: SGI Peptide ID NO. 571058
  misc_feature (35)..(634): NCBI GI: 171679988 Blast Desc: protein product [Podospora anserina] gi|170939620|emb|CAP64847.1| protein product [Podospora anserina]
  misc_feature (27)..(638): NCBI GI: 46126297 Blast Desc: FG07526.1 [Gibberella zeae PH-1]
  misc_feature (164)..(634): NCBI GI: 85094159 Blast Desc: NCU06073 [Neurospora crassa OR74A] gi|28921291|gb|EAA30600.1| [Neurospora crassa OR74A]
  misc_feature (164)..(632): NCBI GI: 256724687 Blast Desc: NECHADRAFT_71563 [Nectria haematococca mpVI 77-13-4]
  misc_feature (153)..(636): NCBI GI: 261355442 Blast Desc: conserved [Verticillium albo-atrum VaMs.102]
  misc_feature (158)..(634): NCBI GI: 145612051 Blast Desc: MGG_08061 [Magnaporthe grisea 70-15] gi|145019298|gb|EDK03526.1| MGG_08061 [Magnaporthe grisea 70-15]
  misc_feature (42)..(531): NCBI GI: 154314425 Blast Desc: BC1G_05306 [Botryotinia fuckeliana B05.10] gi|150848951|gb|EDN24144.1| BC1G_05306 [Botryotinia fuckeliana B05.10]
  misc_feature (167)..(531): NCBI GI: 238840206 Blast Desc: Atg28p [Microsporum canis CBS 113480]
  misc_feature (393)..(634): NCBI GI: 116203819 Blast Desc: CHGG_09793 [Chaetomium globosum CBS 148.51] gi|88175921|gb|EAQ83389.1| CHGG_09793 [Chaetomium globosum CBS 148.51]
  misc_feature (162)..(631): NCBI GI: 242800806 Blast Desc: conserved [Talaromyces stipitatus ATCC 10500] gi|218717004|gb|EED16425.1| conserved [Talaromyces stipitatus ATCC 10500]
MSFPNSLFSKFGLRGGTMSSLIPQYISPPQQPVDDHDLAELSPRPEHALLANNHSPTSPIDEIGGGSRSRRTTTNMHRRADNGKAKASVTIQEPPRSPSSVGDDAGYDYGVGNRTHQNSRSPEVWRASEPYQRTQSNGPQLSFFESMFMPRPSYSDRSPSAKVDKTFKTIERQERSLEKQLQRLLNAQDYALERSLATDEPEDSVSRSSTPDSVPPKGHVVPVRQPRKRHLSKKEARVGISHCLSQLSNLKNEEDAYIATALAERKSALSRLRNLSSKRSNIVTEMEAMKSYQPLKNEIQKMEDQHRTVCSDIEQLEYQLRSLKQKKARLEHKITEAKSRRESELSGYAGALKECDKRIKDIMDFPSVSVLEVEGLLSQDADLKALVGDHMSGLEFLSLRPERRTLPMAKDWWEGEVRILEIRKTAVDRERTALDEGAQLWADVIGRLEAHDQHLSLAMTALASYAAQREKRSGEAEGTLKKQYELSKSTTTDLEELQKFTEAQGWNLLAAGLGAELNYITQLKASLADTLRVVGWADGVVTPRPSTPTRTPETGNLIGTPEQAQKLEEDLTGSVIRRWNGTEESSNPNNPPADLLLDPTHHESDNEVPPGLLSEVHESEDEHNEVPPEFLSMHSPNRNKGKEKDVINFEPLKDEKPVDDEEHHELSRESSANEVPPDLLAESHVD

SEQ ID NO: 32103 - DNA, 4700 bp, Muscodor strobelii
  misc_feature: SGI EST ID NO. CUFF.75936.0
  misc_feature: Variant of the nucleotide sequence at SEQ ID NO 32101
cgatcagttagcttgacacctcaagccctcacgtatagcataattgacgttttactactgtcaagtcttgagtccaattgtggaagttgttgatttgcccgttgtcaagttcgactttctcaattgctgatctgtcattcttcctgctgcacttgtggcagggtgtgaccaaactactgatttatcaccaatgtctgtcgcgcaattgaagagggatctctctggtctagtatggatgcgaaccattttgactacagcactcttgactactctacaggcagcattcgtctcatatgtatagagaaacgcacgtctgattgtctaagcctctccatcgacacatacgatgtctcctcttgccctccttatgtcgcactgtcgtatgtctggggagaggagaacccaggagggacagtccacctcggcgggcagaaatttcagcttcgcatcagcttgtggcaccttctacatagattagaagaggacgggtaccatgggcagtacctatgggttgacgctatctgcataaatcagagcaacctggtcgaacgtggtcaccaagtgaacatgatgaaagacattttttcaaatgcggaaactaccatcgcatggctgggcgagggtgaccctgaaactgatcggctgatgcgtgccgctactatgaacggatcgcacaactttaatgtacagcattgggatgcggccatttttcgtaatgtgttggagaagcgcccgtatttcagtcgcatgtggattgtacaggaggtcctcctgtcacggaaacttctagtcctatgcggttcgtgcagctgctggtgggaggacctggatgccctcttctacgacggacaacgaatcaccgcttaccatgagctcttcgaagctcgcgcagtctaccgtacagaaaacggcatacaggcagtcgagttgtcccgtttattaaacgactttcatcacaaggaatgtgcagatccccgagatcgcatctacgcgttgctaggtctagcagctcctccgtttccatccggggcggagattccactcaaggcggactacactatctcgcctgagacgctataccaccagacgttggcatatctgcagacattggagtcgacgaacttcgaacccacctacttattgacgttgaaacgaaagctacaagtcgcgcttgggataaagatcaagagaaagatcactccagatgttcgcaataaaaatatcggcaaggatgattctaaacggactctgaaggatatggaggaagaattaaagctggatatagaactggaacgtgacatcttacgggctagtgccccgtataagtggcagtcgaggtgcacccatccagtaggagacccaggttgcatcctttgtttacgattgcgatccggcacagacaagagtctccggatgtatcagactcaaaggtctacttgagcggctgaaaattgacgagactttcgtgaaatcggcgaggcgcactgctcaggtagatcttgaggtatacgaagacatcaaaacaaccgattctgatagcatggtccagtatgatgatatctggtacttgcatttggaaatattaccaatgtgcgagggtgcagaagagcccgatcgtaaacggcgattgccgtttcgtcgagttgacgcgagcctgacttttaagcgcgtcgttctgtatcttgcaccaagaatcgccagcgaggcaaacaagaccgagacaacagagacgattgcgcttatatgacgttcattataagacagcactgttcgtcgccgcaacgtattttgtagtcattgacatcacttacaatgttctcgagtagctaatatgtgccgactgagagctgtcattctatgggaacaatcggaaactgaaaggtaaatagtataatatgccagttacttgagacagtgggtcctttaagatatatcggtatcattgtcggccggaaaatcactgctgacttacacgcaagtccgaacatgcaagcgcacaagtttagtcaagaaatgatgcagagagggtgttgggagaggtgagatgtcgcgcgggtggtgtggtcagctgcttgttgacacacacctcgtgaacatgatgtagcttatcgatatgcccagacaccggaagctgatatcatcgcgcttccttcgcatctgcagctcactcatctcccatcagtctcatcactcacaatccaacctagtcttgactgtttgcaatcattaatgctcgctcttttctactgtgatagagctgcactcattcggactctaaaatgagcgtgcattttcagagcccactgtcttcgtgtctataaaatccatcgttctcgtagccgtctgcctttttctacttatggcgacgatgcccttcgccttttgagatacccatacttgcaagtccagtaacaccgacatgagctttcccaactctctattctccaagtttggtctaagaggaggcaccatgtcttccttaatcccccaatacatctcgccgccgcagcaaccggtagacgatcatgaccttgccgaactctctcctcgacctgaacacgcgctgcttgcgaacaatcactctccaactagcccgatcgacgagattggcggtgggtcgcgaagccgccgcactactaccaacatgcatcgcagagccgacaacggaaaggcgaaggcatcagtaacgatccaagaaccacctcgctcgccatctagtgtcggcgacgacgctggctatgactatggagtcgggaacagaacgcatcaaaactcgagaagccccgaggtctggcgagcatccgagccgtatcagcgtacacagagtaacgggccccagctatccttcttcgaaagcatgttcatgcctcgaccatcgtattccgaccgctcgccctccgctaaagtcgacaagacattcaagaccattgagcgccaagaacgcagcttggagaaacagctccagagactcctcaatgcccaagactacgccttggagagatctctagcgactgacgagcccgaagacagcgtctctcgatcctcgacccccgactcggtaccaccaaaaggtcacgtcgtgccagtgcgacagccacgaaagagacatctatccaagaaagaggcacgcgtcggtatatcgcattgtctaagccaactatcaaacctgaaaaacgaagaagacgcgtacattgcaaccgcacttgccgagcgcaaatctgcactatcccgcctgcgaaacctatcctctaagagaagtaatatcgtgacggagatggaagctatgaaatcatatcaaccattgaagaacgagatacagaagatggaagaccaacacagaacagtctgctcggatatagagcagctcgaatatcagctacggagtctcaagcagaagaaagcacggcttgaacataaaatcacagaggccaagagcaggcgcgaatccgagctcagtggttatgcaggcgctttgaaggaatgcgacaagaggatcaaagatattatggactttcccagtgtatccgtcctggaagtcgagggtctcttatcgcaagatgctgatctaaaggcactggttggagatcacatgtcagggcttgagttcctttccttgcgcccagaacgccgcacactgccgatggcgaaagactggtgggaaggcgaggtcagaatcctagaaatacgcaagacagcagtggaccgcgagcggactgccctcgatgaaggcgcgcagctctgggcagatgttataggacgcttagaagcgcacgatcagcacctgagtcttgcgatgacggctttggcgagttacgctgcgcagcgtgagaagagaagtggtgaggcagagggtacactgaagaaacagtatgagcttagcaagagcacaacaacggatctggaggagttacagaagtttactgaagctcagggctggaatcttctcgctgcgggattaggcgcagaattgaactatatcacacagcttaaagctagtctcgcagatacgctacgtgttgtcggatgggcagatggagtcgtgacgccgagacctagtacaccgactcggacacccgagacggggaacttgatcggtacccctgagcaagcgcaaaagctcgaagaggatctcacgggcagtgtgatcaggcgatggaatggtaccgaggagagctcgaatcccaataatcctcctgccgacctacttcttgatccaacgcatcacgagagcgacaacgaagttcccccgggcttattaagtgaggtccacgagagcgaggatgaacataacgaggtcccgcccgagttcctttctatgcatagtccgaatcggaataaaggcaaggagaaggacgttatcaactttgaacctctgaaggatgagaaacctgtggatgatgaagagcatcatgagttgagcagagagagcagtgcgaatgaggttccgcctgacttgttggctgagagccatgttgattagtcagttctatgccctgttcttgacggctttgtacgcttgggactgcatgttatttggactggcgtcaggtttgcgacagcgtttggtgttatggtgtttcttggttccgtatttgcaattactacacatgctatcaaaagacttgcaatgattgtagcaacgatactccgtatgtaaaattacgcactacacactacagtgccctaacattaatctccaa

SEQ ID NO: 32104 - DNA, 1077 bp, Muscodor strobelii
  misc_feature: SGI cDNA ID NO. 571059
  misc_feature: Elevated expression when VOC is produced
  misc_feature: Encodes the peptide sequence at SEQ ID NO 32105
atgatgaaagacattttttcaaatgcggaaactaccatcgcatggctgggcgagggtgaccctgaaactgatcggctgatgcgtgccgctactatgaacggatcgcacaactttaatgtacagcattgggatgcggccatttttcgtaatgtgttggagaagcgcccgtatttcagtcgcatgtggattgtacaggaggtcctcctgtcacggaaacttctagtcctatgcggttcgtgcagctgctggtgggaggacctggatgccctcttctacgacggacaacgaatcaccgcttaccatgagctcttcgaagctcgcgcagtctaccgtacagaaaacggcatacaggcagtcgagttgtcccgtttattaaacgactttcatcacaaggaatgtgcagatccccgagatcgcatctacgcgttgctaggtctagcagctcctccgtttccatccggggcggagattccactcaaggcggactacactatctcgcctgagacgctataccaccagacgttggcatatctgcagacattggagtcgacgaacttcgaacccacctacttattgacgttgaaacgaaagctacaagtcgcgcttgggataaagatcaagagaaagatcactccagatgttcgcaataaaaatatcggcaaggatgattctaaacggactctgaaggatatggaggaagaattaaagctggatatagaactggaacgtgacatcttacgggctagtgccccactcaaaggtctacttgagcggctgaaaattgacgagactttcgtgaaatcggcgaggcgcactgctcaggtagatcttgaggtatacgaagacatcaaaacaaccgattctgatagcatggtccagtatgatgatatctggtacttgcatttggaaatattaccaatgtgcgagggtgcagaagagcccgatcgtaaacggcgattgccgtttcgtcgagttgacgcgagcctgacttttaagcgcgtcgttctgtatcttgcaccaagaatcgccagcgaggcaaacaagaccgagacaacagagacgattgcgcttatatga

SEQ ID NO: 32105 - protein, 358 aa, Muscodor strobelii
  misc_feature: SGI Peptide ID NO. 571059
  misc_feature (1)..(66): Pfam Id: PF06985 Pfam Desc: Heterokaryon incompatibility protein (HET)
  misc_feature (1)..(178): NCBI GI: 238507802 Blast Desc: conserved [Aspergillus flavus NRRL3357] gi|220688621|gb|EED44973.1| conserved [Aspergillus flavus NRRL3357]
  misc_feature (2)..(178): NCBI GI: 256722080 Blast Desc: NECHADRAFT_86213 [Nectria haematococca mpVI 77-13-4]
  misc_feature (1)..(178): NCBI GI: 256722966 Blast Desc: NECHADRAFT_86875 [Nectria haematococca mpVI 77-13-4]
  misc_feature (1)..(166): NCBI GI: 145234110 Blast Desc: An02g12950 [Aspergillus niger] gi|134057368|emb|CAK37923.1| protein product [Aspergillus niger]
  misc_feature (1)..(182): NCBI GI: 226287224 Blast Desc: conserved [Paracoccidioides brasiliensis Pb18]
  misc_feature (2)..(176): NCBI GI: 154292443 Blast Desc: BC1G_14540 [Botryotinia fuckeliana B05.10] gi|150846126|gb|EDN21319.1| BC1G_14540 [Botryotinia fuckeliana B05.10]
  misc_feature (2)..(178): NCBI GI: 154310192 Blast Desc: BC1G_07016 [Botryotinia fuckeliana B05.10] gi|150851577|gb|EDN26770.1| BC1G_07016 [Botryotinia fuckeliana B05.10]
  misc_feature (1)..(182): NCBI GI: 225683598 Blast Desc: [Paracoccidioides brasiliensis Pb03]
  misc_feature (1)..(155): NCBI GI: 156061491 Blast Desc: SS1G_02890 [Sclerotinia sclerotiorum 1980] gi|154700292|gb|EDO00031.1| SS1G_02890 [Sclerotinia sclerotiorum 1980]
  misc_feature (1)..(197): NCBI GI: 238842362 Blast Desc: conserved [Microsporum canis CBS 113480]
  misc_feature: Useful for introducing or modulating the production of volatile compounds
MMKDIFSNAETTIAWLGEGDPETDRLMRAATMNGSHNFNVQHWDAAIFRNVLEKRPYFSRMWIVQEVLLSRKLLVLCGSCSCWWEDLDALFYDGQRITAYHELFEARAVYRTENGIQAVELSRLLNDFHHKECADPRDRIYALLGLAAPPFPSGAEIPLKADYTISPETLYHQTLAYLQTLESTNFEPTYLLTLKRKLQVALGIKIKRKITPDVRNKNIGKDDSKRTLKDMEEELKLDIELERDILRASAPLKGLLERLKIDETFVKSARRTAQVDLEVYEDIKTTDSDSMVQYDDIWYLHLEILPMCEGAEEPDRKRRLPFRRVDASLTFKRVVLYLAPRIASEANKTETTETIALI

SEQ ID NO: 32106 - DNA, 1446 bp, Muscodor strobelii
  misc_feature: SGI cDNA ID NO. 571060
  misc_feature: Elevated expression when VOC is produced
  misc_feature: Encodes the peptide sequence at SEQ ID NO 32107
atgtctacccctacaaattataaagtcttattcgatagttatcacaatgtcataaacaatgaactggtcgacacagctacaaagcgtcagagtatcgaccctagtaccgaggaaccactctggaattctccagtttctggtaaagaggaagtggaccgggcagtgagaagcggacaaaaggcatacgtctcttggcgtaagttatcgtgggatgaacgtgcagattatctcaataggttcgcggatgccatcaaggcgaatacagatgcgttcattgagcttcttggcaaggaagcgggaaagccgccccaagctgccggctttgagatgttcctcgtaatgaacctggcacgagagattccgttgttacgcttgaaagaagagaagccgatagatgatgagactcgaactgcaatcgtgcgctacgttcccctcggtgtaggcgtcggcatcgtgccgtggaatttccctctaacgctgggcattggcaaattacttccagctcttctagcaggcaacactttcatatggaagccttctccatttgcgccctactcggctttgaaactcgctgagattggcgctaaggtgctaccgccaggagtcttccaagctctttcaggaggcgatgatctagggcctcttctaacaacatatcccgatgtggccaaagttagctttacgggttcggttgagacgggcaagaagattatggcggcatgcgcgggcaccgtaaaaagactgacattggagctaggtggcaatgacgcggcagttgtatgtgacgatgttgatattgattccgtcgttgctcaggttacattctttacgtttgttcactgctcgcagatctgcatgaatatcaagagaatttatgtacatgagaatatctacgatcagttcctcgacaaaatggtcgcagcaacgaagcagttcaaaacgggcagtgcaactgaccccgaggtctttttcgggccaattcagaacagcaagcaatacgaaaagctgcgtaacttttactctcatatagataaagacggctggaaaacagcactaggaggacagccaggtccaaaggagggcaagggcttctatatgcccgctactatcatcgacaaccctccagatgattccagaatcgtagtcgatgagcctttcgggcccattgttcccgttttgaaatggtccgacgaaaatgaagttataaaacgtgtcaatgcctccagactaggccttggtgcttcagtgtggagcaaagacgtcccgagagcgcagcgcatggccgaacaactcgaggcaggaagcatttgggttaacactcactttgaagttgcgcctaatgtaccttacggtggccacaaggaaagtggattgggaatggattggggagaagtcgggttgaagggctggacgaatgcacaggcttattggacgaaacacatttga

SEQ ID NO: 32107 - protein, 481 aa, Muscodor strobelii
  misc_feature: SGI Peptide ID NO. 571060
  misc_feature (22)..(476): Pfam Id: PF00171 Pfam Desc: Aldehyde dehydrogenase family
  misc_feature (1)..(480): NCBI GI: 46110949 Blast Desc: FG02356.1 [Gibberella zeae PH-1]
  misc_feature (8)..(479): NCBI GI: 171676724 Blast Desc: protein product [Podospora anserina] gi|170936429|emb|CAP61086.1| protein product [Podospora anserina]
  misc_feature (13)..(477): NCBI GI: 169768486 Blast Desc: [Aspergillus oryzae RIB40] gi|238497792|ref|XP_002380131.1| aldehyde dehydrogenase, [Aspergillus flavus NRRL3357] gi|83766571|dbj|BAE56711.1| protein
  misc_feature (13)..(479): NCBI GI: 70981881 Blast Desc: aldehyde dehydrogenase [Aspergillus fumigatus Af293] gi|66844092|gb|EAL84431.1| aldehyde dehydrogenase, [Aspergillus fumigatus Af293] gi|159122305|gb|EDP47427.1| aldehyde fumigatus
  misc_feature (13)..(479): NCBI GI: 119487483 Blast Desc: aldehyde dehydrogenase [Neosartorya fischeri NRRL 181] gi|119410691|gb|EAW20637.1| aldehyde dehydrogenase [Neosartorya fischeri NRRL 181]
  misc_feature (13)..(479): NCBI GI: 121714751 Blast Desc: aldehyde dehydrogenase [Aspergillus clavatus NRRL 1] gi|119403140|gb|EAW13560.1| aldehyde dehydrogenase [Aspergillus clavatus NRRL 1]
  misc_feature (13)..(480): NCBI GI: 164422865 Blast Desc: NCU09648 [Neurospora crassa OR74A] gi|157069853|gb|EAA29478.2| NCU09648 [Neurospora crassa OR74A]
  misc_feature (11)..(477): NCBI GI: 145249146 Blast Desc: An14g02870 [Aspergillus niger] gi|134081589|emb|CAK41998.1| protein product [Aspergillus niger]
  misc_feature (11)..(477): NCBI GI: 67516917 Blast Desc: AN0740.2 [Aspergillus nidulans FGSC A4] gi|40746226|gb|EAA65382.1| AN0740.2 [Aspergillus nidulans FGSC A4] gi|259488982|tpe|CBF88877.1| TPA: conserved [Aspergillus FGSC
  misc_feature (8)..(479): NCBI GI: 145228395 Blast Desc: An01g00620 [Aspergillus niger] gi|134054593|emb|CAK43448.1| protein product [Aspergillus niger]
  misc_feature (31)..(475): SWISSPROT Homolog: EC 1.2.1.8 Betaine-aldehyde dehydrogenase
  misc_feature: Useful for introducing or modulating the production of volatile compounds
  misc_feature: Useful for fungicidal and/or biocontrol applications
MSTPTNYKVLFDSYHNVINNELVDTATKRQSIDPSTEEPLWNSPVSGKEEVDRAVRSGQKAYVSWRKLSWDERADYLNRFADAIKANTDAFIELLGKEAGKPPQAAGFEMFLVMNLAREIPLLRLKEEKPIDDETRTAIVRYVPLGVGVGIVPWNFPLTLGIGKLLPALLAGNTFIWKPSPFAPYSALKLAEIGAKVLPPGVFQALSGGDDLGPLLTTYPDVAKVSFTGSVETGKKIMAACAGTVKRLTLELGGNDAAVVCDDVDIDSVVAQVTFFTFVHCSQICMNIKRIYVHENIYDQFLDKMVAATKQFKTGSATDPEVFFGPIQNSKQYEKLRNFYSHIDKDGWKTALGGQPGPKEGKGFYMPATIIDNPPDDSRIVVDEPFGPIVPVLKWSDENEVIKRVNASRLGLGASVWSKDVPRAQRMAEQLEAGSIWVNTHFEVAPNVPYGGHKESGLGMDWGEVGLKGWTNAQAYWTKHI

SEQ ID NO: 32108 - DNA, 2035 bp, Muscodor strobelii
  misc_feature: SGI EST ID NO. CUFF.75956.0
  misc_feature: Variant of the nucleotide sequence at SEQ ID NO 32106
gttcctatccttttctcgatgattaggcggaacatcgcagtcgtccaatatttacatcatatatactactaggatttgaatgagttactatacgtcatttgctaggtccattttacttcgttgcgatgtctacccctacaaattataaagtcttattcgatagttatcacaatgtcataaacaatgaactggtcgacacagctacaaagcgtcagagtatcgaccctagtaccgaggaaccactctggaattctccagtttctggtaaagaggaagtggaccgggcagtgagaagcggacaaaaggcatacgtctcttggcgtaagttatcgtgggatgaacgtgcagattatctcaataggttcgcggatgccatcaaggcgaatacagatgcgttcattgagcttcttggcaaggaagcgggaaagccgccccaagctgccggctttgagatgttcctcgtaatgaacctggcacgagagattccgttgttacgcttgaaagaagagaagccgatagatgatgagactcgaactgcaatcgtgcgctacgttcccctcggtgtaggcgtcggcatcgtgccgtggaatttccctctaacgctgggcattggcaaattacttccagctcttctagcaggcaacactttcatatggaagccttctccatttgcgccctactcggctttgaaactcgctgagattggcgctaaggtgctaccgccaggagtcttccaagctctttcaggaggcgatgatctagggcctcttctaacaacatatcccgatgtggccaaagttagctttacgggttcggttgagacgggcaagaagattatggcggcatgcgcgggcaccgtaaaaagactgacattggagctaggtggcaatgacgcggcagttgtatgtgacgatgttgatattgattccgtcgttgctcaggttacattctttacgtttgttcactgctcgcagatctgcatgaatatcaagagaatttatgtacatgagaatatctacgatcagttcctcgacaaaatggtcgcagcaacgaagcagttcaaaacgggcagtgcaactgaccccgaggtctttttcgggccaattcagaacagcaagcaatacgaaaagctgcgtaacttttactctcatatagataaagacggctggaaaacagcactaggaggacagccaggtccaaaggagggcaagggcttctatatgcccgctactatcatcgacaaccctccagatgattccagaatcgtagtcgatgagcctttcgggcccattgttcccgttttgaaatggtccgacgaaaatgaagttataaaacgtgtcaatgcctccagactaggccttggtgcttcagtgtggagcaaagacgtcccgagagcgcagcgcatggccgaacaactcgaggcaggaagcatttgggttaacactcactttgaagttgcgcctaatgtaccttacggtggccacaaggaaagtggattgggaatggattggggagaagtcgggttgaagggctggacgaatgcacaggcttattggacgaaacacatttgattggtggtatttgtctcattagaagaactgttgcatactacttggatagataaaagatgtccgacaatttggttgccttatgtaggtagataacttgcacaagtgaccgcgtgtcccagagcggatcttgatagctgaaagaacgaatgttgttatgccgagaattgtcagttggcttgtcctacatagttcaacttgtaatagagttaatggaattaatatcatattcccccgttatcttctttcgtcctgtccttacgatcctgtttgtccaggactagtcaagatttctatttcatagcatattgggtcattgaccgcgatctagttctgcgcgtgcgacggtgtcagaaaattcgggaacgtagcttaccaggcggaaaaggaggaactggataaacaggccgatatcacgtgtccttcaaaacttgtcatctgtaaggcgttctttggtgcgcgaggca

SEQ ID NO: 32109 - DNA, 1458 bp, Muscodor strobelii
  misc_feature: SGI cDNA ID NO. 571061
  misc_feature: Encodes the peptide sequence at SEQ ID NO 32110
atgtctacccctacaaattataaagtcttattcgatagttatcacaatgtcataaacaatgaactggtcgacacagctacaaagcgtcagagtatcgaccctagtaccgaggaaccactctggaattctccagtttctggtaaagaggaagtggaccgggcagtgagaagcggacaaaaggcatacgtctcttggcgtaagttatcgtgggatgaacgtgcagattatctcaataggttcgcggatgccatcaaggcgaatacagatgcgttcattgagcttcttggcaaggaagcgggaaagccgccccaagctgccggctttgagatgttcctcgtaatgaacctggcacgagagattccgttgttacgcttgaaagaagagaagccgatagatgatgagactgtagacctacagcgaactgcaatcgtgcgctacgttcccctcggtgtaggcgtcggcatcgtgccgtggaatttccctctaacgctgggcattggcaaattacttccagctcttctagcaggcaacactttcatatggaagccttctccatttgcgccctactcggctttgaaactcgctgagattggcgctaaggtgctaccgccaggagtcttccaagctctttcaggaggcgatgatctagggcctcttctaacaacatatcccgatgtggccaaagttagctttacgggttcggttgagacgggcaagaagattatggcggcatgcgcgggcaccgtaaaaagactgacattggagctaggtggcaatgacgcggcagttgtatgtgacgatgttgatattgattccgtcgttgctcaggttacattctttacgtttgttcactgctcgcagatctgcatgaatatcaagagaatttatgtacatgagaatatctacgatcagttcctcgacaaaatggtcgcagcaacgaagcagttcaaaacgggcagtgcaactgaccccgaggtctttttcgggccaattcagaacagcaagcaatacgaaaagctgcgtaacttttactctcatatagataaagacggctggaaaacagcactaggaggacagccaggtccaaaggagggcaagggcttctatatgcccgctactatcatcgacaaccctccagatgattccagaatcgtagtcgatgagcctttcgggcccattgttcccgttttgaaatggtccgacgaaaatgaagttataaaacgtgtcaatgcctccagactaggccttggtgcttcagtgtggagcaaagacgtcccgagagcgcagcgcatggccgaacaactcgaggcaggaagcatttgggttaacactcactttgaagttgcgcctaatgtaccttacggtggccacaaggaaagtggattgggaatggattggggagaagtcgggttgaagggctggacgaatgcacaggcttattggacgaaacacatttga

SEQ ID NO: 32110 - protein, 485 aa, Muscodor strobelii
  misc_feature: SGI Peptide ID NO. 571061
  misc_feature (22)..(480): Pfam Id: PF00171 Pfam Desc: Aldehyde dehydrogenase family
  misc_feature (1)..(484): NCBI GI: 46110949 Blast Desc: FG02356.1 [Gibberella zeae PH-1]
  misc_feature (8)..(483): NCBI GI: 171676724 Blast Desc: protein product [Podospora anserina] gi|170936429|emb|CAP61086.1| protein product [Podospora anserina]
  misc_feature (13)..(481): NCBI GI: 169768486 Blast Desc: [Aspergillus oryzae RIB40] gi|238497792|ref|XP_002380131.1| aldehyde dehydrogenase, [Aspergillus flavus NRRL3357] gi|83766571|dbj|BAE56711.1| protein
  misc_feature (13)..(483): NCBI GI: 70981881 Blast Desc: aldehyde dehydrogenase [Aspergillus fumigatus Af293] gi|66844092|gb|EAL84431.1| aldehyde dehydrogenase, [Aspergillus fumigatus Af293] gi|159122305|gb|EDP47427.1| aldehyde fumigatus
  misc_feature (13)..(483): NCBI GI: 119487483 Blast Desc: aldehyde dehydrogenase [Neosartorya fischeri NRRL 181] gi|119410691|gb|EAW20637.1| aldehyde dehydrogenase [Neosartorya fischeri NRRL 181]
  misc_feature (13)..(483): NCBI GI: 121714751 Blast Desc: aldehyde dehydrogenase [Aspergillus clavatus NRRL 1] gi|119403140|gb|EAW13560.1| aldehyde dehydrogenase [Aspergillus clavatus NRRL 1]
  misc_feature (13)..(484): NCBI GI: 164422865 Blast Desc: NCU09648 [Neurospora crassa OR74A] gi|157069853|gb|EAA29478.2| NCU09648 [Neurospora crassa OR74A]
  misc_feature (11)..(481): NCBI GI: 145249146 Blast Desc: An14g02870 [Aspergillus niger] gi|134081589|emb|CAK41998.1| protein product [Aspergillus niger]
  misc_feature (11)..(481): NCBI GI: 67516917 Blast Desc: AN0740.2 [Aspergillus nidulans FGSC A4] gi|40746226|gb|EAA65382.1| AN0740.2 [Aspergillus nidulans FGSC A4] gi|259488982|tpe|CBF88877.1| TPA: conserved [Aspergillus FGSC
  misc_feature (8)..(483): NCBI GI: 145228395 Blast Desc: An01g00620 [Aspergillus niger] gi|134054593|emb|CAK43448.1| protein product [Aspergillus niger]
  misc_feature (31)..(479): SWISSPROT Homolog: EC 1.2.1.8 Betaine-aldehyde dehydrogenase
  misc_feature: Useful for introducing or modulating the production of volatile compounds
  misc_feature: Useful for fungicidal and/or biocontrol applications
MSTPTNYKVLFDSYHNVINNELVDTATKRQSIDPSTEEPLWNSPVSGKEEVDRAVRSGQKAYVSWRKLSWDERADYLNRFADAIKANTDAFIELLGKEAGKPPQAAGFEMFLVMNLAREIPLLRLKEEKPIDDETVDLQRTAIVRYVPLGVGVGIVPWNFPLTLGIGKLLPALLAGNTFIWKPSPFAPYSALKLAEIGAKVLPPGVFQALSGGDDLGPLLTTYPDVAKVSFTGSVETGKKIMAACAGTVKRLTLELGGNDAAVVCDDVDIDSVVAQVTFFTFVHCSQICMNIKRIYVHENIYDQFLDKMVAATKQFKTGSATDPEVFFGPIQNSKQYEKLRNFYSHIDKDGWKTALGGQPGPKEGKGFYMPATIIDNPPDDSRIVVDEPFGPIVPVLKWSDENEVIKRVNASRLGLGASVWSKDVPRAQRMAEQLEAGSIWVNTHFEVAPNVPYGGHKESGLGMDWGEVGLKGWTNAQAYWTKHI

SEQ ID NO: 32111 - DNA, 2035 bp, Muscodor strobelii; identical to SEQ ID NO: 32108
  misc_feature: SGI EST ID NO. CUFF.75956.0
  misc_feature: Variant of the nucleotide sequence at SEQ ID NO 32109

SEQ ID NO: 32112 - DNA, 888 bp, Muscodor strobelii
  misc_feature: SGI cDNA ID NO. 571062
  misc_feature: Encodes the peptide sequence at SEQ ID NO 32113
atgcgcgtcgacatcagtttcaccgtggcaatctttgctaccttcgtgacagctattcctggcccagtgttccgtcgccaaaatgctacatcttcgcgggtcacaactggagcccatcctctgacaatggttcctctgtcaactcttgcgtcaaccgctacacctcttatatacggtattcctccttctcctagcaaaatccccggccgtcctttctctgccaacaacaaggaggtcgaaccttgcacagagacaagtgatgctccgattacgtcgccccctgtcgcaagtaacactcctactggtgctatttgcactactatcactggtgactacccgcgctcaactgttcctggtttctgccgtccctccatgttcattaatgcacctgacctccggcctatcacggcatctgctctggaccctggcgccgctgtacctacccctatctacacggcaacagtgactatgggagcaaacactgtaccggacaagatccagtgctgctcctattgtgcagactacttcaattgctacgcatggcaatttgtcccctctcacatggatgacgaaccgactgaccgacttcctggtggctttgatccgttccgctccggcaactgcctaattgcctattacgttggcaacggtacaagagatgatattaccttcgataatgcttctgaccgctgcccaaatggtcgactgctcaatgttctggaaggctccaacaatcgtgtccagggtacctggaacgacggcatgtacttcaatggctggaatcagggcgcttgcggtgatgctggagataccgttttcagtgctggcgaggacatcggcttcgactgggactcgctttgtcatcatgctggaggccacacacgatga

SEQ ID NO: 32113 - protein, 295 aa, Muscodor strobelii
  misc_feature: SGI Peptide ID NO. 571062
MRVDISFTVAIFATFVTAIPGPVFRRQNATSSRVTTGAHPLTMVPLSTLASTATPLIYGIPPSPSKIPGRPFSANNKEVEPCTETSDAPITSPPVASNTPTGAICTTITGDYPRSTVPGFCRPSMFINAPDLRPITASALDPGAAVPTPIYTATVTMGANTVPDKIQCCSYCADYFNCYAWQFVPSHMDDEPTDRLPGGFDPFRSGNCLIAYYVGNGTRDDITFDNASDRCPNGRLLNVLEGSNNRVQGTWNDGMYFNGWNQGACGDAGDTVFSAGEDIGFDWDSLCHHAGGHTR

SEQ ID NO: 32114 - DNA, 298 bp, Muscodor strobelii
  misc_feature: SGI EST ID NO. CUFF.75958.0
  misc_feature: Variant of the nucleotide sequence at SEQ ID NO 32112
acctatttcagacaatcacagagcttgaccaggtcgtcacttcctaggttatgctcctgtcaaatgcgaagctttaggtttcctcctaatcactgctcgctgacattcgaagtcattgtctagcgatctcccgagcatcgtattgccaagatgcgcgtcgacatcagtttcaccgtggcaatctttgctaccttcgtgacagctattcctggcccagtgttccgtcgccaaaatgctacatcttcgcgggtcacaactggagcccatcctctgacaatggttcctctgtcaactcttg

SEQ ID NO: 32115 - DNA, 1050 bp, Muscodor strobelii
  misc_feature: SGI cDNA ID NO. 571063
  misc_feature: Encodes the peptide sequence at SEQ ID NO 32116
atggacaggggaaaccggactcggagtgattatactgttgggatcctctgtgcgttacctaaagaactcatggcaatacgggccctcttcgacagaagacacgataacgtagatattcctcgggatgacagtaaccactacgccttaggcgagatctgccgtcatatggtagtcgctgcctgcctacctgctggtgaatatggcacgaactcagcggcacattctatctcgaatatgtatcgaagcttcccttctctgcgcctcggtttctgtctcttagtaggcattggcggtggcgcaccatcggaagagaacgatatccgtctcggcgatgtggttgtaagtcttccaacgggaaatcaccccggcgtcctgcaatacgatcgcggcaaggagaaagaaaacttgtcttttgagttgacggggtccttgcctccgccaccacgctgcctcatgagcgcaatcagttcactgcgatcggacccagacctccctcctgatcccctccgattttatctagaagaaatcgcttcccgtctccccaattaccgatatcccggacaggagcgcgatcaattattcaagacagtctgcgctcaatgccaaacgtcagaaccctgccccaccagcctgaatcacatggtgacgcgatctcctcgacttactgatcagcctcggattcattacggcctcattgcttcgggaaaccgcgttttgaaagactctaaagttcgagacacactggcacaaaagcacggcgtactatgttttgagatggaggcagccggggtagtcaacgccggactagattgtcttgtgattagaggcatatccgactatgcagatgcggcaaagaataaagagtggcaggagtacgcggctgcgtcggctgcagcatatgcaaaactcttgttggatgttgtgtcaagcaaaaatgcaattcggaccgagaatgagtacggctcgcgtctcccatcggtgaaacgcactgccagcgagctggatacgtatgaggattacgagggcccatcatggaagcgacggaggtaa

SEQ ID NO: 32116 - protein, 349 aa, Muscodor strobelii
  misc_feature: SGI Peptide ID NO. 571063
  misc_feature (11)..(305): NCBI GI: 256733332 Blast Desc: NECHADRAFT_20901 [Nectria haematococca mpVI 77-13-4]
  misc_feature (7)..(305): NCBI GI: 46120350 Blast Desc: FG04822.1 [Gibberella zeae PH-1]
  misc_feature (10)..(308): NCBI GI: 121704357 Blast Desc: Pfs domain protein [Aspergillus clavatus NRRL 1] gi|119398587|gb|EAW09016.1| Pfs domain protein [Aspergillus clavatus NRRL 1]
  misc_feature (3)..(307): NCBI GI: 169776830 Blast Desc: [Aspergillus oryzae RIB40] gi|83771617|dbj|BAE61748.1| protein product [Aspergillus oryzae]
  misc_feature (7)..(307): NCBI GI: 256719923 Blast Desc: NECHADRAFT_56707 [Nectria haematococca mpVI 77-13-4]
  misc_feature (7)..(308): NCBI GI: 238488815 Blast Desc: conserved [Aspergillus flavus NRRL3357] gi|220698033|gb|EED54373.1| conserved [Aspergillus flavus NRRL3357]
  misc_feature (10)..(305): NCBI GI: 115398856 Blast Desc: [Aspergillus terreus NIH2624] gi|114191900|gb|EAU33600.1| [Aspergillus terreus NIH2624]
  misc_feature (7)..(308): NCBI GI: 169762978 Blast Desc: [Aspergillus oryzae RIB40] gi|83770417|dbj|BAE60550.1| protein product [Aspergillus oryzae]
  misc_feature (10)..(305): NCBI GI: 70985797 Blast Desc: Pfs domain protein [Aspergillus fumigatus Af293] gi|66846033|gb|EAL86366.1| Pfs domain protein [Aspergillus fumigatus Af293]
  misc_feature (10)..(305): NCBI GI: 159128460 Blast Desc: Pfs domain protein [Aspergillus fumigatus A1163]
MDRGNRTRSDYTVGILCALPKELMAIRALFDRRHDNVDIPRDDSNHYALGEICRHMVVAACLPAGEYGTNSAAHSISNMYRSFPSLRLGFCLLVGIGGGAPSEENDIRLGDVVVSLPTGNHPGVLQYDRGKEKENLSFELTGSLPPPPRCLMSAISSLRSDPDLPPDPLRFYLEEIASRLPNYRYPGQERDQLFKTVCAQCQTSEPCPTSLNHMVTRSPRLTDQPRIHYGLIASGNRVLKDSKVRDTLAQKHGVLCFEMEAAGVVNAGLDCLVIRGISDYADAAKNKEWQEYAAASAAAYAKLLLDVVSSKNAIRTENEYGSRLPSVKRTASELDTYEDYEGPSWKRRR

SEQ ID NO: 32117 - DNA, 6017 bp, Muscodor strobelii
  misc_feature: SGI EST ID NO. CUFF.75976.0
  misc_feature: Variant of the nucleotide sequence at SEQ ID NO 32115
ctttcgtgagttgatttggtccaatcgcatgagcaggcatcacgacgtgggggctgcttggctacctccttgagcacagcttgctgcgcctccttactaattccgccaaatagccatcgagaagctgaccgcacttctcaatcatctgcatttttgttcggccccaacagcgtgcgctggagcttttgaattgatcttggctcaaagcctcttatgctatacttcagatatcgttgattgaaccagattattttgctttgaggcaggagaatatatggaagtcggtgttcgcctgcctacctgagtacggagctagttaggcttagcaggatcccagtctaatgacggctcgtttattcgacgagcggtcgcgggttctgtcgccatcgtgcgcccgagagttctagcgattagtttgccatttgatgcatcccccgccctcgctggccgaggcatctcgcccatatggcgcagttcgagatgtcctcacccgcgcgcgtagcgacgatggggttgaagatgcggctccgattgagcctctccagcatcacggaccgccgatacctctagtgaacgagccacagccacttccccaccaaggacgacgcagagctttgcttataggtattaactattttggccaacgcggccagcttagtggttgtatcaacgatgtgaaaaatatggcaacatatcttacggagcacttccactacaggcgggatgacatcgtccttctttgtgatgatatgatgcaggatacgagtcagccgacgaaacggaacatcattcgcgccatgcactggctagcgaaagatgcgcggccttgcgactcactattttttcactactctggacacagcggttcagttgggatggatgttggccaggaaaaagattttgaagacgtcattttcccagtcgacttccgacaagttggccacattaccgacgaggaaatgcacagaattatggtacaaccgttgcaaaagggcgtacgactgactgccatctttgactcagtccattcttcatcagccttggacctgccgtatatttactccacgcaaggtgtcctcaaggagtccgggatggccaatgaagctggtcagggccttcttcatgcagtatcatctgacggccaggatttgtctaccaaagaggcatcaaagtaccaaggtgactttgctctgttcgacccaccatatagaaaggaagagctccgcgatcgaccttcgaccaaggaaacgtcccctatagggagtaccgtgcttttcgaaagcaaacatgatctcattctgttcgtgtacttttcagttctatcattttgcattcgtagattaccccttcgctctcataacgtcttgtcaaaaggtattcataacggcatcccacataagtggtcgtgtgatcagtgcccacctgatatgttggacacagcgtggatagaaagatgcttatattgttgttgcaatcgaattgccatagttggctattcaatttgactgacgcaattgaacggatttacgtcaacctcaagactgcacttgatgtgctggcaatccagtgaactgtagaaatttgcaattatatctctgaccagatctaatagtcctcccctcaatcttgcacagacaagccctcaagaagcggccctgagcgccgatcgacctgcgtccactgcggctgcgcaggaagcccccacggactctgggtatgcgtccgccaccacgtataccaaggaaatgaggcaaatatccagtgaacatgagcagaatcaaagtgcacaggatcgtgaaggtgatgacggggatgcagcaacagtatactcagatacatcaagtttggcgtttcctggacaagaaaactatgtgctggagctagcggatgacctgtacgacaacgtcagcttttggaatcctgatatccatgccaaagaaaggattgcaaatattctcccagatctactcagagattttgccctcaaaatcgggaactgtgcagaaacacagatgcaccgggatgtcatggtctatgtgcatagaaatcggcagaaaattgcgaagctcttcgcagatatgtgttctgacggggcagaagatattccagagaatgatgtgccagacttagaaacgatgtctctagaggataaaataaaccaatggtttgcaaagtcggatgtcaacgaaattcgaccagtgagtcgggtctcgagtggcctggacctcgaagatgcagagcctctcgactctatctcagtaggctgtgattcggcatccgatgatgacgacccgtccccagttcgggacgaacatcgggatcataagatgttgacgcctaagattgctgcatatcgaaacttcgtcttgaacactgacgcataccaatggctacttgttggcttactcggggagttccgccttatgtcaactgagccaaacacaatccaagctataaggcagctaataatttcagctcttccgtctactcgcagggtcagtaggaaaaagccctcaggaactcaccgaacgaggttctatattgactggaaccccgatgctttctttgttcagcagcgatacacaaccaagccagctgacaccattgggggtgttatcaccatcacagggacttctcaagatgcgcaggccactacttgttcggaatacatgaagcagacctggccaacgacgggagagttaacgttaaagctagtccagctggttttggatggccgaccagaaagtcggaagcagtgctccttcccagatggatcagagcttcatgcctggacagagggatcgaaatttgttgttgaaattttaggagttacgtccgttgttgaggtcggagagcaattaagctggctcggggcagctcttcggccttctgctcgcgaaaagggcttgacctattgcacacctacgatttcacatgttagctctaacaattccacgccgcaaatcgacaatacggctccgctgccgcacactgttttcgagattgggttcacattcggagaggttgaaagtcctcctcaacgttctaacggtcaatgttggcatgacgctttcaagaacccagtcgtagtcacaggatacccaatccttcgaagagctgactccaacactggtcttgaggcgaacctcaatattttggctggactgactggaacacgactgcttgactacttcatggaacagttctttctcaaaggattctcttcgatgctagtgccgactacccgaaaaggcagtatcctctgttggcatctagtctataacaatgatggaagccgtatttcatatttggatcatcacgtccctagtaaagtattgaatattcacccaggcttagaaaatgtccgtcacgtgctcggatggagctcagaagttcgattgtacgctggctctgctttggctgcgtacgatgttggtcacgccggactaccccgagctcatgtgaattgtgcatttagcgacattcgtatgactgcaggacagttgattgccggcgggccttcataccacctcggagcgaaagatacaccggcctatctaactcgaaatggctacataccaagattgaaatggatttccaacaagcttgtcgtactatgggacgaggctgataagcgggggtggctcataaacggaacaagcgcacttttacatgtcgtgcgggcttccctggcacacgacagcagagacaaattcaagtctgcatttgttttcaaagacgaacacctgcaagaatcgtcgatgccgtttaccgctgacgcggcaaccgacgtcttgataaaccccgacaatatgagactcaaactctatcctgagaaagaaggatatctaaccctcgaaagtcgtatagatcatttttacaacattttagagaagctcattgactaccaagcctacgtcaccggagactgtggtacaaaaattgcaaatcaaccccggcgaaatcttgagggttgggacttcaccgacctagcaacgtaccatgatccattatacccacgtgtggcaacgattgaaccccgtggtaagggatgggtcgagcttacaagagctgtccaagcagttaccttggtcggtcgtggctttggtgaaatcattcggcccactgtcaattgtgagcactggtccgatttgccaaaggaccaatattatctcgcagcctgtatgtcagatttgaggccgatgataagagacaacaattaccataacgatagccagataagactaagcgagaacctaatatggcacacgcctaccaatatatacagctcatgtcgatgcagaggggcctttgagtccgatcattgcgaaccggtgcagactcttttcccttcatcgctgagcaacattttactccccaggagacatcatgtcccccaagagacaaatggcgctgtgatctttgggcataactcgacgtttcggtggatttgggaagacacaggtcagcctgttgaagaggagagaggcctttcgtcgaatgcattagataatgattcgttctacgatagtggagtcggtacaagtcttgtatcctcaaagcaaggcagctcgagaaccatttctcgtgtcggcactcaaatacatacctcaaggaggccggggtattatgatgtgacttcgtcagagacacgagccatcatggacaggggaaaccggactcggagtgattatactgttgggatcctctgtgcgttacctaaagaactcatggcaatacgggccctcttcgacagaagacacgataacgtagatattcctcgggatgacagtaaccactacgccttaggcgagatctgccgtcatatggtagtcgctgcctgcctacctgctggtgaatatggcacgaactcagcggcacattctatctcgaatatgtatcgaagcttcccttctctgcgcctcggtttctgtctcttagtaggcattggcggtggcgcaccatcggaagagaacgatatccgtctcggcgatgtggttgtaagtcttccaacgggaaatcaccccggcgtcctgcaatacgatcgcggcaaggagaaagaaaacttgtcttttgagttgacggggtccttgcctccgccaccacgctgcctcatgagcgcaatcagttcactgcgatcggacccagacctccctcctgatcccctccgattttatctagaagaaatcgcttcccgtctccccaattaccgatatcccggacaggagcgcgatcaattattcaagacagtctgcgctcaatgccaaacgtcagaaccctgccccaccagcctgaatcacatggtgacgcgatctcctcgacttactgatcagcctcggattcattacggcctcattgcttcgggaaaccgcgttttgaaagactctaaagttcgagacacactggcacaaaagcacggcgtactatgttttgagatggaggcagccggggtagtcaacgccggactagattgtcttgtgattagaggcatatccgactatgcagatgcggcaaagaataaagagtggcaggagtacgcggctgcgtcggctgcagcatatgcaaaactcttgttggatgttgtgtcaagcaaaaatgcaattcggaccgagaatgagtacggctcgcgtctcccatcggtgaaacgcactgccagcgagctggatacgtatgaggattacgagggcccatcatggaagcgacggaggtaactaaggcttgggcgtttggcgtttggcattgacgtgtgggactgtagatctatcttgttctcttaagcttcgagttaccaaatagttaaagatacccggccaacacacgagaaattcgaaggctgtttaaataccttcggcctctagtaatagcaacacggtgcctcacaagggcagttttctgggatatatcaatgtcattggatctatgtatgaagtctttatatctagaccactcaggtctcgtcaagcaacaaatagggcgctgttatttcaaagataagtcacggaaatgaagcgtacgag

SEQ ID NO: 32118 - DNA, 1752 bp, Muscodor strobelii
  misc_feature: SGI cDNA ID NO. 571064
  misc_feature: Encodes the peptide sequence at SEQ ID NO 32119
atgagtgcttcttacgacttcgttatcattggcggcgggacggctggcttaacactagccgcgcgactttccgaaagacccgacttctctattgctgtcgttgaagctggtagctactatcaaatcacaaacccatttgtctcgtcaacgccagcttgtgccggtgcattcacaggctcttcgccatatgatgtaaacccaaatgtcgactggggcttcatgacaactgctcgagccggaaccaatggtcgggcaatacattatgcaaggggcaaatgccttggaggaagttcgggaagaagctcaatgatgtaccaccgaccagatgaaggctcacttcaacgatgggctgaccttgtcggcgacgaatcctacaatttcaagaacatgcttccatattatcaaaagagttgcaagtttacggctcctgactctgcggttatctccgatggaacggtcagatatcagcctcaagcgtttgctcaagacggtggccctctacatgtctcgtacccacacgaccttcgaccgttttcgactcatcttgcgtcagcatttgaggagattggcataccgcgcgcggatgattttaacagtggctcattggtagggtcgcagttctgcactgtgacaattgatcccacaaccgcgcttcgttcctctgcccagactgctttccttgatacatgccaagcgcgcccaaacatcaaagtcttccgccagacactcgtcacgaagatcatttttgatgataacaaacaggccgtagccgtaaatattgacaccggtctacgtcttggagtagaacgagaggtcattctctgcgccggagcatttcagtcaccacaaatcctcatgctctcaggtatcggcccagctgaagctctcaaaaatctggatatccctgttgttgctgatcgccctggcgtgggacagaacatgtctgatcacgtcatgttcggaccgtcttatcgcgtcaacgttaagaccctaccatcagttttatcggacccaacacaagtgattcctgcggtgatgaactatttcatgaatgcgcgaggcccgctgacaagccaagcggccgactacatagcttgggaaaaggtgcctagagacatgatatccaaggaggcagccgaaaagctgtctgatctgccccaatcatggcctgatctggagtacattgctgtcgacgcatatttcggggactacgcatcgccattgctgcgtcagcctgaagcgggataccctacagacaagcatgactatgcgagtatcattgtatccccatgcgctcccaggtctcgtggatccgtaacattgaagtcttctaatattgccgatctgccgctaattgatcccaactggctggccgatcctatcgatgtcgaggtcgcgattgctggatacaagagagttcgggcggccttcgcctccgacacgatcaaggcaatccgcgctgacactaatgagtactttcccggacttgaggcagagacagatgatcagattttggaaactatacaacgctcagccgtgccggtatttcacgcatctaccacttgtcgcatgggacgcagagatgatcccgacgcagtagtagatgctaatgcgtttgtgattggtgtatctagactcagggttgtagatgcgagttccttcgcgctgcttcctcctggtcatccgcagagtacggtatatgcatttgcagagaagatctcagatcagatcaaagcacttcatgagaaatag

SEQ ID NO: 32119 - protein, 583 aa, Muscodor strobelii
  misc_feature: SGI Peptide ID NO. 571064
  misc_feature (6)..(381): Pfam Id: PF01266 Pfam Desc: FAD dependent oxidoreductase
  misc_feature (426)..(573): Pfam Id: PF05199 Pfam Desc: GMC oxidoreductase
  misc_feature (5)..(332): Pfam Id: PF00732 Pfam Desc: GMC oxidoreductase
  misc_feature (6)..(37): Pfam Id: PF01266 Pfam Desc: FAD dependent oxidoreductase
  misc_feature (6)..(39): Pfam Id: PF00890 Pfam Desc: FAD binding domain
  misc_feature (6)..(37): Pfam Id: PF05834 Pfam Desc: Lycopene cyclase protein
  misc_feature (6)..(36): Pfam Id: PF07992 Pfam Desc: Pyridine nucleotide-disulphide oxidoreductase
  misc_feature (2)..(579): NCBI GI: 39940370 Blast Desc: MGG_05055 [Magnaporthe grisea 70-15] gi|145010697|gb|EDJ95353.1| MGG_05055 [Magnaporthe grisea 70-15]
  misc_feature (1)..(577): NCBI GI: 171690948 Blast Desc: protein product [Podospora anserina] gi|170945422|emb|CAP71534.1| protein product [Podospora anserina]
  misc_feature (3)..(578): NCBI GI: 156040363 Blast Desc: SS1G_12198 [Sclerotinia sclerotiorum 1980] gi|154696254|gb|EDN95992.1| SS1G_12198 [Sclerotinia sclerotiorum 1980]
  misc_feature (3)..(578): NCBI GI: 154320634 Blast Desc: BC1G_01789 [Botryotinia fuckeliana B05.10] gi|150853478|gb|EDN28670.1| BC1G_01789 [Botryotinia fuckeliana B05.10]
  misc_feature (2)..(577): NCBI GI: 121705126 Blast Desc: GMC oxidoreductase, [Aspergillus clavatus NRRL 1] gi|119398972|gb|EAW09400.1| GMC oxidoreductase, [Aspergillus clavatus NRRL 1]
  misc_feature (4)..(577): NCBI GI: 121710942 Blast Desc: glucose-methanol-choline (gmc) oxidoreductase [Aspergillus clavatus NRRL 1] gi|119401237|gb|EAW11661.1| glucose-methanol-choline (gmc) oxidoreductase [Aspergillus NRRL
  misc_feature (3)..(577): NCBI GI: 238484763 Blast Desc: GMC oxidoreductase, [Aspergillus flavus NRRL3357] gi|220701670|gb|EED58008.1| GMC oxidoreductase, [Aspergillus flavus NRRL3357]
  misc_feature (3)..(577): NCBI GI: 169767846 Blast Desc: [Aspergillus oryzae RIB40] gi|83766249|dbj|BAE56392.1| protein product [Aspergillus oryzae]
  misc_feature (3)..(577): NCBI GI: 145254257 Blast Desc: An18g01120 [Aspergillus niger] gi|134084156|emb|CAK47189.1| protein product [Aspergillus niger]
  misc_feature (4)..(577): NCBI GI: 238845985 Blast Desc: glucose-methanol-choline oxidoreductase [Microsporum canis CBS 113480]
  misc_feature (4)..(579): SWISSPROT Homolog: EC 1.1.99.1 Choline dehydrogenase
MSASYDFVIIGGGTAGLTLAARLSERPDFSIAVVEAGSYYQITNPFVSSTPACAGAFTGSSPYDVNPNVDWGFMTTARAGTNGRAIHYARGKCLGGSSGRSSMMYHRPDEGSLQRWADLVGDESYNFKNMLPYYQKSCKFTAPDSAVISDGTVRYQPQAFAQDGGPLHVSYPHDLRPFSTHLASAFEEIGIPRADDFNSGSLVGSQFCTVTIDPTTALRSSAQTAFLDTCQARPNIKVFRQTLVTKIIFDDNKQAVAVNIDTGLRLGVEREVILCAGAFQSPQILMLSGIGPAEALKNLDIPVVADRPGVGQNMSDHVMFGPSYRVNVKTLPSVLSDPTQVIPAVMNYFMNARGPLTSQAADYIAWEKVPRDMISKEAAEKLSDLPQSWPDLEYIAVDAYFGDYASPLLRQPEAGYPTDKHDYASIIVSPCAPRSRGSVTLKSSNIADLPLIDPNWLADPIDVEVAIAGYKRVRAAFASDTIKAIRADTNEYFPGLEAETDDQILETIQRSAVPVFHASTTCRMGRRDDPDAVVDANAFVIGVSRLRVVDASSFALLPPGHPQSTVYAFAEKISDQIKALHEK

SEQ ID NO: 32120 - DNA, 939 bp, Muscodor strobelii
  misc_feature: SGI cDNA ID NO. 571065
  misc_feature: Encodes the peptide sequence at SEQ ID NO 32121
atgttgggcgccaccgtagacggtattgctgatagatcaaggccgctccagagcttcgtgatagccatcgcggtcctcagcgtcacgtttgtttcacttcgattttggtcccgaagccttgcctggcgagatgcgactgtaaagaacagtcgcctcttctggtgggatgactggtttgcgctaattgccgcgctacttctgctagtccaacttgcactggaactcgtgatgattcatagtgctggatttggtcagcatctctcaacgctatcagaggagcagttcagattgttcttcaagctgctgtacatcggtaccttcttttttttcacggccgtatcgttcaccaagttctctgttctcttctttcttacccgcctgttcccgcgacatgccaattctccgtgttataactacagcctcgggacaatctacggtctcaacgtcttctggctcatcgggatcattttcgccaccgtctttctttgcaatccagtggaaaagaactgggatccgacaagagtaggcaagtgcgggacggaatacaatctttaccttggaaatgcagtccccagtgccatcatcgacctggctattcttgtactgcctttgcccaagctgtgggccctccggatcaatacgaagcgaaagctagggcttgccatcatctttgttcttggttatagcgtcattgtcgtatccattgggcggttcatccaagtcgcccggactggagaggggttgaacaaagatttcacatgggcagcgatacctttgttcttttggatatcagctgagccgggcatcagtgttatctgtgcatgcctccctgccttgcttcccctcggtcgggagttggtcaaacgttatcacttcgtacgagggggccagagagatgtcaccaagcagggcattcacgagcaatacgcccccctctga

SEQ ID NO: 32121 - protein, 312 aa, Muscodor strobelii
  misc_feature: SGI Peptide ID NO. 571065
  misc_feature (82)..(290): NCBI GI: 145250481 Blast Desc: An15g02150 [Aspergillus niger] gi|134082274|emb|CAK42318.1| protein product [Aspergillus niger]
  misc_feature (6)..(285): NCBI GI: 67537778 Blast Desc: AN5059.2 [Aspergillus nidulans FGSC A4] gi|40740863|gb|EAA60053.1| AN5059.2 [Aspergillus nidulans FGSC A4] gi|259482061|tpe|CBF76179.1| TPA: conserved [Aspergillus FGSC
  misc_feature (97)..(290): NCBI GI: 242821088 Blast Desc: conserved [Talaromyces stipitatus ATCC 10500] gi|218712531|gb|EED11956.1| conserved [Talaromyces stipitatus ATCC 10500]
  misc_feature (7)..(306): NCBI GI: 145228617 Blast Desc: An01g01780 [Aspergillus niger] gi|134054708|emb|CAK43549.1| protein product [Aspergillus niger]
  misc_feature (7)..(288): NCBI GI: 238497123 Blast Desc: conserved [Aspergillus flavus NRRL3357] gi|220694677|gb|EED51021.1| conserved [Aspergillus flavus NRRL3357]
  misc_feature (7)..(288): NCBI GI: 169774355 Blast Desc: [Aspergillus oryzae RIB40] gi|83769508|dbj|BAE59643.1| protein product [Aspergillus oryzae]
  misc_feature (26)..(310): NCBI GI: 146323527 Blast Desc: integral membrane protein [Aspergillus fumigatus Af293] gi|129558246|gb|EAL92076.2| integral membrane protein, [Aspergillus fumigatus Af293]
  misc_feature (2)..(290): NCBI GI: 256720355 Blast Desc: NECHADRAFT_56055 [Nectria haematococca mpVI 77-13-4]
  misc_feature (82)..(310): NCBI GI: 242797784 Blast Desc: conserved [Talaromyces stipitatus ATCC 10500] gi|242797794|ref|XP_002483035.1| conserved [Talaromyces stipitatus ATCC 10500] gi|218716378|gb|EED15799.1| conserved ATCC
  misc_feature (82)..(310): NCBI GI: 242797789 Blast Desc: conserved [Talaromyces stipitatus ATCC 10500] gi|218716379|gb|EED15800.1| conserved [Talaromyces stipitatus ATCC 10500]
MLGATVDGIADRSRPLQSFVIAIAVLSVTFVSLRFWSRSLAWRDATVKNSRLFWWDDWFALIAALLLLVQLALELVMIHSAGFGQHLSTLSEEQFRLFFKLLYIGTFFFFTAVSFTKFSVLFFLTRLFPRHANSPCYNYSLGTIYGLNVFWLIGIIFATVFLCNPVEKNWDPTRVGKCGTEYNLYLGNAVPSAIIDLAILVLPLPKLWALRINTKRKLGLAIIFVLGYSVIVVSIGRFIQVARTGEGLNKDFTWAAIPLFFWISAEPGISVICACLPALLPLGRELVKRYHFVRGGQRDVTKQGIHEQYAPL

SEQ ID NO: 32122 - DNA, 871 bp, Muscodor strobelii
  misc_feature: SGI EST ID NO. CUFF.75986.0
  misc_feature: Variant of the nucleotide sequence at SEQ ID NO 32120
ggcaagtgcgggacggaatacaatctttaccttggaaatgcagtccccagtgccatcatcgacctggctattcttgtactgcctttgcccaagctgtgggccctccggatcaatacgaagcgaaagctagggcttgccatcatctttgttcttggttatagcgtcattgtcgtatccattgggcggttcatccaagtcgcccggactggagaggggttgaacaaagatttcacatgggcagcgatacctttgttcttttggatatcagctgagccgggcatcagtgttatctgtgcatgcctccctgccttgcttcccctcggtcgggagttggtcaaacgttatcacttcgtacgagggggccagagagatgtcaccaagcagggcagtaacatctcttcttgtgtcggagcccatgatcaagtggaagagatccatctttcgcgctgcgaggacgggccagcggatacgaagcttacatcacagatgtatggaataagggataaactgtcattatctccgaccgcgacgagaagcacttactatgctagagtaacacatgacgtcccgaaacagttcacgagcaatacgcccccctctgattctatcaattcgatcaaggtggagagaaatattcaggtgaattcttggagatattcagaattatagcttggttttattcacgtcggaagggagaaaaatccggagaggggatgtctccgatatacatcaccaaagctggaaatttcgtgcagttcgccttggtactacacaggatgattgatgatggttgctctttcatagcgaagcaatgcgtatcctatgctgtatcatgtctgagccagtttgcatcgcgaaacatctaaccgag

SEQ ID NO: 32123 - DNA, 7326 bp, Muscodor strobelii
  misc_feature: SGI cDNA ID NO. 571066
  misc_feature: Encodes the peptide sequence at SEQ ID NO 32124
atgtccatgcttattatggaaagtcttggactagataccacaagagaaatgtcgagagatgaaagagttggatgtcaacgaatcgtgttagattcagagtatgccgcgacatcgttgtccgaatcccaggagaagcccctaagtcaacagcttgaaccgatcgcggtagtcgggatgggatgtcgtctaccgggggatatcaactcgccctcagacctgtggtctatgatgcttgagcaacgatcaggtcagacggccaaggtgcccaagtcaagattcaatgtcgatgcgtacttacacgataacaacgatcgccctgggagcttcaacgttcccggaggatatttcatcaatgagacgccacatgattttgactctgcgttctttggcatcacgcctgtcgaagccatgtggatggacccccaacagcgcaaaatgctcgaggtagtctacgaggcttttgagtccgccggcgccacacttgaacacctctcgggctccgatacagcctgttttatggccactttcacttccgatttccagcaaatggctttcaaggagccttcttttcggcacagtgtcgctgctaccggcgtagacccaggtatcctaagcagcaggatcagtcatactttcaatcttcgcggacccagtgtcgtcatgaacacagcatgctcatcgtctatgtacgccattcatcacgcatgtaatgcattacgtgcgcaggagtgcactgctgccattgtgggcggaagtaacatgatcctcactgttgatcaacatatgaacacggcgaaattgggtgtcctatcgccttcctcaacctgtcagacgttcaacagatatgcgaatggctacggccgtgctgagggattcggcgccgtgtatctcaagcgtcttaacgacgctgttcgagacgtcgacccgattcgtggtgttattcgctctagtgcagtcaacaacaacggcagagctccagcggttgggatcacatatccagggttcgacggacagagagccgtgatcagagacgcttatcgccggtgtggtgacctggatccacggcttgtgggctacatcgagtgtcatggtactggcacagcgattggcgaccccctagaagtccatgccatctctgacagcctcaacgctacccgaaagctggaaacagatggacgactacttatcggtggcgtgaagcctaacatcggacatagtgaagcagcaagtggcatcgcagcgatgataaaggctattttggcggtagaacgaggtattataccgccgacgcgtggagtcacggacttgaacccaaacatcgactgggagggatggatggtcgaggtcccgattcacgcacgcaaatttcctcagcacctccctatcgcccgtgttggcgtcaactcttttggatacggaggttctaacgctcatttagtcgtagaaagctcacattcacttcttgcctcgcctcaatcttatgtccacagtagactgacgagatacgaaaatccgaaaattctggataacgagacaaccaaatatcggcctcatctgctcatattctctgcccgcgatgaccaggccttaatccgtaatataaaggcccacggaaaagtagccggtaattatgaaatactagatctagcatacactctcgcaaatcggcgatcccatttcacttatcgagcaatgaccgttgccacaccttcaagtcttgacttgcatttctcagaccctatgaatttttttcatttttctgagaagaaaagggcgaccagcgatctatgttttgcgttcacaggccagggagcacagtgggccggaatgggaatgagcctgatgacttactatccaacattcctgagagcgatcaggaacctggatatggtcctcgaacatctcgaacacaaacctagctggactttggaaaacatcctgtgccagcaagattgcggcatgccaatccatgagccagaattttcacaacccttgactatagctgtccagataggcattatacagttgctgcgacaatggggcattaagcaagctgtcacaattggacactcgtctggtgagattgcagctgcatatgcctccgggtatctatccgaggccgaagctatcatcattgcttattatcggggttattgtctccgagacttcaagaccgacggagccatgatagcggtcggattaggggaggaggccgtctctgagtatattgctgcatacaatgacaaagaggttgttgtagcctgtgtcaactctcctgggagcgtcacgctgagtggacgggccgacgtgcttcaccagatacaagagaaactcatcacgaaaaacgtctttgttcgggttgtcaaaactaacggcgttccttatcattcgttccacatgactcctattgcggcgatgtaccaggtaataattgtccgagaattcgcccgtatcacagacaaaagaatgcgcaatgagaaagccaaaatggtttcctcagtgacaaatgaaattctctcggaggatgccatacttgacgcatcctactggtgcaataacttgttgaggccagtactcttcagccatgcagtcaagactattattatgagtcctcaactccccagtgtcaacacaatcatcgaaatcgggccacatggggcgcttgccggccccgtacagcaaattttggcctcgctcaagtctaaagatgtcatttacttaccgaccctcgtccgaaatgagcaatgcgcaagctcgttgttgtatttagcgggaagcttatatctgcagaaccaaatgcttgacctggatcgcataacttgcgtagaaagcaccaattccactggagatatcaccagtcaaagaggcaatctgatagttgacttgccaggatatcaatgggacagatcaaaggtcctctgggccgagtctcggagcagccgcgagtccagaactctgcgttatcctcggcatgacttgcttggagagttggtccccggtagctcgctttctgagccaacatggcgcaacgtcctccgcctcaaggaccttccttggttacacgaccacgtgctaggtggggaggctattttcccggcggcaggctacctttgcatggcgattgaagccattacacaaacagtcgaatcttcgtcgtccagctcaactccgccaatcgagtcgttgactatccgtgatgttgtaatccggcaggccttggtgatgcctgaagacgaaagcgggcttgagatttttcttaatctgcgcatgtcgcatcagtcagtgaccgtaaacgagaaaagaaatctttaccatgaattcaacatctcgtccatttcgccggatggcgtgcggcgacaccatatgacaggctccatcgccaccaaccaacgtcgtcacaggtcacccgcgagctcaaagccaaatctagcacagcgtgcaacgggtaacacgtggtaccacgcccttaacgaagtcggatttgcctatgggccaaagttccgtggccttgagaccatatttttcgatgggaaggatcccgtagcgtgggccaacatgcgcgtgaagatttcagtagacgccggtaaaggcgaatcacgctacgtgctgcatcctgtgacaatcgacgcatgtatgcagctcatgatcatcgccatctgggcagggcgaacggactcaatggcgtttggcattgtccccgtgcgcgctgatgaaatcacaatctggacgccgacggccgttcaggtgacgtctcattctggttcgtgtatgaacaatgacgagttggcaacagcattcgcatggcaaagctggcgtggaaatcgccagtttgaaacacacggccagcttattggagccgacgggaatgtactcatggagatatcgggccttcgagcatcggcctacgaagctgccattgctcaacgtcaacttgagggacaaaacgctgagccccagccttactctaagatagaatacaaacctgacgtagatctactgaatcactatttaatttcggacctggacttggtggagtatttgagactcctggagttcaagagaccgggatataaagttctggacattggtgccacgcaatcacacctgcttccgagtacgctgccgaccatacatctcactgcaacaacaagcaatgtcgaagccgtggatagtatactaccatatatgacttccaagaactttcaagtcagacatttcatctgggggccgtctcaagaggacgaagacatcgagtttgaggtctatgatattgtgatatcagaactgccctcaatagccagctttccgcgcttgcgaaaactcctagcgcgtgaaggatgtgcattgattagacccattcgtacgctgtctcgtggggagatggaagctgagggcttctcacgcatcgatgttaatcttagcgacgatttcatagcaatcgttcctgcggagcaaaagacagtctatgcctcagccaaatatgctgacgacaacatctctatcaaagtccagctattttgtcgtaatgttgctaccacaagcacgtctttcatttctaaactggttagttcctataaggaagttggcatacatgtggatgtcttcgtaattggagataaggtaacgattggtcgcaatattatcatggggatcgatataaacgacaactttctatcgacaataacggagagtgagtttcactggcttcaagacgttgttgaagcaggtaataatatccagtggatcacattctccgtcctctcatcctctagtaatgaacaaacatcgccagagcacggcatgacaaggggcttcttacgcagtcttcgcgccgaaaatccatctatgaagattgttctcgttgagttcatatcccggggcgctctcaatgatacggctccaaaacgagactcacacgctatcatcgcctcgctagcccacatcctgttcacgcagaaagaagaggatctggagacagagtaccaaatcttcagtaatggtcgagttttgattaacaggttaatgcctaatactcaactgaatcatgcatacaaccatgatcacgagcaaagggatgccatggtcctcgcccctgaagttaggctgtcagggaggcttaggtcggggcaagtactcttcgagcacgtcagtcccgagaccattgtaccacccagccctgacgagatcgaatttcgagtcatggcaaccagtctagaatattatacggtcactggcatgtccaagcataatcccctgcctatctttctcctcgggtcgtcggggatcgtcactgccgtgggccccgaaatagctgacatttgccctggcgaccgcgtcttagccctcacgccgtccagtgcagtttccacgcatcaagtcgcaaaggccgcactagtgcagaagctgcgagataatgaagcattcacaacgcttgctgttctcccgctgttctatcttgccgcaatctacgggctcgagagtatagcacaagtacagcccggcgaatcagttttagtgttcgccgaggttggacccatctcagaggccgttattgaagtctctcgggcgctaggagcacgtccgtatgttgccatcgctccgagttcgcttgcgcaggtgtttcggcagcgatttgagctcgatgaagaccagatcgtggatcccgaaacacatgccatcacacggaaactagacatcgaaattgttttttcatcgaatgcagttgaccctaccatttccaacaatgcttggaggtatatggcaaccggctcacgcttcgtgaactacatccctatagacaacgaggaatctaccagcctcagtctcgacacgatgcctattttacgtggtgcgagctacaggatgctcaggatgtcgactttatataatgctgagtccaaaaagcaatcgctcctcatgagcggactcctagagcggatcatcgatctataccgtcaggggttgctttcgcccccacgacatacaatccggaacctcgcagatgtgaatgaagtcatcacggccacaaacactaatagcacgatcagcagcaagaatatcgtcctgtcccacgaagaaaataggataaataacgaagggcctcaaattgtgaacgtgcttcgttctcgtcccaccatacggttctctaccaaggcaacatacctccttgttgggtgcctgggcggcatcggccggagtctgagttcatggatgcagagccgaggtgcgcaaagtttcattttcttgtcacgcaccggcccgaacacttctcccgaagccgcacaaataattatggacctacggacacgaggtgcaaatgtcaaatttgtcgcgggggatgtaagtgcgccgagtgtcgttcgaaaacttgttatgtcaattccgtcagaccagccccttcgaggagttgtaaacgccgcgatggttttacgggataaatttttccatgccatgtcatacaccagttggcttgaagcgatcaaaccaaaagttgaaggtagtcgcattctctacgaggaaacaaaagatctgccacttgacttcttcctcatgacaagttccacttcgggtatgctgggcaatccaggtcagagcaactacgcggctgcaaacacatatatggatcagttagctcgtctgggccgactagaggggaggccgacttgctccatcgtgctaccaatggtgtcaggtgtaggcgttgtatcgcggaacgcggaattagaggaaacgcttaagcgatctggcttgtatggcatcgaagacaatgctttgcttgatgtttttgaggtcgcaattctgtctctacaagcctggaaggacaggggtcttgtagatggtgacaaagatggcatggatcacatcatagccggacttgatccgacactgttacgcagggccaagcagcagagggcaaatcccgaaaataattcgtactgggaactggatgcgcgcttgtcgctcatcaatcctactacgtcagacatcgatgtagggcctcgggggcatcggagaacggattcagtcctagatcagataaaatcggcgcagtcgtacggcggcgctatggcactagtgaagacacgcttctgtgccaaactctcgagcatcctgctcttggacatcggcgacattgggttggaggagacggggagctcaatatcaagctatggagtcaacagcatgatcgcagcagagctgagaaactggatctttcaggagctgggactcgatatcccgttccagcaattagcggcccccaacttgagcatcactaagttcgcgcaacttgtctgcgctcaccacggacttgttgcggacagatga

SEQ ID NO: 32124 - protein, 2441 aa, Muscodor strobelii
  misc_feature: SGI Peptide ID NO. 571066
  misc_feature (597)..(934): Pfam Id: PF00698 Pfam Desc: Acyl transferase domain
  misc_feature (2052)..(2219): Pfam Id: PF00106 Pfam Desc: short chain dehydrogenase
  misc_feature (52)..(303): Pfam Id: PF00109 Pfam Desc: Beta-ketoacyl synthase, N-terminal domain
  misc_feature (311)..(434): Pfam Id: PF02801 Pfam Desc: Beta-ketoacyl synthase, C-terminal domain
  misc_feature (2052)..(2232): Pfam Id: PF08659 Pfam Desc: KR domain
  misc_feature (659)..(804): Pfam Id: PF00698 Pfam Desc: Acyl transferase domain
  misc_feature (597)..(633): Pfam Id: PF00698 Pfam Desc: Acyl transferase domain
  misc_feature (217)..(251): Pfam Id: PF00108 Pfam Desc: Thiolase, N-terminal domain
  misc_feature (20)..(2441): NCBI GI: 269996426 Blast Desc: polyketide synthase [Alternaria brassicicola]
  misc_feature (28)..(2438): NCBI GI: 242823008 Blast Desc: polyketide synthase, [Talaromyces stipitatus ATCC 10500] gi|218712925|gb|EED12350.1| polyketide synthase, [Talaromyces stipitatus ATCC 10500]
  misc_feature (28)..(2438): NCBI GI: 242793230 Blast Desc: polyketide synthase, [Talaromyces stipitatus ATCC 10500] gi|218718708|gb|EED18128.1| polyketide synthase, [Talaromyces stipitatus ATCC 10500]
  misc_feature (28)..(2437): NCBI GI: 255953389 Blast Desc: Pc21g03990 [Penicillium chrysogenum Wisconsin 54-1255] gi|211589158|emb|CAP95296.1| Pc21g03990 [Penicillium chrysogenum Wisconsin 54-1255]
  misc_feature (51)..(2438): NCBI GI: 242783828 Blast Desc: polyketide synthase, [Talaromyces stipitatus ATCC 10500] gi|218720411|gb|EED19830.1| polyketide synthase, [Talaromyces stipitatus ATCC 10500]
  misc_feature (51)..(2439): NCBI GI: 119483506 Blast Desc: polyketide synthase, [Neosartorya fischeri NRRL 181] gi|119409812|gb|EAW19759.1| polyketide synthase, [Neosartorya fischeri NRRL 181]
  misc_feature (20)..(1805): NCBI GI: 258575337 Blast Desc: UREG_01366 [Uncinocarpus reesii 1704] gi|237902116|gb|EEP76517.1| UREG_01366 [Uncinocarpus reesii 1704]
  misc_feature (44)..(2438): NCBI GI: 212545621 Blast Desc: polyketide synthase, [Penicillium marneffei ATCC 18224] gi|210064484|gb|EEA18579.1| polyketide synthase, [Penicillium marneffei ATCC 18224]
  misc_feature (59)..(2438): NCBI GI: 115387133 Blast Desc: ATEG_01894 [Aspergillus terreus NIH2624] gi|114195156|gb|EAU36856.1| ATEG_01894 [Aspergillus terreus NIH2624]
  misc_feature (28)..(1378): NCBI GI: 240110610 Blast Desc: polyketide synthase, [Coccidioides posadasii C735 delta SOWgp]
  misc_feature (52)..(1254): SWISSPROT Homolog: EC 2.3.1.161 Lovastatin nonaketide synthase
  misc_feature: Useful for fungicidal and/or biocontrol applications
MSMLIMESLGLDTTREMSRDERVGCQRIVLDSEYAATSLSESQEKPLSQQLEPIAVVGMGCRLPGDINSPSDLWSMMLEQRSGQTAKVPKSRFNVDAYLHDNNDRPGSFNVPGGYFINETPHDFDSAFFGITPVEAMWMDPQQRKMLEVVYEAFESAGATLEHLSGSDTACFMATFTSDFQQMAFKEPSFRHSVAATGVDPGILSSRISHTFNLRGPSVVMNTACSSSMYAIHHACNALRAQECTAAIVGGSNMILTVDQHMNTAKLGVLSPSSTCQTFNRYANGYGRAEGFGAVYLKRLNDAVRDVDPIRGVIRSSAVNNNGRAPAVGITYPGFDGQRAVIRDAYRRCGDLDPRLVGYIECHGTGTAIGDPLEVHAISDSLNATRKLETDGRLLIGGVKPNIGHSEAASGIAAMIKAILAVERGIIPPTRGVTDLNPNIDWEGWMVEVPIHARKFPQHLPIARVGVNSFGYGGSNAHLVVESSHSLLASPQSYVHSRLTRYENPKILDNETTKYRPHLLIFSARDDQALIRNIKAHGKVAGNYEILDLAYTLANRRSHFTYRAMTVATPSSLDLHFSDPMNFFHFSEKKRATSDLCFAFTGQGAQWAGMGMSLMTYYPTFLRAIRNLDMVLEHLEHKPSWTLENILCQQDCGMPIHEPEFSQPLTIAVQIGIIQLLRQWGIKQAVTIGHSSGEIAAAYASGYLSEAEAIIIAYYRGYCLRDFKTDGAMIAVGLGEEAVSEYIAAYNDKEVVVACVNSPGSVTLSGRADVLHQIQEKLITKNVFVRVVKTNGVPYHSFHMTPIAAMYQVIIVREFARITDKRMRNEKAKMVSSVTNEILSEDAILDASYWCNNLLRPVLFSHAVKTIIMSPQLPSVNTIIEIGPHGALAGPVQQILASLKSKDVIYLPTLVRNEQCASSLLYLAGSLYLQNQMLDLDRITCVESTNSTGDITSQRGNLIVDLPGYQWDRSKVLWAESRSSRESRTLRYPRHDLLGELVPGSSLSEPTWRNVLRLKDLPWLHDHVLGGEAIFPAAGYLCMAIEAITQTVESSSSSSTPPIESLTIRDVVIRQALVMPEDESGLEIFLNLRMSHQSVTVNEKRNLYHEFNISSISPDGVRRHHMTGSIATNQRRHRSPASSKPNLAQRATGNTWYHALNEVGFAYGPKFRGLETIFFDGKDPVAWANMRVKISVDAGKGESRYVLHPVTIDACMQLMIIAIWAGRTDSMAFGIVPVRADEITIWTPTAVQVTSHSGSCMNNDELATAFAWQSWRGNRQFETHGQLIGADGNVLMEISGLRASAYEAAIAQRQLEGQNAEPQPYSKIEYKPDVDLLNHYLISDLDLVEYLRLLEFKRPGYKVLDIGATQSHLLPSTLPTIHLTATTSNVEAVDSILPYMTSKNFQVRHFIWGPSQEDEDIEFEVYDIVISELPSIASFPRLRKLLAREGCALIRPIRTLSRGEMEAEGFSRIDVNLSDDFIAIVPAEQKTVYASAKYADDNISIKVQLFCRNVATTSTSFISKLVSSYKEVGIHVDVFVIGDKVTIGRNIIMGIDINDNFLSTITESEFHWLQDVVEAGNNIQWITFSVLSSSSNEQTSPEHGMTRGFLRSLRAENPSMKIVLVEFISRGALNDTAPKRDSHAIIASLAHILFTQKEEDLETEYQIFSNGRVLINRLMPNTQLNHAYNHDHEQRDAMVLAPEVRLSGRLRSGQVLFEHVSPETIVPPSPDEIEFRVMATSLEYYTVTGMSKHNPLPIFLLGSSGIVTAVGPEIADICPGDRVLALTPSSAVSTHQVAKAALVQKLRDNEAFTTLAVLPLFYLAAIYGLESIAQVQPGESVLVFAEVGPISEAVIEVSRALGARPYVAIAPSSLAQVFRQRFELDEDQIVDPETHAITRKLDIEIVFSSNAVDPTISNNAWRYMATGSRFVNYIPIDNEESTSLSLDTMPILRGASYRMLRMSTLYNAESKKQSLLMSGLLERIIDLYRQGLLSPPRHTIRNLADVNEVITATNTNSTISSKNIVLSHEENRINNEGPQIVNVLRSRPTIRFSTKATYLLVGCLGGIGRSLSSWMQSRGAQSFIFLSRTGPNTSPEAAQIIMDLRTRGANVKFVAGDVSAPSVVRKLVMSIPSDQPLRGVVNAAMVLRDKFFHAMSYTSWLEAIKPKVEGSRILYEETKDLPLDFFLMTSSTSGMLGNPGQSNYAAANTYMDQLARLGRLEGRPTCSIVLPMVSGVGVVSRNAELEETLKRSGLYGIEDNALLDVFEVAILSLQAWKDRGLVDGDKDGMDHIIAGLDPTLLRRAKQQRANPENNSYWELDARLSLINPTTSDIDVGPRGHRRTDSVLDQIKSAQSYGGAMALVKTRFCAKLSSILLLDIGDIGLEETGSSISSYGVNSMIAAELRNWIFQELGLDIPFQQLAAPNLSITKFAQLVCAHHGLVADR

SEQ ID NO: 32125 - DNA, 1044 bp, Muscodor strobelii
  misc_feature: SGI cDNA ID NO. 571067
  misc_feature: Encodes the peptide sequence at SEQ ID NO 32126
atggtaacagagcgactgcacagacttttcccattcccatcagagctgtatcgcaaacgtaagaagtccgaccaagctcagaagagcgccggcaaacgaaaacagaagaagcccgagaaggtaccgaaacccgtaggctacgtcggcgcggatggacaattctattgcacacgcgacggttgtacaggtcaccaccagaacactccgataggccaccgtaatcactggagccatgtacatgaccccaagagcgccgcaggcctcaagagggccgagaaacaaaggcagttggcgctgcgaaactctgctcctgattctctccaggcgtccatgcaccttgctggcgctgcctctgcctctgtctcggctcctgtcccggcccctgaccctttcgaggactacttgcccttgcccttgccccggctgcctgctgttgctagtcagttcggaatccctttcgagctccgggatcatgtggcgtctgtctccttacctcagcagtacggagaaccgcagcccgctggccagcaatacgggcttccgcaccagatgaataggccggcagatgcattcgcacatcatccggtcaatagccatatacctatgcagccgaacaaccatatgttcatgccgcctcccccgtcgcctcacatgccgccgtttccgccccagaatctggcctacgaagagtcgatgccgctggacccccgactgatgcccgagacgagcgttccgtccgctactcgattcggcccgggtgtgcgcaatgaagttcgccgcgttcagcataatcctcccccgagctcccatcgctctgctggtatgggaagcgaccatcagcgtcaacttcagcatccagacccactcgctcctcctccattcatgtggtcgtcagacatgggagactccggcttccagcagactatgggtccgaatgctcattccgttgttgatccgggaacgaacgaacgtgagcagcgacagcatcagctgtcattcctggactatgaggacgagcaggccaagaaggattcgggccattaa

SEQ ID NO: 32126 - protein, 347 aa, Muscodor strobelii
  misc_feature: SGI Peptide ID NO. 571067
MVTERLHRLFPFPSELYRKRKKSDQAQKSAGKRKQKKPEKVPKPVGYVGADGQFYCTRDGCTGHHQNTPIGHRNHWSHVHDPKSAAGLKRAEKQRQLALRNSAPDSLQASMHLAGAASASVSAPVPAPDPFEDYLPLPLPRLPAVASQFGIPFELRDHVASVSLPQQYGEPQPAGQQYGLPHQMNRPADAFAHHPVNSHIPMQPNNHMFMPPPPSPHMPPFPPQNLAYEESMPLDPRLMPETSVPSATRFGPGVRNEVRRVQHNPPPSSHRSAGMGSDHQRQLQHPDPLAPPPFMWSSDMGDSGFQQTMGPNAHSVVDPGTNEREQRQHQLSFLDYEDEQAKKDSGH

SEQ ID NO: 32127 - DNA, 906 bp, Muscodor strobelii
  misc_feature: SGI cDNA ID NO. 571068
  misc_feature: Elevated expression when VOC is produced
  misc_feature: Encodes the peptide sequence at SEQ ID NO 32128
atgacaacctcaaggtccgaactgacatcccgcatcctcccccaaatgacgatgggggacggcaaaccagggtccctcagcgccccgcctccgcccttcccccgcgatctaacccccgcagcgcgtgcaacggagcggttcagcgtccaggggaacgcgatagtgacgggcggaggaggagatctcgggttcgccgtcagcagagcattgctcgaacatggcgttaccggcttgatgatattcgacctgaaccccttagaagcatccaaaaaggtcgaaatcctcaagtctgagttcctggatgcgaagatcttgttcttggaggtggacatcacggatgaagaagcagtcaacgcagcagtcgtcaagactgtcgaagagctcgagggaccggtgactacactgctaaatttcgcgggaatggtctattgtgaccatgcagtcaatgctacgtccaaggattggaaccgcgttctgaacgtcaatacggttggcgcattcttcgtcgctcgtgcggtggcaaagatccttattgcggaaaaactaagaggaagtataatcctcgtggcgagcgtatcagcgcatcgcgtcaacttcccacagccgcaggttccctacaatgtctcgaaggcgggcgtcaaagcgatggcaaagtcattagcggctgagtggggacatttagggattagagtgaatagtatttcgccggggtacatggatacaattctgaatgagggtgatggattagaggaggcgagaaatatgtgggcgagtcggaatccaatggggaggatgggccagcctgatgagctctcgggtgcggttattttgcttgctagtagagctgggagctatatcaatggttcggatcttctagtagacggcggacagactctatttatgtaa

SEQ ID NO: 32128 - protein, 301 aa, Muscodor strobelii
  misc_feature: SGI Peptide ID NO. 571068
  misc_feature (51)..(225): Pfam Id: PF00106 Pfam Desc: short chain dehydrogenase
  misc_feature (51)..(242): Pfam Id: PF08659 Pfam Desc: KR domain
  misc_feature (54)..(121): Pfam Id: PF01073 Pfam Desc: 3-beta hydroxysteroid dehydrogenase/isomerase family
  misc_feature (51)..(133): Pfam Id: PF08659 Pfam Desc: KR domain
  misc_feature (5)..(300): NCBI GI: 156035505 Blast Desc: SS1G_12956 [Sclerotinia sclerotiorum 1980] gi|154698361|gb|EDN98099.1| SS1G_12956 [Sclerotinia sclerotiorum 1980]
  misc_feature (3)..(300): NCBI GI: 238504518 Blast Desc: oxidoreductase, short chain dehydrogenase/reductase family [Aspergillus flavus NRRL3357] gi|220690961|gb|EED47310.1| oxidoreductase, short chain dehydrogenase/reductase family flavus
  misc_feature (5)..(300): NCBI GI: 67538756 Blast Desc: AN5548.2 [Aspergillus nidulans FGSC A4] gi|40743063|gb|EAA62253.1| AN5548.2 [Aspergillus nidulans FGSC A4]
  misc_feature (5)..(300): NCBI GI: 154312517 Blast Desc: BC1G_05861 [Botryotinia fuckeliana B05.10] gi|150849962|gb|EDN25155.1| BC1G_05861 [Botryotinia fuckeliana B05.10]
  misc_feature (6)..(296): NCBI GI: 46114944 Blast Desc: FG03314.1 [Gibberella zeae PH-1]
  misc_feature (29)..(300): NCBI GI: 169764261 Blast Desc: [Aspergillus oryzae RIB40] gi|83764456|dbj|BAE54600.1| protein product [Aspergillus oryzae]
  misc_feature (29)..(296): NCBI GI: 256720800 Blast Desc: NECHADRAFT_49913 [Nectria haematococca mpVI 77-13-4]
  misc_feature (5)..(300): NCBI GI: 189191000 Blast Desc: 2-deoxy-D-gluconate 3-dehydrogenase [Pyrenophora tritici-repentis Pt-1C-BFP] gi|187973445|gb|EDU40944.1| 2-deoxy-D-gluconate 3-dehydrogenase [Pyrenophora tritici-repentis
  misc_feature (5)..(300): NCBI GI: 169622230 Blast Desc: SNOG_14332 [Phaeosphaeria nodorum SN15] gi|111057083|gb|EAT78203.1| SNOG_14332 [Phaeosphaeria nodorum SN15]
  misc_feature (13)..(300): NCBI GI: 242772193 Blast Desc: oxidoreductase, short chain dehydrogenase/reductase family [Talaromyces stipitatus ATCC 10500] gi|218721610|gb|EED21028.1| oxidoreductase, short chain family
  misc_feature (41)..(300): SWISSPROT Homolog: EC 1.1.1.250 D-arabinitol 2-dehydrogenase
  misc_feature: Useful for introducing or modulating the production of volatile compounds
MTTSRSELTSRILPQMTMGDGKPGSLSAPPPPFPRDLTPAARATERFSVQGNAIVTGGGGDLGFAVSRALLEHGVTGLMIFDLNPLEASKKVEILKSEFLDAKILFLEVDITDEEAVNAAVVKTVEELEGPVTTLLNFAGMVYCDHAVNATSKDWNRVLNVNTVGAFFVARAVAKILIAEKLRGSIILVASVSAHRVNFPQPQVPYNVSKAGVKAMAKSLAAEWGHLGIRVNSISPGYMDTILNEGDGLEEARNMWASRNPMGRMGQPDELSGAVILLASRAGSYINGSDLLVDGGQTLFM

SEQ ID NO: 32129 - DNA, 3035 bp, Muscodor strobelii
  misc_feature: SGI EST ID NO. CUFF.76031.1
  misc_feature: Variant of the nucleotide sequence at SEQ ID NO 32127
caacaaaccatgcagggcatacgcaagaatgtcgaatcaatcatcttcaagtggaggccaaaaacacctggcgcggcaacatatcacattccaagtagatcacagtcaccatggccagcagagaaaagactagtaaataagagcccctaatcaacccgaacatcacgtgaaacttctattctgataaacttcaaacttcatcccgatcctataccactcaaataccaaaaatgacaacctcaaggtccgaactgacatcccgcatcctcccccaaatgacgatgggggacggcaaaccagggtccctcagcgccccgcctccgcccttcccccgcgatctaacccccgcagcgcgtgcaacggagcggttcagcgtccaggggaacgcgatagtgacgggcggaggaggagatctcgggttcgccgtcagcagagcattgctcgaacatggcgttaccggcttgatgatattcgacctgaaccccttagaagcatccaaaaaggtcgaaatcctcaagtctgagttcctggatgcgaagatcttgttcttggaggtggacatcacggatgaagaagcagtcaacgcagcagtcgtcaagactgtcgaagagctcgagggaccggtgactacactgctaaatttcgcgggaatggtctattgtgaccatgcagtcaatgctacgtccaaggattggaaccgcgttctgaacgtcaatacggttggcgcattcttcgtcgctcgtgcggtggcaaagatccttattgcggaaaaactaagaggaagtataatcctcgtggcgagcgtatcagcgcatcgcgtcaacttcccacagccgcaggttccctacaatgtctcgaaggcgggcgtcaaagcgatggcaaagtcattagcggctgagtggggacatttagggattagagtgaatagtatttcgccggggtacatggatacaattctgaatgagggtgatggattagaggaggcgagaaatatgtgggcgagtcggaatccaatggggaggatgggccagcctgatgagctctcgggtgcggttattttgcttgctagtagagctgggagctatatcaatggttcggatcttctagtagacggcggacagactctatttatgtaagatggttaagcaatagaaggtgtagacttgatagattagtttcaggtcctctaggcaggcgttcactattgcgcttcagcttttctctgacgaatcgccgtgctactaatcttactagcgaagtcttccgtcttagtcggcccgtcgagaatatcttcagcatcaaggacatctacttcaaagacctctacctcccgtagtccaagttccatccgcttgtcgttcacggctttgccgcctgatcgcgtctctcctgatacgatcaagacatccatgtctttctctgttatcgtgggtccgtatacgtcctggagtacgacgcattgtacttcgaccgctccgccacggaaccgagcgatcacttcgtcatcctttttaatgatttcgtccggttctcttctaccgtccttggacagtgctagtatcgatgctaggaactcgacaacgttgttggcgcgctcatcccatgattgtacaaactctgcaaacttcttcctcttgagcagctcatcgcccgtcacgccgatgatgaagcgcgaggtgaccttcgtatcctgtgcaggaacacgtagtaacaaggcggcagctgtcaacaagagcttatggcccgggtgcagttgatcgaacgttccgcccaggcacacgatattatatgtgttgccgagcttcgatgttgactttggctcggtcgtaaatgaaagccctccctcaacagcaatgaattggtcctccttgagcgcttcgatttgaacaccggctgctatccttatgtaagtcagaaatagcttgtttcccggttcgctatttacgtgaaaaatgtgcctccatgggtgataagtagaggcgaatgttggtaaatccactatgattgtgttgttagattctacggatggtttcaaatctaccaagggacctttcgatggatcgtggtcaatgaaaaccacgcgtgcatcaaccgagtctgatccagcgtgcatctcgctcggtatggaaagctgtgagcagatgactgctatgatgctatatattccggcgagaacagtttgcgcatccgcccatctaaaagctttctgatttggtgatgcatcttgtaggatgcgagaggcgacgccaatgatcaggactgagccgctaggatgctgggctacatcttgttccaatttcaaatgtgagatggttgctcgtagaggtggctcatatgcggttttgagagctgcgtgggtggctggatggggaggtggggggagaagcaacagcgacggcgggcgacgatctgccatcgtctatgaatgtacggtcttcaagtcttacttgtgaggcgagcgtttgaaggcgcactttgtagatagctcaatttgcaatcatcgaccttactgaagcggtatgattttatgagattgtggtgttcagatgtgtcctgcttcaaggctcacggtaagctgtcatccctcggcagacggtaatagcaaagtgggacagattgggtgacgtgataggcagctatcgcaaagctcgagtgctcggtgtaagtgataatatcaagtcaacgacctagtaataagctacgatttgaaagtacgggagataaggacaaaaatcaagttcgcataagttttcctttcactttcacctgtggatacgaagttgctcgaaactgactcgtgtgaagaacctttgcgccgacaagctccaggttgagttgacccaaactgtggagtgaagtactccgcggtacccctctgccgatgacgtgcataacgagtaccgtagaatacgcttctttagctgccacctcgatattcaccgctcgagagcttcaattgagaacatgagatagcatattatcagcaaattcaatgccttaggtatttatgtcagtatatcaattgcaggtctcag

SEQ ID NO: 32130 - DNA, 1215 bp, Muscodor strobelii
  misc_feature: SGI cDNA ID NO. 571069
  misc_feature: Encodes the peptide sequence at SEQ ID NO 32131
atggcagatcgtcgcccgccgtcgctgttgcttctccccccacctccccatccagccacccacgcagctctcaaaaccgcatatgagccacctctacgagcaaccatctcacatttgaaattggaacaagatgtagcccagcatcctagcggctcagtcctgatcattggcgtcgcctctcgcatcctacaagatgcatcaccaaatcagaaagcttttagatgggcggatgcgcaaactgttctcgccggaatatatagcatcatagcagtcatctgctcacagctttccataccgagcgagatgcacgctggatcagactcggttgatgcacgcgtggttttcattgaccacgatccatcgaaaggtcccttggtagatttgaaaccatccgtagaatctaacaacacaatcatagtggatttaccaacattcgcctctacttatcacccatggaggcacatttttcacgtaaatagcgaaccgggaaacaagctatttctgacttacataaggatagcagccggtgttcaaatcgaagcgctcaaggaggaccaattcattgctgttgagggagggctttcatttacgaccgagccaaagtcaacatcgaagctcggcaacacatataatatcgtgtgcctgggcggaacgttcgatcaactgcacccgggccataagctcttgttgacagctgccgccttgttactacgtgttcctgcacaggatacgaaggtcacctcgcgcttcatcatcggcgtgacgggcgatgagctgctcaagaggaagaagtttgcagagtttgtacaatcatgggatgagcgcgccaacaacgttgtcgagttcctagcatcgatactagcactgtccaaggacggtagaagagaaccggacgaaatcattaaaaaggatgacgaagtgatcgctcggttccgtggcggagcggtcgaagtacaatgcgtcgtactccaggacgtatacggacccacgataacagagaaagacatggatgtcttgatcgtatcaggagagacgcgatcaggcggcaaagccgtgaacgacaagcggatggaacttggactacgggaggtagaggtctttgaagtagatgtccttgatgctgaagatattctcgacgggccgactaagacggaagacttcgctagtaagattagtagcacggcgattcgtcagagaaaagctgaagcgcaatag

SEQ ID NO: 32131 - protein, 404 aa, Muscodor strobelii
  misc_feature: SGI Peptide ID NO. 571069
  misc_feature (214)..(399): Pfam Id: PF01467 Pfam Desc: Cytidylyltransferase
  misc_feature (7)..(401): NCBI GI: 116200660 Blast Desc: CHGG_10875 [Chaetomium globosum CBS 148.51] gi|88175589|gb|EAQ83057.1| CHGG_10875 [Chaetomium globosum CBS 148.51]
  misc_feature (19)..(404): NCBI GI: 171680803 Blast Desc: protein product [Podospora anserina] gi|27764294|emb|CAD60574.1| protein product [Podospora anserina] gi|170940029|emb|CAP65255.1| protein product [Podospora anserina]
  misc_feature (24)..(401): NCBI GI: 85093064 Blast Desc: NCU06029 [Neurospora crassa OR74A] gi|28921064|gb|EAA30383.1| conserved [Neurospora crassa OR74A]
  misc_feature (27)..(404): NCBI GI: 46126203 Blast Desc: FG07479.1 [Gibberella zeae PH-1]
  misc_feature (20)..(404): NCBI GI: 39945888 Blast Desc: MGG_08064 [Magnaporthe grisea 70-15] gi|145019301|gb|EDK03529.1| MGG_08064 [Magnaporthe grisea 70-15]
  misc_feature (49)..(404): NCBI GI: 256724693 Blast Desc: NECHADRAFT_48027 [Nectria haematococca mpVI 77-13-4]
  misc_feature (23)..(403): NCBI GI: 261358333 Blast Desc: pantetheine-phosphate adenylyltransferase family protein [Verticillium albo-atrum VaMs.102]
  misc_feature (8)..(402): NCBI GI: 154314429 Blast Desc: BC1G_05308 [Botryotinia fuckeliana B05.10] gi|150848953|gb|EDN24146.1| BC1G_05308 [Botryotinia fuckeliana B05.10]
  misc_feature (5)..(400): NCBI GI: 119180457 Blast Desc: CIMG_08857 [Coccidioides immitis RS]
  misc_feature (5)..(400): NCBI GI: 240110340 Blast Desc: CPC735_063720 [Coccidioides posadasii C735 delta SOWgp]
MADRRPPSLLLLPPPPHPATHAALKTAYEPPLRATISHLKLEQDVAQHPSGSVLIIGVASRILQDASPNQKAFRWADAQTVLAGIYSIIAVICSQLSIPSEMHAGSDSVDARVVFIDHDPSKGPLVDLKPSVESNNTIIVDLPTFASTYHPWRHIFHVNSEPGNKLFLTYIRIAAGVQIEALKEDQFIAVEGGLSFTTEPKSTSKLGNTYNIVCLGGTFDQLHPGHKLLLTAAALLLRVPAQDTKVTSRFIIGVTGDELLKRKKFAEFVQSWDERANNVVEFLASILALSKDGRREPDEIIKKDDEVIARFRGGAVEVQCVVLQDVYGPTITEKDMDVLIVSGETRSGGKAVNDKRMELGLREVEVFEVDVLDAEDILDGPTKTEDFASKISSTAIRQRKAEAQ

SEQ ID NO: 32132 - DNA, 3113 bp, Muscodor strobelii
  misc_feature: SGI EST ID NO. CUFF.76031.0
  misc_feature: Variant of the nucleotide sequence at SEQ ID NO 32130
ctgagacctgcaattgatatactgacataaatacctaaggcattgaatttgctgataatatgctatctcatgttctcaattgaagctctcgagcggtgaatatcgaggtggcagctaaagaagcgtattctacggtactcgttatgcacgtcatcggcagaggggtaccgcggagtacttcactccacagtttgggtcaactcaacctggagcttgtcggcgcaaaggttcttcacacgagtcagtttcgagcaacttcgtatccacaggtgaaagtgaaaggaaaacttatgcgaacttgatttttgtccttatctcccgtactttcaaatcgtagcttattactaggtcgttgacttgatattatcacttacaccgagcactcgagctttgcgatagctgcctatcacgtcacccaatctgtcccactttgctattaccgtctgccgagggatgacagcttaccgtgagccttgaagcaggacacatctgaacaccacaatctcataaaatcataccgcttcagtaaggtcgatgattgcaaattgagctatctacaaagtgcgccttcaaacgctcgcctcacaagtaagacttgaagaccgtacattcatagacgatggcagatcgtcgcccgccgtcgctgttgcttctccccccacctccccatccagccacccacgcagctctcaaaaccgcatatgagccacctctacgagcaaccatctcacatttgaaattggaacaagatgtagcccagcatcctagcggctcagtcctgatcattggcgtcgcctctcgcatcctacaagatgcatcaccaaatcagaaagcttttagatgggcggatgcgcaaactgttctcgccggaatatatagcatcatagcagtcatctgctcacagctttccataccgagcgagatgcacgctggatcagactcggttgatgcacgcgtggttttcattgaccacgatccatcgaaaggtcccttggtagatttgaaaccatccgtagaatctaacaacacaatcatagtggatttaccaacattcgcctctacttatcacccatggaggcacatttttcacgtaaatagcgaaccgggaaacaagctatttctgacttacataaggatagcagccggtgttcaaatcgaagcgctcaaggaggaccaattcattgctgttgagggagggctttcatttacgaccgagccaaagtcaacatcgaagctcggcaacacatataatatcgtgtgcctgggcggaacgttcgatcaactgcacccgggccataagctcttgttgacagctgccgccttgttactacgtgttcctgcacaggatacgaaggtcacctcgcgcttcatcatcggcgtgacgggcgatgagctgctcaagaggaagaagtttgcagagtttgtacaatcatgggatgagcgcgccaacaacgttgtcgagttcctagcatcgatactagcactgtccaaggacggtagaagagaaccggacgaaatcattaaaaaggatgacgaagtgatcgctcggttccgtggcggagcggtcgaagtacaatgcgtcgtactccaggacgtatacggacccacgataacagagaaagacatggatgtcttgatcgtatcaggagagacgcgatcaggcggcaaagccgtgaacgacaagcggatggaacttggactacgggaggtagaggtctttgaagtagatgtccttgatgctgaagatattctcgacgggccgactaagacggaagacttcgctagtaagattagtagcacggcgattcgtcagagaaaagctgaagcgcaatagtgaacgcctgcctagaggacctgaaactaatctatcaagtctacaccttctattgcttaaccatcttacataaatagagtctgtccgccgtctactagaactagggtcatcatattttatcagcatcagctcatattaggaggtaggacaataggacttgaaggaaatatgaactcacgatccgaaccattgatatagctcccagctctactagcaagcaaaataaccgcacccgagagctcatcaggctggcccatcctccccattggattccgactcgcccacatatttctcgcctcctctaatccatcaccctcattcagaattgtatccatgtaccccggcgaaatactattcactctaatccctaaatgtccccactcagccgctaatgactttgccatcgctttgacgcccgccttcgagacattgtagggaacctgcggctgtgggaagttgacgcgatgcgctgatacgctcgccacgaggattatacttcctcttagtttttccgcaataaggatctttgccaccgcacgagcgacgaagaatgcgccaaccgtattgacgttcagaacgcggttccaatccttggacgtagcattgactgcatggtcacaatagaccattcccgcgaaatttagcagtgtagtcaccggtccctcgagctcttcgacagtcttgacgactgctgcgttgactgcttcttcatccgtgatgtccacctccaagaacaagatcttcgcatccaggaactcagacttgaggatttcgacctttttggatgcttctaaggggttcaggtcgaatatcatcaagccggtaacgccatgttcgagcaatgctctgctgacggcgaacccgagatctcctcctccgcccgtcactatcgcgttcccctggacgctgaaccgctccgttgcacgcgctgcgggggttagatcgcgggggaagggcggaggcggggcgctgagggaccctggtttgccgtcccccatcgtcatttgggggaggatgcgggatgtcagttcggaccttgaggttgtcatttttggtatttgagtggtataggatcgggatgaagtttgaagtttatcagaatagaagtttcacgtgatgttcgggttgattaggggctcttatttactagtcttttctctgctggccatggtgactgtgatctacttggaatgtgatatgttgccgcgccaggtgtttttggcctccacttgaagatgattgattcgacattcttgcgtatgccctgcatggtttgttg

SEQ ID NO: 32133 - DNA, 1833 bp, Muscodor strobelii
  misc_feature: SGI cDNA ID NO. 571070
  misc_feature: Encodes the peptide sequence at SEQ ID NO 32134
atgaatccgccggggtatgggaatgccccccggcggcccaacaacacctacggctcgcagcagcacgacgagctgcacatcccctcgggcggcatgaaccacgccgcgagtcagatgtccagccagctgtccccgcgcgacttcgcctcccaggccggcccccagatcaagctggagcagccgtcgtcgcagccggtcaaccctccctaccagggctccgccgtgcccaacgtcctgcagcccggccgcccctctgccatgagcgccaacaccgctcccaccctcccgaccatgtccgcctccatacagcgctccccaagcgaatacagctcgccctccaagccgccctccctcagcatgtcgcacacgtactcgcgatcgagccctgcggcttcctacgatccttctgccggcaactatgcgccctacaccccgacaaccccaggcggctccgcggggcccagccagtcccagtacatgtcgccccaagaccccaaatacggtgctcccggctcgcagaggaacatctcgaacacgcccctgggcctagcggatatccggccgcgcgccgactcgagcttgtccgacagccatcccggcaccatgggatacgacctagccaactcgcagccctcgaccagcaactacctcgcgccctggaccctctacgccttcgactggtgcaagtgggcaccccaaggcaaaggcgccggcaaggtcgccatcggcagctatctcgaagacggacacaattttatacaaatacttgatacccagatcgttaacactccttctgatatatatacccccggatctcctaaatacagcctagagttcacaaagattgccgaagccacccactcgtaccctgtcacccgcctgctttgggaaccaccatcgtcccagaagcagacaaccgatctgctcgcaacatccggcgatcacctgagactgtggtctcttccctccgacgcgcagactcctcattccagcaatgtcaacaagtctgccatgggtgcgcccattacgaagctgactcctctagcattgctgtccaactccaagacgcccgaccacaccgcgccgctgacatccctggactggaataccgtatccccgagtctcatcattacctctagtatagatacgacgtgtaccatatgggacattccatccctcaccgccaagacgcagctgatcgcccacgacaaagaagtatacgatgttcgattctgtgccaacagcgtcgatgtgttcgtgagctgtggccaggacggcagtgtgcgcatgtttgatctccgaagcttagagcatagcactattatctacgagccgacagccaaggatgatagagacgccaatggcggtagaattagtccaactctcgctcagcagaccatgtccaatgccccgcctctcttaaggcttgcgacctcgccacatgacactcatctactagccaccttcgctcaagattccaatatcattcgcatcctagacgtacggcaacccggccaagctttgctagagctacggggacatggaggctccgtgaactcagtggagtggtcacctggtcgcagaggcttgcttgcctccggtggagatgactcccaggtgctactttgggacctgatgaactccactcccactactggtccgtcctcaaacggtactggtggaacagagaaacacctcagtccggtagcgagctggaactgcgactacgaagttggcaacctgggctgggctcctcctcttggtaacaacgatgctggaggagactggcttggtgtgagtggtgggcgcggtgtctggggtgtgaaggtttga

SEQ ID NO: 32134 - protein, 610 aa, Muscodor strobelii
  misc_feature: SGI Peptide ID NO. 571070
  misc_feature (505)..(544): Pfam Id: PF00400 Pfam Desc: WD domain, G-beta repeat
  misc_feature (393)..(432): Pfam Id: PF00400 Pfam Desc: WD domain, G-beta repeat
  misc_feature (350)..(389): Pfam Id: PF00400 Pfam Desc: WD domain, G-beta repeat
  misc_feature (1)..(610): NCBI GI: 171680805 Blast Desc: protein product [Podospora anserina] gi|27764295|emb|CAD60575.1| protein product [Podospora anserina] gi|170940030|emb|CAP65256.1| protein product [Podospora anserina]
  misc_feature (3)..(583): NCBI GI: 261355443 Blast Desc: WD repeat-containing protein [Verticillium albo-atrum VaMs.102]
  misc_feature (11)..(610): NCBI GI: 85093104 Blast Desc: NCU06039 [Neurospora crassa OR74A] gi|28921074|gb|EAA30393.1| NCU06039 [Neurospora crassa OR74A]
  misc_feature (14)..(610): NCBI GI: 154314431 Blast Desc: BC1G_05309 [Botryotinia fuckeliana B05.10] gi|150848954|gb|EDN24147.1| BC1G_05309 [Botryotinia fuckeliana B05.10]
  misc_feature (1)..(610): NCBI GI: 156057681 Blast Desc: SS1G_04572 [Sclerotinia sclerotiorum 1980] gi|154702357|gb|EDO02096.1| SS1G_04572 [Sclerotinia sclerotiorum 1980]
  misc_feature (165)..(610): NCBI GI: 256724813 Blast Desc: [Nectria haematococca mpVI 77-13-4]
  misc_feature (171)..(610): NCBI GI: 145612055 Blast Desc: MGG_08065 [Magnaporthe grisea 70-15] gi|145019302|gb|EDK03530.1| MGG_08065 [Magnaporthe grisea 70-15]
  misc_feature (154)..(610): NCBI GI: 46126295 Blast Desc: FG07525.1 [Gibberella zeae PH-1]
  misc_feature (83)..(610): NCBI GI: 169594704 Blast Desc: SNOG_00079 [Phaeosphaeria nodorum SN15] gi|111070454|gb|EAT91574.1| SNOG_00079 [Phaeosphaeria nodorum SN15]
  misc_feature (10)..(610): NCBI GI: 189202934 Blast Desc: WD domain containing protein [Pyrenophora tritici-repentis Pt-1C-BFP] gi|187984902|gb|EDU50390.1| WD domain containing protein [Pyrenophora tritici-repentis Pt-1C-BFP]
MNPPGYGNAPRRPNNTYGSQQHDELHIPSGGMNHAASQMSSQLSPRDFASQAGPQIKLEQPSSQPVNPPYQGSAVPNVLQPGRPSAMSANTAPTLPTMSASIQRSPSEYSSPSKPPSLSMSHTYSRSSPAASYDPSAGNYAPYTPTTPGGSAGPSQSQYMSPQDPKYGAPGSQRNISNTPLGLADIRPRADSSLSDSHPGTMGYDLANSQPSTSNYLAPWTLYAFDWCKWAPQGKGAGKVAIGSYLEDGHNFIQILDTQIVNTPSDIYTPGSPKYSLEFTKIAEATHSYPVTRLLWEPPSSQKQTTDLLATSGDHLRLWSLPSDAQTPHSSNVNKSAMGAPITKLTPLALLSNSKTPDHTAPLTSLDWNTVSPSLIITSSIDTTCTIWDIPSLTAKTQLIAHDKEVYDVRFCANSVDVFVSCGQDGSVRMFDLRSLEHSTIIYEPTAKDDRDANGGRISPTLAQQTMSNAPPLLRLATSPHDTHLLATFAQDSNIIRILDVRQPGQALLELRGHGGSVNSVEWSPGRRGLLASGGDDSQVLLWDLMNSTPTTGPSSNGTGGTEKHLSPVASWNCDYEVGNLGWAPPLGNNDAGGDWLGVSGGRGVWGVKV

SEQ ID NO: 32135 - DNA, 3066 bp, Muscodor strobelii
  misc_feature: SGI EST ID NO. CUFF.76281.1
  misc_feature: Variant of the nucleotide sequence at SEQ ID NO 32133
cgaagatattgatcaagtcttgggggatgcgcgaattgcgctttgttagtcaagccgaaggcatcgacgaagacctgaggtggttcgtgccattgcctgccctgaaacattgctgtagggctcgcatctagccgttttgggggagaacctctgcctggtccttcactgctcctgctttgtcgcccgtcgctgtaccgcccgcaccagatcgcgcccagccccgccatcttgggttcatcgtattcctgcctcgaagcgctttgggatcagccaggtcgccaggtcaggctaccacccgagcatcaaacccggttttgagagaggacggcgaatgaaaagtgcatgtgcctaaaggtactgggcgcctgtatttcgagttttgacgacctgatacctcactttgccaagtgcatacccaaactcactgcatgtaactcgtcatatccacctatgaatccggccgcaactacctaggtcaagtcatcctgaatcgcacttgcatagctacctctctttttatatgcttatctgtattccctctttcccatcgaaccctgcagctcgcctagccgcaggtctctcttgcgccctccactgcaacgtccaacctgatccattgtcctcatattgggcagttggacccatcaaccacctctctgtggtttccggtctcaaaagcgacgaaccttctccgcctgttgctgacccgtcgcgacgtcgactgcatctagcgccttcctagcgccgcggcccacgatgaatccgccggggtatgggaatgccccccggcggcccaacaacacctacggctcgcagcagcacgacgagctgcacatcccctcgggcggcatgaaccacgccgcgagtcagatgtccagccagctgtccccgcgcgacttcgcctcccaggccggcccccagatcaagctggagcagccgtcgtcgcagccggtcaaccctccctaccagggctccgccgtgcccaacgtcctgcagcccggccgcccctctgccatgagcgccaacaccgctcccaccctcccgaccatgtccgcctccatacagcgctccccaagcgaatacagctcgccctccaagccgccctccctcagcatgtcgcacacgtactcgcgatcgagccctgcggcttcctacgatccttctgccggcaactatgcgccctacaccccgacaaccccaggcggctccgcggggcccagccagtcccagtacatgtcgccccaagaccccaaatacggtgctcccggctcgcagaggaacatctcgaacacgcccctgggcctagcggatatccggccgcgcgccgactcgagcttgtccgacagccatcccggcaccatgggatacgacctagccaactcgcagccctcgaccagcaactacctcgcgccctggaccctctacgccttcgactggtgcaagtgggcaccccaaggcaaaggcgccggcaaggtcgccatcggcagctatctcgaagacggacacaattttatacaaatacttgatacccagatcgttaacactccttctgatatatatacccccggatctcctaaatacagcctagagttcacaaagattgccgaagccacccactcgtaccctgtcacccgcctgctttgggaaccaccatcgtcccagaagcagacaaccgatctgctcgcaacatccggcgatcacctgagactgtggtctcttccctccgacgcgcagactcctcattccagcaatgtcaacaagtctgccatgggtgcgcccattacgaagctgactcctctagcattgctgtccaactccaagacgcccgaccacaccgcgccgctgacatccctggactggaataccgtatccccgagtctcatcattacctctagtatagatacgacgtgtaccatatgggacattccatccctcaccgccaagacgcagctgatcgcccacgacaaagaagtatacgatgttcgattctgtgccaacagcgtcgatgtgttcgtgagctgtggccaggacggcagtgtgcgcatgtttgatctccgaagcttagagcatagcactattatctacgagccgacagccaaggatgatagaggtatgtgcagggcgggatttgtccaagcatcatagccctatctctaacccttttacaacagacgccaatggcggtagaattagtccaactctcgctcagcagaccatgtccaatgccccgcctctcttaaggcttgcgacctcgccacatgacactcatctactagccaccttcgctcaagattccaatatcattcgcatcctagacgtacggcaacccggccaagctttgctagagctacggggacatggaggctccgtgaactcagtggagtggtcacctggtcgcagaggcttgcttgcctccggtggagatgactcccaggtgctactttgggacctgatgaactccactcccactactggtccgtcctcaaacggtactggtggaacagagaaacacctcagtccggtagcgagctggaactgcgactacgaagttggcaacctgggctgggctcctcctcttggtaacaacgatgctggaggagactggcttggtgtgagtggtgggcgcggtgtctggggtgtgaaggtttgaggagacagtggcttgaagtactgatcagataacatttcggacgagatcgagtcaaacttctccatgatcgacaataatccggacccgtgaagagacatgagccatgatgcgaccatataggtgttattcatatcgcttctcggctactggagacatcgttatgccgatacctctcaggcttcgagggacagattatcatggagggttttttgcaaacaactgcaatgactagaggtcattgggcaggatggagtacgcgtatcatgaccagttcatattgcattgcatgcaccggctttctagaaaaatgccaggcagcgggcgtagggaacgaaaatggactcggcactcgtcgagttgaaacaagacaataggtagtttttagtgtccaaatacaacatgttggctaccccaaa

SEQ ID NO: 32136 - DNA, 1023 bp, Muscodor strobelii
  misc_feature: SGI cDNA ID NO. 571071
  misc_feature: Encodes the peptide sequence at SEQ ID NO 32137
atgatgaaggcagtacttgttgatcgatttgtgcagagatatgatgaacttcacgtctcagaagtacctaaacctactgcaaaagatgatgaaatcctcattcaagtgaaagcagctggagtcaacttcgttgatacactctatgctcgaggcaagcaccaaaataaccaacgccatgtaaagccccctttcacactcggtctcgaattctcgggtgtaatcgtctccagtccaccctcatcccctttcgaaccaggggaccgcgtattcggggactacggtggttcatacgcagagtatatcaccctcccctccagctcatctctactgcgtattcccccgagctggtcattcaccgacgcagcggggctcgctgccactctacctgtatccttcggcgcattagttcaatgtgctaagctcaaaagaggcgagacggtgctcattcatgctactgctggcggcttaggactagcggccgtacagatcgcgaaagcgctcgggtgtcgtgtcatcggaacagctggcacgaaggagaaatgtcagatcgccgagcgatttggcgctgatgtctgtgtggactaccaaactgaggcccagtggtgggagaaagtcatggaggtcactaagggaaaaggagtagacgtcgtgttcgacagtgttggtctcgttgatcgaagtttgaaatgcttggcgcatcgtggaaggatattggtcgttgggttcgctggccgagagggcgatatggagggtgtgaagatgaatcgtatactgcttaagcaggctcaggtcattggatatagactcggcgaaagctatagacgctatcctcacgagaaggacgaaatctggcgcgagctataccggctagttgcagggggagatatcaagcccaccgtatttgataaagagtacaaaggcctcgagagtgttccgattgcacttgcggacattgcgtctcgtaaagtctggggtaaggcagtaatacaggtcgataaagggcatatagctgcacgattatga

SEQ ID NO: 32137 - protein, 340 aa, Muscodor strobelii
  misc_feature: SGI Peptide ID NO. 571071
  misc_feature (29)..(112): Pfam Id: PF08240 Pfam Desc: Alcohol dehydrogenase GroES-like domain
  misc_feature (143)..(285): Pfam Id: PF00107 Pfam Desc: Zinc-binding dehydrogenase
  misc_feature (2)..(314): NCBI GI: 261355444 Blast Desc: zeta-crystallin [Verticillium albo-atrum VaMs.102]
  misc_feature (2)..(334): NCBI GI: 169596208 Blast Desc: SNOG_00859 [Phaeosphaeria nodorum SN15] gi|160701253|gb|EAT92354.2| SNOG_00859 [Phaeosphaeria nodorum SN15]
  misc_feature (2)..(331): NCBI GI: 189202902 Blast Desc: zeta-crystallin [Pyrenophora tritici-repentis Pt-1C-BFP] gi|187984886|gb|EDU50374.1| zeta-crystallin [Pyrenophora tritici-repentis Pt-1C-BFP]
  misc_feature (2)..(333): NCBI GI: 225682076 Blast Desc: zinc-containing alcohol dehydrogenase superfamily protein [Paracoccidioides brasiliensis Pb03]
  misc_feature (30)..(333): NCBI GI: 261200411 Blast Desc: alcohol dehydrogenase [Ajellomyces dermatitidis SLH14081] gi|239593678|gb|EEQ76259.1| alcohol dehydrogenase [Ajellomyces dermatitidis SLH14081]
  misc_feature (2)..(333): NCBI GI: 258566832 Blast Desc: [Uncinocarpus reesii 1704] gi|237905606|gb|EEP80007.1| [Uncinocarpus reesii 1704]
  misc_feature (2)..(333): NCBI GI: 240107041 Blast Desc: quinone oxidoreductase, [Coccidioides posadasii C735 delta SOWgp]
  misc_feature (2)..(333): NCBI GI: 119175121 Blast Desc: CIMG_09462 [Coccidioides immitis RS]
  misc_feature (2)..(340): NCBI GI: 164424882 Blast Desc: NCU11325 [Neurospora crassa OR74A] gi|157070703|gb|EDO65096.1| NCU11325 [Neurospora crassa OR74A]
  misc_feature (2)..(339): NCBI GI: 156053626 Blast Desc: SS1G_05660 [Sclerotinia sclerotiorum 1980] gi|154703441|gb|EDO03180.1| SS1G_05660 [Sclerotinia sclerotiorum 1980]
  misc_feature (20)..(300): SWISSPROT Homolog: EC 1.6.5.5 NADPH:quinone reductase
MMKAVLVDRFVQRYDELHVSEVPKPTAKDDEILIQVKAAGVNFVDTLYARGKHQNNQRHVKPPFTLGLEFSGVIVSSPPSSPFEPGDRVFGDYGGSYAEYITLPSSSSLLRIPPSWSFTDAAGLAATLPVSFGALVQCAKLKRGETVLIHATAGGLGLAAVQIAKALGCRVIGTAGTKEKCQIAERFGADVCVDYQTEAQWWEKVMEVTKGKGVDVVFDSVGLVDRSLKCLAHRGRILVVGFAGREGDMEGVKMNRILLKQAQVIGYRLGESYRRYPHEKDEIWRELYRLVAGGDIKPTVFDKEYKGLESVPIALADIASRKVWGKAVIQVDKGHIAARL

SEQ ID NO: 32138 - DNA, 1285 bp, Muscodor strobelii
  misc_feature: SGI EST ID NO. CUFF.76035.0
  misc_feature: Variant of the nucleotide sequence at SEQ ID NO 32136
cgttgatacactctatgctcgaggcaagcaccaaaataaccaacgccatgtaaagccccctttcacactcggtctcgaattctcgggtgtaatcgtctccagtccaccctcatcccctttcgaaccaggggaccgcgtattcggggactacggtggttcatacgcagagtatatcaccctcccctccagctcatctctactgcgtattcccccgagctggtcattcaccgacgcagcggggctcgctgccactctacctgtatccttcggcgcattagttcaatgtgctaagctcaaaagaggcgagacggtgctcattcatgctactgctggcggcttaggactagcggccgtacagatcgcgaaagcgctcgggtgtcgtgtcatcggaacagctggcacgaaggagaaatgtcagatcgccgagcgatttggcgctgatgtctgtgtggactaccaaactgaggcccagtggtgggagaaagtcatggaggtcactaagggaaaaggagtagacgtcgtgttcgacagtgttggtctcgttgatcgaagtttgaaatgcttggcgcatcgtggaaggatattggtcgttgggttcgctggccgagagggcgatatggagggtgtgaagatgaatcgtatactgcttaagcaggctcaggtcattggatatagactcggcgaaagctatagacgctatcctcacgagaaggacgaaatctggcgcgagctataccggctagttgcagggggagatatcaagcccaccgtatttgataaagagtacaaaggcctcgagagtgttccgattgcacttgcggacattgcgtctcgtaaagtctggggtaaggcagtaatacaggtcgataaagggcatatagctgcacgattatgatggtctgtcacaataaagatccggaattcagaatcctctcagcaacaggtgtcataaaaaaaggtgccttttcacctcgacatcccaacgggtcaccaaacatctcaaacacatggcaactaaaagcaggatacataaacacgcaaaacataagaagtccaagtatacataaacaaataaaaaagagtaggccaataaataaaaaaggtcgagcaagcagacgcaggtcactatactaccgctagggcccaagatcgaattcatgtgcttccggctaatatctagctactctaccacgtatatcaccataccaattaagcggactgaagcgttcatgttatcctggcgttcaatcgtggatcatgtatttgagtatttgttcgagtccga

SEQ ID NO: 32139 - DNA, 1041 bp, Muscodor strobelii
  misc_feature: SGI cDNA ID NO. 571072
  misc_feature: Encodes the peptide sequence at SEQ ID NO 32140
atgatgaaggcagtacttgttgatcgatttgtgcagagatatgatgaacttcacgtctcagaagtacctaaacctactgcaaaagatgatgaaatcctcattcaagtgaaagcagctggagtcaacttcgttgatacactctatgctcgaggcaagcaccaaaataaccaacgccatgtaaagccccctttcacactcggtctcgaattctcgggtgtaatcgtctccagtccaccctcatcccctttcgaaccaggggaccgcgtattcggggactacggtggttcatacgcagagtatatcaccctcccctccagctcatctctactgcgtattcccccgagctggtcattcaccgacgcagcggggctcgctgccactctacctgtatccttcggcgcattagttcaatgtgctaagctcaaaagaggcgagacggtgctcattcatgctactgctggcggcttaggactagcggccgtacagatcgcgaaagcgctcgggtgtcgtgtcatcggaacagctggcacgaaggagaaatgtcagatcgccgagcgatttggcgctgatgtctgtgtggactaccaaactgaggcccagtggtgggagaaagtcatggaggtcactaagggaaaaggagtagacgtcgtgttcgacagtgttggtctcgttgatcgaagtttgaaatgcttggcgcatcgtggaaggatattggtcgttgggttcgctggccgagagggcgatatggagggtgtgaagatgaatcgtatactgcttaagcaggctcaggtcattggatatgtaggttcctgtttacccgttgcaaaggttttgtttaaacgctatcctcacgagaaggacgaaatctggcgcgagctataccggctagttgcagggggagatatcaagcccaccgtatttgataaagagtacaaaggcctcgagagtgttccgattgcacttgcggacattgcgtctcgtaaagtctggggtaaggcagtaatacaggtcgataaagggcatatagctgcacgattatga

SEQ ID NO: 32140 - protein, 346 aa, Muscodor strobelii
  misc_feature: SGI Peptide ID NO. 571072
  misc_feature (29)..(112): Pfam Id: PF08240 Pfam Desc: Alcohol dehydrogenase GroES-like domain
  misc_feature (143)..(295): Pfam Id: PF00107 Pfam Desc: Zinc-binding dehydrogenase
  misc_feature (143)..(266): Pfam Id: PF00107 Pfam Desc: Zinc-binding dehydrogenase
  misc_feature (2)..(320): NCBI GI: 261355444 Blast Desc: zeta-crystallin [Verticillium albo-atrum VaMs.102]
  misc_feature (2)..(340): NCBI GI: 169596208 Blast Desc: SNOG_00859 [Phaeosphaeria nodorum SN15] gi|160701253|gb|EAT92354.2| SNOG_00859 [Phaeosphaeria nodorum SN15]
  misc_feature (2)..(337): NCBI GI: 189202902 Blast Desc: zeta-crystallin [Pyrenophora tritici-repentis Pt-1C-BFP] gi|187984886|gb|EDU50374.1| zeta-crystallin [Pyrenophora tritici-repentis Pt-1C-BFP]
  misc_feature (2)..(339): NCBI GI: 225682076 Blast Desc: zinc-containing alcohol dehydrogenase superfamily protein [Paracoccidioides brasiliensis Pb03]
  misc_feature (30)..(339): NCBI GI: 261200411 Blast Desc: alcohol dehydrogenase [Ajellomyces dermatitidis SLH14081] gi|239593678|gb|EEQ76259.1| alcohol dehydrogenase [Ajellomyces dermatitidis SLH14081]
  misc_feature (2)..(339): NCBI GI: 258566832 Blast Desc: [Uncinocarpus reesii 1704] gi|237905606|gb|EEP80007.1| [Uncinocarpus reesii 1704]
  misc_feature (2)..(346): NCBI GI: 164424882 Blast Desc: NCU11325 [Neurospora crassa OR74A] gi|157070703|gb|EDO65096.1| NCU11325 [Neurospora crassa OR74A]
  misc_feature (2)..(339): NCBI GI: 240107041 Blast Desc: quinone oxidoreductase, [Coccidioides posadasii C735 delta SOWgp]
  misc_feature (2)..(339): NCBI GI: 119175121 Blast Desc: CIMG_09462 [Coccidioides immitis RS]
  misc_feature (2)..(337): NCBI GI: 189197407 Blast Desc: quinone oxidoreductase [Pyrenophora tritici-repentis Pt-1C-BFP] gi|187980989|gb|EDU47615.1| quinone oxidoreductase [Pyrenophora tritici-repentis Pt-1C-BFP]
  misc_feature (20)..(244): SWISSPROT Homolog: EC 1.6.5.5 NADPH:quinone reductase
MMKAVLVDRFVQRYDELHVSEVPKPTAKDDEILIQVKAAGVNFVDTLYARGKHQNNQRHVKPPFTLGLEFSGVIVSSPPSSPFEPGDRVFGDYGGSYAEYITLPSSSSLLRIPPSWSFTDAAGLAATLPVSFGALVQCAKLKRGETVLIHATAGGLGLAAVQIAKALGCRVIGTAGTKEKCQIAERFGADVCVDYQTEAQWWEKVMEVTKGKGVDVVFDSVGLVDRSLKCLAHRGRILVVGFAGREGDMEGVKMNRILLKQAQVIGYVGSCLPVAKVLFKRYPHEKDEIWRELYRLVAGGDIKPTVFDKEYKGLESVPIALADIASRKVWGKAVIQVDKGHIAARL

SEQ ID NO: 32141 - DNA, 1285 bp, Muscodor strobelii; identical to SEQ ID NO: 32138
  misc_feature: SGI EST ID NO. CUFF.76035.0
  misc_feature: Variant of the nucleotide sequence at SEQ ID NO 32139

SEQ ID NO: 32142 - DNA, 3126 bp, Muscodor strobelii
  misc_feature: SGI cDNA ID NO. 571073
  misc_feature: Reduced expression when VOC is produced
  misc_feature: Encodes the peptide sequence at SEQ ID NO 32143
atgagcgatccgcgcgatcacgactcatccgaggacgaggaggacttcaacccccagcaggccgacatcagtgacgacgaggtcaagggcgacgagtccgaccacgacgacgagaacacgaaacgagagcctcccaactcctcgcccgcccgcgaacagcccgccgacgaccacgatgacgacgacgaggaagacgagggtcgcggcaacaatgaggagcgagacgaagaggaggacgaagatgatgaggaagaggaagatgaggatgaggagatccagggccaccgccgcaaacgccgccgcgacaagcgtaatgccttcttcgacatagaagccgaagttgacgacgaagacgagggcgaggatgacgaggagaacgaggccgagaatgccgacttcatcgaccaggaggacccggccgacttcaacgaggccagccgcctcgagtctgacagacgacatcgcgagcttgatctgcagcgtgaacgcatggaccatgaagacctagaggaggaggctgcgcgattcaagaccaagtatggtcaccgacgtaatgcccgcggcttgggcgacactaccatcgtcccccagcgactcctccttcccagcgtcgatgatccgagcatctggggtgtccgatgtaaggagggcaaggagcgagaggtcgtcttctccatcacgaagcgcatacaggagaagttcggaaccaaagacgagctcggcatcacggcagccttcgagcgtggcggccccaactccatcatgaagggtctgatctacgtcgaagcttaccgacagaccgatatcctccaggcgcttgacggcatgcttaacgtgtatccccgaaccaagctcctgctggtcgatatcaaggagatgcccgacctgctgcgtgtgcagaagacacctactttggaacccggtgcttgggtgcggcttaagcgacccgtcaagtataatggtgatcttgcccaagtcattgatatcaccgagaacggtttggacgttagggttcggttcattcccagaattgattacggcgccggcatggaagtgctcggtgcggatggcaagcgcaagcgtcaggccccggttcagcgccccccgcagaaactattcagcgaggtggaagctcggaagcgaaatcctcgcaacctgtcgggcaatccccagaccaacatgtggagttacaatggtgatcaattcgagggtggtttcttggtcaaggatatcaagattcagcacttgcaggtcaaagatgtcaacccaagtctagaggaggtcacccgatttacctctggaggcgaagatggcgttgagaatatcgatctcaagtcacttgccgcaagtttgcgtgacagcaacgctacgaccacgtatctccctggcgatattgtcgaggtttacgacggtgagcagaagggtgttatcggaaaggccacgaaggtgcaggcagacattgtcactcttgaggtacaagagggtgaactgcgtgggcagaccattgatgtacctacgaaaggtctacgcaagcgcttccgaactggtgatcacgtcaaggtcatcggaggcagtcggtaccgagacgagctcggcatggtcgtcaagatctcggaagaccgagtcactctcttgacggatcagaccaataccgaaatcacagtgttcagcaaggatttgagagaggcttctgatattgctggacagggatctctgggacagtattctctacttgatcttgtacagctcgacgctacaaccgttggctgcattgtcaaggtcgacagagagtctctgggggtcctagatcagaatggcgacaaccgtcaggtcatgccgtcgcagattgctaacaaattacccaagagaaaactcgccgtagctgctgaccgcaatggctctgagatccgcccggacgatgttgtgaaggagtacagtggtatgggtcgacaaggaaagattatccacatccaccgcagctatgttttctgtcatacgcaccagactacggagaatgctggtatctttgttgctagggtcagcaatgtcagcactgtctcagcaaagggtggccgcattgcagccgctgctggaccggacctcatttccatgaaccctgcactgaagcttaacggcggcaagaatgacatgccacctccgaaggtcacgtttggcagggacaagttacttggacagactgtcacgatcagaaagggaggctggaagggtttacttggtcgcgtcaaggacaccactgatactcacgcacgggtagagctccactccaagagcaaaatcatcagcgtacccaaagtcgatctagttgtacgagacatgattagtggtcgtgaagtcaagaactgggagagaggcggtggtcgcggaggtttcaacggtgctccaggtggcagacctcaggaacgttctggtccagactggggcaatggtggtcgcacacctgttaattcatcgtccgccagaacgccggcttggaagacgcctggtggtggagccggaggccgaactcctgcctggggtcgtggaggtgacggtggacgaactccagcatgggccgacggatcaaggaccgttaacccctatgatggaaacaggactgcatacggtggttccggtgccggtggtcgtacaccagcctggtcatctggtggctccaagacaccggcctatgagggtagcggatccaagactcctgcatacggtggtagtagtggtgatggctggggttcaaagacaccttacggggcgtcggctgccacacctggtgcaagtggtggtgatagctggggctatactcccggcgccagcggatcatctggtgcctacgatgcacccacgcctggcggtatgctaggcgctcctactcctggtgctttcaacgccccgacccctggagcctataacgctcctactcctggtggtcctgtcgatgctcccacgcctggcggtggctggcaaggtggatggggctcgaacaatgcgcctacccctggagccgctgcggctcctactcccgcggctggaggcttcgcatatggcgctccgacccctggagcttacacggctgacacgcctgccgctggtccgcgctacactgatgatgactag

SEQ ID NO: 32143 - protein, 1041 aa, Muscodor strobelii
  misc_feature: SGI Peptide ID NO. 571073
  misc_feature (258)..(305): Pfam Id: PF03439 Pfam Desc: Supt5 repeat
  misc_feature (174)..(218): Pfam Id: PF03439 Pfam Desc: Supt5 repeat
  misc_feature (3)..(1041): NCBI GI: 256724812 Blast Desc: transcription initiation protein [Nectria haematococca mpVI 77-13-4]
  misc_feature (3)..(1041): NCBI GI: 46126293 Blast Desc: FG07524.1 [Gibberella zeae PH-1] gi|116256791|sp|Q4I5I4.1|SPT5_GIBZE RecName: Full=Transcription elongation factor SPT5; AltName: Full=Chromatin elongation factor
  misc_feature (55)..(1041): NCBI GI: 171680028 Blast Desc: protein product [Podospora anserina] gi|170939640|emb|CAP64867.1| protein product [Podospora anserina]
  misc_feature (106)..(1017): NCBI GI: 164424652 Blast Desc: NCU06929 [Neurospora crassa OR74A] gi|161789040|sp|Q7S3C4.2|SPT5_NEUCR RecName: Full=Transcription elongation factor spt-5; AltName: Full=Chromatin elongation spt-5
  misc_feature (2)..(1041): NCBI GI: 261355445 Blast Desc: transcription elongation factor SPT5 [Verticillium albo-atrum VaMs.102]
  misc_feature (168)..(1039): NCBI GI: 156057685 Blast Desc: SS1G_04574 [Sclerotinia sclerotiorum 1980] gi|154702359|gb|EDO02098.1| SS1G_04574 [Sclerotinia sclerotiorum 1980]
  misc_feature (1)..(1041): NCBI GI: 145612057 Blast Desc: MGG_12268 [Magnaporthe grisea 70-15] gi|145019303|gb|EDK03531.1| MGG_12268 [Magnaporthe grisea 70-15]
  misc_feature (133)..(1041): NCBI GI: 116203851 Blast Desc: CHGG_09809 [Chaetomium globosum CBS 148.51] gi|88175937|gb|EAQ83405.1| CHGG_09809 [Chaetomium globosum CBS 148.51]
  misc_feature (10)..(1039): NCBI GI: 238840210 Blast Desc: transcription elongation factor spt5 [Microsporum canis CBS 113480]
  misc_feature (96)..(1034): NCBI GI: 145257351 Blast Desc: An04g03300 [Aspergillus niger] gi|134058612|emb|CAK38596.1| protein product [Aspergillus niger]
  misc_feature: Useful for introducing or modulating the production of volatile compounds
MSDPRDHDSSEDEEDFNPQQADISDDEVKGDESDHDDENTKREPPNSSPAREQPADDHDDDDEEDEGRGNNEERDEEEDEDDEEEEDEDEEIQGHRRKRRRDKRNAFFDIEAEVDDEDEGEDDEENEAENADFIDQEDPADFNEASRLESDRRHRELDLQRERMDHEDLEEEAARFKTKYGHRRNARGLGDTTIVPQRLLLPSVDDPSIWGVRCKEGKEREVVFSITKRIQEKFGTKDELGITAAFERGGPNSIMKGLIYVEAYRQTDILQALDGMLNVYPRTKLLLVDIKEMPDLLRVQKTPTLEPGAWVRLKRPVKYNGDLAQVIDITENGLDVRVRFIPRIDYGAGMEVLGADGKRKRQAPVQRPPQKLFSEVEARKRNPRNLSGNPQTNMWSYNGDQFEGGFLVKDIKIQHLQVKDVNPSLEEVTRFTSGGEDGVENIDLKSLAASLRDSNATTTYLPGDIVEVYDGEQKGVIGKATKVQADIVTLEVQEGELRGQTIDVPTKGLRKRFRTGDHVKVIGGSRYRDELGMVVKISEDRVTLLTDQTNTEITVFSKDLREASDIAGQGSLGQYSLLDLVQLDATTVGCIVKVDRESLGVLDQNGDNRQVMPSQIANKLPKRKLAVAADRNGSEIRPDDVVKEYSGMGRQGKIIHIHRSYVFCHTHQTTENAGIFVARVSNVSTVSAKGGRIAAAAGPDLISMNPALKLNGGKNDMPPPKVTFGRDKLLGQTVTIRKGGWKGLLGRVKDTTDTHARVELHSKSKIISVPKVDLVVRDMISGREVKNWERGGGRGGFNGAPGGRPQERSGPDWGNGGRTPVNSSSARTPAWKTPGGGAGGRTPAWGRGGDGGRTPAWADGSRTVNPYDGNRTAYGGSGAGGRTPAWSSGGSKTPAYEGSGSKTPAYGGSSGDGWGSKTPYGASAATPGASGGDSWGYTPGASGSSGAYDAPTPGGMLGAPTPGAFNAPTPGAYNAPTPGGPVDAPTPGGGWQGGWGSNNAPTPGAAAAPTPAAGGFAYGAPTPGAYTADTPAAGPRYTDDD

SEQ ID NO: 32144 - DNA, 3593 bp, Muscodor strobelii
  misc_feature: SGI EST ID NO. CUFF.76402.0
  misc_feature: Variant of the nucleotide sequence at SEQ ID NO 32142
accacagcgcgtgtcgattcccacctttcaaagggatcgctcctccaccatcactcatcctccaacatatatacctatctcctgatcagacactcacgtgcatcagggaaccacacccccggatcccgtcaagctggtcaggctggttaaggttctgcccacagagataccgcccacggagacccgccaagatgagcgatccgcgcgatcacgactcatccgaggacgaggaggacttcaacccccagcaggccgacatcagtgacgacgaggtcaagggcgacgagtccgaccacgacgacgagaacacgaaacgagagcctcccaactcctcgcccgcccgcgaacagcccgccgacgaccacgatgacgacgacgaggaagacgagggtcgcggcaacaatgaggagcgagacgaagaggaggacgaagatgatgaggaagaggaagatgaggatgaggagatccagggccaccgccgcaaacgccgccgcgacaagcgtaatgccttcttcgacatagaagccgaagttgacgacgaagacgagggcgaggatgacgaggagaacgaggccgagaatgccgacttcatcgaccaggaggacccggccgacttcaacgaggccagccgcctcgagtctgacagacgacatcgcgagcttgatctgcagcgtgaacgcatggaccatgaagacctagaggaggaggctgcgcgattcaagaccaagtatggtcaccgacgtaatgcccgcggcttgggcgacactaccatcgtcccccagcgactcctccttcccagcgtcgatgatccgagcatctggggtgtccgatgtaaggagggcaaggagcgagaggtcgtcttctccatcacgaagcgcatacaggagaagttcggaaccaaagacgagctcggcatcacggcagccttcgagcgtggcggccccaactccatcatgaagggtctgatctacgtcgaagcttaccgacagaccgatatcctccaggcgcttgacggcatgcttaacgtgtatccccgaaccaagctcctgctggtcgatatcaaggagatgcccgacctgctgcgtgtgcagaagacacctactttggaacccggtgcttgggtgcggcttaagcgacccgtcaagtataatggtgatcttgcccaagtcattgatatcaccgagaacggtttggacgttagggttcggttcattcccagaattgattacggcgccggcatggaagtgctcggtgcggatggcaagcgcaagcgtcaggccccggttcagcgccccccgcagaaactattcagcgaggtggaagctcggaagcgaaatcctcgcaacctgtcgggcaatccccagaccaacatgtggagttacaatggtgatcaattcgagggtggtttcttggtcaaggatatcaagattcagcacttgcaggtcaaagatgtcaacccaagtctagaggaggtcacccgatttacctctggaggcgaagatggcgttgagaatatcgatctcaagtcacttgccgcaagtttgcgtgacagcaacgctacgaccacgtatctccctggcgatattgtcgaggtttacgacggtgagcagaagggtgttatcggaaaggccacgaaggtgcaggcagacattgtcactcttgaggtacaagagggtgaactgcgtgggcagaccattgatgtacctacgaaaggtctacgcaagcgcttccgaactggtgatcacgtcaaggtcatcggaggcagtcggtaccgagacgagctcggcatggtcgtcaagatctcggaagaccgagtcactctcttgacggatcagaccaataccgaaatcacagtgttcagcaaggatttgagagaggcttctgatattgctggacagggatctctgggacagtattctctacttgatcttgtacagctcgacgctacaaccgttggctgcattgtcaaggtcgacagagagtctctgggggtcctagatcagaatggcgacaaccgtcaggtcatgccgtcgcagattgctaacaaattacccaagagaaaactcgccgtagctgctgaccgcaatggctctgagatccgcccggacgatgttgtgaaggagtacagtggtatgggtcgacaaggaaagattatccacatccaccgcagctatgttttctgtcatacgcaccagactacggagaatgctggtatctttgttgctagggtcagcaatgtcagcactgtctcagcaaagggtggccgcattgcagccgctgctggaccggacctcatttccatgaaccctgcactgaagcttaacggcggcaagaatgacatgccacctccgaaggtcacgtttggcagggacaagttacttggacagactgtcacgatcagaaagggaggctggaagggtttacttggtcgcgtcaaggacaccactgatactcacgcacgggtagagctccactccaagagcaaaatcatcagcgtacccaaagtcgatctagttgtacgagacatgattagtggtcgtgaagtcaagaactgggagagaggcggtggtcgcggaggtttcaacggtgctccaggtggcagacctcaggaacgttctggtccagactggggcaatggtggtcgcacacctgttaattcatcgtccgccagaacgccggcttggaagacgcctggtggtggagccggaggccgaactcctgcctggggtcgtggaggtgacggtggacgaactccagcatgggccgacggatcaaggaccgttaacccctatgatggaaacaggactgcatacggtggttccggtgccggtggtcgtacaccagcctggtcatctggtggctccaagacaccggcctatgagggtagcggatccaagactcctgcatacggtggtagtagtggtgatggctggggttcaaagacaccttacggggcgtcggctgccacacctggtgcaagtggtggtgatagctggggctatactcccggcgccagcggatcatctggtgcctacgatgcacccacgcctggcggtatgctaggcgctcctactcctggtgctttcaacgccccgacccctggagcctataacgctcctactcctggtggtcctgtcgatgctcccacgcctggcggtggctggcaaggtggatggggctcgaacaatgcgcctacccctggagccgctgcggctcctactcccgcggctggaggcttcgcatatggcgctccgacccctggagcttacacggctgacacgcctgccgctggtccgcgctacactgatgatgactagatggatgggtggacggcggaaagtgacgagggtctgcacgtaatgaatggcagactacctatacgcgggctactggagctgctgaggggcgttcgggatttgcttgagcattcatgtatacttgtaggaatagaggcatagcgaaatggagattgcgatagctatctcccaaaagaatgctttttatttattatatgctatgcgtgtctggtctggtcttgtctatctacgcagtgctctatgagtcgtgactggtatctgtgcatgagaaggtac

SEQ ID NO: 32145 - DNA, 627 bp, Muscodor strobelii
  misc_feature: SGI cDNA ID NO. 571074
  misc_feature: Encodes the peptide sequence at SEQ ID NO 32146
atgtgccactaccaactcatccatacgacgccccactacgaacaaatcagtctcgacgcggccgaacgacggaatatggagcgtatcacgagttgcagcgaaaacaaagttgttgaggccattgagggtgctgtgggggcaaaggagtacgatggttttgacgatgtggctttggatgagaaagctgagagtgagaagatcgaagatagtgcgcaggagaaaagagatcaagacaaggatgacaggaaaaccaaggagaatgagaaagatgaagacgatgacgatgacctggtagtagaactaggtatcgacgacgatgaatcagtcgctcccggggatgaaaatgaagacgacgaggaaagattgaaagaggagcttgatcagtggactgagcttgatctgggcaatatcgggagtaatgatggcgtttgtggggatgcgtatattgaggaggtttttgttccgtttactatggatgagtcgttcttgcttgagcggaatgatgtggttggggatgataggaggaaggggatgataggtgaggtgatggatgcaatggttgagagtgtgagacagagaggcggtgggaagaaccgtgggtgttgtggatggtttggttggtggtga

SEQ ID NO: 32146 - protein, 208 aa, Muscodor strobelii
  misc_feature: SGI Peptide ID NO. 571074
MCHYQLIHTTPHYEQISLDAAERRNMERITSCSENKVVEAIEGAVGAKEYDGFDDVALDEKAESEKIEDSAQEKRDQDKDDRKTKENEKDEDDDDDLVVELGIDDDESVAPGDENEDDEERLKEELDQWTELDLGNIGSNDGVCGDAYIEEVFVPFTMDESFLLERNDVVGDDRRKGMIGEVMDAMVESVRQRGGGKNRGCCGWFGWW

SEQ ID NO: 32147 - DNA, 1353 bp, Muscodor strobelii
  misc_feature: SGI cDNA ID NO. 571075
  misc_feature: Encodes the peptide sequence at SEQ ID NO 32148
atgccattcacctacgaagacaccgacaattaccagacattggattcattcctcaagcaacacacatctatcaggttcattcgcctgcagtggattgactactccaacgtccttcgcacccgtttcgtacctgtcggtcgttgtttgcaaatcgcagctgaaaacgaccatgtccacctcgcgcagaatagcatgctcattcccatctcgaccgctccgcgaatattttccatcagcgatcaccatgaaacgtggacactctaccctgattggtcctctttacgtctctgcggctttcacccgggccacgcgactgtcatgagctacatgaaccaggacgagtcgccagccatgtttgacaaatgtcctcgcgcactactcgtcgaaaccctacgtgaattggaatcttctttggccaagcgggtagtaattggatttgagattgaattcgtacttttagacgagtcgaacaacatcataactccaatcgaccgcctggatggctactcgaggactgcagggcttcgagccgatactcttgatctcgtcgaggagatcatagatgcacttgaacggtcttccatcaggattcatcatttccacgcagatgcatatgaccagctagagatctctcttgctccagaacccgcgatagatgccatagattcacttgtattggcacaggaaacaattcgcactatatgtgtacgccgaaagctcaaagcttctatggccccccaagcgactttaactggtccatccacgggcatacatctccatctctcattgaataattccgattcagtggccagacatgaggctagtgctatgttagatcatgacaacttcctcgctggcattcttaatcacatgggctctctttgtgcgatgggcatggcaaactatgacggctacattcgctccatcagcgattgtgcaggtaaatggattggatggggcacagataatcgcgatctgccggtgcgcaagatcagtgattcgcattgggagtttcgcacaatggacagcaccgccaacccctatctttttacggctacgctattactcgccgccctggatggtattgaaaatgacactgatatggtctggaaggattgcacactctttccagacttactagatgccgatgcgagagcttcctacggactgaacaagagcatgccgatatcgttcaaggaagctttagaccgtctcaaaagcgatactgagctggggaaaagaatccctcgtgaattgctggagtggttcgtctccgttaaggacaaggaggtagaggaatttgcgaagatgagcgatgaagagcgaagacaccgttttctgagatacttctga

SEQ ID NO: 32148 - protein, 450 aa, Muscodor strobelii
  misc_feature: SGI Peptide ID NO. 571075
  misc_feature (120)..(362): Pfam Id: PF00120 Pfam Desc: Glutamine synthetase, catalytic domain
  misc_feature (12)..(450): NCBI GI: 261189081 Blast Desc: protein fluG [Ajellomyces dermatitidis SLH14081] gi|239591957|gb|EEQ74538.1| protein fluG [Ajellomyces dermatitidis SLH14081]
  misc_feature (65)..(450): NCBI GI: 239609228 Blast Desc: protein fluG [Ajellomyces dermatitidis ER-3]
  misc_feature (11)..(450): NCBI GI: 159124404 Blast Desc: conserved [Aspergillus fumigatus A1163]
  misc_feature (14)..(450): NCBI GI: 119470611 Blast Desc: glutamine synthetase, catalytic subunit, [Neosartorya fischeri NRRL 181] gi|119406208|gb|EAW16159.1| glutamine synthetase, catalytic subunit, [Neosartorya fischeri NRRL 181]
  misc_feature (10)..(442): NCBI GI: 256732067 Blast Desc: NECHADRAFT_41904 [Nectria haematococca mpVI 77-13-4]
  misc_feature (12)..(443): NCBI GI: 169617700 Blast Desc: SNOG_12032 [Phaeosphaeria nodorum SN15] gi|111059324|gb|EAT80444.1| SNOG_12032 [Phaeosphaeria nodorum SN15]
  misc_feature (10)..(443): NCBI GI: 171693747 Blast Desc: protein product [Podospora anserina] gi|170946822|emb|CAP73626.1| protein product [Podospora anserina]
  misc_feature (86)..(450): NCBI GI: 115390795 Blast Desc: [Aspergillus terreus NIH2624] gi|114193826|gb|EAU35526.1| [Aspergillus terreus NIH2624]
  misc_feature (12)..(450): NCBI GI: 226291817 Blast Desc: developmental protein fluG [Paracoccidioides brasiliensis Pb18]
  misc_feature (12)..(450): NCBI GI: 116197801 Blast Desc: CHGG_07056 [Chaetomium globosum CBS 148.51] gi|88178335|gb|EAQ85803.1| CHGG_07056 [Chaetomium globosum CBS 148.51]
  misc_feature (19)..(450): SWISSPROT Homolog: EC 6.3.1.2 Glutamate--ammonia ligase
MPFTYEDTDNYQTLDSFLKQHTSIRFIRLQWIDYSNVLRTRFVPVGRCLQIAAENDHVHLAQNSMLIPISTAPRIFSISDHHETWTLYPDWSSLRLCGFHPGHATVMSYMNQDESPAMFDKCPRALLVETLRELESSLAKRVVIGFEIEFVLLDESNNIITPIDRLDGYSRTAGLRADTLDLVEEIIDALERSSIRIHHFHADAYDQLEISLAPEPAIDAIDSLVLAQETIRTICVRRKLKASMAPQATLTGPSTGIHLHLSLNNSDSVARHEASAMLDHDNFLAGILNHMGSLCAMGMANYDGYIRSISDCAGKWIGWGTDNRDLPVRKISDSHWEFRTMDSTANPYLFTATLLLAALDGIENDTDMVWKDCTLFPDLLDADARASYGLNKSMPISFKEALDRLKSDTELGKRIPRELLEWFVSVKDKEVEEFAKMSDEERRHRFLRYF

SEQ ID NO: 32149 - DNA, 405 bp, Muscodor strobelii
  misc_feature: SGI EST ID NO. CUFF.76046.0
  misc_feature: Variant of the nucleotide sequence at SEQ ID NO 32147
ctggatggctactcgaggactgcagggcttcgagccgatactcttgatctcgtcgaggagatcatagatgcacttgaacggtcttccatcaggattcatcatttccacgcagatgcatatgaccagctagagatctctcttgctccagaacccgcgatagatgccatagattcacttgtattggcacaggaaacaattcgcactatatgtgtacgccgaaagctcaaagcttctatggccccccaagcgactttaactggtccatccacgggcatacatctccatctctcattgaataattccgattcagtggccagacatgaggctagtgctatgttagatcatgacaacttcctcgctggcattcttaatcacatgggctctctttgtgcgatgggcatggca

SEQ ID NO: 32150 - DNA, 2160 bp, Muscodor strobelii
  misc_feature: SGI cDNA ID NO. 571076
  misc_feature: Encodes the peptide sequence at SEQ ID NO 32151
atgaaatccttttcatacctcgcgctggctagcgctctgagccccgtcgctctagctggcgttggcccgggtgggatcgacgtgacaatttctccgatccaacctcaactccaatttcctcagacagggccgactctcgaggctcaagaacctcaatcgaaagagtatgaatacatagtagttggttctggccctggtggtgcccctctggcagcaaacctcgctcgcgcaggtcataccgttttgctggtcgatgcaggtggtgactatggctatctgcggcaagttgacgctcctgctctcgcgaacccatcttccgaaaggaacgaagtgagctggggcttcttcacgcaccactatgcaaacaagaccatggcattgaaggatcgaaaactcacatgggagacccccgacggtgattggtatactggcgtcaatccacctgagggttcgagcgtcctgggaaacttttaccctcgatatggcggtttgggtggctgtgtcgagcataatgctctggtcgggctattgccaagcaagaacgacttcgatgatattgccaacttgacgggcgaccctgcatggtcaaacgataacataagacagtactacgaaaagcttgagaatgctcagtatcctgtcgacgacacctctgtgcattctgttagcgggtatatcgatctaaacatcaatcccgaaggtatcgcagcacaagacatcaagctcatgtctgcattggctggagccgcaattggctacggcaaatcagcagatgatcttgtgaacgctattaacgagaccattaagactgctatacaacaaggaatcgacccttacaccgagttgctaccccttaatcttactcaagatatcgtcgacgcatggggaaatatccttgctcgtgacaccaattctgtggctcctgatcgcgatacagccaagacattcgcgcgactacccgagacaatggataatgtcgactaccgccgctcgactcctcgagattatgtttataaaacagtgatggccaagaatccggatggctccaagaaatatcaacttgacgttgctctagacactctggtgaccaaagtcacattcgccaacagaacgtgcagtggcaaaccgaaagctaatggcattgaatacctttacggacaatcgctttatagagccgatcctcgggcaagcaagacagagaacagtggcaagcctggatctgtcaaggccacgaaggaagttattgtttctggtggggctttcaactcaccccagatcttgaagttgtctggtgttggacccaaggaggaacttgaaaaattcggtattccagtcgtcctcgacttgccaggtgttggtaagaacctccaagatcgcttagaggttagcgtaaatgccgactaccctaccaacttcacccgaattctcgattgtacatatctcgcaaccgaggatgatccatgctggacccaatacgccgatagcaacaacaaaggagccgcgaagggtacctacgcctcgagcggtaattatttcggcgctttttgggcttcgagctactcagaggacggagaacaggatctctggattggaggattccccgccattttcaatggattctatcccggctattcttctaatgcggccacacctgacgcgaagaaccattggtcttggcttgttcttcacgctcatacgcgcaatagagccggcacagtcgagctggcttctgctaatcctcgtgatacccccatcatcacattccacaacttatacgaaggaatgaccaaagaagacgccgataaagacgccggcgccgttctcgaaggcatgcgcatggcccagagtttcttcaacaatgtgccagacatcgatggtctccccgttcaatggtggccgccaatggacgtatcttccgacgaggatctcattgaatggattaaagaagaagcttggggtcaccatgcatcatgctctaacaagatcggttctgatgatgatgttgatgccgtcctcgacgccaacttcaaagttagaggcgtccaaggtcttcgtgttgttgatgcttcggcattccctaagatcccaggcacatttcccgcaattgggattatgatgctctccgagaaagcctctgctgacattctagctggtcgctag

SEQ ID NO: 32151 - protein, 719 aa, Muscodor strobelii
  misc_feature: SGI Peptide ID NO. 571076
  misc_feature (561)..(711): Pfam Id: PF05199 Pfam Desc: GMC oxidoreductase
  misc_feature (56)..(474): Pfam Id: PF00732 Pfam Desc: GMC oxidoreductase
  misc_feature (57)..(88): Pfam Id: PF00890 Pfam Desc: FAD binding domain
  misc_feature (639)..(711): Pfam Id: PF05199 Pfam Desc: GMC oxidoreductase
  misc_feature (408)..(474): Pfam Id: PF00732 Pfam Desc: GMC oxidoreductase
  misc_feature (57)..(94): Pfam Id: PF07992 Pfam Desc: Pyridine nucleotide-disulphide oxidoreductase
  misc_feature (56)..(717): NCBI GI: 154321511 Blast Desc: BC1G_01630 [Botryotinia fuckeliana B05.10] gi|150852168|gb|EDN27360.1| BC1G_01630 [Botryotinia fuckeliana B05.10]
  misc_feature (53)..(716): NCBI GI: 240275508 Blast Desc: GMC oxidoreductase [Ajellomyces capsulatus H143]
  misc_feature (53)..(716): NCBI GI: 225561900 Blast Desc: glucose-methanol-choline oxidoreductase [Ajellomyces capsulatus G186AR]
  misc_feature (54)..(716): NCBI GI: 169609841 Blast Desc: SNOG_08012 [Phaeosphaeria nodorum SN15] gi|111063168|gb|EAT84288.1| SNOG_08012 [Phaeosphaeria nodorum SN15]
  misc_feature (26)..(718): NCBI GI: 261352468 Blast Desc: alcohol dehydrogenase [Verticillium albo-atrum VaMs.102]
  misc_feature (50)..(717): NCBI GI: 255948056 Blast Desc: Pc22g07790 [Penicillium chrysogenum Wisconsin 54-1255] gi|211591812|emb|CAP98067.1| Pc22g07790 [Penicillium chrysogenum Wisconsin 54-1255]
  misc_feature (53)..(718): NCBI GI: 115491891 Blast Desc: conserved [Aspergillus terreus NIH2624] gi|114197433|gb|EAU39133.1| conserved [Aspergillus terreus NIH2624]
  misc_feature (53)..(716): NCBI GI: 261197980 Blast Desc: choline dehydrogenase [Ajellomyces dermatitidis SLH14081] gi|239595355|gb|EEQ77936.1| choline dehydrogenase [Ajellomyces dermatitidis SLH14081]
  misc_feature (53)..(716): NCBI GI: 239607795 Blast Desc: choline dehydrogenase [Ajellomyces dermatitidis ER-3]
  misc_feature (55)..(717): NCBI GI: 242791737 Blast Desc: choline dehydrogenase, [Talaromyces stipitatus ATCC 10500] gi|218718402|gb|EED17822.1| choline dehydrogenase, [Talaromyces stipitatus ATCC 10500]
  misc_feature (316)..(719): SWISSPROT Homolog: EC 1.1.99.1 Choline dehydrogenase
MKSFSYLALASALSPVALAGVGPGGIDVTISPIQPQLQFPQTGPTLEAQEPQSKEYEYIVVGSGPGGAPLAANLARAGHTVLLVDAGGDYGYLRQVDAPALANPSSERNEVSWGFFTHHYANKTMALKDRKLTWETPDGDWYTGVNPPEGSSVLGNFYPRYGGLGGCVEHNALVGLLPSKNDFDDIANLTGDPAWSNDNIRQYYEKLENAQYPVDDTSVHSVSGYIDLNINPEGIAAQDIKLMSALAGAAIGYGKSADDLVNAINETIKTAIQQGIDPYTELLPLNLTQDIVDAWGNILARDTNSVAPDRDTAKTFARLPETMDNVDYRRSTPRDYVYKTVMAKNPDGSKKYQLDVALDTLVTKVTFANRTCSGKPKANGIEYLYGQSLYRADPRASKTENSGKPGSVKATKEVIVSGGAFNSPQILKLSGVGPKEELEKFGIPVVLDLPGVGKNLQDRLEVSVNADYPTNFTRILDCTYLATEDDPCWTQYADSNNKGAAKGTYASSGNYFGAFWASSYSEDGEQDLWIGGFPAIFNGFYPGYSSNAATPDAKNHWSWLVLHAHTRNRAGTVELASANPRDTPIITFHNLYEGMTKEDADKDAGAVLEGMRMAQSFFNNVPDIDGLPVQWWPPMDVSSDEDLIEWIKEEAWGHHASCSNKIGSDDDVDAVLDANFKVRGVQGLRVVDASAFPKIPGTFPAIGIMMLSEKASADILAGR

SEQ ID NO: 32152 - DNA, 1491 bp, Muscodor strobelii
  misc_feature: SGI cDNA ID NO. 571077
  misc_feature: Encodes the peptide sequence at SEQ ID NO 32153
atgagacagtacgttcacaatccgggaagcggcaaggccacagcttgtcgaaacacgcagacggacaagaggctcgcatttgggcttcgtggcctcgtccttgataccgacgcttctacaagctggtcggctaacgaacccgacatgatcaaagatatgttggccttcctcgatcgtagcaacataggaaatgcgaaaatagccggcctagaagaggacttgaatcttggcagtggcagctatcaatggctcatcaatatcttctacgtcgcttatgtcctagctgagttcggcatcctgctgtggaaggcattcccccctcacatcgttggtaccattgttgtacttggatggggtttaatcgcaactgcacaagccggtgcccaaaattgggatgggcttatggctttaaggtttctacttggtgtcttcgaagcttgctatggaccaggaatcatctatctgctttcattcttctatctccgacaagaagttggctttcgatgtggcatttttgcctccgctgctccgctagcatcaacattcgcaggtgctctagcttatggcattacaaatggccgttcacatctcgccaactggcgtctgctgttcctcgtcgagggcgtaccgactgtgcttatggccatcgctgccttcttttgcattcctgattcccctgagaaagccaaattcttgaaccgggaagaaaaggcgattgtcagggcaagagcgatgcggcaagtcggcacagatgcaaacgatagggttgggaagtttcgcttcaaagatgtttgcgcagttctggtcgactggaaggcgtggctctgtgcctttatgtacttctcgggaaatgtctcttactccagtttgcctgtgtttttgccaacaatcttgaaagacatgggctataccaatatcaatgcccagggcctctccgctcctccgtcattcaccgcgttcttatgcgctctcctcactacatggctagctgatagaactcagcagcgatgtttcgttctttttgtgacctccgctataggaggcaccggttatattgtccttgctaccgtcgaaacggtcggaatccgctactttgcaacgttcttggcttcggctggcgttttttccaccattccaaacattcttgccttgactctgagtaagtattttgtcatgtccgaccaaacgaaggttctacagcgcggcatgtctcttgtcctcatcaatctcgtcggtcagaccggacctttcctaggcactaacatattccccacgtggcaaagtcccaggtatatcgagggcatgagtatctgcgccgctttcatgtttttttctgccctgctcgcgctagttcagcgatattttctcgtacgggagaatgcaaagctcgatcgcaaatacggcgtcctggttgagaaggactcgggtaccccagacacagaggatttcgctcttgagaattatggtccttatttcagatacgtgctttga

SEQ ID NO: 32153 - protein, 496 aa, Muscodor strobelii
  misc_feature: SGI Peptide ID NO. 571077
  misc_feature (53)..(420): Pfam Id: PF07690 Pfam Desc: Major Facilitator Superfamily
  misc_feature (49)..(496): NCBI GI: 238487978 Blast Desc: MFS transporter, [Aspergillus flavus NRRL3357] gi|220700106|gb|EED56445.1| MFS transporter, [Aspergillus flavus NRRL3357]
  misc_feature (58)..(496): NCBI GI: 145243280 Blast Desc: An11g01720 [Aspergillus niger] gi|134078847|emb|CAK45906.1| protein product [Aspergillus niger]
  misc_feature (53)..(493): NCBI GI: 189211381 Blast Desc: pantothenate transporter liz1 [Pyrenophora tritici-repentis Pt-1C-BFP] gi|187978114|gb|EDU44740.1| pantothenate transporter liz1 [Pyrenophora tritici-repentis
  misc_feature (53)..(496): NCBI GI: 255948086 Blast Desc: Pc22g07940 [Penicillium chrysogenum Wisconsin 54-1255] gi|211591827|emb|CAP98082.1| Pc22g07940 [Penicillium chrysogenum Wisconsin 54-1255]
  misc_feature (58)..(496): NCBI GI: 119469461 Blast Desc: MFS transporter, [Neosartorya fischeri NRRL 181] gi|119406102|gb|EAW16053.1| MFS transporter, [Neosartorya fischeri NRRL 181]
  misc_feature (58)..(496): NCBI GI: 121699279 Blast Desc: MFS transporter, [Aspergillus clavatus NRRL 1] gi|119396110|gb|EAW06542.1| MFS transporter, [Aspergillus clavatus NRRL 1]
  misc_feature (53)..(496): NCBI GI: 242777495 Blast Desc: MFS transporter, [Talaromyces stipitatus ATCC 10500] gi|218722664|gb|EED22082.1| MFS transporter, [Talaromyces stipitatus ATCC 10500]
  misc_feature (53)..(496): NCBI GI: 169599515 Blast Desc: SNOG_02577 [Phaeosphaeria nodorum SN15] gi|111068188|gb|EAT89308.1| SNOG_02577 [Phaeosphaeria nodorum SN15]
  misc_feature (53)..(496): NCBI GI: 212533195 Blast Desc: MFS transporter, [Penicillium marneffei ATCC 18224] gi|210072118|gb|EEA26207.1| MFS transporter, [Penicillium marneffei ATCC 18224]
  misc_feature (58)..(496): NCBI GI: 70991749 Blast Desc: MFS transporter [Aspergillus fumigatus Af293] gi|66848356|gb|EAL88685.1| MFS transporter, [Aspergillus fumigatus Af293] gi|159124285|gb|EDP49403.1| MFS transporter,
MRQYVHNPGSGKATACRNTQTDKRLAFGLRGLVLDTDASTSWSANEPDMIKDMLAFLDRSNIGNAKIAGLEEDLNLGSGSYQWLINIFYVAYVLAEFGILLWKAFPPHIVGTIVVLGWGLIATAQAGAQNWDGLMALRFLLGVFEACYGPGIIYLLSFFYLRQEVGFRCGIFASAAPLASTFAGALAYGITNGRSHLANWRLLFLVEGVPTVLMAIAAFFCIPDSPEKAKFLNREEKAIVRARAMRQVGTDANDRVGKFRFKDVCAVLVDWKAWLCAFMYFSGNVSYSSLPVFLPTILKDMGYTNINAQGLSAPPSFTAFLCALLTTWLADRTQQRCFVLFVTSAIGGTGYIVLATVETVGIRYFATFLASAGVFSTIPNILALTLSKYFVMSDQTKVLQRGMSLVLINLVGQTGPFLGTNIFPTWQSPRYIEGMSICAAFMFFSALLALVQRYFLVRENAKLDRKYGVLVEKDSGTPDTEDFALENYGPYFRYVL

SEQ ID NO: 32154 - DNA, 1767 bp, Muscodor strobelii
  misc_feature: SGI cDNA ID NO. 571078
  misc_feature: Encodes the peptide sequence at SEQ ID NO 32155
atgtcgcacgattctcgaccaggggaaactccgagtgacctagaaaaatctaggcattcggatgaagttgagcatgctgagtacaacactgaatatgacgtagaacacgagactggcaactttgaagttgatgagtcggctcttccaaaaggttattttacatcgagctttttcctggggtcaatgacggcaatctgcctgggcctattcgcaggtgtctcaggctatgcattcgctgctccagtgttgacaatcatcaatgaggatatcggaccggatccgaatttcgtctggatagcgttgtcctacaccctaactagtgccgtcacgttgacaatcatcggtcgtgtttcggacattttcgggcgaagatggatgttcatcggcggagcaacattcgccttggtcggcagcattgtctgcgcgaccgcgaagacgattcctacgttcattggcggcatgacaatcatcggcatcggtgcagctacacagttatcgtattactacgtgatgggtgaactagtcccgatgaaatatcgtcttgcgggcaacggcttttgctacatcttctgcatcccaggatctggattcgctgctgtcactgctcaagcgttcattacgtaccaaccccagatcggctggcgtggtccgtactatttgctcattgctgctaatgctatttccttagcatgttggatactattctatcatccaccgacgttccacatgaagcatccccaagagaaagcgaaacagtacgttctgagctttgactacgttgggactatattgtacacaggaggattgctcatcttgatcctgggacttaactggggtggaaatgtgtatgcatggtcatctgcatacgttatcggcaccattgttgctggctttagcggcctcgccttgttcatcttgtgggagacttttataccactcaaagagcctctcatgcctatatcactcttttttaatagggattgggttgttgcaaccgtcgtatctggcgttgatgcttttgccattgtatggccaggtatggtcgccaatctttacacaaatggcgacgcaatcaatgccgcttggctcgcctctctttccagcatctctatcactgttggccaggtcctcggtggactatttgccaagcggattggcagagtcagactacagatcatcagtagctacacgcttggcggcattttctatgcgtccatggcagcttgcacgcctagcagcaaggcattagccgcgagcttaatgtttctgggtaatttttgggtcgggtggggagaaagtcttacgattacggtcgttactttaactgcaaggaaccaaagcaagcttggaacagccagtggaactgcgggttctattcgattcttgatatccagtatcgcaacaacagtctacactgttgtgctcagcaaccgtctagtacagacgatcgtctcagaagttccttcagctttggttggagccgggctaccgtcttctagcgtttcggacttcatcgccgatatccctaccggagacttcacagatattcaaggggtgacttcgcaaatcatcaaggtcggactagcggcttataagcaagcgtactctaatgcctatcggactgttttcttaaccacaatagctttcactggcattgcagttattggtagtattatgcttcccaacatcgataacctcctgagcggaaaggtggcagtcactcttcacagagaggaagccggagataatatcaagagcgtcagctga

SEQ ID NO: 32155 - protein, 588 aa, Muscodor strobelii
  misc_feature: SGI Peptide ID NO. 571078
  misc_feature (65)..(468): Pfam Id: PF07690 Pfam Desc: Major Facilitator Superfamily
  misc_feature (17)..(588): Pfam Id: PF06609 Pfam Desc: Fungal trichothecene efflux pump (TRI12)
  misc_feature (65)..(239): Pfam Id: PF07690 Pfam Desc: Major Facilitator Superfamily
  misc_feature (48)..(571): Pfam Id: PF06609 Pfam Desc: Fungal trichothecene efflux pump (TRI12)
  misc_feature (14)..(579): NCBI GI: 261361349 Blast Desc: conserved [Verticillium albo-atrum VaMs.102]
  misc_feature (10)..(583): NCBI GI: 255944063 Blast Desc: Pc20g02450 [Penicillium chrysogenum Wisconsin 54-1255] gi|211587534|emb|CAP85574.1| Pc20g02450 [Penicillium chrysogenum Wisconsin 54-1255]
  misc_feature (268)..(577): NCBI GI: 169606244 Blast Desc: SNOG_06160 [Phaeosphaeria nodorum SN15] gi|160706946|gb|EAT85991.2| SNOG_06160 [Phaeosphaeria nodorum SN15]
  misc_feature (43)..(583): NCBI GI: 242771562 Blast Desc: siderophore iron transporter, [Talaromyces stipitatus ATCC 10500] gi|218721486|gb|EED20904.1| siderophore iron transporter, [Talaromyces stipitatus ATCC 10500]
  misc_feature (9)..(584): NCBI GI: 189208644 Blast Desc: trichothecene efflux pump [Pyrenophora tritici-repentis Pt-1C-BFP] gi|187976748|gb|EDU43374.1| trichothecene efflux pump [Pyrenophora tritici-repentis
  misc_feature (12)..(524): NCBI GI: 169614029 Blast Desc: SNOG_10149 [Phaeosphaeria nodorum SN15] gi|160707263|gb|EAT82484.2| SNOG_10149 [Phaeosphaeria nodorum SN15]
  misc_feature (91)..(581): NCBI GI: 145241974 Blast Desc: An09g03170 [Aspergillus niger] gi|134078176|emb|CAK40256.1| protein product [Aspergillus niger]
  misc_feature (1)..(585): NCBI GI: 261353464 Blast Desc: trichothecene efflux pump [Verticillium albo-atrum VaMs.102]
  misc_feature (1)..(579): NCBI GI: 169595380 Blast Desc: SNOG_00428 [Phaeosphaeria nodorum SN15] gi|160701085|gb|EAT91923.2| SNOG_00428 [Phaeosphaeria nodorum SN15]
  misc_feature (26)..(584): NCBI GI: 169595438 Blast Desc: SNOG_00458 [Phaeosphaeria nodorum SN15] gi|160701097|gb|EAT91953.2| SNOG_00458 [Phaeosphaeria nodorum SN15]
MSHDSRPGETPSDLEKSRHSDEVEHAEYNTEYDVEHETGNFEVDESALPKGYFTSSFFLGSMTAICLGLFAGVSGYAFAAPVLTIINEDIGPDPNFVWIALSYTLTSAVTLTIIGRVSDIFGRRWMFIGGATFALVGSIVCATAKTIPTFIGGMTIIGIGAATQLSYYYVMGELVPMKYRLAGNGFCYIFCIPGSGFAAVTAQAFITYQPQIGWRGPYYLLIAANAISLACWILFYHPPTFHMKHPQEKAKQYVLSFDYVGTILYTGGLLILILGLNWGGNVYAWSSAYVIGTIVAGFSGLALFILWETFIPLKEPLMPISLFFNRDWVVATVVSGVDAFAIVWPGMVANLYTNGDAINAAWLASLSSISITVGQVLGGLFAKRIGRVRLQIISSYTLGGIFYASMAACTPSSKALAASLMFLGNFWVGWGESLTITVVTLTARNQSKLGTASGTAGSIRFLISSIATTVYTVVLSNRLVQTIVSEVPSALVGAGLPSSSVSDFIADIPTGDFTDIQGVTSQIIKVGLAAYKQAYSNAYRTVFLTTIAFTGIAVIGSIMLPNIDNLLSGKVAVTLHREEAGDNIKSVS

SEQ ID NO: 32156 - DNA, 334 bp, Muscodor strobelii
  misc_feature: SGI EST ID NO. CUFF.76071.0
  misc_feature: Variant of the nucleotide sequence at SEQ ID NO 32154
tgaggatatcggaccggatccgaatttcgtctggatagcgttgtcctacaccctaactagtgccgtcacgttgacaatcatcggtcgtgtttcggacattttcgggcgaagatggatgttcatcggcggagcaacattcgccttggtcggcagcattgtctgcgcgaccgcgaagacgattcctacgttcattggcggcatgacaatcatcggcatcggtgcagctacacagttatcgtattactacgtgatgggtgaactagtcccgatgaaatatcgtcttgcgggcaacggcttttgctacatcttctgcatcccaggatctggattcgct

SEQ ID NO: 32157 - DNA, 1578 bp, Muscodor strobelii
  misc_feature: SGI cDNA ID NO. 571079
  misc_feature: Encodes the peptide sequence at SEQ ID NO 32158
atggcagagatggatgcgccttatttgttcatctatcaccaccgatcaaaattagaggaattggctcagcatgaaacctaccagaacttactaaagccacttttagattacgtttaccaaaattatgcggatgagtatcacgcggctgatgagatgttgaaaagggaggccataactccttttcactttggtaaactctttaaaccaaaccagatggttgtttgccggcaggctcgagacggtttgacagctgcagttttacagtcgtatccgacaagagagggtgacattttctctttcacaggttggacatgggctttcgacggtgataaactctatagacagaagtgggatgggaaggtgacaagtccatccgacgatgagatacctatttcgaccttggcaatacacccagtagattatgcccaagtctcggatataacgcagcttgagaagcgaggagaaaagttctggagcgtgcggaaacagtcatatatgtgctacactgggtggactagaaaccgcgatcgctattatatcgatgctcgtttcatggtggacgtggccacgtaccatattatacacggcagtccttccaaagaatcaaatacgggttcagacgagaccattgatccttggccaaagaaactcggtagacaggatcatctggcccctgaagtcgccagacttctccctctcacgatctacgggttcaacctactggagaaaaaatgggtatcaatatttgtccaaaatctgcatgatcttgagtggaataagaaagcattcgaccgtctcgttctagagccaaagaccaaagagatgatccgtgctctcgtagatgtccagacacaggcagaaaagatggacgacatcatcaccggaaaaggcaatggcttgattgtgcttttacacggaagtccggggacaggcaaaacgctgacagctgagagtgttgctgagcttgccgagaaaccgctgtatcgcgtgacttgcggcgacattgggactgaagcagcaaccgtggaacaatatttgcaatctgtgttgtatcttggaaagctgtgggactgtattctacttcttgatgaggcggacgttttccttgaagagagaaccatggctgatttgcagcgaaactcccttgtttcagtgtttcttcgtgtacttgagtattatgagggtatactcatattaacttcaaatagagtgggaaccttcgatgaagcttttaagtcgcgcatacaggttgctattcactatgataatctcactaagaagtctcgtaaacagatctggcgaaacttctttgacatgattgaggaatcgaacgaagaagacgctaacatgccggagctcgagcggcggctcgatgaattggcctcagaagagatgaatggtcgccagatccgcaatgcgctacttacagcgcgacaacttgctaagcacaagaatgagagacttgattggccgcacctgagccaagtgatgaaaacttctgcagcgttcaataaatatctgaaggctgtacgagggcacagcgacgatcaatgggcgcgtgaagaacaattgagataa

SEQ ID NO: 32158 - protein, 525 aa, Muscodor strobelii
  misc_feature: SGI Peptide ID NO. 571079
  misc_feature (301)..(484): Pfam Id: PF00004 Pfam Desc: ATPase family associated with various cellular activities (AAA)
  misc_feature (246)..(525): NCBI GI: 261358384 Blast Desc: conserved [Verticillium albo-atrum VaMs.102]
  misc_feature (4)..(525): NCBI GI: 46105200 Blast Desc: FG00228.1 [Gibberella zeae PH-1]
  misc_feature (3)..(525): NCBI GI: 212545270 Blast Desc: conserved [Penicillium marneffei ATCC 18224] gi|210065758|gb|EEA19852.1| conserved [Penicillium marneffei ATCC 18224]
  misc_feature (2)..(512): NCBI GI: 255932979 Blast Desc: Pc12g11420 [Penicillium chrysogenum Wisconsin 54-1255] gi|211582579|emb|CAP80769.1| Pc12g11420 [Penicillium chrysogenum Wisconsin 54-1255]
  misc_feature (2)..(525): NCBI GI: 115449835 Blast Desc: [Aspergillus terreus NIH2624] gi|114187657|gb|EAU29357.1| [Aspergillus terreus NIH2624]
  misc_feature (3)..(525): NCBI GI: 171685452 Blast Desc: protein product [Podospora anserina] gi|170942687|emb|CAP68340.1| protein product [Podospora anserina]
  misc_feature (3)..(525): NCBI GI: 46133953 Blast Desc: FG09116.1 [Gibberella zeae PH-1]
  misc_feature (1)..(520): NCBI GI: 169619754 Blast Desc: SNOG_13075 [Phaeosphaeria nodorum SN15] gi|111058282|gb|EAT79402.1| SNOG_13075 [Phaeosphaeria nodorum SN15]
  misc_feature (181)..(525): NCBI GI: 212545829 Blast Desc: conserved [Penicillium marneffei ATCC 18224] gi|210064588|gb|EEA18683.1| conserved [Penicillium marneffei ATCC 18224]
  misc_feature (230)..(525): NCBI GI: 169615523 Blast Desc: SNOG_10919 [Phaeosphaeria nodorum SN15] gi|160702979|gb|EAT81418.2| SNOG_10919 [Phaeosphaeria nodorum SN15]
MAEMDAPYLFIYHHRSKLEELAQHETYQNLLKPLLDYVYQNYADEYHAADEMLKREAITPFHFGKLFKPNQMVVCRQARDGLTAAVLQSYPTREGDIFSFTGWTWAFDGDKLYRQKWDGKVTSPSDDEIPISTLAIHPVDYAQVSDITQLEKRGEKFWSVRKQSYMCYTGWTRNRDRYYIDARFMVDVATYHIIHGSPSKESNTGSDETIDPWPKKLGRQDHLAPEVARLLPLTIYGFNLLEKKWVSIFVQNLHDLEWNKKAFDRLVLEPKTKEMIRALVDVQTQAEKMDDIITGKGNGLIVLLHGSPGTGKTLTAESVAELAEKPLYRVTCGDIGTEAATVEQYLQSVLYLGKLWDCILLLDEADVFLEERTMADLQRNSLVSVFLRVLEYYEGILILTSNRVGTFDEAFKSRIQVAIHYDNLTKKSRKQIWRNFFDMIEESNEEDANMPELERRLDELASEEMNGRQIRNALLTARQLAKHKNERLDWPHLSQVMKTSAAFNKYLKAVRGHSDDQWAREEQLR

SEQ ID NO: 32159 - DNA, 336 bp, Muscodor strobelii
  misc_feature: SGI cDNA ID NO. 571080
  misc_feature: Elevated expression when VOC is produced
  misc_feature: Encodes the peptide sequence at SEQ ID NO 32160
atgcgcgcagcaatcctctcgctcctcagcgttacagctctagccagcgctgagatcacccctggcaccatcgaggttgaacggtacactggagacgcgtctgcgccctatgagaacacaaccatcctggttcaccccgagtacgacttcgaggatgcgacaatcttggcggaagtgtcgtctctctatcaaactgggccagagtatacatacttctgttttgcctacaagcccgatggtactttctacagcgacacttggtttggaatcgatcagcctctacatctctcggaggaaaatgtacttgttaaagccgtcacttgcagaatcgagtaa

SEQ ID NO: 32160 - protein, 111 aa, Muscodor strobelii
  misc_feature: SGI Peptide ID NO. 571080
  misc_feature: Useful for introducing or modulating the production of volatile compounds
MRAAILSLLSVTALASAEITPGTIEVERYTGDASAPYENTTILVHPEYDFEDATILAEVSSLYQTGPEYTYFCFAYKPDGTFYSDTWFGIDQPLHLSEENVLVKAVTCRIE

SEQ ID NO: 32161 - DNA, 1189 bp, Muscodor strobelii
  misc_feature: SGI EST ID NO. CUFF.76100.0
  misc_feature: Variant of the nucleotide sequence at SEQ ID NO 32159
gacagattgtacacggagctttcgcatgctaacatttagacagtgccgtaagggcaactgcaggctccttattgaaattcgccgaccggtgattttactatccaataccagatacgtcaaccagcgcgtatgcggtcgcatttccatcaatggtatcaatcgccaagcagccaaagccaacctcatttctcgtgtttgctaccaaccatcctgcaggctccctttgactggggtcagctggagtttggatgaggatagcaaaatagcaaccatcatttccccctaggtctccttccctattgaggatgagatcttcactagaagatgggtacaaatgaagcttgaatgccaccaacgtggaattgattccaatgcagcatctaacagcaacagagacaagtgaatacctaattccgaaataactcatatttcgaactttgtgaatcaagttatcaaatttgcaaccaagattcttcttttgcccaatatgcgcgcagcaatcctctcgctcctcagcgttacagctctagccagcgctgagatcacccctggcaccatcgaggttgaacggtacactggagacgcgtctgcgccctatgagaacacaaccatcctggttcaccccgagtacgacttcgaggatgcgacaatcttggcggaagtgtcgtctctctatcaaactgggccagagtatacatacttctgttttgcctacaagcccgatggtactttctacagcgacacttggtttggaatcgatcagcctctacatctctcggaggaaaatgtacttgttaaagccgtcacttgcagaatcgagtaaccggatcaactaaggcaacggcaggacttagggttgggttgacattggcaacacgtccatgtgaacaggtcttccattccacctgaactgggattgagaacagagctccaaggcgtcatttaggcacggcaggtccaggagcacgtcgcctaccactgagcatagcatagagcgttttctttgcaaactggcgaatcgatttgataggcgcttgtgttgtatagcgaattctgctatttataatcaagacttaatgatgtttactcttacagttgcgttgatgcgcaatcccataggtgcagaccacttcgacgacgtcctgttgatactagaacttactcattaattcaaatatcaagactcggc

SEQ ID NO: 32162 - DNA, 1620 bp, Muscodor strobelii
  misc_feature: SGI cDNA ID NO. 571081
  misc_feature: Encodes the peptide sequence at SEQ ID NO 32163
atggcgcctcgacgcattctagccacgccatccactaaggacgtctatcttgatgccctgctcgaagatgttcgtaagtacaacgcgcggcggccggatctctatgccggcctgcgcgagcgcaccatcgatgtagagatggcgctacttctgaacccccgtactgctcgcctcacgtgtaaggagccaccggaggaattcgaggctgttaacgcgcacttctcggcccaggtacatgctttcttcaacgcgctgggcgcctttgaggacatagcggagaagcagtctgctaatgggctcgatctcatccgtgccgacaagggcctttggctcaccatccgcgtgaccaatcagtcctttgatatctacccggattgcctacaccgcacgttccacacgcgccgtctcaatgtgcagaactacgacagcctaacgcttctcaattgcgtcacacgactgcgcgtcttacccgctctgaactacaccgctgagatagggatggagttttctcacatgcggcctgtttccccgcgcgtgccctttgagctcgctacgcgtctcgctcatcttcgtgagctcgattgtccttggttgtgggagcgccttcctattgccttttcatccatcgcgctgcgccgattcgcccgcgtatgggaaggtccttggcgcgatgctcgcgctgactttggccgatacgtgcacgatgttatgcccttactgccatcttcgctcgccaagtgccgcttctggttttggaaagccagccagtacggagacgacgcggaccagtcagtgcagatgcctgatcttgtcatcaattcctctcaatcatcatcaaccccagagttacgagacagagatcccgtgtctctcggtttgcgagagttggggagtcgtctcgaggaactggatatccgggcgcttatcactcttgatctttttgatcgcactagcaaggatgcgacaaaccactcttcatcatggccacgaatgcaacatctaaaggtagaatcccacccatgttcgccaaatggaagttggtacttctcgggccctaaaggcgaagatcctcatcccatgggtttcatgattatgaaagacaaacactatccacccagccaagaagacagcgacgacaaagagacgcatgatctgtggtctcgcgaggaagacgagtaccaaggcgatgaggacatatctctcgaccgccaacctgatatgttccgtgtgctacccgtcccggatcgcatcaaccctctgcttctggcgtttgcatgtgctctccgacgagaacgcatgccctcccttcaagatgctgagctattcacttggcttacgtggcgtccgtcggagaagcgggctcgagattatgaagggagcgacgatgggcctccttcagctgaagatggaaccgtgttgtttcggtggggtgtgaaatacgaggcgcatgtcaatggagggaaggggaaggtgacgtggcaagttggcgagagctggaggccgagtagtcaggttatcacctcgtttgaggatctcgtgggtggtgatggggagaatgtggagtgggaagcatttgagtttgtcggtgagagggacccagatattgaagtatttatttga

SEQ ID NO: 32163 - protein, 539 aa, Muscodor strobelii
  misc_feature: SGI Peptide ID NO. 571081
  misc_feature (1)..(539): NCBI GI: 119473444 Blast Desc: NFIA_060750 [Neosartorya fischeri NRRL 181] gi|119406768|gb|EAW16719.1| conserved [Neosartorya fischeri NRRL 181]
  misc_feature (1)..(539): NCBI GI: 85068492 Blast Desc: NCU03422 [Neurospora crassa OR74A] gi|18376356|emb|CAD21134.1| [Neurospora crassa] gi|28916756|gb|EAA26524.1| conserved [Neurospora crassa OR74A]
  misc_feature (1)..(539): NCBI GI: 116201409 Blast Desc: CHGG_08589 [Chaetomium globosum CBS 148.51] gi|88177107|gb|EAQ84575.1| CHGG_08589 [Chaetomium globosum CBS 148.51]
  misc_feature (7)..(539): NCBI GI: 67526365 Blast Desc: AN3640.2 [Aspergillus nidulans FGSC A4] gi|40740658|gb|EAA59848.1| conserved [Aspergillus nidulans FGSC A4] gi|259481829|tpe|CBF75716.1| TPA: conserved [Aspergillus FGSC
  misc_feature (12)..(539): NCBI GI: 116206008 Blast Desc: CHGG_02297 [Chaetomium globosum CBS 148.51] gi|88182894|gb|EAQ90362.1| CHGG_02297 [Chaetomium globosum CBS 148.51]
  misc_feature (17)..(533): NCBI GI: 119189429 Blast Desc: CIMG_04762 [Coccidioides immitis RS]
  misc_feature (17)..(533): NCBI GI: 240111237 Blast Desc: CPC735_070720 [Coccidioides posadasii C735 delta SOWgp]
  misc_feature (1)..(512): NCBI GI: 169609581 Blast Desc: SNOG_07882 [Phaeosphaeria nodorum SN15] gi|111063038|gb|EAT84158.1| SNOG_07882 [Phaeosphaeria nodorum SN15]
  misc_feature (58)..(447): NCBI GI: 169618255 Blast Desc: SNOG_12319 [Phaeosphaeria nodorum SN15] gi|111059012|gb|EAT80132.1| SNOG_12319 [Phaeosphaeria nodorum SN15]
  misc_feature (373)..(531): NCBI GI: 261361014 Blast Desc: conserved [Verticillium albo-atrum VaMs.102]
MAPRRILATPSTKDVYLDALLEDVRKYNARRPDLYAGLRERTIDVEMALLLNPRTARLTCKEPPEEFEAVNAHFSAQVHAFFNALGAFEDIAEKQSANGLDLIRADKGLWLTIRVTNQSFDIYPDCLHRTFHTRRLNVQNYDSLTLLNCVTRLRVLPALNYTAEIGMEFSHMRPVSPRVPFELATRLAHLRELDCPWLWERLPIAFSSIALRRFARVWEGPWRDARADFGRYVHDVMPLLPSSLAKCRFWFWKASQYGDDADQSVQMPDLVINSSQSSSTPELRDRDPVSLGLRELGSRLEELDIRALITLDLFDRTSKDATNHSSSWPRMQHLKVESHPCSPNGSWYFSGPKGEDPHPMGFMIMKDKHYPPSQEDSDDKETHDLWSREEDEYQGDEDISLDRQPDMFRVLPVPDRINPLLLAFACALRRERMPSLQDAELFTWLTWRPSEKRARDYEGSDDGPPSAEDGTVLFRWGVKYEAHVNGGKGKVTWQVGESWRPSSQVITSFEDLVGGDGENVEWEAFEFVGERDPDIEVFI

SEQ ID NO: 32164 - DNA, 663 bp, Muscodor strobelii
  misc_feature: SGI EST ID NO. CUFF.76115.0
  misc_feature: Variant of the nucleotide sequence at SEQ ID NO 32162
cacgaatgcaacatctaaaggtagaatcccacccatgttcgccaaatggaagttggtacttctcgggccctaaaggcgaagatcctcatcccatgggtttcatgattatgaaagacaaacactatccacccagccaagaagacagcgacgacaaagagacgcatgatctgtggtctcgcgaggaagacgagtaccaaggcgatgaggacatatctctcgaccgccaacctgatatgttccgtgtgctacccgtcccggatcgcatcaaccctctgcttctggcgtttgcatgtgctctccgacgagaacgcatgccctcccttcaagatgctgagctattcacttggcttacgtggcgtccgtcggagaagcgggctcgagattatgaagggagcgacgatgggcctccttcagctgaagatggaaccgtgttgtttcggtggggtgtgaaatacgaggcgcatgtcaatggagggaaggggaaggtgacgtggcaagttggcgagagctggaggccgagtagtcaggttatcacctcgtttgaggatctcgtgggtggtgatggggagaatgtggagtgggaagcatttgagtttgtcggtgagagggacccagatattgaagtatttatttgatgaggacatcgagtccatgacaaggaac

SEQ ID NO: 32165 - DNA, 1959 bp, Muscodor strobelii
  misc_feature: SGI cDNA ID NO. 571083
  misc_feature: Elevated expression when VOC is produced
  misc_feature: Encodes the peptide sequence at SEQ ID NO 32166
atgcatcgccgcacttacgcccccctccggcctgctgcaggcggccagcatggttccagggagtgtgatggcgcgcgccctgtctgctctgcctgttccaagcgtggtaaatcccattgtacctaccccgagaagcacgggtcggcccacagctccattgagatagtcaatctagtcaagactctaccccgaaaagaagtagacactctcgtcgacttcctacgggagggaaaagaccctttaattatcttggctgatttccagcagggtatacgcgaaggtaacttatcgaacagtcttcccgagactagtcatatcttcttggagacagagctgtcgtcgcaatatcccaaggcatatgccaccctacctgaaattgatactcgtgcactagcaaagagtaaccttctacgccccgtatcctcacctcctggcaaatcgtcctcggtcttattccctagtgaggctacaagccccgtgccaaacccacctagtcatcacgcccagtctacccatcaaatcaggctctgtgatgagagacttcgaacactagatgtacgattctggaccaatgttaatatctcgaacgatctggctgctgaaatattatcactatatatcaccacagatcatccgcttcttggcttgttcgataatcagctgttcatccatgacctgcttaacaagcagaacagattctgctctagatttctgttccacgccgtcatgtacttgggaagtgaagctgaaagattatggacattgcaacctgacactcatatggcaatggcgggtgctgttttgctaagcatctcgctgatgggtcaagggaaagaccatgctgtgctcgaattcgccatgggagctatggacatgggccagcgactcgatctctacccaaacagcgcgtccttaacagcccagcaccgcgaagaagagcaatccgacgaagaacacaatgcattgtgcttcgccgcttggggcgttttcaattggaatgtgatgatatccgtattctatcgccagcctgaatctaggacgcccaagtttccgccgagtcttccaataccaggagagaagctaagcaatgccaacgtcactacatctagcacaaaagatgttagcaaattacgtctccaggaaaatgtcttccctctcctctgtcatttttggagacttgtccacaaagtcaactggatctattatacagtcgaggacagtcctccaaaatttctccggttcgtactcgtcgaacatgccttccgagagttgattgcgtgggttgaaaggctccctatcttcttagtccgaggacaacaggttgcacatcatattacggtcttccacatatggttacacacatcgatccttgatatgttcagacctttcatccatggtccagaagccaacgcgcatcatcttcatacatttacggcccaggacgctacctgcgccgccgtatgtaaagcatccacagaccagttaaaacatcttataatcagataccgcagccgccatgtcgagtccacatgttcgattctttggcatactggactcatctatctcgctaatggtgtcctcagcctgggtgacccaaactggcacctctactttctcttatgcatatacggatatgaacgactcaacaggccttatcgcatagcggaagttatcactcaaggattactcgcggtggcaatgcgcgatacagacatgacgtctaacgaggcaaacgaactcctacttcggttgaaagagcatggccttgagcacatcaaagaagatctcaaagaacggattcgcgccacgtttatggtagacctcgatcttgcgcttacagatccggaggcagcaaaggccgaaaatcttgcaagcaactttgaagatctggcactcttccaagatctcatcaatccagggggcgagccaatggataccacaagtacatctccaggttaa

SEQ ID NO: 32166 - protein, 652 aa, Muscodor strobelii
  misc_feature: SGI Peptide ID NO. 571083
  misc_feature (22)..(646): NCBI GI: 256720436 Blast Desc: NECHADRAFT_101055 [Nectria haematococca mpVI 77-13-4]
  misc_feature (108)..(632): NCBI GI: 256728949 Blast Desc: NECHADRAFT_40058 [Nectria haematococca mpVI 77-13-4]
  misc_feature (338)..(638): NCBI GI: 261353784 Blast Desc: conserved [Verticillium albo-atrum VaMs.102]
  misc_feature (22)..(640): NCBI GI: 46117468 Blast Desc: FG04576.1 [Gibberella zeae PH-1]
  misc_feature (95)..(635): NCBI GI: 46126907 Blast Desc: FG07831.1 [Gibberella zeae PH-1]
  misc_feature (21)..(651): NCBI GI: 46115844 Blast Desc: FG03764.1 [Gibberella zeae PH-1]
  misc_feature (10)..(237): NCBI GI: 261353784 Blast Desc: conserved [Verticillium albo-atrum VaMs.102]
  misc_feature (326)..(631): NCBI GI: 171683185 Blast Desc: protein product [Podospora anserina] gi|170941552|emb|CAP67204.1| protein product [Podospora anserina]
  misc_feature (21)..(544): NCBI GI: 70986436 Blast Desc: C6 transcription factor [Aspergillus fumigatus Af293] gi|66846341|gb|EAL86674.1| C6 transcription factor, [Aspergillus fumigatus Af293]
  misc_feature (21)..(544): NCBI GI: 159128117 Blast Desc: C6 transcription factor, [Aspergillus fumigatus A1163]
  misc_feature: Useful for introducing or modulating the production of volatile compounds
MHRRTYAPLRPAAGGQHGSRECDGARPVCSACSKRGKSHCTYPEKHGSAHSSIEIVNLVKTLPRKEVDTLVDFLREGKDPLIILADFQQGIREGNLSNSLPETSHIFLETELSSQYPKAYATLPEIDTRALAKSNLLRPVSSPPGKSSSVLFPSEATSPVPNPPSHHAQSTHQIRLCDERLRTLDVRFWTNVNISNDLAAEILSLYITTDHPLLGLFDNQLFIHDLLNKQNRFCSRFLFHAVMYLGSEAERLWTLQPDTHMAMAGAVLLSISLMGQGKDHAVLEFAMGAMDMGQRLDLYPNSASLTAQHREEEQSDEEHNALCFAAWGVFNWNVMISVFYRQPESRTPKFPPSLPIPGEKLSNANVTTSSTKDVSKLRLQENVFPLLCHFWRLVHKVNWIYYTVEDSPPKFLRFVLVEHAFRELIAWVERLPIFLVRGQQVAHHITVFHIWLHTSILDMFRPFIHGPEANAHHLHTFTAQDATCAAVCKASTDQLKHLIIRYRSRHVESTCSILWHTGLIYLANGVLSLGDPNWHLYFLLCIYGYERLNRPYRIAEVITQGLLAVAMRDTDMTSNEANELLLRLKEHGLEHIKEDLKERIRATFMVDLDLALTDPEAAKAENLASNFEDLALFQDLINPGGEPMDTTSTSPG

SEQ ID NO: 32167 - DNA, 2536 bp, Muscodor strobelii
  misc_feature: SGI EST ID NO. CUFF.76158.0
  misc_feature: Variant of the nucleotide sequence at SEQ ID NO 32165
caagggagcagttgttcctctcgcatcgctgcacaagttcttgacgaggcctaaggtcattcaaccgccactgtgacgcatgctcgcccaggaaagacattggagactacatactgggcgaaccacgaaacgaagcggtatgcatcgccgcacttacgcccccctccggcctgctgcaggcggccagcatggttccagggaggttcgggaagagtcatcagcatcttccagcagcagttccgcgcaagcggcctcacaacgccatggagcctgtctcgaatgccgttctcgaaaaaccaaatgtgatggcgcgcgccctgtctgctctgcctgttccaagcgtggtaaatcccattgtacctaccccgagaagcacgggtcggcccacagctccattgagatagtcaatctagtcaagactctaccccgaaaagaagtagacactctcgtcgacttcctacgggagggaaaagaccctttaattatcttggctgatttccagcagggtatacgcgaaggtaacttatcgaacagtcttcccgagactagtcatatcttcttggagacagagctgtcgtcgcaatatcccaaggcatatgccaccctacctgaaattgatactcgtgcactagcaaagagtaaccttctacgccccgtatcctcacctcctggcaaatcgtcctcggtcttattccctagtgaggctacaagccccgtgccaaacccacctagtcatcacgcccagtctacccatcaaatcaggctctgtgatgagagacttcgaacactagatgtacgattctggaccaatgttaatatctcgaacgatctggctgctgaaatattatcactatatatcaccacagatcatccgcttcttggcttgttcgataatcagctgttcatccatgacctgcttaacaagcagaacagattctgctctagatttctgttccacgccgtcatgtacttgggaagtgtaagtcgtcatcaacgatagtctaagcacacttcattattgaggtagtagacagcaaatgtactgcgcattcgacaaaacagttgcatcgctagtaacttcctttggcgaggaagctgaaagattatggacattgcaacctgacactcatatggcaatggcgggtgctgttttgctaagcatctcgctgatgggtcaagggaaagaccatgctgtgctcgaattcgccatgggagctatggacatgggccagcgactcgatctctacccaaacagcgcgtccttaacagcccagcaccgcgaagaagagcaatccgacgaagaacacaatgcattgtgcttcgccgcttggggcgttttcaattggaatgtgtgggtttgccctcaaagtgctgtatggtaaagccagagaaactgatatcgctctgtgcaggatgatatccgtattctatcgccagcctgaatctaggacgcccaagtttccgccgagtcttccaataccaggagagaagctaagcaatgccaacgtcactacatctagcacaaaagatgttagcaaattacgtctccaggaaaatgtcttccctctcctctgtcatttttggagacttgtccacaaagtcaactggatctattatacagtcgaggacagtcctccaaaatttctccggttcgtactcgtcgaacatgccttccgagagttgattgcgtgggttgaaaggctccctatcttcttagtccgaggacaacaggttgcacatcatattacggtcttccacatatggttacacacatcgatccttgatatgttcagacctttcatccatggtccagaagccaacgcgcatcatcttcatacatttacggcccaggacgctacctgcgccgccgtatgtaaagcatccacagaccagttaaaacatcttataatcagataccgcagccgccatgtcgagtccacatgttcgattctttggcatactggactcatctatctcgctaatggtgtcctcagcctgggtgacccaaactggcacctctactttctcttatgcatatacggatatgaacgactcaacaggccttatcgcatagcggaagttatcactcaaggattactcgcggtggcaatgcgcgatacagacatgacgtctaacgaggcaaacgaactcctacttcggttgaaagagcatggccttgagcacatcaaagaagatctcaaagaacggattcgcgccacgtttatggtagacctcgatcttgcgcttacagatccggaggcagcaaaggccgaaaatcttgcaagcaactttgaagatctggcactcttccaagatctcatcaatccagggggcgagccaatggataccacaagtacatctccaggttaaaatcttaaacatccggaccacaataagctgcccaatctgcggcctttttgtatttgtcttcttttcttatggttcggaccctccggtcgccctgagcaaagcagctatctcgagttccccgttattccatcgtcattactcatcaatgggaaaggttcaaacgcat

SEQ ID NO: 32168 - DNA, 873 bp, Muscodor strobelii
  misc_feature: SGI cDNA ID NO. 571084
  misc_feature: Reduced expression when VOC is produced
  misc_feature: Encodes the peptide sequence at SEQ ID NO 32169
atggaaagcaccaccttgtcaacactgctagctcctgcaaccgtaccgacctataaatgtcctcttggcaccaaggtctttcttctgcacctaggcatcgcacgagctgacgaatcatggatccttcgcgcatctaacgtcagcacaaaaagcaatccaaagcctgaagtcaaaacgcgagatcttattctgcttgctgtattagttgatcacccacaagatggactacttcttttcgagaccggcgccgccgaagatgtcaaattgtggggcgctccagcgacggatgtctttccgcgggtagtctataacgaggagcacaagctacccaatgccatcgccgcctgtggttacaatatcaaagatatcaaagccgtaatctttggccatctccaccttgatcacgccggcggactagagcactttatggatacaaatatcccaatctacgttcacgaggaagagttcaagcacgcttgctgggcggcagccactggtgccgactcagaggtctatctcagcagctatctaagtttagacaggcttaattggcgatcgttctctgaagcccacgtcgaccttttccaaggtgtcatcatgcaccacgcccctggccacactcctggcctttgtgttatgcagatcaacttggagaaggatggctgtttcatcttcactacggatcattatcattgtaaggagaatcacttacagcgttacccacaaggatggttcgcgcgggagcacaacgcttggatccggtcgtgcgatatgatcgaacgcttgcagcgtaacttcaatgcaaagttggtgtatgggcatgatctggaaactgcgatggagttgatagaggcgaggaagttctacgaataa

SEQ ID NO: 32169 - protein, 290 aa, Muscodor strobelii
  misc_feature: SGI Peptide ID NO. 571084
  misc_feature (63)..(274): Pfam Id: PF00753 Pfam Desc: Metallo-beta-lactamase superfamily
  misc_feature (3)..(290): NCBI GI: 119191003 Blast Desc: CIMG_05549 [Coccidioides immitis RS] gi|240107398|gb|EER25583.1| metallo-beta-lactamase superfamily protein [Coccidioides posadasii C735 delta SOWgp]
  misc_feature (3)..(271): NCBI GI: 258564935 Blast Desc: conserved [Uncinocarpus reesii 1704] gi|237906913|gb|EEP81314.1| conserved [Uncinocarpus reesii 1704]
  misc_feature (3)..(290): NCBI GI: 255955465 Blast Desc: Pc21g14710 [Penicillium chrysogenum Wisconsin 54-1255] gi|211590196|emb|CAP96368.1| Pc21g14710 [Penicillium chrysogenum Wisconsin 54-1255]
  misc_feature (10)..(290): NCBI GI: 121719111 Blast Desc: metallo-beta-lactamase superfamily protein [Aspergillus clavatus NRRL 1] gi|119404489|gb|EAW14865.1| metallo-beta-lactamase superfamily protein [Aspergillus clavatus
  misc_feature (10)..(290): NCBI GI: 242778541 Blast Desc: conserved [Talaromyces stipitatus ATCC 10500] gi|218722879|gb|EED22297.1| conserved [Talaromyces stipitatus ATCC 10500]
  misc_feature (7)..(290): NCBI GI: 169784500 Blast Desc: [Aspergillus oryzae RIB40] gi|83775458|dbj|BAE65578.1| protein product [Aspergillus oryzae]
  misc_feature (28)..(290): NCBI GI: 238508349 Blast Desc: conserved [Aspergillus flavus NRRL3357] gi|220688889|gb|EED45241.1| conserved [Aspergillus flavus NRRL3357]
  misc_feature (19)..(284): NCBI GI: 71003818 Blast Desc: UM00428.1 [Ustilago maydis 521] gi|46096106|gb|EAK81339.1| UM00428.1 [Ustilago maydis 521]
  misc_feature (13)..(276): NCBI GI: 67904080 Blast Desc: AN9027.2 [Aspergillus nidulans FGSC A4] gi|40745203|gb|EAA64359.1| AN9027.2 [Aspergillus nidulans FGSC A4] gi|259486521|tpe|CBF84434.1| TPA: conserved [Aspergillus FGSC
  misc_feature (28)..(282): NCBI GI: 169602981 Blast Desc: SNOG_04495 [Phaeosphaeria nodorum SN15] gi|160706304|gb|EAT88255.2| SNOG_04495 [Phaeosphaeria nodorum SN15]
  misc_feature: Useful for introducing or modulating the production of volatile compounds
MESTTLSTLLAPATVPTYKCPLGTKVFLLHLGIARADESWILRASNVSTKSNPKPEVKTRDLILLAVLVDHPQDGLLLFETGAAEDVKLWGAPATDVFPRVVYNEEHKLPNAIAACGYNIKDIKAVIFGHLHLDHAGGLEHFMDTNIPIYVHEEEFKHACWAAATGADSEVYLSSYLSLDRLNWRSFSEAHVDLFQGVIMHHAPGHTPGLCVMQINLEKDGCFIFTTDHYHCKENHLQRYPQGWFAREHNAWIRSCDMIERLQRNFNAKLVYGHDLETAMELIEARKFYE

SEQ ID NO: 32170 - DNA, 1297 bp, Muscodor strobelii
  misc_feature: SGI EST ID NO. CUFF.76135.0
  misc_feature: Variant of the nucleotide sequence at SEQ ID NO 32168
catagatgtgtctactcctacttcgctatggaaagcaccaccttgtcaacactgctagctcctgcaaccgtaccgacctataaatgtcctcttggcaccaaggtctttcttctgcacctaggcatcgcacgagctgacgaatcatggatccttcgcgcatctaacgtcagcacaaaaagcaatccaaagcctgaagtcaaaacgcgagatcttattctgcttgctgtattagttgatcacccacaagatggactacttcttttcgagaccggcgccgccgaagatgtcaaattgtggggcgctccagcgacggatgtctttccgcgggtagtctataacgaggagcacaagctacccaatgccatcgccgcctgtggttacaatatcaaagatatcaaagccgtaatctttggccatctccaccttgatcacgccggcggactagagcactttatggatacaaatatcccaatctacgttcacgaggaagagttcaagcacgcttgctgggcggcagccactggtgccgactcagaggtctatctcagcagctatctaagtttagacaggcttaattggcgatcgttctctgaagcccacgtcgaccttttccaaggtgtcatcatgcaccacgcccctggccacactcctggcctttgtgttatgcagatcaacttggagaaggatggctgtttcatcttcactacggatcattatcattgtaaggagaatcacttacagcgttacccacaaggatggttcgcgcgggagcacaacgcttggatccggtcgtgcgatatgatcgaacgcttgcagcgtaacttcaatgcaaagttggtgtatgggcatgatctggaaactgcgatggagttgatagaggcgaggaagttctacgaataagtttatattcggacagtcaaaattcatgacatcttgacacattgtcagttgcactgcttaagtctgaaaaccggtgtcataatgataattgacccttagtaccattaccacacatgccggcgacacttatcaagtgatatgagcagtctgatggtgttgcatgaagtgtccggagggagacctggacacgccatccactccagatgaaggataagatttagagctaaaccggtaacgctcaattacaaaggcattctcttgaaaacaatacatccaaatttcttttccggcagcttcatgcttctccatgaatgcattcatatagcatttgtcatagacgaacttgtttgttccattatatattacaagatcctttttaatccattcaaggtagaag

SEQ ID NO: 32171 - DNA, 1002 bp, Muscodor strobelii
  misc_feature: SGI cDNA ID NO. 571085
  misc_feature: Encodes the peptide sequence at SEQ ID NO 32172
atgttttctatatctgttgcaactatttgtcttctcgtagctgcaaatctagtctccacgactgaggttcacaatggtactcagtttgaggtgagattctcctgggatgccgcacctgagacgacccagataaaagacagctacgaactcgatgcagctctccaagcgtataacaggcttgtcgatgtatatactgccaattcttctctgcctggaaacgactgtctggcttcatgcaacggtacggaccagccgcagacactttacgatctcaaggactgcatcatcagagaggctcatgacgagagcatcttcttcgccctactgcaagaagacatcactgaagcgaataacttctggtccaccatcctcaatcagtctacacaggacaggactcaatgggtccccgctcgaacctacgtcaaggcttattacaatggcaccttgtctgccactgctttcgcgctctggactgcttctgatctcgcagatgaggctaatgaccatgccaaccccgaacactattacaagaagagctctatcaaccaggatggaagcgaaacgtccagtatctttgagggatggggcggtggcttctcgaccttcggaaccaagcgcactaatttcactgttccaaattttgcaactcccaagtttggaactgctgaataccctagcgagtgggagatcgatgcaagtttcacggcggctctccaacgtattggtccaaaaaacctcgtcacaggacccgctgcaggccaaacttttggcgtgttgcacatcgccgtgcgtgactttcaagacaacaatggctctggcattgagatttactcagctgtttggtaccctccttgggataaagctacttcacccgatgatcacaaggagttcattacagactaccttacagatgaggcttaccacatggttgtggaagttgtcaacctgacactgaaggctctatcagatatcagaactggcatttttaaccctggcggctga

SEQ ID NO: 32172 - protein, 333 aa, Muscodor strobelii
  misc_feature: SGI Peptide ID NO. 571085
MFSISVATICLLVAANLVSTTEVHNGTQFEVRFSWDAAPETTQIKDSYELDAALQAYNRLVDVYTANSSLPGNDCLASCNGTDQPQTLYDLKDCIIREAHDESIFFALLQEDITEANNFWSTILNQSTQDRTQWVPARTYVKAYYNGTLSATAFALWTASDLADEANDHANPEHYYKKSSINQDGSETSSIFEGWGGGFSTFGTKRTNFTVPNFATPKFGTAEYPSEWEIDASFTAALQRIGPKNLVTGPAAGQTFGVLHIAVRDFQDNNGSGIEIYSAVWYPPWDKATSPDDHKEFITDYLTDEAYHMVVEVVNLTLKALSDIRTGIFNPGG

SEQ ID NO: 32173 - DNA, 483 bp, Muscodor strobelii
  misc_feature: SGI cDNA ID NO. 571086
  misc_feature: Elevated expression when VOC is produced
  misc_feature: Encodes the peptide sequence at SEQ ID NO 32174
atgcgtttcactctcgctttgatcgctgcctccgcagcattctctcaagctgccgtattcagccaaaagacctataatgagctttctatttcgggcggcacatccggcaatgctgctgaagaagcatcggccctgttctctgacttggatcaaaatgatcttgcaaatgtcgaccaagccgacatcgatttcctcaattctgtcaatcagatcgccaacgacgctgaagttgatgctttcaacccggccatcgacgccgcttctggcgatgaggccgacgcccttcagcgtggcaagataaagaacaaggtgctcaagctcactgccgctgttctgaagctccagattcaacaggcccagggcgatgatgttgcagatgatctcgaagaggaacagactaagcttgccggcaacatttccactgatgaggattcagctggactggaatcaactgcgttggacttcgacgccaccactgactga

SEQ ID NO: 32174 - protein, 160 aa, Muscodor strobelii
  misc_feature: SGI Peptide ID NO. 571086
  misc_feature (1)..(160): NCBI GI: 256728402 Blast Desc: small secreted protein [Nectria haematococca mpVI 77-13-4]
  misc_feature (1)..(159): NCBI GI: 46115224 Blast Desc: FG03454.1 [Gibberella zeae PH-1]
  misc_feature (16)..(159): NCBI GI: 261359017 Blast Desc: conserved [Verticillium albo-atrum VaMs.102]
  misc_feature (18)..(159): NCBI GI: 156039974 Blast Desc: SS1G_12123 [Sclerotinia sclerotiorum 1980] gi|154696180|gb|EDN95918.1| SS1G_12123 [Sclerotinia sclerotiorum 1980]
  misc_feature (18)..(159): NCBI GI: 39946422 Blast Desc: MGG_08300 [Magnaporthe grisea 70-15] gi|145020056|gb|EDK04284.1| MGG_08300 [Magnaporthe grisea 70-15]
  misc_feature (19)..(159): NCBI GI: 154300513 Blast Desc: BC1G_11080 [Botryotinia fuckeliana B05.10] gi|150856605|gb|EDN31797.1| BC1G_11080 [Botryotinia fuckeliana B05.10]
  misc_feature (17)..(158): NCBI GI: 189206177 Blast Desc: conserved [Pyrenophora tritici-repentis Pt-1C-BFP] gi|187975516|gb|EDU42142.1| conserved [Pyrenophora tritici-repentis Pt-1C-BFP]
  misc_feature (3)..(157): NCBI GI: 169621458 Blast Desc: SNOG_13939 [Phaeosphaeria nodorum SN15] gi|111057444|gb|EAT78564.1| SNOG_13939 [Phaeosphaeria nodorum SN15]
  misc_feature (23)..(155): NCBI GI: 242819650 Blast Desc: conserved [Talaromyces stipitatus ATCC 10500] gi|218713826|gb|EED13250.1| conserved [Talaromyces stipitatus ATCC 10500]
  misc_feature (23)..(155): NCBI GI: 212539081 Blast Desc: conserved [Penicillium marneffei ATCC 18224] gi|210069438|gb|EEA23529.1| conserved [Penicillium marneffei ATCC 18224]
  misc_feature: Useful for introducing or modulating the production of volatile compounds
MRFTLALIAASAAFSQAAVFSQKTYNELSISGGTSGNAAEEASALFSDLDQNDLANVDQADIDFLNSVNQIANDAEVDAFNPAIDAASGDEADALQRGKIKNKVLKLTAAVLKLQIQQAQGDDVADDLEEEQTKLAGNISTDEDSAGLESTALDFDATTD

SEQ ID NO: 32175 - DNA, 985 bp, Muscodor strobelii
  misc_feature: SGI EST ID NO. CUFF.76140.0
  misc_feature: Variant of the nucleotide sequence at SEQ ID NO 32173
cttccactggcaatcacagtttccttccttcctcatcctacgatcactaccaattcgacatctttcgctctctccttccatactcacagctgtgctgtctttcgcttcttgccgattccctagtttaatatcaaagatacttgctaccagcgctagtcgttgagaacctactctttcacaatcaccgatatcctcgaccaacactcaacatgcgtttcactctcgctttgatcgctgcctccgcagcattctctcaagctgccgtattcagccaaaagacctataatgagctttctatttcgggcggcacatccggcaatgctgctgaagaagcatcggccctgttctctgacttggatcaaaatgatcttgcaaatgtcgaccaagccgacatcgatttcctcaattctgtcaatcagatcgccaacgacgctgaagttgatgctttcaacccggccatcgacgccgcttctggcgatgaggccgacgcccttcagcgtggcaagataaagaacaaggtgctcaagctcactgccgctgttctgaagctccagattcaacaggcccagggcgatgatgttgcagatgatctcgaagaggaacagactaagcttgccggcaacatttccactgatgaggattcagctggactggaatcaactgcgttggacttcgacgccaccactgactgaacaatcatcggatatttgtgagggaaagagatgcaaggggcatacttattgaatgaaggcggatcagcattttgctattggacaacactggttcttcgagctagagtatggatttaatacatatgagacgaaatgtcacccaatgatacccgaacggtgatgaactgctcgtccatgcgcctgtgatcatgtttcatgtccatcttattctccaatcaacgtatagcgtcgcttgccgagattccagattttgccattgaaatgatttctctacgcatctctcaacatgtgaa

SEQ ID NO: 32176 - DNA, 651 bp, Muscodor strobelii
  misc_feature: SGI cDNA ID NO. 571087
  misc_feature: Encodes the peptide sequence at SEQ ID NO 32177
atgcagctgatcaccacccttgtcgctctcgcctccgtcgcacaagctcactacacatttccggctttggtagccaatggcgctgcgaccaccaattgggagtatgttaggaaaacgacaaactatcagagcaatggaccggtcaccgacgtaacttcggatcagttccgatgctatcagctcgcaccaggcaatgaaggcgcaaagacaatgagcgtcgcagccggttcgaccgttggtatgacagcagctgcatcaatatcacatcccggtgtgctacaattctacatggcaaaggtcccttcgggtcagaccgcagcttcgtgggatggttcgggcgcagtgtggtttaaaatcttctcacagggtcctaatatctcgccaagcggtctaacgtggccaagcatgggacttacccaagcgacgacgaagattccatcttgtatcccagcaggggattatctcttgcgtgttgagcacatcgctctgcatagcgccgggtccgtgggcggcgcgcaaagctatatctcatgtgcgcaattgacggtcaccggaggaggaagcaagacaccaacgggccttgtttccttccctggagcgtacaaggcgaccgacccgggtattttgatcaatatctactggtacgtatag

SEQ ID NO: 32177 - protein, 216 aa, Muscodor strobelii
  misc_feature: SGI Peptide ID NO. 571087
  misc_feature (1)..(216): Pfam Id: PF03443 Pfam Desc: Glycosyl hydrolase family 61
  misc_feature (142)..(213): Pfam Id: PF03443 Pfam Desc: Glycosyl hydrolase family 61
  misc_feature (4)..(216): NCBI GI: 189202962 Blast Desc: fungal cellulose binding domain containing protein [Pyrenophora tritici-repentis Pt-1C-BFP] gi|187984916|gb|EDU50404.1| fungal cellulose binding domain
  misc_feature (17)..(216): NCBI GI: 169596128 Blast Desc: SNOG_00815 [Phaeosphaeria nodorum SN15] gi|160701235|gb|EAT92310.2| SNOG_00815 [Phaeosphaeria nodorum SN15]
  misc_feature (17)..(216): NCBI GI: 116203843 Blast Desc: CHGG_09805 [Chaetomium globosum CBS 148.51] gi|88175933|gb|EAQ83401.1| CHGG_09805 [Chaetomium globosum CBS 148.51]
  misc_feature (19)..(216): NCBI GI: 171680024 Blast Desc: protein product [Podospora anserina] gi|170939638|emb|CAP64865.1| protein product [Podospora anserina]
  misc_feature (19)..(216): NCBI GI: 39945892 Blast Desc: MGG_08066 [Magnaporthe grisea 70-15] gi|145019304|gb|EDK03532.1| MGG_08066 [Magnaporthe grisea 70-15]
  misc_feature (17)..(214): NCBI GI: 85092580 Blast Desc: NCU02344 [Neurospora crassa OR74A] gi|28920895|gb|EAA30230.1| conserved [Neurospora crassa OR74A] gi|40804596|emb|CAF05857.1| related to cellulose binding protein
  misc_feature (3)..(216): NCBI GI: 67540516 Blast Desc: AN6428.2 [Aspergillus nidulans FGSC A4] gi|40739260|gb|EAA58450.1| AN6428.2 [Aspergillus nidulans FGSC A4] gi|259479347|tpe|CBF69492.1| TPA: conserved [Aspergillus FGSC
  misc_feature (17)..(214): NCBI GI: 171681359 Blast Desc: protein product [Podospora anserina] gi|170940638|emb|CAP65866.1| protein product [Podospora anserina]
  misc_feature (1)..(213): NCBI GI: 39946514 Blast Desc: MGG_08254 [Magnaporthe grisea 70-15] gi|145020107|gb|EDK04335.1| MGG_08254 [Magnaporthe grisea 70-15]
  misc_feature (1)..(216): NCBI GI: 39968819 Blast Desc: MGG_02502 [Magnaporthe grisea 70-15] gi|145013882|gb|EDJ98523.1| MGG_02502 [Magnaporthe grisea 70-15]
  misc_feature (2)..(213): SWISSPROT Homolog: EC 3.2.1.4 Cellulase
MQLITTLVALASVAQAHYTFPALVANGAATTNWEYVRKTTNYQSNGPVTDVTSDQFRCYQLAPGNEGAKTMSVAAGSTVGMTAAASISHPGVLQFYMAKVPSGQTAASWDGSGAVWFKIFSQGPNISPSGLTWPSMGLTQATTKIPSCIPAGDYLLRVEHIALHSAGSVGGAQSYISCAQLTVTGGGSKTPTGLVSFPGAYKATDPGILINIYWYV

SEQ ID NO: 32178 - DNA, 395 bp, Muscodor strobelii
  misc_feature: SGI EST ID NO. CUFF.76147.0
  misc_feature: Variant of the nucleotide sequence at SEQ ID NO 32176
gtcaatatgaaactaaggaacattataagatgcgaaggatgcacatctgattcaccttgaagatcctcgccttgcagcagatcacgacaactgaactctttgtcggtacactactgctcgcaatacgtcaatatgcagctgatcaccacccttgtcgctctcgcctccgtcgcacaagctcactacacatttccggctttggtagccaatggcgctgcgaccaccaattgggagtatgttaggaaaacgacaaactatcagagcaatggaccgggtatgttcaatgttccagtcgtaacttgttcagatacaagcaatctatcttttaggactgagcattagaactgacaaaatcccagtcaccgacgtaacttcggatcagttccgatgctatc

SEQ ID NO: 32179 - DNA, 834 bp, Muscodor strobelii
  misc_feature: SGI cDNA ID NO. 571088
  misc_feature: Encodes the peptide sequence at SEQ ID NO 32180
atggatcgagccgctgctctccgcaagctagtctacggggacgagactgtggatgccttcaccaaaggtccccagaagcgcgtcaactctctccctgctttccaagccgagtcatggctgccctccgacataccttctcgggccaagtctcttaactccaacgtgaaacgcgtgagcaaagtgggatgcgcttccagaccctcttcaacgagaccgccttccagactatcaaggtatgaagagttccaacccgagccaattgaactgcttcggtgctcctctgcattccctcgcatgcgagatgacactgcacctcttactgtacctatcgctgcaaatgacgctggatatgatagtgacgaagaggatcgccgcaatggcgttccgataacctattcgcagggcacgaaacagtcgtaccacccgtccatgcgcgaagaagcggaggaagagtacatggagctcaaggtcgaacgcgccgatatccaggaactgctcgaagtgaaagtgcaaacatactggatctttcgtttgttgtactttgactaccatggtttggactggagtgaatctcgttggctcgagtacttggagctcgaggacactgtagatatgataagtcaaagactcgaagctgttgaagtcaagatacagaatgttctcgctcaaatctgtagctatatggattttggccctcttatggctaactctgtgccgtatcaacagaacgacacgactatttgggatccacaaggtaggtttgaggataggtgggatttcaacaatgatggcaagttggagttggaatggaatggggtaaatttgaatccataa

SEQ ID NO: 32180 - protein, 277 aa, Muscodor strobelii
  misc_feature: SGI Peptide ID NO. 571088
MDRAAALRKLVYGDETVDAFTKGPQKRVNSLPAFQAESWLPSDIPSRAKSLNSNVKRVSKVGCASRPSSTRPPSRLSRYEEFQPEPIELLRCSSAFPRMRDDTAPLTVPIAANDAGYDSDEEDRRNGVPITYSQGTKQSYHPSMREEAEEEYMELKVERADIQELLEVKVQTYWIFRLLYFDYHGLDWSESRWLEYLELEDTVDMISQRLEAVEVKIQNVLAQICSYMDFGPLMANSVPYQQNDTTIWDPQGRFEDRWDFNNDGKLELEWNGVNLNP

SEQ ID NO: 32181 - DNA, 359 bp, Muscodor strobelii
  misc_feature: SGI EST ID NO. CUFF.76152.0
  misc_feature: Variant of the nucleotide sequence at SEQ ID NO 32179
ccgataacctattcgcagggcacgaaacagtcgtaccacccgtccatgcgcgaagaagcggaggaagagtacatggagctcaaggtcgaacgcgccgatatccaggaactgctcgaagtgaaagtgcaaacatactggatctttcgtttgttgtactttgactaccatggtttggactggagtgaatctcgttggctcgagtacttggagctcgaggacactgtagatatgataagtcaaagactcgaagctgttgaagtcaagatacagaatgttctcgctcaaatctgtagctatatggattttggccctcttatggctaactctgtgccgtatcaacagaacgacacgactatttg

SEQ ID NO: 32182 - DNA, 807 bp, Muscodor strobelii
  misc_feature: SGI cDNA ID NO. 571089
  misc_feature: Encodes the peptide sequence at SEQ ID NO 32183
atgtcgtcactccgcaatactgtaaaccgccgcgttcaccgcgagcgtggccaattgaaggagcgagagaaccgctacggactactcgagaagcacaaagactacagcctccgagccaaagaccacaacaagaaaaaagcccaactcaagtctctgcgccagaaagccgccgaccggaacgaagatgaattctactacggcatgctctcgcggaagggaccgtccacgaacctcggaacaggcagcaagaaatgggacggcacagtcgccgcggatcgcgggaacaaagcactggatatggatacggtccgattactcaagacacaagacatggggtacatacgctccgctcgcaacgtggcgatgaaggaaataaagacgctagaggagagagtcatcgcgcttggtggaagtcttgaggatgcgctgccgcttgatgaacctgattccgaggatgaggggggttttgactttaatgaggctcccgtgaagaagaaggcgaagaagattgtttttgcggatgaggaaggggagagggaggggatgattcagagagatgaagaacgggaagaggaagttgtggataagagcaagcggggagaagatgaggaggatatgagagaggagaagcagaagttgctcgatagattacagaaacgacttcaaggcgcacgcaagaaacagcgcgtgcttgcgcaaacggagcgtgagcttgagacacagagagcgcgcatggccaagtcgtcggctatgggcggggttacgaagtcggggaagaagatcaaggttcgggagagaaagagatga

SEQ ID NO: 32183 - protein, 268 aa, Muscodor strobelii
  misc_feature: SGI Peptide ID NO. 571089
  misc_feature (10)..(268): Pfam Id: PF03998 Pfam Desc: Utp11 protein
  misc_feature (10)..(72): Pfam Id: PF03998 Pfam Desc: Utp11 protein
  misc_feature (1)..(268): NCBI GI: 256735615 Blast Desc: NECHADRAFT_99031 [Nectria haematococca mpVI 77-13-4]
  misc_feature (1)..(268): NCBI GI: 46120649 Blast Desc: FG04929.1 [Gibberella zeae PH-1]
  misc_feature (1)..(268): NCBI GI: 171687741 Blast Desc: protein product [Podospora anserina] gi|170943832|emb|CAP69484.1| protein product [Podospora anserina]
  misc_feature (1)..(268): NCBI GI: 261358828 Blast Desc: U3 small nucleolar RNA-associated protein [Verticillium albo-atrum VaMs.102]
  misc_feature (1)..(268): NCBI GI: 85111949 Blast Desc: NCU03133 [Neurospora crassa OR74A] gi|28925953|gb|EAA34946.1| conserved [Neurospora crassa OR74A] gi|38567271|emb|CAE76561.1| related to cgi-94 protein [Neurospora
  misc_feature (1)..(138): NCBI GI: 116180496 Blast Desc: CHGG_00876 [Chaetomium globosum CBS 148.51] gi|88185173|gb|EAQ92641.1| CHGG_00876 [Chaetomium globosum CBS 148.51]
  misc_feature (1)..(268): NCBI GI: 39951345 Blast Desc: MGG_01315 [Magnaporthe grisea 70-15] gi|145020869|gb|EDK04998.1| MGG_01315 [Magnaporthe grisea 70-15]
  misc_feature (11)..(268): NCBI GI: 154297235 Blast Desc: BC1G_12453 [Botryotinia fuckeliana B05.10] gi|150842980|gb|EDN18173.1| BC1G_12453 [Botryotinia fuckeliana B05.10]
  misc_feature (1)..(268): NCBI GI: 258563244 Blast Desc: [Uncinocarpus reesii 1704] gi|237907874|gb|EEP82275.1| [Uncinocarpus reesii 1704]
  misc_feature (1)..(268): NCBI GI: 121701077 Blast Desc: U3 small nucleolar RNA-associated protein Utp11, [Aspergillus clavatus NRRL 1] gi|119396946|gb|EAW07377.1| U3 small nucleolar RNA-associated protein Utp11, [Aspergillus NRRL
MSSLRNTVNRRVHRERGQLKERENRYGLLEKHKDYSLRAKDHNKKKAQLKSLRQKAADRNEDEFYYGMLSRKGPSTNLGTGSKKWDGTVAADRGNKALDMDTVRLLKTQDMGYIRSARNVAMKEIKTLEERVIALGGSLEDALPLDEPDSEDEGGFDFNEAPVKKKAKKIVFADEEGEREGMIQRDEEREEEVVDKSKRGEDEEDMREEKQKLLDRLQKRLQGARKKQRVLAQTERELETQRARMAKSSAMGGVTKSGKKIKVRERKR

SEQ ID NO: 32184 - DNA, 3449 bp, Muscodor strobelii
  misc_feature: SGI EST ID NO. CUFF.76224.0
  misc_feature: Variant of the nucleotide sequence at SEQ ID NO 32182
tccaccgtcgctttgcaacgaaaatcacacattcacacatctcaagagcgacccgaccacagtgatcatgtcgtcactccgcaatactgtaaaccgccgcgttcaccgcgagcgtggccaattgaaggagcgagagaaccgctacggactactcgagaagcacaaagactacagcctccgagccaaagaccacaacaagaaaaaagcccaactcaagtctctgcgccagaaagccgccgaccggaacgaagatgaattctactacggcatgctctcgcggaagggaccgtccacgaacctcggaacaggcagcaagaaatgggacggcacagtcgccgcggatcgcgggaacaaagcactggatatggatacggtccgattactcaagacacaagacatggggtacatacgctccgctcgcaacgtggcgatgaaggaaataaagacgctagaggagagagtcatcgcgcttggtggaagtcttgaggatgcgctgccgcttgatgaacctgattccgaggatgaggggggttttgactttaatgaggctcccgtgaagaagaaggcgaagaagattgtttttgcggatgaggaaggggagagggaggggatgattcagagagatgaagaacgggaagaggaagttgtggataagagcaagcggggagaagatgaggaggatatgagagaggagaagcagaagttgctcgatagattacagaaacgacttcaaggcgcacgcaagaaacagcgcgtgcttgcgcaaacggagcgtgagcttgagacacagagagcgcgcatggccaagtcgtcggctatgggcggggttacgaagtcggggaagaagatcaaggttcgggagagaaagagatgagcgtctttccatgtcttgataatattagggaagttctgtttacgggtacaggcgttctacattggcgaccggggaaaaaattatgtcacatgattaagagcaggcggcgttcaaggctatacccaggagaatggtatatatagagatcttgcgttccgctgatatacagtctcctcgtgaccccaatattcctacctccccatcgtgactagccaggtagtcatccaccttttggtccaaaattaagtccagcactagtatgcagtacgaaagtgataagaaagatcctgcccctgcatctagacgcggggtattattatgtacatttgaatataacgccgccaagaccaagtgtatgtcggtatcgtctgtgggaggacagccatagcttccctcccaatctagcatttccatcattcatatcgcatcaatcccattccattactcgcttcgcttcgcatttgcaataaaattgcgttataacttgtcgctcgagatgcacttggtaagtcccacaacaatcgccatgagagccttaaaggtcagcgtaagcgcccaaataacacacttaaacgcaaaaccaagcaatttgatgattgtacgcgcagtgcctggcagcttctccttatcagagtccttgatactgagtttgccaccgagactactagcctggctctcgagatcgagctcgagcgcctcgatgcggccccgcttcttcttcttctccttggtggccggaagaatcttgctgctgagacgacttccgctgcgctggaagctggagcgtgacccagcgtcgtcacgaagatggacggcgggcggaggggcgaattgctcgactaggacgttcttctcgtcgatgtgcgcaacgaggaggagagcggcggctgccacgtcgaggacgtagtagctttcgatgcgtccggcgactagtgtgtcgagttccatccacccttcgcctgtcgcgtcgcgggtcagacggccaaggtgctggggtgacttgacgtgctcgattgtgtactctgtgcggctgtatgctggactccgctcaatcgtgatgcagaatggggttgcgatggcggggtggacaaggaagtaattctggctatcttcatcccagacgagtctcgcgcattcattttcagccgcggccacggctgttgcgtcgtttggtcgctcgagagcgacttttgccgcttggctggggtataagagtgccacgagtccgtcatttggcggcaggcgacgagatggttcctcaagggtcgtggccatggcttcctgccacgattgcttgccctctgcctcccggatggcgttcatgaagccgcttgagttccgagctgccgaatctgtcggattcttgtctttgcatgtcttgtttggatcatgacggctgagtgtgacgtatgctgatgccgaggtcgggtcaatgcgcatatggtagagtggttgggtccttgacgttagagtgtagataggtgtgtctttctctggaaccatcttcatgcaatacgtccgaccctccatgcttgatgccttccatccatttgccgccttccagaaatctcggagctcctctgttgtgctcacaggtgggatcaccgccggctcatgctgccgtctcggccacctctgttgagctgaactggtgctcatcggacttcgcactggactgcgaactggagggcttctggcctccacttgttgtggcacgtgggactgcctactgatgactgttcgtggtatatgtgtcggacttgtttgcgcggggtagtagttctgctgatcaaaggccagagtatgatcgtactggggaaatattgagcgaagcgcaggttcctgttccggcgggggggacggtatctcttctagtgggatctttgctattgaactccgtgttcttggtgctgcttggatgttggtgctcgtgaccggctggctgtccttcgccgggacgtctggccgcggtgagctatgtattgcctgacggggctgaccttggtagaatggattgtttgatgccaattgagcagtgcttgctagtggcggtgttccgtcgatcacatactctgccaattcttctgttctttgcccgtggttctgcggggatgtcatatcaaatgatgcgtcccggcctcttgatgactgaggagtcccagcacgcggtcgaggcgttggtgtttttcgaggcggcgtctttgtgacattcgcatttgggaagagagagaaccccccagagggcccgttcgttgccattatgccgattatatcagatctcccagagtcagccctgtgccaggtggaatgctgttccaattttgtcactcgagtccgtcttctctaggatgcaattagataagactcgacagcgaaaccaggctgtcggaacacagggggggttcgcgatcactatattaatgtacgaaaaatagcacagataggaggcagcatgagcatccgatgttgtgccaccaacaattaagacgcaaatgttcttaaagtaggaggaaaaaggaaccattccccagtcggtcggtataacaagtaaaaagaagaggcaaggagacgtata

SEQ ID NO: 32185 - DNA, 1782 bp, Muscodor strobelii
  misc_feature: SGI cDNA ID NO. 571090
  misc_feature: Encodes the peptide sequence at SEQ ID NO 32186
atggcaacgaacgggccctctggggggttctctctcttcccaaatgcgaatgtcacaaagacgccgcctcgaaaaacaccaacgcctcgaccgcgtgctgggactcctcagtcatcaagaggccgggacgcatcatttgatatgacatccccgcagaaccacgggcaaagaacagaagaattggcagagtatgtgatcgacggaacaccgccactagcaagcactgctcaattggcatcaaacaatccattctaccaaggtcagccccgtcaggcaatacatagctcaccgcggccagacgtcccggcgaaggacagccagccggtcacgagcaccaacatccaagcagcaccaagaacacggagttcaatagcaaagatcccactagaagagataccgtcccccccgccggaacaggaacctgcgcttcgctcaatatttccccagtacgatcatactctggcctttgatcagcagaactactaccccgcgcaaacaagtccgacacatataccacgaacagtcatcagtaggcagtcccacgtgccacaacaagtggaggccagaagccctccagttcgcagtccagtgcgaagtccgatgagcaccagttcagctcaacagaggtggccgagacggcagcatgagccggcggtgatcccacctgtgagcacaacagaggagctccgagatttctggaaggcggcaaatggatggaaggcatcaagcatggagggtcggacgtattgcatgaagatggttccagagaaagacacacctatctacactctaacgtcaaggacccaaccactctaccatatgcgcattgacccgacctcggcatcagcatacgtcacactcagccgtcatgatccaaacaagacatgcaaagacaagaatccgacagattcggcagctcggaactcaagcggcttcatgaacgccatccgggaggcagagggcaagcaatcgtggcaggaagccatggccacgacccttgaggaaccatctcgtcgcctgccgccaaatgacggactcgtggcactcttataccccagccaagcggcaaaagtcgctctcgagcgaccaaacgacgcaacagccgtggccgcggctgaaaatgaatgcgcgagactcgtctgggatgaagatagccagaattacttccttgtccaccccgccatcgcaaccccattctgcatcacgattgagcggagtccagcatacagccgcacagagtacacaatcgagcacgtcaagtcaccccagcaccttggccgtctgacccgcgacgcgacaggcgaagggtggatggaactcgacacactagtcgccggacgcatcgaaagctactacgtcctcgacgtggcagccgccgctctcctcctcgttgcgcacatcgacgagaagaacgtcctagtcgagcaattcgcccctccgcccgccgtccatcttcgtgacgacgctgggtcacgctccagcttccagcgcagcggaagtcgtctcagcagcaagattcttccggccaccaaggagaagaagaagaagcggggccgcatcgaggcgctcgagctcgatctcgagagccaggctagtagtctcggtggcaaactcagtatcaaggactctgataaggagaagctgccaggcactgcgcgtacaatcatcaaattgcttggttttgcgtttaagtgtgttatttgggcgcttacgctgacctttaaggctctcatggcgattgttgtgggacttaccaagtgcatctcgagcgacaagttataa

SEQ ID NO: 32186 - protein, 593 aa, Muscodor strobelii
  misc_feature: SGI Peptide ID NO. 571090
  misc_feature (1)..(590): NCBI GI: 46120622 Blast Desc: FG04928.1 [Gibberella zeae PH-1]
  misc_feature (1)..(593): NCBI GI: 39951347 Blast Desc: MGG_01316 [Magnaporthe grisea 70-15] gi|145020868|gb|EDK04997.1| MGG_01316 [Magnaporthe grisea 70-15]
  misc_feature (6)..(588): NCBI GI: 261358827 Blast Desc: conserved [Verticillium albo-atrum VaMs.102]
  misc_feature (27)..(590): NCBI GI: 256734910 Blast Desc: NECHADRAFT_75644 [Nectria haematococca mpVI 77-13-4]
  misc_feature (139)..(592): NCBI GI: 156054140 Blast Desc: SS1G_05918 [Sclerotinia sclerotiorum 1980] gi|154703698|gb|EDO03437.1| SS1G_05918 [Sclerotinia sclerotiorum 1980]
  misc_feature (142)..(586): NCBI GI: 85111947 Blast Desc: NCU03132 [Neurospora crassa OR74A] gi|28925952|gb|EAA34945.1| [Neurospora crassa OR74A] gi|38567272|emb|CAE76562.1| [Neurospora crassa]
  misc_feature (6)..(558): NCBI GI: 116180498 Blast Desc: CHGG_00877 [Chaetomium globosum CBS 148.51] gi|88185174|gb|EAQ92642.1| CHGG_00877 [Chaetomium globosum CBS 148.51]
  misc_feature (5)..(593): NCBI GI: 171687739 Blast Desc: protein product [Podospora anserina] gi|170943831|emb|CAP69483.1| protein product [Podospora anserina]
  misc_feature (139)..(428): NCBI GI: 154297237 Blast Desc: BC1G_12454 [Botryotinia fuckeliana B05.10] gi|150842981|gb|EDN18174.1| BC1G_12454 [Botryotinia fuckeliana B05.10]
  misc_feature (143)..(593): NCBI GI: 261200699 Blast Desc: conserved [Ajellomyces dermatitidis SLH14081] gi|239593822|gb|EEQ76403.1| conserved [Ajellomyces dermatitidis SLH14081]
MATNGPSGGFSLFPNANVTKTPPRKTPTPRPRAGTPQSSRGRDASFDMTSPQNHGQRTEELAEYVIDGTPPLASTAQLASNNPFYQGQPRQAIHSSPRPDVPAKDSQPVTSTNIQAAPRTRSSIAKIPLEEIPSPPPEQEPALRSIFPQYDHTLAFDQQNYYPAQTSPTHIPRTVISRQSHVPQQVEARSPPVRSPVRSPMSTSSAQQRWPRRQHEPAVIPPVSTTEELRDFWKAANGWKASSMEGRTYCMKMVPEKDTPIYTLTSRTQPLYHMRIDPTSASAYVTLSRHDPNKTCKDKNPTDSAARNSSGFMNAIREAEGKQSWQEAMATTLEEPSRRLPPNDGLVALLYPSQAAKVALERPNDATAVAAAENECARLVWDEDSQNYFLVHPAIATPFCITIERSPAYSRTEYTIEHVKSPQHLGRLTRDATGEGWMELDTLVAGRIESYYVLDVAAAALLLVAHIDEKNVLVEQFAPPPAVHLRDDAGSRSSFQRSGSRLSSKILPATKEKKKKRGRIEALELDLESQASSLGGKLSIKDSDKEKLPGTARTIIKLLGFAFKCVIWALTLTFKALMAIVVGLTKCISSDKL

SEQ ID NO: 32187 - DNA, 1689 bp, Muscodor strobelii
  misc_feature: SGI cDNA ID NO. 571091
  misc_feature: Encodes the peptide sequence at SEQ ID NO 32188
atgtggctcatcaacacgtcaacatatgagctggaagatgtcgtcaatcctcgaaagggatcatacgccatcctttcccacacatgggaagacggtgaagtctcgtttcagaaatatcaaaatagagctgaagcagagctacttaaaggcttcgccaaaatcgacatgactgtgcggcttgctcgcgagaaaaatttgaagtatgcgtgggttgacacgtgctgtattgacaagaggagcagcgcagaattatcagaggccattaattcgatgttcaaatggtactcgaattctgctatctgctttgtttacttgtccgatctgcgtagttctgtgatcgcaccttggttatcctatctccatccgggtccgtctgatataaactggggaacgaaagaaaagagaaaagccttaaataccttgaccatagtggagacgcaaactgcggagatgctcgctcgatgccgctggtttcaccgcggctggacactgcaggaattaattgcgcctactgaaatcgagtttttcgacgatcaatgggtgatgtttggtacgaagaggactctgaaggaggcgctcagttcggttactcgaatcccgtcgcaagttctattcaaaacgatcgatctgcgcaaaattccggttgctcagcgcatgtcatgggcatcagatcgcgagaccacccgtgtcgaagacattgcttactgtcttcttggtctatttggtatcaatatggtaccactctacggcgaaggcgagaacgctttcattcggttgcaagaagagatcttgaaggaatcagatgacctgaccctctttgcgtggacttctaatgacaatggctttcaacaatatcgaggcattcttgcgtgctccccttccgaattcagggagtgcagcacaattcgtcggcatcgcgccgtgaatgatcatacaggcgagtttcgaatgacccataaaggtcttagcattgaccagagcaatctaaagtctatagaactcgcgaatagcgctgtgttaccattagattgctacaagtccgttccagcacgttcagaaactgaggattacattctgaaaaaaaagattcacgatctgaactcgggttatatatcatgcgaacaagtcttggatatgttcggatctgttgtgtttattgtgaaaaccgttgatctggaggaatcagacgagctaggtatggaaatgcttgatgtcacagtccaacatgatgaagggcttcaggttcgcatatggccggatgccctcctcagtttcgacgaccagaaattcgattattctgcaactagacatacaatactgttcaaatgtcagagaggagacggcgaagaagctttcttgcttaagcaccacggcactgatacggcggatacttaccttgcagtattggatggctcaagaaaagacacctggcatgacacttttagacgcatcagcgcattgacagaggttgacacgcactggcactcaacgatcgaggttattaacaaattccaacaattctccgggaatgagtcaaaggggcaagtgtctattcgtgggacatggttcaactgtgctgtcacgttcgcaccacttggaagcatctcgcaaaaaaaggccctccaagtcaatatcactgatatcaggtctaggaaagaaggccgtgattgtgagatgttagccccctga

SEQ ID NO: 32188 - protein, 562 aa, Muscodor strobelii
  misc_feature: SGI Peptide ID NO. 571091
  misc_feature (22)..(166): Pfam Id: PF06985 Pfam Desc: Heterokaryon incompatibility protein (HET)
  misc_feature (1)..(324): NCBI GI: 256722404 Blast Desc: NECHADRAFT_44368 [Nectria haematococca mpVI 77-13-4]
  misc_feature (1)..(344): NCBI GI: 256720984 Blast Desc: NECHADRAFT_82249 [Nectria haematococca mpVI 77-13-4]
  misc_feature (1)..(306): NCBI GI: 256726184 Blast Desc: NECHADRAFT_94537 [Nectria haematococca mpVI 77-13-4]
  misc_feature (1)..(344): NCBI GI: 46126619 Blast Desc: FG07687.1 [Gibberella zeae PH-1]
  misc_feature (1)..(352): NCBI GI: 145605569 Blast Desc: MGG_09177 [Magnaporthe grisea 70-15] gi|145013388|gb|EDJ98029.1| MGG_09177 [Magnaporthe grisea 70-15]
  misc_feature (1)..(302): NCBI GI: 256722053 Blast Desc: NECHADRAFT_16940 [Nectria haematococca mpVI 77-13-4]
  misc_feature (1)..(325): NCBI GI: 164425178 Blast Desc: NCU06304 [Neurospora crassa OR74A] gi|157070820|gb|EAA33330.2| conserved [Neurospora crassa OR74A]
  misc_feature (21)..(325): NCBI GI: 238485594 Blast Desc: ankyrin repeat-containing protein, [Aspergillus flavus NRRL3357] gi|220698914|gb|EED55253.1| ankyrin repeat-containing protein, [Aspergillus flavus NRRL3357]
  misc_feature (1)..(275): NCBI GI: 256720642 Blast Desc: NECHADRAFT_28132 [Nectria haematococca mpVI 77-13-4]
  misc_feature (1)..(327): NCBI GI: 46139867 Blast Desc: FG11448.1 [Gibberella zeae PH-1]
MWLINTSTYELEDVVNPRKGSYAILSHTWEDGEVSFQKYQNRAEAELLKGFAKIDMTVRLAREKNLKYAWVDTCCIDKRSSAELSEAINSMFKWYSNSAICFVYLSDLRSSVIAPWLSYLHPGPSDINWGTKEKRKALNTLTIVETQTAEMLARCRWFHRGWTLQELIAPTEIEFFDDQWVMFGTKRTLKEALSSVTRIPSQVLFKTIDLRKIPVAQRMSWASDRETTRVEDIAYCLLGLFGINMVPLYGEGENAFIRLQEEILKESDDLTLFAWTSNDNGFQQYRGILACSPSEFRECSTIRRHRAVNDHTGEFRMTHKGLSIDQSNLKSIELANSAVLPLDCYKSVPARSETEDYILKKKIHDLNSGYISCEQVLDMFGSVVFIVKTVDLEESDELGMEMLDVTVQHDEGLQVRIWPDALLSFDDQKFDYSATRHTILFKCQRGDGEEAFLLKHHGTDTADTYLAVLDGSRKDTWHDTFRRISALTEVDTHWHSTIEVINKFQQFSGNESKGQVSIRGTWFNCAVTFAPLGSISQKKALQVNITDIRSRKEGRDCEMLAP

SEQ ID NO: 32189 - DNA, 741 bp, Muscodor strobelii
  misc_feature: SGI cDNA ID NO. 571092
  misc_feature: Encodes the peptide sequence at SEQ ID NO 32190
atgtgcatagttggattcgtcgacacaaatctcgaattcaatgagaccatagttccctcctacatccaacatgcaaatgaaccagtaattctccagcagccatcgcagaccgaacgcgtgctcaagttactgcggagtgaccacccaccgaattatcttgaactctataatgagcccgatttagcatatcatgaggacggggcgaccaatccggagaaggcagccgacacgctgaagccagttctccaatacaacagaaaacacaacgtctcgacgctcctgagtccggcgttatgggatccagcgaaagtgacgaaccaagggggttggatggaccgctttgacaaagcctgcgacggctgcttaacgtcaaaggaaatccccatcatcgctacgcaccagtacaacctgaacgcctcaggcgtcatcgctagccttaaggacatacataagcgctggcccgatcacaagatctggatcaccgagctagctcctgctacacatgctcaaaattgccctaagagcttgagcgaggtcggagagtggatgactgaagtggtgaggggcactcaggctctaccctacgtgcagagaatcttttggaattcgggggaatggtctgacttatccgaatggcacggctaccccgttgttggagaagtacgggcggctgtgtgctactacttgactgcgaaagaaggaacgtttttagccggaaagaacagagttgatttcttataa

SEQ ID NO: 32190 - protein, 246 aa, Muscodor strobelii
  misc_feature: SGI Peptide ID NO. 571092
  misc_feature (17)..(201): NCBI GI: 169845329 Blast Desc: CC1G_00563 [Coprinopsis cinerea okayama7#130] gi|116509449|gb|EAU92344.1| CC1G_00563 [Coprinopsis cinerea okayama7#130]
  misc_feature (38)..(162): NCBI GI: 169600869 Blast Desc: SNOG_03287 [Phaeosphaeria nodorum SN15] gi|160705534|gb|EAT90018.2| SNOG_03287 [Phaeosphaeria nodorum SN15]
MCIVGFVDTNLEFNETIVPSYIQHANEPVILQQPSQTERVLKLLRSDHPPNYLELYNEPDLAYHEDGATNPEKAADTLKPVLQYNRKHNVSTLLSPALWDPAKVTNQGGWMDRFDKACDGCLTSKEIPIIATHQYNLNASGVIASLKDIHKRWPDHKIWITELAPATHAQNCPKSLSEVGEWMTEVVRGTQALPYVQRIFWNSGEWSDLSEWHGYPVVGEVRAAVCYYLTAKEGTFLAGKNRVDFL

SEQ ID NO: 32191 - DNA, 1758 bp, Muscodor strobelii
  misc_feature: SGI cDNA ID NO. 571093
  misc_feature: Encodes the peptide sequence at SEQ ID NO 32192
atgctacaaacaacgttgctaaggatcgcggcacctctcttggccctcgttggggttgatgggacaccgacaaaaacccattgcaagtgtgcccccggggatacatgctggccgtcatcatcggagtggcagcatttcaactcgagcatttcaggaaagctcatcgccgataaaccaatagcaatctcttgttatcatggtgcggattacgatgatgcagcatgcgatagcatcaacagcgcatggtcatctgccacatggatgggtgaacgtcctatgggattagatttcccgttgaacataacatgccctcctctttcagcgacagcccgttccacagccaccgcagaccagtgcactatgggtagtaatcccgtctacgcagtaaacgctacgaagatcgacgacatcgttgccgcagtccgctttgccaaagcaaagaatctgagactcgttatcaagacaagcggacatgatatacttggaagaagcgatggttacggaagccttgttgtctggcttcgctactttcggaacggtatcaccttcaaaccagaatacagatcttctacagattgcaaggctacggattggaagggcagtgcgatgaaaatagctggcgggtacatgtggggagacgtgtacgcacaggcaagcgccaacaacgtggtgatcgtaggcggcggggctacgacagtctccagcatcggtggttggatgcagggagggggacatggtcccgcaagttcgtactttggtctcggtgcagatcaggttctcgaagccgaagtcgtactagcaagtggaaaggttgtcaccgccaatgcttgccaaaatcaggacttgtttttcgcaatccgtggcgggggtcctggcacatatgggattgtcgtatcaaccatcgtcaagacatacccacaagtcagcgccactattcagcgtcttatgatcacgccgctaaacacatcaacggacagtctgcgcgatgctatcgctactatctacggggaatttccaaatcttgtagagtcaggcttctcaggttatcctaattggcagtctgggtctcgacagttctatacgcactcactattcatgctaaacacttcgagtgagtatgttcaagcgaagggacaaatgctccttgacaaactcgaccgattctccagcacgttgaatatgacatctagctatgaatcgtatcctgattactggtctttttacgacaagttatcaaaccacgattccccgattggttatatgggtgcgattggaagccgcatgttagacacaaactctctgaaggactttattgcaatccgagccgctgtcgacgtgttagccggcctaccaagcgagggagtcaacaacgccgtttctctggtagccgggggacaagtatgggccgacaaattacagaattcggctgtcaatccagcttggagaactacggtggcaatcaatacgtgctctcgttctatcgttggtaagactgcacaagagtggcaagagatccacgatgacatcacctacaccaagactgcagctttaactgctcttgcacctcggacaggagggtatatgaacgaggcagaccacttcgaccccaattggagagccaacttttacggatcgaattatcagaaactctatcgtataaagtctcggtatgatccgacgtctctattttactgcccaacttgtgtcggaagcgatgagtggcagtcggatgcagtcggtcggctatgtgctgtgtga

SEQ ID NO: 32192 - protein, 585 aa, Muscodor strobelii
  misc_feature: SGI Peptide ID NO. 571093
  misc_feature (526)..(570): Pfam Id: PF08031 Pfam Desc: Berberine and berberine like
  misc_feature (125)..(275): Pfam Id: PF01565 Pfam Desc: FAD binding domain
  misc_feature (13)..(583): NCBI GI: 238505834 Blast Desc: isoamyl alcohol oxidase [Aspergillus flavus NRRL3357] gi|220690233|gb|EED46583.1| isoamyl alcohol oxidase [Aspergillus flavus NRRL3357]
  misc_feature (28)..(585): NCBI GI: 119492764 Blast Desc: isoamyl alcohol oxidase [Neosartorya fischeri NRRL 181] gi|119411861|gb|EAW21804.1| isoamyl alcohol oxidase [Neosartorya fischeri NRRL 181]
  misc_feature (29)..(585): NCBI GI: 71000347 Blast Desc: isoamyl alcohol oxidase [Aspergillus fumigatus Af293] gi|66852505|gb|EAL92830.1| isoamyl alcohol oxidase [Aspergillus fumigatus Af293]
  misc_feature (29)..(585): NCBI GI: 159127881 Blast Desc: isoamyl alcohol oxidase [Aspergillus fumigatus A1163]
  misc_feature (36)..(583): NCBI GI: 154292132 Blast Desc: BC1G_14875 [Botryotinia fuckeliana B05.10] gi|150846302|gb|EDN21495.1| BC1G_14875 [Botryotinia fuckeliana B05.10]
  misc_feature (7)..(583): NCBI GI: 116202729 Blast Desc: CHGG_09249 [Chaetomium globosum CBS 148.51] gi|88177767|gb|EAQ85235.1| CHGG_09249 [Chaetomium globosum CBS 148.51]
  misc_feature (20)..(583): NCBI GI: 187940954 Blast Desc: alcohol oxidase [Hypomyces subiculosus] gi|187940964|gb|ACD39768.1| alcohol oxidase [Hypomyces subiculosus]
  misc_feature (28)..(585): NCBI GI: 115385090 Blast Desc: conserved [Aspergillus terreus NIH2624] gi|114196784|gb|EAU38484.1| conserved [Aspergillus terreus NIH2624]
  misc_feature (1)..(583): NCBI GI: 256720419 Blast Desc: NECHADRAFT_55923 [Nectria haematococca mpVI 77-13-4]
  misc_feature (32)..(571): NCBI GI: 121705024 Blast Desc: isoamyl alcohol oxidase [Aspergillus clavatus NRRL 1] gi|119398921|gb|EAW09349.1| isoamyl alcohol oxidase [Aspergillus clavatus NRRL 1]
MLQTTLLRIAAPLLALVGVDGTPTKTHCKCAPGDTCWPSSSEWQHFNSSISGKLIADKPIAISCYHGADYDDAACDSINSAWSSATWMGERPMGLDFPLNITCPPLSATARSTATADQCTMGSNPVYAVNATKIDDIVAAVRFAKAKNLRLVIKTSGHDILGRSDGYGSLVVWLRYFRNGITFKPEYRSSTDCKATDWKGSAMKIAGGYMWGDVYAQASANNVVIVGGGATTVSSIGGWMQGGGHGPASSYFGLGADQVLEAEVVLASGKVVTANACQNQDLFFAIRGGGPGTYGIVVSTIVKTYPQVSATIQRLMITPLNTSTDSLRDAIATIYGEFPNLVESGFSGYPNWQSGSRQFYTHSLFMLNTSSEYVQAKGQMLLDKLDRFSSTLNMTSSYESYPDYWSFYDKLSNHDSPIGYMGAIGSRMLDTNSLKDFIAIRAAVDVLAGLPSEGVNNAVSLVAGGQVWADKLQNSAVNPAWRTTVAINTCSRSIVGKTAQEWQEIHDDITYTKTAALTALAPRTGGYMNEADHFDPNWRANFYGSNYQKLYRIKSRYDPTSLFYCPTCVGSDEWQSDAVGRLCAV

SEQ ID NO: 32193 - DNA, 606 bp, Muscodor strobelii
  misc_feature: SGI cDNA ID NO. 571094
  misc_feature: Encodes the peptide sequence at SEQ ID NO 32194
atggtgcgtcaattgatctttgaagtccgtggtggcatccgtcgcgaggctgaagcgagaccgttggctatctcagttgaacacgccatctactctcccaggcctagccttaaacgggccgagttaggtgccatcatcgccgcactactgtgggccgtggaagagtatgacaacctcaaaggctcggacttcgtcagtgttgtagtcctctcaagttccatctacgcactccatataatgcatgaatggattgagaaaggctatattcatgagctgagcgtcttgcctgagtaccgtgttcgagaaatcccaaacattgatttcattaagtgggcgaagcaactcaatggtcgcctcaccgagatgggtcatgttgtctacgagttggggcccgcagagaacagtcacataccttactggatctgtgagcagagacttgatgcattggaagcaaaagacgatgcagatgcaaccgaaagcgagccaggacaaacggatgaatattattcaacagaagacgaagatccacaagctgatgatgatagttcagcagaagacagagactcgcaagccgacaaggaatatgtgccatcagacgaagagtaa

SEQ ID NO: 32194 - protein, 201 aa, Muscodor strobelii
  misc_feature: SGI Peptide ID NO. 571094
  misc_feature (1)..(150): NCBI GI: 242812940 Blast Desc: ribonuclease H1, [Talaromyces stipitatus ATCC 10500] gi|218714404|gb|EED13827.1| ribonuclease H1, [Talaromyces stipitatus ATCC 10500]
  misc_feature (22)..(151): NCBI GI: 258572500 Blast Desc: [Uncinocarpus reesii 1704] gi|237905282|gb|EEP79683.1| [Uncinocarpus reesii 1704]
  misc_feature (32)..(151): NCBI GI: 240107489 Blast Desc: RNase H domain containing protein [Coccidioides posadasii C735 delta SOWgp]
  misc_feature (32)..(151): NCBI GI: 119191229 Blast Desc: CIMG_05662 [Coccidioides immitis RS]
  misc_feature (1)..(153): NCBI GI: 212544590 Blast Desc: ribonuclease H1, [Penicillium marneffei ATCC 18224] gi|210065418|gb|EEA19512.1| ribonuclease H1, [Penicillium marneffei ATCC 18224]
  misc_feature (1)..(154): NCBI GI: 119181956 Blast Desc: CIMG_06038 [Coccidioides immitis RS]
  misc_feature (35)..(137): NCBI GI: 145228713 Blast Desc: An01g02270 [Aspergillus niger] gi|134054757|emb|CAK43597.1| protein product [Aspergillus niger]
MVRQLIFEVRGGIRREAEARPLAISVEHAIYSPRPSLKRAELGAIIAALLWAVEEYDNLKGSDFVSVVVLSSSIYALHIMHEWIEKGYIHELSVLPEYRVREIPNIDFIKWAKQLNGRLTEMGHVVYELGPAENSHIPYWICEQRLDALEAKDDADATESEPGQTDEYYSTEDEDPQADDDSSAEDRDSQADKEYVPSDEE

SEQ ID NO: 32195 - DNA, 1662 bp, Muscodor strobelii
  misc_feature: SGI cDNA ID NO. 571095
  misc_feature: Encodes the peptide sequence at SEQ ID NO 32196
atggatatcgacaagaaaaatgattcacaggatccatatgaagaacatgtcgaaagaaatgtccttcaagagctgaacttcgatgagttgagctatggccctcctgggattaagggcattttcacatcaaaatatgtcgtgggctgtgcggcttttgctgctctaggtggcttcttatttggctacgaccagggcgtaatttccgtcacactgacgatggaacaatttctgcagcgatttcccgaggttgctgatggggcaccaggtgcaggattctataaaggactggtgacggctctgatcactttaggtgctttcgttggcgcaattaaccaaggatggatttcggacgccatatctcgaaagcgaactattatggtagctgttgtgatctttatcatcggatcagccatacaaaccgcttcggtcaactacaatatgctcattgtcggacgtttaattggaggtatcggaatcggaatactgtccagtgttgcccccttgtacatatcagaaatttctccgccgaatatccgtggcacgatgctggtcttcgaagaacttagcatcgttgttggcattgtcgttgcttattacatcacatacggaactcggaccatcccctcgcactggtcgtggcagctgccattcctgttgcaaatcctgcctggtatactccttggcgtaggcgcgatcctacttccctattctccgaggtggttagcctcagttgggagagaagacgaaagtctggccaccttggccaaagtacgacaatgtccgacaaatgacaaccgagttgagaaggaatggttagagattattgcagagtgcaaattccaaaatgaggtgctggctggcaggcatcccggcttgatgagcccaggcatcggcaataagcttcggctcgaagttgtatcatggaccgacctgtttaagaagggttgttggcgacgaacccatgtcggtattgggatcatgtttttccagcagtttgttggcatcaatgcattgatctactactctcccacattattcaaaacactaggcttcgatttggatcggcaactagtcttatccggagctatcaatgtcttacaacttgtcggtgtccttactagtttgtggactatggatagatttggccgccgaatgctccttctcgtcggtagcggagccatggctgtctcgcatatcattatcgcggctcttgttggcgaatatagcggtaactggcctgatcatgtcacagccgcaaacgttagcgtagcattccttttcatttatatggtgtcttttggtgcaagttgggggcctgttccttgggccctgccggctgaaatttttccttcgtctcttcgtgcaaagggcgtgggtatcgctacggcctctaactggatcaataactttattattggccttatcactccaccattgatcgatgctaccggatttggcgcatacgtcttcttcgctgcattctgcttcctgtcgtttgtttggacattctttttcgtgcccgagaccaatggagcaagcctggaaaagatggacgaggtcttcaaagaccgaactaatctcgaggataacgaggcaaaaagccggatattggctgagcttgtccgggaacgagcagtcggaacacatatactgcaagcttag

SEQ ID NO: 32196 - protein, 553 aa, Muscodor strobelii
  misc_feature: SGI Peptide ID NO. 571095
  misc_feature (53)..(473): Pfam Id: PF07690 Pfam Desc: Major Facilitator Superfamily
  misc_feature (49)..(521): Pfam Id: PF00083 Pfam Desc: Sugar (and other) transporter
  misc_feature (53)..(440): Pfam Id: PF07690 Pfam Desc: Major Facilitator Superfamily
  misc_feature (443)..(519): Pfam Id: PF07690 Pfam Desc: Major Facilitator Superfamily
  misc_feature (49)..(258): Pfam Id: PF00083 Pfam Desc: Sugar (and other) transporter
  misc_feature (318)..(521): Pfam Id: PF00083 Pfam Desc: Sugar (and other) transporter
  misc_feature (4)..(542): NCBI GI: 119480229 Blast Desc: MFS monosaccharide transporter, [Neosartorya fischeri NRRL 181] gi|119408297|gb|EAW18246.1| MFS monosaccharide transporter, [Neosartorya fischeri NRRL 181]
  misc_feature (23)..(542): NCBI GI: 159129056 Blast Desc: MFS monosaccharide transporter, [Aspergillus fumigatus A1163]
  misc_feature (23)..(542): NCBI GI: 70989599 Blast Desc: MFS monosaccharide transporter [Aspergillus fumigatus Af293] gi|66847280|gb|EAL87611.1| MFS monosaccharide transporter, [Aspergillus fumigatus Af293]
  misc_feature (3)..(545): NCBI GI: 238487522 Blast Desc: MFS monosaccharide transporter, [Aspergillus flavus NRRL3357] gi|220699878|gb|EED56217.1| MFS monosaccharide transporter, [Aspergillus flavus NRRL3357]
  misc_feature (28)..(542): NCBI GI: 121710122 Blast Desc: MFS monosaccharide transporter, [Aspergillus clavatus NRRL 1] gi|119400827|gb|EAW11251.1| MFS monosaccharide transporter, [Aspergillus clavatus NRRL 1]
  misc_feature (3)..(545): NCBI GI: 169770105 Blast Desc: [Aspergillus oryzae RIB40] gi|83767381|dbj|BAE57520.1| protein product [Aspergillus oryzae]
  misc_feature (4)..(544): NCBI GI: 46118321 Blast Desc: FG04700.1 [Gibberella zeae PH-1]
  misc_feature (4)..(544): NCBI GI: 189194511 Blast Desc: arabinose-proton symporter [Pyrenophora tritici-repentis Pt-1C-BFP] gi|187979158|gb|EDU45784.1| arabinose-proton symporter [Pyrenophora tritici-repentis
  misc_feature (6)..(549): NCBI GI: 255948434 Blast Desc: Pc22g09740 [Penicillium chrysogenum Wisconsin 54-1255] gi|211592001|emb|CAP98262.1| Pc22g09740 [Penicillium chrysogenum Wisconsin 54-1255]
  misc_feature (32)..(544): NCBI GI: 145244014 Blast Desc: An11g05280 [Aspergillus niger] gi|134079204|emb|CAL00378.1| protein product [Aspergillus niger]
MDIDKKNDSQDPYEEHVERNVLQELNFDELSYGPPGIKGIFTSKYVVGCAAFAALGGFLFGYDQGVISVTLTMEQFLQRFPEVADGAPGAGFYKGLVTALITLGAFVGAINQGWISDAISRKRTIMVAVVIFIIGSAIQTASVNYNMLIVGRLIGGIGIGILSSVAPLYISEISPPNIRGTMLVFEELSIVVGIVVAYYITYGTRTIPSHWSWQLPFLLQILPGILLGVGAILLPYSPRWLASVGREDESLATLAKVRQCPTNDNRVEKEWLEIIAECKFQNEVLAGRHPGLMSPGIGNKLRLEVVSWTDLFKKGCWRRTHVGIGIMFFQQFVGINALIYYSPTLFKTLGFDLDRQLVLSGAINVLQLVGVLTSLWTMDRFGRRMLLLVGSGAMAVSHIIIAALVGEYSGNWPDHVTAANVSVAFLFIYMVSFGASWGPVPWALPAEIFPSSLRAKGVGIATASNWINNFIIGLITPPLIDATGFGAYVFFAAFCFLSFVWTFFFVPETNGASLEKMDEVFKDRTNLEDNEAKSRILAELVRERAVGTHILQA

SEQ ID NO: 32197 - DNA, 452 bp, Muscodor strobelii
  misc_feature: SGI EST ID NO. CUFF.76201.0
  misc_feature: Variant of the nucleotide sequence at SEQ ID NO 32195
cttgtacatatcagaaatttctccgccgaatatccgtggcacgatgctggtcttcgaagaacttagcatcgttgttggcattgtcgttgcttattacatcacatacggaactcggaccatcccctcgcactggtcgtggcagctgccattcctgttgcaaatcctgcctggtatactccttggcgtaggcgcgatcctacttccctattctccgaggtggttagcctcagttgggagagaagacgaaagtctggccaccttggccaaagtacgacaatgtccgacaaatgacaaccgagttgagaaggaatggttagagattattgcagagtgcaaattccaaaatgaggtgctggctggcaggcatcccggcttgatgagcccaggcatcggcaataagcttcggctcgaagttgtatcatggaccgacctgtttaagaagggttgttggc

SEQ ID NO: 32198 - DNA, 1485 bp, Muscodor strobelii
  misc_feature: SGI cDNA ID NO. 571096
  misc_feature: Reduced expression when VOC is produced
  misc_feature: Encodes the peptide sequence at SEQ ID NO 32199
atgtcactccagaccattcggaatgtcgtcctactgttcagcggccctcgatcatcatctccgagttcaatcatcagtaacatcactgccatctccagccagtttgcctatgaggaagtaataccggacaatatcactactctcacagacaattatgtgtcacccatagacggtcttgttcgcgggttattatacgtgcccgacctagacgacgacgatccttgtaatgctgacattgatcgatacatcccatccaatgttaccagacagaagagtctacccaacaccgactataagctcatcgctctagcaccatggatttctgtgaattgcacgaagtctttcttcaggtctgcccgcgtagacccggtcagggctatgttggtttatcaacctgacgctgccgatggaaggccgccctatgcggagtctgaggactgggaccttgacgatggtggcgcttggaaagaaagcaatcatttcccagtctatgctgtgcctagtagcgcggggaaaggaatgatgttccaactgagccagtattctggcaacatttcatcagtcccgtttgctgaacagatcaacaagacttactctccaaagtccgacgactacattcgagtttggtctgagctcgctgtgtcgagtgactcaagcgagttaccaatttgggcattggtcctcatcatcgtcgctactctcattgccgtcattagcggcacgtcgctatgcatgcattacgttcagagtcgtcgacgagcgtttctgcgacaccgtgtcatgaatggcgaagttaatctagaagcgctggggatcaaacgtctccgtgtgcccttgagccacgtcgagacatttcccttgtttacttaccactatgacgcctcatcgacatccatggtatctaaaggggctgaagacacgaccgtccactctgcgagtcaattcacagggaaacaagttgaccgtctcgaccatcaacccacttgtttaatttgtttggaagacttccagtcaaatgaaactgtcattcgcgagcttccttgcggccacatttatcatcccgagtgtatcgacaaatttttgagtgagatgagctcactttgtccatattgcaaagcatccatgctaccacttgggttcagtcccaagattaccaactcaatggcgcgaagggagctcaacacgcggaagctaaggtctagctcccgcgccttgagaggcgacattgagagcggatggcgcaaaatgttttcgagcggtagtcgtgtaacgaaatgttcatcacgaacatcaggcgccactgagctcacctcacccacaccggtaattctgcatacccgaggcagcatcttacggcgtgaggctaggccgaacacacagcagaggatggaggagcttgttccaccagtggacgaaaccaacagcgatgatggtcgaccaccatggaagcgcgcggcgttgaccttatttcctggattcaattga

SEQ ID NO: 32199 - protein, 494 aa, Muscodor strobelii
  misc_feature: SGI Peptide ID NO. 571096
  misc_feature (329)..(371): Pfam Id: PF00097 Pfam Desc: Zinc finger, C3HC4 type (RING finger)
  misc_feature (1)..(493): NCBI GI: 39951369 Blast Desc: MGG_01327 [Magnaporthe grisea 70-15] gi|145020857|gb|EDK04986.1| MGG_01327 [Magnaporthe grisea 70-15]
  misc_feature (1)..(388): NCBI GI: 85091393 Blast Desc: NCU07387 [Neurospora crassa OR74A] gi|28920269|gb|EAA29644.1| [Neurospora crassa OR74A]
  misc_feature (1)..(428): NCBI GI: 171695194 Blast Desc: protein product [Podospora anserina] gi|170947839|emb|CAP60003.1| protein product [Podospora anserina]
  misc_feature (18)..(494): NCBI GI: 116182252 Blast Desc: CHGG_01754 [Chaetomium globosum CBS 148.51] gi|88186051|gb|EAQ93519.1| CHGG_01754 [Chaetomium globosum CBS 148.51]
  misc_feature (1)..(466): NCBI GI: 156053896 Blast Desc: SS1G_05796 [Sclerotinia sclerotiorum 1980] gi|154703576|gb|EDO03315.1| SS1G_05796 [Sclerotinia sclerotiorum 1980]
  misc_feature (34)..(388): NCBI GI: 256735482 Blast Desc: NECHADRAFT_98964 [Nectria haematococca mpVI 77-13-4]
  misc_feature (57)..(401): NCBI GI: 46107688 Blast Desc: FG00727.1 [Gibberella zeae PH-1]
  misc_feature (1)..(402): NCBI GI: 189197295 Blast Desc: conserved [Pyrenophora tritici-repentis Pt-1C-BFP] gi|187980933|gb|EDU47559.1| conserved [Pyrenophora tritici-repentis Pt-1C-BFP]
  misc_feature (27)..(493): NCBI GI: 240111102 Blast Desc: C3HC4 type (RING finger) zinc finger containing protein [Coccidioides posadasii C735 delta SOWgp]
  misc_feature (27)..(493): NCBI GI: 119189791 Blast Desc: CIMG_04943 [Coccidioides immitis RS]
  misc_feature: Useful for introducing or modulating the production of volatile compounds
MSLQTIRNVVLLFSGPRSSSPSSIISNITAISSQFAYEEVIPDNITTLTDNYVSPIDGLVRGLLYVPDLDDDDPCNADIDRYIPSNVTRQKSLPNTDYKLIALAPWISVNCTKSFFRSARVDPVRAMLVYQPDAADGRPPYAESEDWDLDDGGAWKESNHFPVYAVPSSAGKGMMFQLSQYSGNISSVPFAEQINKTYSPKSDDYIRVWSELAVSSDSSELPIWALVLIIVATLIAVISGTSLCMHYVQSRRRAFLRHRVMNGEVNLEALGIKRLRVPLSHVETFPLFTYHYDASSTSMVSKGAEDTTVHSASQFTGKQVDRLDHQPTCLICLEDFQSNETVIRELPCGHIYHPECIDKFLSEMSSLCPYCKASMLPLGFSPKITNSMARRELNTRKLRSSSRALRGDIESGWRKMFSSGSRVTKCSSRTSGATELTSPTPVILHTRGSILRREARPNTQQRMEELVPPVDETNSDDGRPPWKRAALTLFPGFN

SEQ ID NO: 32200 - DNA, 3501 bp, Muscodor strobelii
  misc_feature: SGI EST ID NO. CUFF.76502.2
  misc_feature: Variant of the nucleotide sequence at SEQ ID NO 32198
ccaaaatggtcttctcatccctgagaggatctcgaatctcctagcccccagaatccccaacttgccaagaacatcttttttaccctttcttgcggactgctgattctgctacggcgaagcagcaggacgtcccccgaacccatttgcaatatctcctcttctaagtagaatcctactacctcttggttgtcttgtctcagcgacttgtctgaacgatgattcagaagcatgtcactccagaccattcggaatgtcgtcctactgttcagcggccctcgatcatcatctccgagttcaatcatcagtaacatcactgccatctccgtgagtttgacatagtgtcctggtgtccgctgcataactcacatgagccccgtgtctacagagccagtttgcctatgaggaagtaataccggacaatatcactactctcacagacaattatgtgtcacccatagacggtcttgttcgcgggttattatacgtgcccgacctagacgacgacgatccttgtaatgctgacattgatcgatacatcccatccaatgttaccagacagaagagtctacccaacaccgactataagctcatcgctctagcaccatggatttctgtgaattgcacgaagtctttcttcaggtctgcccgcgtagacccggtcagggctatgttggtttatcaacctgacgctgccgatggaaggccgccctatgcggagtctgaggactgggaccttgacgatggtggcgcttggaaagaaagcaatcatttcccagtctatgctgtgcctagtagcgcggggaaaggaatgatgttccaactgagccagtattctggcaacatttcatcagtcccgtttgctgaacagatcaacaagacttactctccaaagtccgacgactacattcgagtttggtctgagctcgctgtgtcgagtgactcaagcgagttaccaatttgggcattggtcctcatcatcgtcgctactctcattgccgtcattagcggcacgtcgctatgcatgcattacgttcagagtcgtcgacgagcgtttctgcgacaccgtgtcatgaatggcgaagttaatctagaagcgctggggatcaaacgtctccgtgtgcccttgagccacgtcgagacatttcccttgtttacttaccactatgacgcctcatcgacatccatggtatctaaaggggctgaagacacgaccgtccactctgcgagtcaattcacagggaaacaagttgaccgtctcgaccatcaacccacttgtttaatttgtttggaagacttccagtcaaatgaaactgtcattcgcgagcttccttgcggccacatttatcatcccgagtgtatcgacaaatttttgagtgagatgagctcactttgtccatattgcaaagcatccatgctaccacttgggttcagtcccaagattaccaactcaatggcgcgaagggagctcaacacgcggaagctaaggtctagctcccgcgccttgagaggcgacattgagagcggatggcgcaaaatgttttcgagcggtagtcgtgtaacgaaatgttcatcacgaacatcaggcgccactgagctcacctcacccacaccggtaattctgcatacccgaggcagcatcttacggcgtgaggctaggccgaacacacagcagaggatggaggagcttgttccaccagtggacgaaaccaacagcgatgatggtcgaccaccatggaagcgcgcggcgttgaccttatttcctggattcaattgaaaacaagtaatctactaaagcatttacattggagttttggaaatcgtgagcattgatcggcgccatgtctctggcatgctttgaaggaaaatcagtgttactgtttcgtgggtgcgggcgcaaaatggagggtttggtattgcatgttttggcgcatggcttggatatacccctatgagagatctcatgacttttgacagatgatatatttaatcaataagatatcagacccatttgagcatcattgtcgattcatattgattaacaattgatgcagatctgtagagcttcactgtgccagaaactcgcttcaggctcttgcacctatctgtgcacagccacatcaggcaacctcccagcctgtacctaaggtacctgaggaatcagttcgtaggatctgccagtagcgtcgatcagaccaccgcaatacaccggacgacttgaatctttcaaatgagataacatgatatgagacaagcaccaatcgcagcattgctcgccttatgcaaaatgtaaggagcaagcgatacgaggtcccaagcaagaacgtcattgggctcataccccgccgtcgcggccgcggtcagctgcatgaacatgtcaacacctgcctattccgaaaagcacatttcaacccacagtctcctgatcccttccaacgccaacacttcacagagagaggatgataagccgctgataatatgcttccatggctcaggagagacatgctcgccatcatggggcgatttggcagtgcaactggtcactgagaccagttgtcgtgtcttgctctatgaccgaggcccgggaaatctaagagctgaagtcgtagcaagggagatgtgggacctcgttctcggaggaggtattgatggaacaggcgacggggacgttgaaaatgagctccggggtccatatctttcgatcgcccattcatatggcggtgcgtttgcgagggcattcgtccaggctgaatacgatactcggatcctatcaacaagacatcaaactctagcaacagaatcacaacaagagataccggcaaattcacgcattattggtctcgtactcgtagaaacaggccaagaaggaggtctcgacgccaaagtcgacgacgcgcagatcaataacaagattatgggcgaccgaccagtctacgtgataagagggaacagtctgatcggaaaatggaaaaatctcggggacaaagagcgagctttatccaacaatgagtctcaactatctgcagagagagatgccgtggtgcagcaacggagattgctagagttgatggataaggaagatgaacgtctgaagaagagacagctgggtctctcgaggaatagtaggtatgtgagtgtgcctgatgtgggacatcatgtcgtaagggacaagccgactgttgttgttgagggtgtgaagtgggtgcttgagaatgagggtagtggtagtcacgagggggggatgaagagggatgttgttaagagggatcagttgaaggttcaactgattggaaaagatgatcggaaaagagaagggaggattgggcttcgacggatatttgagaggtttaggagagggtttggttgagggtcttagtatcttagtatccgagatcaacgaggtttggggctgtagacatagatcgaggagtctaatacgcatcttagaatctttcaaatgctttctgtaacacttatgtataggatagggggcaaacattacag

SEQ ID NO: 32201 - DNA, 993 bp, Muscodor strobelii
  misc_feature: SGI cDNA ID NO. 571097
  misc_feature: Reduced expression when VOC is produced
  misc_feature: Encodes the peptide sequence at SEQ ID NO 32202
atgtcaacacctgcctattccgaaaagcacatttcaacccacagtctcctgatcccttccaacgccaacacttcacagagagaggatgataagccgctgataatatgcttccatggctcaggagagacatgctcgccatcatggggcgatttggcagtgcaactggtcactgagaccagttgtcgtgtcttgctctatgaccgaggcccgggaaatctaagagctgaagtcgtagcaagggagatgtgggacctcgttctcggaggaggtattgatggaacaggcgacggggacgttgaaaatgagctccggggtccatatctttcgatcgcccattcatatggcggtgcgtttgcgagggcattcgtccaggctgaatacgatactcggatcctatcaacaagacatcaaactctagcaacagaatcacaacaagagataccggcaaattcacgcattattggtctcgtactcgtagaaacaggccaagaaggaggtctcgacgccaaagtcgacgacgcgcagatcaataacaagattatgggcgaccgaccagtctacgtgataagagggaacagtctgatcggaaaatggaaaaatctcggggacaaagagcgagctttatccaacaatgagtctcaactatctgcagagagagatgccgtggtgcagcaacggagattgctagagttgatggataaggaagatgaacgtctgaagaagagacagctgggtctctcgaggaatagtaggtatgtgagtgtgcctgatgtgggacatcatgtcgtaagggacaagccgactgttgttgttgagggtgtgaagtgggtgcttgagaatgagggtagtggtagtcacgagggggggatgaagagggatgttgttaagagggatcagttgaaggttcaactgattggaaaagatgatcggaaaagagaagggaggattgggcttcgacggatatttgagaggtttaggagagggtttggttga

SEQ ID NO: 32202 - protein, 330 aa, Muscodor strobelii
  misc_feature: SGI Peptide ID NO. 571097
  misc_feature (32)..(280): NCBI GI: 256729975 Blast Desc: NECHADRAFT_27628 [Nectria haematococca mpVI 77-13-4]
  misc_feature (20)..(327): NCBI GI: 46115222 Blast Desc: FG03453.1 [Gibberella zeae PH-1]
  misc_feature (19)..(278): NCBI GI: 242780939 Blast Desc: alpha/beta hydrolase, [Talaromyces stipitatus ATCC 10500] gi|218719848|gb|EED19267.1| alpha/beta hydrolase, [Talaromyces stipitatus ATCC 10500]
  misc_feature (2)..(278): NCBI GI: 240107184 Blast Desc: alpha/beta hydrolase fold family protein [Coccidioides posadasii C735 delta SOWgp]
  misc_feature (11)..(280): NCBI GI: 239610580 Blast Desc: alpha/beta hydrolase [Ajellomyces dermatitidis ER-3]
  misc_feature (11)..(280): NCBI GI: 261195306 Blast Desc: alpha/beta hydrolase [Ajellomyces dermatitidis SLH14081] gi|239587929|gb|EEQ70572.1| alpha/beta hydrolase [Ajellomyces dermatitidis SLH14081]
  misc_feature (11)..(277): NCBI GI: 238491968 Blast Desc: alpha/beta hydrolase, [Aspergillus flavus NRRL3357] gi|220697634|gb|EED53975.1| alpha/beta hydrolase, [Aspergillus flavus NRRL3357]
  misc_feature (23)..(278): NCBI GI: 212526446 Blast Desc: alpha/beta hydrolase, [Penicillium marneffei ATCC 18224] gi|210072778|gb|EEA26865.1| alpha/beta hydrolase, [Penicillium marneffei ATCC 18224]
  misc_feature (11)..(280): NCBI GI: 70985888 Blast Desc: alpha/beta hydrolase [Aspergillus fumigatus Af293] gi|66846078|gb|EAL86411.1| alpha/beta hydrolase, [Aspergillus fumigatus Af293] gi|159128414|gb|EDP53529.1| alpha/beta fumigatus
  misc_feature (11)..(279): NCBI GI: 119473789 Blast Desc: alpha/beta hydrolase, [Neosartorya fischeri NRRL 181] gi|119406923|gb|EAW16873.1| alpha/beta hydrolase, [Neosartorya fischeri NRRL 181]
  misc_feature: Useful for introducing or modulating the production of volatile compounds
MSTPAYSEKHISTHSLLIPSNANTSQREDDKPLIICFHGSGETCSPSWGDLAVQLVTETSCRVLLYDRGPGNLRAEVVAREMWDLVLGGGIDGTGDGDVENELRGPYLSIAHSYGGAFARAFVQAEYDTRILSTRHQTLATESQQEIPANSRIIGLVLVETGQEGGLDAKVDDAQINNKIMGDRPVYVIRGNSLIGKWKNLGDKERALSNNESQLSAERDAVVQQRRLLELMDKEDERLKKRQLGLSRNSRYVSVPDVGHHVVRDKPTVVVEGVKWVLENEGSGSHEGGMKRDVVKRDQLKVQLIGKDDRKREGRIGLRRIFERFRRGFG

SEQ ID NO: 32203 - DNA, 3501 bp, Muscodor strobelii; identical to SEQ ID NO: 32200
  misc_feature: SGI EST ID NO. CUFF.76502.2
  misc_feature: Variant of the nucleotide sequence at SEQ ID NO 32201

SEQ ID NO: 32204 - DNA, 1842 bp, Muscodor strobelii
  misc_feature: SGI cDNA ID NO. 571098
  misc_feature: Encodes the peptide sequence at SEQ ID NO 32205
atgcaagtcacacgccccgatgggtccagccaggacaatgatgagcctgaggtcctgccgtttgcccaagtcgaagacctcatttcgaacctttcgcctgagcaggtgttgaatgaggcgaaggagaacgggctgtgtagcttctgtcgtagctgtcttcaatctatcatcccatcgaaggttctagagcacatagaaagcgctggtgacatagtcgacctcaatgttcgactcaagtttgattggcatgcaggtggagttcactggtttaggttcgagataatatctttgcaaaatttcgaatccaaggaccggggatgggacgtgttcgcatgtgctgctccctcatatcgagtgtcatgccctgcacccaaatatcaacatgcgaatgtgacgaatgattcgcatgctgcaaaacacctcgctttgcattggctacgcaggtgtcagacactgcaccaaacgtgcagtgataaagccgatcgccaacataagccaacgcgtctgctcgatgtccagcacgcccgagacaccggacttcttctactggtttcaacggaacgaccggagatcggtaaccatgtagaagattatattactctaagtcactgttggggtctgaacggtgaggctgacaaccctctcctactcgagcgaaacatagacgagaggcaaaacactgggcttcctgtgtctaaacttccaaagacctttcgggacgctattaaaatctgcgagtggtttgaagtccgttggttatggatcgattgcctttgcataatacaagataaccgcgaggactggcttcatgaagtagaccttttcggaaagacgtatcagaatgctcttgtaaacatttccgctgacgtggggggcagctcaaaggcaggctgttttgtcaaacgggtaacttcagatattgctcggccccaagtacattttcgaggttgtgacgcagagttcacgctttgcctgtatgcagaggacagagaactcattgcggcaccatcttacaggcgagcgtggattcttcgagaacgcgagctatcgcctcgaattatccacttcacatctacgcagatgatatgggagtgcagctatcaggagaccagctataagaaaagggtgatcgccagcgaatcgctaccggatggtctaccccatgcctttcacgagccgttgccgtctaagacggcaaggcccttccagagcgatcatgacaaggccatgattctgactcggtggagagatctatgtgcgaacatgtccaaccaagaaatatccaaacattccgatatgcctctgattatgtcagatctggctgaggaatattcgaaatggctacccgatgaccaatatattgcaggccactggaaatcagaattaccctttgcgttgatttggatgccagtcggagttcaagccaaaagaccatcccgacaagttcccacgtggtcctggtattcgtctcagaaaaacgttgagctggctagcactacgagtaatatgcacatgttggactggccacctgtccttttctacaccgcggagattctagggcacgtcaccaagttgacgacgaagaaccctttcggccaggtcgattacgtgagccttgccttgaaaggaatcgttcgccgcttgcgtctataccctgctcgccatggtgcgacaaatgcccttcgtcgtctgcgtatccatgactgcaaggagggcgtctcgtggagagatctggactctacccgaaatcctaatgcagtcgtaaaagcaaaatttaaagataggggcgattgcattcgcacgacctcattaacgtacacgattgtttctgccttgtcttga

SEQ ID NO: 32205 - protein, 613 aa, Muscodor strobelii
  misc_feature: SGI Peptide ID NO. 571098
  misc_feature (198)..(346): Pfam Id: PF06985 Pfam Desc: Heterokaryon incompatibility protein (HET)
  misc_feature (198)..(288): Pfam Id: PF06985 Pfam Desc: Heterokaryon incompatibility protein (HET)
  misc_feature (120)..(550): NCBI GI: 46127719 Blast Desc: FG08237.1 [Gibberella zeae PH-1]
  misc_feature (132)..(551): NCBI GI: 46139991 Blast Desc: FG11510.1 [Gibberella zeae PH-1]
  misc_feature (132)..(552): NCBI GI: 171694732 Blast Desc: protein product [Podospora anserina] gi|170947608|emb|CAP59769.1| protein product [Podospora anserina]
  misc_feature (126)..(563): NCBI GI: 171677825 Blast Desc: protein product [Podospora anserina] gi|170936981|emb|CAP61639.1| protein product [Podospora anserina]
  misc_feature (145)..(545): NCBI GI: 256722671 Blast Desc: NECHADRAFT_87199 [Nectria haematococca mpVI 77-13-4]
  misc_feature (132)..(543): NCBI GI: 256723734 Blast Desc: NECHADRAFT_86704 [Nectria haematococca mpVI 77-13-4]
  misc_feature (141)..(550): NCBI GI: 145251023 Blast Desc: An15g04930 [Aspergillus niger] gi|134082553|emb|CAK42468.1| protein product [Aspergillus niger]
  misc_feature (121)..(518): NCBI GI: 256732304 Blast Desc: NECHADRAFT_80764 [Nectria haematococca mpVI 77-13-4]
  misc_feature (123)..(502): NCBI GI: 154291024 Blast Desc: BC1G_15400 [Botryotinia fuckeliana B05.10] gi|150847129|gb|EDN22322.1| BC1G_15400 [Botryotinia fuckeliana B05.10]
  misc_feature (191)..(548): NCBI GI: 256723752 Blast Desc: NECHADRAFT_52118 [Nectria haematococca mpVI 77-13-4]
MQVTRPDGSSQDNDEPEVLPFAQVEDLISNLSPEQVLNEAKENGLCSFCRSCLQSIIPSKVLEHIESAGDIVDLNVRLKFDWHAGGVHWFRFEIISLQNFESKDRGWDVFACAAPSYRVSCPAPKYQHANVTNDSHAAKHLALHWLRRCQTLHQTCSDKADRQHKPTRLLDVQHARDTGLLLLVSTERPEIGNHVEDYITLSHCWGLNGEADNPLLLERNIDERQNTGLPVSKLPKTFRDAIKICEWFEVRWLWIDCLCIIQDNREDWLHEVDLFGKTYQNALVNISADVGGSSKAGCFVKRVTSDIARPQVHFRGCDAEFTLCLYAEDRELIAAPSYRRAWILRERELSPRIIHFTSTQMIWECSYQETSYKKRVIASESLPDGLPHAFHEPLPSKTARPFQSDHDKAMILTRWRDLCANMSNQEISKHSDMPLIMSDLAEEYSKWLPDDQYIAGHWKSELPFALIWMPVGVQAKRPSRQVPTWSWYSSQKNVELASTTSNMHMLDWPPVLFYTAEILGHVTKLTTKNPFGQVDYVSLALKGIVRRLRLYPARHGATNALRRLRIHDCKEGVSWRDLDSTRNPNAVVKAKFKDRGDCIRTTSLTYTIVSALS

SEQ ID NO: 32206 - DNA, 4156 bp, Muscodor strobelii
  misc_feature: SGI EST ID NO. CUFF.76294.1
  misc_feature: Variant of the nucleotide sequence at SEQ ID NO 32204
tagcgttttaagactgttctagagatcgtcccgtatagaccccccacacggtaatgaaggtaatcacttaaaagctgggtttggtgtgtcatctattgttctcacagccacgcctcattaaatgtccccctcattgagagccttcatgatcgacaatatgctttgactctctttcggtctcctcttcgttgactatccgtcatggactgcgggttgccgatgaacctaatcgagaactttatgcgaatcacatcttcatagctttcagtaagtatcttgttggcattcttgctcgagtccagcggcagagatgcaagtcacacgccccgatgggtccagccaggacaatgatgagcctgaggtcctgccgtttgcccaagtcgaagacctcatttcgaacctttcgcctgagcaggtgttgaatgaggcgaaggagaacgggctgtgtagcttctgtcgtagctgtcttcaatctatcacttcttccccgaagcctaagttgccccacagtacggtttaccttcagtccttcttacatcctcatatcagttgcatatgcatgatccgagagttttgcttcgtttgtcggcagatcccatcgaaggttctagagcacatagaaagcgctggtgacatagtcgacctcaatgttcgactcaagtttgattggcatgcaggtggagttcactggtttaggttcgagataatatctttgcaaaatttcgaatccaaggaccggggatgggacgtgttcgcatgtgctgctccctcatatcgagtgtcatgccctgcacccaaatatcaacatgcgaatgtgacgaatgattcgcatgctgcaaaacacctcgctttgcattggctacgcaggtgtcagacactgcaccaaacgtgcagtgataaagccgatcgccaacataagccaacgcgtctgctcgatgtccagcacgcccgagacaccggacttcttctactggtttcaacggaacgaccggagatcggtaaccatgtagaagattatattactctaagtcactgttggggtctgaacggtgaggctgacaaccctctcctactcgagcgaaacatagacgagaggcaaaacactgggcttcctgtgtctaaacttccaaagacctttcgggacgctattaaaatctgcgagtggtttgaagtccgttggttatggatcgattgcctttgcataatacaagataaccgcgaggactggcttcatgaagtagaccttttcggaaagacgtatcagaatgctcttgtaaacatttccgctgacgtggggggcagctcaaaggcaggctgttttgtcaaacgggtaacttcagatattgctcggccccaagtacattttcgaggttgtgacgcagagttcacgctttgcctgtatgcagaggacagagaactcattgcggcaccatcttacaggcgagcgtggattcttcgagaacgcgagctatcgcctcgaattatccacttcacatctacgcagatgatatgggagtgcagctatcaggagaccagctataagaaaagggtgatcgccagcgaatcgctaccggatggtctaccccatgcctttcacgagccgttgccgtctaagacggcaaggcccttccagagcgatcatgacaaggccatgattctgactcggtggagagatctatgtgcgaacatgtccaaccaagaaatatccaaacattccgatatgcctctgattatgtcagatctggctgaggaatattcgaaatggctacccgatgaccaatatattgcaggccactggaaatcagaattaccctttgcgttgatttggatgccagtcggagttcaagccaaaagaccatcccgacaagttcccacgtggtcctggtattcgtctcagaaaaacgttgagctggctagcactacgagtaatatgcacatgttggactggccacctgtccttttctacaccgcggagattctagggcacgtcaccaagttgacgacgaagaaccctttcggccaggtcgattacgtgagccttgccttgaaaggaatcgttcgccgcttgcgtctataccctgctcgccatggtgcgacaaatgcccttcgtcgtctgcgtatccatgactgcaaggagggcgtctcgtggagagatctggactctacccgaaatcctaatgcagtcgtaaaagcaaaatttaaagataggggcgattgcattcgcgtacgtatggggcataacctttttccggaagaaagccagtgctcgctagattttgcagacgacctcattaacgtacacgattgtttctgccttgtcttgagagcaactgttggtccatctgcaatagtttgcctctgtctcttgttgttgagagaagacaagacaggcgagttcagacgcattggagtcttgcgtctacgtgatagagatgcaacgaagatgatgtatgcttctaccggatctagacagcaccgtctctgggaagagcttctcgacccaactacagcatcagaagagacagagtcaaaatctaaactcgcgttgagaaatacctggtgggacgcagcaaacaatcgcgcaacgtccacagaggtcataagagagatagtcaaagatttctttcgggacagcggcgtacggtttccaagactagccaaatcacaagtcataaagttggtttgattattatatatgagacttggtgctaggagcaatggaagacaaccttccatcttaggttacaaaagactcttttcgacatagattttcctggccactaccgccggcgaaccgcctctgttccactacgcatcccatatatcgtcgagtcttgcctgagtctgaaatgcacactcactctcaaaccccagcaagttccgagctcgcaagggcaccgcgagccgcgaggattaccgggacacagcaatagagggacatttccacaccgatgtcatctcaatcagctctatcgctgttaccggctgtcatgatgatggcaggccgttcgacttcgactcacgttcggacaggtgtcacccattcccccacggcggaaaggggagtccggcgatatctccgtgtgagcctcaagcttcctaacgagctgcggcagttcgataaccagacaatgtcggacgtggttctgcagtttcgctacaagccattaacagcggggccacgataaagaagcccgaaacggaggcgctgttgagggcgcacgaggaccccagtgtccaatcgggctacagcctgcgattaagaattgtcgatgccaaatacaacttcgcgagtcagtggtatctgttcagacagaagatgcgatagggtagcgccatggaactttcatcaccatattgggctataggccactaccttccattctggggcggaggctcctccaacgccgtatcactcgtgattttgtccgccatcgcacctgggcagttcgatttctgggagtgttaagtcctcatcggtcccgccgggggtagtattgaatttgcagtcctcaactgtcttaggcagcgatggcatcttattgtattctcaagttggccgtagtcatggcctcaatgcggctggtgactgcatgatcactattgcaaaagccccgccaccgtcatttatcgtcgaaaatttgatctttgtgcttgactataggcttctatagctcaatggggttgcgggaagttgacttaatggtggcatgaatacgtcaacaaattgaaatatctatattgatgttaaaggaactctacctagatgcacgagcagataacgaccagtaagatcgataaaatggctaaagactttctctcattgaaaaatcatattttctaatcctaaatagatctctcaggtcatatatagcgatcacagtcacagagtcagtgtatgcatgtgatgggcgaggttatgagcggatgggacaactatcgttgaagggttcaggtaccgaaatagcaggttgaatgcagccgcctcggagcccggatatgcggcatagccagggcctgcttagggtgccgaagaccactcccatcacccaggtgaggtctgtgcgtcatccaacatgatcaatggcatatcgaagtgtccattggacagtgcaaacaaacaggaagccatgtctcatgctattcattgaatcag

SEQ ID NO: 32207 - DNA, 1794 bp, Muscodor strobelii
  misc_feature: SGI cDNA ID NO. 571099
  misc_feature: Reduced expression when VOC is produced
  misc_feature: Encodes the peptide sequence at SEQ ID NO 32208
atgcttgcagaagatgtcgcgtggacggttcggcaccaccctttggaccccacgccgacattcctgcgacacaagagatatgtcgcagtcgccttattgttgattgcgctgttgtatctcctggttgagctcattcccgaccatagcgacgttcgattcggctatcactatgtccacgacagctacgactggtccaccgccaaacgctaccatcccatctccgagtacacgcctctgcccacgggcgcgccgctgtccttgcccagagtgcagcatgatttcccggtcgacgatagcgacgaggccaaggctcgagaggctgtgctcgcagcacgtcggagcgaggtaaaggcggcttttgtcaagagttggaatagctacaggaaaactgcttttggatacgacgaactgttgccagtgacgggaggaggaacggacaagaccggctttggcggatggggaacctctcttgtcgacagtctcgacaccctgtggatcatggacttgaaagacgacttccatgatgccgtggctgctgctgtcagcattgactattccaagaccaacaacacccaaatcaactacttcgaaaccatcattcggcacctcgggggtctgctcggcgcctacgacttgagtctccaaacagtgctgttggacaaggcagtcgaactggccgacttgttgtatatggcatacgacacgcccaaccacatgcccccgatgtatctcaacttcaacaacgccaagaagggaaaccagcgaccgagcaccgcggaggcttcgtccgccgtggcttcttcctctctcgagttcacacgtatgtcgcagttgacgggcgacaacaagtactacgacgctatcaatagggtcaccgaactgcttgcagaatggcaaaacaagacgatgctacccgggatatggccggcctaccttgacttgttggacgaggaattaactgctaactccttcacactgggagctgattccgacagtctgtatgaatatctccccaaggaatttgctcagctcggtggcctcgagcctttatacgaaaacatgtatcgaagtgccatggacactgtcatcaacaatatcctgttccgaccgcggctgcctgacagagacgacatcttgtttccgggaaccgtgtacatcaacagttttggcccgacacttaacaccgaatccgaacacctctcttgttttgtcggcggcatgttcgccctgggcggtaaactcttcgacatcgacgagcacgtcgcatacgctgagaggctcacgcgcggctgcgtatgggcatacggcgccttcgcatcgggtctgatgcccgagactttcgacatgttgtcatgtgactccctcgacgggtgcgattggagcgagacagcatgggagagtctcggccagctgaatctcacaaaagggttcacaggcgtgccggaccccagctatatcctgcggcctgaagctctcgaaagcgtcttttatatgtaccgcataaccggcaactccacctggcaagatatggcttggaccatgtttgaatcaatccgaaacgctacggagacggagcttgccttctcggccatcgagtctgtggaatttagtgacaccgtcaagactaattccatggagagcttctggctagccgagaccctcaaatacgcctatttaatattttcttcgccagacctaatcagtctcgacgaattcgtcttcaacactgaagcccatcctttcagacgacctgtacctaatccgaatccacaccctgttacatatcagtcataa

SEQ ID NO: 32208 - protein, 597 aa, Muscodor strobelii
  misc_feature: SGI Peptide ID NO. 571099
  misc_feature (119)..(583): Pfam Id: PF01532 Pfam Desc: Glycosyl hydrolase family 47
  misc_feature (119)..(412): Pfam Id: PF01532 Pfam Desc: Glycosyl hydrolase family 47
  misc_feature (481)..(583): Pfam Id: PF01532 Pfam Desc: Glycosyl hydrolase family 47
  misc_feature (57)..(584): NCBI GI: 256734566 Blast Desc: NECHADRAFT_90164 [Nectria haematococca mpVI 77-13-4]
  misc_feature (26)..(584): NCBI GI: 46122819 Blast Desc: FG05787.1 [Gibberella zeae PH-1]
  misc_feature (61)..(586): NCBI GI: 85095467 Blast Desc: NCU05836 [Neurospora crassa OR74A] gi|28921555|gb|EAA30860.1| conserved [Neurospora crassa OR74A]
  misc_feature (51)..(584): NCBI GI: 261361297 Blast Desc: endoplasmic reticulum mannosyl-oligosaccharide 1,2-alpha-mannosidase [Verticillium albo-atrum VaMs.102]
  misc_feature (17)..(584): NCBI GI: 171691058 Blast Desc: protein product [Podospora anserina] gi|170945477|emb|CAP71589.1| protein product [Podospora anserina]
  misc_feature (45)..(587): NCBI GI: 261352124 Blast Desc: endoplasmic reticulum mannosyl-oligosaccharide 1,2-alpha-mannosidase [Verticillium albo-atrum VaMs.102]
  misc_feature (57)..(584): NCBI GI: 256730697 Blast Desc: NECHADRAFT_105779 [Nectria haematococca mpVI 77-13-4]
  misc_feature (32)..(587): NCBI GI: 116180494 Blast Desc: CHGG_00875 [Chaetomium globosum CBS 148.51] gi|88185172|gb|EAQ92640.1| CHGG_00875 [Chaetomium globosum CBS 148.51]
  misc_feature (63)..(587): NCBI GI: 39951343 Blast Desc: MGG_01314 [Magnaporthe grisea 70-15] gi|145020870|gb|EDK04999.1| MGG_01314 [Magnaporthe grisea 70-15]
  misc_feature (21)..(587): NCBI GI: 171687745 Blast Desc: protein product [Podospora anserina] gi|170943834|emb|CAP69486.1| protein product [Podospora anserina]
  misc_feature (65)..(578): SWISSPROT Homolog: EC 3.2.1.113 Mannosyl-oligosaccharide 1,2-alpha-mannosidase
  misc_feature: Useful for introducing or modulating the production of volatile compounds
MLAEDVAWTVRHHPLDPTPTFLRHKRYVAVALLLIALLYLLVELIPDHSDVRFGYHYVHDSYDWSTAKRYHPISEYTPLPTGAPLSLPRVQHDFPVDDSDEAKAREAVLAARRSEVKAAFVKSWNSYRKTAFGYDELLPVTGGGTDKTGFGGWGTSLVDSLDTLWIMDLKDDFHDAVAAAVSIDYSKTNNTQINYFETIIRHLGGLLGAYDLSLQTVLLDKAVELADLLYMAYDTPNHMPPMYLNFNNAKKGNQRPSTAEASSAVASSSLEFTRMSQLTGDNKYYDAINRVTELLAEWQNKTMLPGIWPAYLDLLDEELTANSFTLGADSDSLYEYLPKEFAQLGGLEPLYENMYRSAMDTVINNILFRPRLPDRDDILFPGTVYINSFGPTLNTESEHLSCFVGGMFALGGKLFDIDEHVAYAERLTRGCVWAYGAFASGLMPETFDMLSCDSLDGCDWSETAWESLGQLNLTKGFTGVPDPSYILRPEALESVFYMYRITGNSTWQDMAWTMFESIRNATETELAFSAIESVEFSDTVKTNSMESFWLAETLKYAYLIFSSPDLISLDEFVFNTEAHPFRRPVPNPNPHPVTYQS

SEQ ID NO: 32209 - DNA, 2382 bp, Muscodor strobelii
  misc_feature: SGI EST ID NO. CUFF.76233.0
  misc_feature: Variant of the nucleotide sequence at SEQ ID NO 32207
ggaaccttgatcccgactcgcctgaatcgtgaaggccctgacctcgcaagccgtgtcttggcacaatccctcagctttctccaattgcccatcatcaactgcatcccatttgttgtttctcatctaggtctattatacttatgaggtatcatcagccctcaaacaccgagtgccagcatcgaatatagtagcatatcaacagagatttgggtgagtgaggcgattgtgctgcttcgaggccggcacaatcgcccacagaccatctctgtggaatgcttgcagaagatgtcgcgtggacggttcggcaccaccctttggaccccacgccgacattcctgcgacacaagagatatgtcgcagtcgccttattgttgattgcgctgttgtatctcctggttgagctcattcccgaccatagcgacgttcgattcggctatcactatgtccacgacagctacgactggtccaccgccaaacgctaccatcccatctccgagtacacgcctctgcccacgggcgcgccgctgtccttgcccagagtgcagcatgatttcccggtcgacgatagcgacgaggccaaggctcgagaggctgtgctcgcagcacgtcggagcgaggtaaaggcggcttttgtcaagagttggaatagctacaggaaaactgcttttggatacgacgaactgttgccagtgacgggaggaggaacggacaagaccggctttggcggatggggaacctctcttgtcgacagtctcgacaccctgtggatcatggacttgaaagacgacttccatgatgccgtggctgctgctgtcagcattgactattccaagaccaacaacacccaaatcaactacttcgaaaccatcattcggcacctcgggggtctgctcggcgcctacgacttgagtctccaaacagtgctgttggacaaggcagtcgaactggccgacttgttgtatatggcatacgacacgcccaaccacatgcccccgatgtatctcaacttcaacaacgccaagaagggaaaccagcgaccgagcaccgcggaggcttcgtccgccgtggcttcttcctctctcgagttcacacgtatgtcgcagttgacgggcgacaacaagtactacgacgctatcaatagggtcaccgaactgcttgcagaatggcaaaacaagacgatgctacccgggatatggccggcctaccttgacttgttggacgaggaattaactgctaactccttcacactgggagctgattccgacagtctgtatgaatatctccccaaggaatttgctcagctcggtggcctcgagcctttatacgaaaacatgtatcgaagtgccatggacactgtcatcaacaatatcctgttccgaccgcggctgcctgacagagacgacatcttgtttccgggaaccgtgtacatcaacagttttggcccgacacttaacaccgaatccgaacacctctcttgttttgtcggcggcatgttcgccctgggcggtaaactcttcgacatcgacgagcacgtcgcatacgctgagaggctcacgcgcggctgcgtatgggcatacggcgccttcgcatcgggtctgatgcccgagactttcgacatgttgtcatgtgactccctcgacgggtgcgattggagcgagacagcatgggagagtctcggccagctgaatctcacaaaagggttcacaggcgtgccggaccccagctatatcctgcggcctgaagctctcgaaagcgtcttttatatgtaccgcataaccggcaactccacctggcaagatatggcttggaccatgtttgaatcaatccgaaacgctacggagacggagcttgccttctcggccatcgagtctgtggaatttagtgacaccgtcaagactaattccatggagagcttctggctagccgagaccctcaaatacgcctatttaatattttcttcgccagacctaatcagtctcgacgaattcgtcttcaacactgaagcccatcctttcagacgacctgtacctaatccgaatccacaccctgttacatatcagtcataatgcccaacgaatccttgcgagaagaggagatctcgaattggaaaagagagactggacggcacttgcatgtacaatccttatatataatgtaatgagtaatgacctctacatagacttgcattgcgttggatcgcgcagcatggcatcgcatgagacgggagatacccaataattgatcgttttttctttctttgatatacccgctttgtgtcttgtgtcatactgtgtgagattgttatgggatactgatgagaagagcagcttcactcggacagcaaaggtccgataactttgagccttttcattcaattcatta

SEQ ID NO: 32210 - DNA, 1029 bp, Muscodor strobelii
  misc_feature: SGI cDNA ID NO. 571100
  misc_feature: Encodes the peptide sequence at SEQ ID NO 32211
atggcggaccaaaacagcagtccaacggcgctacaggccttctcaaggccgttcaatcaccagatggctagtcccctattcagaaagcttccccaggagattcgcaacatgatctacgaacaagtgctattgaacacacgaatcagtttcggcaaggtgcagagcgtaggattgcgagtcatttgtgactggaatgccaccttccttctgcgactctgccaacgcgtgcgcactgagattggagacagttggctgggcatggtcttattcaacttcgaggacgtcagcaccatgatgtataagctgacggctctacctacctcgacagtctccaagattcgccacttacgcgtccgcgaagggatggaaaatctctggcgtcatgaagatcatgaacatagacatagacggtacgaacttgttcagttattcaaactcattcctggactgaaactcgacaccctcacggtcctctgcggagctgcctttgcaagaaatggttatagaagcctgagccgtctcatcagatatggccaaggatggaaagagctgcgatatatctcagagagctcattacttctgggctacgacttcagttcttcgcgcacagcccaaccttcaggctggctggagcagatgaacgatcgcgatggtgccagttcccatccttcagtcaccatctatcgatctacgatccccggacgatcatgcaccgttatcaaagaagcgacgcgtgttcaatatgaacaggccacccccacgctagatctacatggcaaatacacaccctacggggattcctttatcgggtcgccagccgaaagtatcaaggagctcatggtagtagtcaaacggggacgagatgtcgactacgcagagaaaatgggatcccccttcttgcctgagggtattggcggcgacctacgccagcatttcccaggaatgacatggggagagatcgcgactaagcgttggtgtccacatcaagactggtatcgcgacgcagacgaatacatgttctatccctga

SEQ ID NO: 32211 - protein, 342 aa, Muscodor strobelii
  misc_feature: SGI Peptide ID NO. 571100
  misc_feature (21)..(320): NCBI GI: 171691238 Blast Desc: protein product [Podospora anserina] gi|170945567|emb|CAP71680.1| protein product [Podospora anserina]
  misc_feature (15)..(326): NCBI GI: 242789599 Blast Desc: conserved [Talaromyces stipitatus ATCC 10500] gi|218717983|gb|EED17403.1| conserved [Talaromyces stipitatus ATCC 10500]
  misc_feature (19)..(320): NCBI GI: 171688030 Blast Desc: protein product [Podospora anserina] gi|170943977|emb|CAP70087.1| protein product [Podospora anserina]
  misc_feature (20)..(320): NCBI GI: 256725356 Blast Desc: NECHADRAFT_83142 [Nectria haematococca mpVI 77-13-4]
  misc_feature (29)..(317): NCBI GI: 189194966 Blast Desc: conserved [Pyrenophora tritici-repentis Pt-1C-BFP] gi|187979700|gb|EDU46326.1| conserved [Pyrenophora tritici-repentis Pt-1C-BFP]
  misc_feature (43)..(305): NCBI GI: 226287908 Blast Desc: PADG_08346 [Paracoccidioides brasiliensis Pb18]
  misc_feature (19)..(320): NCBI GI: 116204469 Blast Desc: [Chaetomium globosum CBS 148.51] gi|88176246|gb|EAQ83714.1| [Chaetomium globosum CBS 148.51]
  misc_feature (138)..(342): NCBI GI: 116192675 Blast Desc: [Chaetomium globosum CBS 148.51] gi|88181968|gb|EAQ89436.1| [Chaetomium globosum CBS 148.51]
  misc_feature (30)..(290): NCBI GI: 258573061 Blast Desc: [Uncinocarpus reesii 1704] gi|237900978|gb|EEP75379.1| [Uncinocarpus reesii 1704]
  misc_feature (140)..(320): NCBI GI: 256720174 Blast Desc: NECHADRAFT_19117 [Nectria haematococca mpVI 77-13-4]
MADQNSSPTALQAFSRPFNHQMASPLFRKLPQEIRNMIYEQVLLNTRISFGKVQSVGLRVICDWNATFLLRLCQRVRTEIGDSWLGMVLFNFEDVSTMMYKLTALPTSTVSKIRHLRVREGMENLWRHEDHEHRHRRYELVQLFKLIPGLKLDTLTVLCGAAFARNGYRSLSRLIRYGQGWKELRYISESSLLLGYDFSSSRTAQPSGWLEQMNDRDGASSHPSVTIYRSTIPGRSCTVIKEATRVQYEQATPTLDLHGKYTPYGDSFIGSPAESIKELMVVVKRGRDVDYAEKMGSPFLPEGIGGDLRQHFPGMTWGEIATKRWCPHQDWYRDADEYMFYP

SEQ ID NO: 32212 - DNA, 188 bp, Muscodor strobelii
  misc_feature: SGI EST ID NO. CUFF.76239.0
  misc_feature: Variant of the nucleotide sequence at SEQ ID NO 32210
tacgcgtccgcgaagggatggaaaatctctggcgtcatgaagatcatgaacatagacatagacggtacgaacttgttcagttattcaaactcattcctggactgaaactcgacaccctcacggtcctctgcggagctgcctttgcaagaaatggttatagaagcctgagccgtctcatcagatatggc

SEQ ID NO: 32213 - DNA, 1065 bp, Muscodor strobelii
  misc_feature: SGI cDNA ID NO. 571101
  misc_feature: Encodes the peptide sequence at SEQ ID NO 32214
atgcctatgcttagcggtaacatagcgcttttcattgtgaaattcatcttcgtcattctctctatactattcgtcgcggcgcgacttttcgccaactggaaatacagtaaaaagatattgattgacgattacatatcagtcgcagcagtcctgtttttagtcgctatatctgtccttagcgatgaagctggtgatggctttcacggtaccagtccgcctcaccttgtagcacagttagccacaagtctcgctgtctttacaccactatgtttatgggcgtgcaaagctccgctattattcctctatcttcgtttattcggcatcaagagatggctcacgctagggtcgtatgcgacattgggtatcatggccgctgcctacatcgcaggactggtagccatccctcctgcttgcacgccccatacgaatcctttgacagaggaatttatcgacgcctgccagctacggactcggcagatcaacgtgtatttgggagctgtgtcggtgctcgctgatctcatcatccttttactaccacttcctgtcgtcatcaacctcagtctcgtcgtccgctccaaagttggattgattctagtctttctatctggatctctggcaattattgctagtgctgtttcgctatattataaggtactgtctctgatggtgccttcgacatcactggctgcggcgatgcttgcgacggtatctgaatgctccatcgcattgatggtaggttgtgtacctgcccttcgagtgatgtggtccaaaatcctcaagccaactcggtcgaccacctataattaccacgccggcaccaacccgaccgggaatagaacacatcggaacacgtcgcattacattgtggtcagggaggatgtcacagtcacccggcagccctcagaatcgagcgcggaacttatcgtacccaaaggcgtctactcgtcaacttcatctcgacagtttaatgagcgatcgcagcccggaagcgagcagccgaaacaacttggtgtattttccgaagcgtatgccctagatacacgcgaaaatggggtatggagatga

SEQ ID NO: 32214 - protein, 354 aa, Muscodor strobelii
  misc_feature: SGI Peptide ID NO. 571101
  misc_feature (18)..(268): NCBI GI: 169612652 Blast Desc: SNOG_09450 [Phaeosphaeria nodorum SN15] gi|111061595|gb|EAT82715.1| SNOG_09450 [Phaeosphaeria nodorum SN15]
  misc_feature (60)..(286): NCBI GI: 116203895 Blast Desc: [Chaetomium globosum CBS 148.51] gi|88175959|gb|EAQ83427.1| [Chaetomium globosum CBS 148.51]
  misc_feature (10)..(318): NCBI GI: 238840889 Blast Desc: conserved [Microsporum canis CBS 113480]
  misc_feature (2)..(337): NCBI GI: 149210587 Blast Desc: MGCH7_ch7g767 [Magnaporthe grisea 70-15] gi|86196722|gb|EAQ71360.1| MGCH7_ch7g767 [Magnaporthe grisea 70-15]
  misc_feature (12)..(283): NCBI GI: 119479083 Blast Desc: NFIA_076030 [Neosartorya fischeri NRRL 181] gi|119407724|gb|EAW17673.1| conserved [Neosartorya fischeri NRRL 181]
  misc_feature (10)..(284): NCBI GI: 226289025 Blast Desc: integral membrane protein [Paracoccidioides brasiliensis Pb18]
  misc_feature (10)..(252): NCBI GI: 239612423 Blast Desc: integral membrane protein [Ajellomyces dermatitidis ER-3]
  misc_feature (10)..(252): NCBI GI: 261202796 Blast Desc: integral membrane protein [Ajellomyces dermatitidis SLH14081] gi|239590709|gb|EEQ73290.1| integral membrane protein [Ajellomyces dermatitidis SLH14081]
  misc_feature (5)..(279): NCBI GI: 238503281 Blast Desc: integral membrane protein, [Aspergillus flavus NRRL3357] gi|220691684|gb|EED48032.1| integral membrane protein, [Aspergillus flavus NRRL3357]
  misc_feature (10)..(261): NCBI GI: 171678375 Blast Desc: protein product [Podospora anserina] gi|170937257|emb|CAP61914.1| protein product [Podospora anserina]
MPMLSGNIALFIVKFIFVILSILFVAARLFANWKYSKKILIDDYISVAAVLFLVAISVLSDEAGDGFHGTSPPHLVAQLATSLAVFTPLCLWACKAPLLFLYLRLFGIKRWLTLGSYATLGIMAAAYIAGLVAIPPACTPHTNPLTEEFIDACQLRTRQINVYLGAVSVLADLIILLLPLPVVINLSLVVRSKVGLILVFLSGSLAIIASAVSLYYKVLSLMVPSTSLAAAMLATVSECSIALMVGCVPALRVMWSKILKPTRSTTYNYHAGTNPTGNRTHRNTSHYIVVREDVTVTRQPSESSAELIVPKGVYSSTSSRQFNERSQPGSEQPKQLGVFSEAYALDTRENGVWR

SEQ ID NO: 32215 - DNA, 1168 bp, Muscodor strobelii
  misc_feature: SGI EST ID NO. CUFF.76263.0
  misc_feature: Variant of the nucleotide sequence at SEQ ID NO 32213
tatagttagccacaagtctcgctgtctttacaccactatgtttatgggcgtgcaaagctccgctattattcctctatcttcgtttattcggcatcaagagatggctcacgctagggtcgtatgcgacattgggtatcatggccgctgcctacatcgcaggactggtagccatccctcctgcttgcacgccccatacgaatcctttgacagaggaatttatcgacgcctgccagctacggactcggcagatcaacgtgtatttgggagctgtgtcggtgctcgctgatctcatcatccttttactaccacttcctgtcgtcatcaacctcagtctcgtcgtccgctccaaagttggattgattctagtctttctatctggatctctggcaattattgctagtgctgtttcgctatattataaggtactgtctctgatggtgccttcgacatcactggctgcggcgatgcttgcgacggtatctgaatgctccatcgcattgatggtaggttgtgtacctgcccttcgagtgatgtggtccaaaatcctcaagccaactcggtcgaccacctataattaccacgccggcaccaacccgaccgggaatagaacacatcggaacacgtcgcattacattgtggtcagggaggatgtcacagtcacccggcagccctcagaatcgagcgcggaacttatcgtacccaaaggcgtctactcgtcaacttcatctcgacagtttaatgagcgatcgcagcccggaagcgagcagccgaaacaacttggtgtattttccgaagcgtatgccctagatacacgcgaaaatggggtatggagatgacatgaggagatggggggagaaatacagtgatgaactatgcttgacagcgatccgcactcgacatgatgatctgaacgcacgccacttaggattacacctttatcactaggtccattcagttgacaggttcagaccgcgattaggcataagatacccgcgagactatgatgccgagagcgacccagcggcctgcccgacatggagccatatatgggctcagtcattaaaatagaggctgtagtagagtcgcgatggcgtcgtggataagatagatagccgctcacgcgatctagtcgagtaaggtctaagacctcaatagaaatcagttaaac

SEQ ID NO: 32216 - DNA, 1623 bp, Muscodor strobelii
  misc_feature: SGI cDNA ID NO. 571102
  misc_feature: Encodes the peptide sequence at SEQ ID NO 32217
atggatgatcttaagttcggcaacggtggagacacgcagcacgacgcccttgtcaacgattcttcaggcgaagtagaaatcaagcgtggaagtccctccatcgagcaagatgaccgagtcctcacacgactaggcaaagtgccggtcctcaagcgcaactttgccttcatatccatgcttggattcacctgcacggttatgaacacctgggaaggagaactacagctgtttcttcagtcgttccagaacggaggctctgcgggttccatctatggctatattgttgtctggattggcaccttatgtgtcttcacgactatgggagagctagcttcgatggcaccgacttcaggtggacaataccactgggtgtacatgttgtcacctagaagctgtcgcaagtttctaagttacttaataggctggtttaccgtcgttggttggcaagcggctgtcgcgggactggcttacctctcagctgcgctcatccagggcgtcgccgtcttgggcaacccatcctacgtgccagagccttggcagagaacactcctgttatgggcttctattgcatttgccgtgttcgtcaacaccataatcagcaatgctttaccaaaagtggaaggcctcatcttgatcctccacgtccttggctttttcgctatcctcgtgcctttagtctatctgagtccacacagtggtgctgagcaggtcttcaccgagttctcgaacggaggtggatggcagacgcagggcctttcgttcttcatcggcctcatcgcgtccgtattcaacttcctaggcgccgatggggcgatgtcagaggagattcagaatgcggcagtcatcgtcccacgtgccatggtcttcagcattctgctcaacggtgctctgggctttggcattctgatcgcagtcttgttctgccttggcgatgtggacgcggccctcgcatctcccactgggtttcctttcatggccattttcaaacaaggcgtcgggtcaacagcgggcgcgcagactatgtcttccattctggtcattctcatgctctgtgggacggtctctgtccttgcttcggcttctcgaatgacgtggtcgtttgcccgtgaccgaggtctccctggctggagatatcttggcaaagtcgatcccaaaacatcaatccccatcatctctatcgctctaacgactctgatttccgtccttctagcgctgatcaacatcggttccgccactgccttcaatatcattgtttcgctcacaatcaatggactatatgcaacatacttcatcgggaacggtctccttctctggcggcgtatgaaaagacaaattcgaccatataacaagagcgagaccggcctgacgaatcactcgcttgataacttatcatggggtcccactcatattcccgagcctctcggggccatcatcaacgcttttggctgcgcatatctcctcatcgtcttgttctttagcttttggcccagtatgatcagccccacgccggagactatgaactggagctcactcatgattggagtcgtgatcatctggtcaattatatattatcttgtgtgggcgaagaagacctactctggcccgatcattgaaactagttag

SEQ ID NO: 32217 - protein, 540 aa, Muscodor strobelii
  misc_feature: SGI Peptide ID NO. 571102
  misc_feature (71)..(537): Pfam Id: PF00324 Pfam Desc: Amino acid permease
  misc_feature (12)..(538): NCBI GI: 115492221 Blast Desc: conserved [Aspergillus terreus NIH2624] gi|114197598|gb|EAU39298.1| conserved [Aspergillus terreus NIH2624]
  misc_feature (26)..(540): NCBI GI: 259485677 Blast Desc: TPA: GABA transporter, (Eurofung) [Aspergillus nidulans FGSC A4]
  misc_feature (7)..(538): NCBI GI: 46127687 Blast Desc: FG08221.1 [Gibberella zeae PH-1]
  misc_feature (19)..(538): NCBI GI: 240107898 Blast Desc: choline transport protein, [Coccidioides posadasii C735 delta SOWgp]
  misc_feature (19)..(538): NCBI GI: 119188281 Blast Desc: CIMG_04188 [Coccidioides immitis RS]
  misc_feature (21)..(538): NCBI GI: 255953911 Blast Desc: Pc21g06640 [Penicillium chrysogenum Wisconsin 54-1255] gi|211589419|emb|CAP95561.1| Pc21g06640 [Penicillium chrysogenum Wisconsin 54-1255]
  misc_feature (14)..(539): NCBI GI: 256728317 Blast Desc: NECHADRAFT_73000 [Nectria haematococca mpVI 77-13-4]
  misc_feature (26)..(538): NCBI GI: 238484007 Blast Desc: GABA permease, [Aspergillus flavus NRRL3357] gi|220701292|gb|EED57630.1| GABA permease, [Aspergillus flavus NRRL3357]
  misc_feature (14)..(539): NCBI GI: 119499413 Blast Desc: amino acid permease, [Neosartorya fischeri NRRL 181] gi|119414628|gb|EAW24567.1| amino acid permease, [Neosartorya fischeri NRRL 181]
  misc_feature (37)..(538): NCBI GI: 256720570 Blast Desc: [Nectria haematococca mpVI 77-13-4]
MDDLKFGNGGDTQHDALVNDSSGEVEIKRGSPSIEQDDRVLTRLGKVPVLKRNFAFISMLGFTCTVMNTWEGELQLFLQSFQNGGSAGSIYGYIVVWIGTLCVFTTMGELASMAPTSGGQYHWVYMLSPRSCRKFLSYLIGWFTVVGWQAAVAGLAYLSAALIQGVAVLGNPSYVPEPWQRTLLLWASIAFAVFVNTIISNALPKVEGLILILHVLGFFAILVPLVYLSPHSGAEQVFTEFSNGGGWQTQGLSFFIGLIASVFNFLGADGAMSEEIQNAAVIVPRAMVFSILLNGALGFGILIAVLFCLGDVDAALASPTGFPFMAIFKQGVGSTAGAQTMSSILVILMLCGTVSVLASASRMTWSFARDRGLPGWRYLGKVDPKTSIPIISIALTTLISVLLALINIGSATAFNIIVSLTINGLYATYFIGNGLLLWRRMKRQIRPYNKSETGLTNHSLDNLSWGPTHIPEPLGAIINAFGCAYLLIVLFFSFWPSMISPTPETMNWSSLMIGVVIIWSIIYYLVWAKKTYSGPIIETS

SEQ ID NO: 32218 - DNA, 669 bp, Muscodor strobelii
  misc_feature: SGI cDNA ID NO. 571103
  misc_feature: Encodes the peptide sequence at SEQ ID NO 32219
atgctcaagcttcacgaattgacgacggacgatgagtttaaggccatggccgtcgtggcatatgaagcctacagtaaccctttcaacggtatatgggagatcttgaaaggacgttccacggaagaatgcgccgcccgtcacttatcatggcaccgagatgaccctggcagccactggctctacgtcactgacgagtcgtccggtgagatggtcggtgctgcgcagtggaatatttacaaagagaacccgtactcccgcggcccgccagacctgaaggcctattggttccctgaagggccactaaagcaggtcggtgatcagcttcttggcggcttggtcgtgaagcgccctggatatatgagcaagccacacatgttggtttcttactgtttcgtacactcggcgcacaggcgccgaggcgtcgcgagcatgatgttgaagtggggaaccgaaaaagcagatcaactgggcttggagtcatgggtcgaatgtactgaaatttccctctcagcctacgagagacacggatttcaggtagtcgaagatatttacatggacgcctcggtcgggagatcgagggagtcggaggaggagttcaatgccgtgagaaagaggttgaaatgtccgatccatgggttcttgctcaagaggggcccagtattgccgtaa

SEQ ID NO: 32219 - protein, 222 aa, Muscodor strobelii
  misc_feature: SGI Peptide ID NO. 571103
  misc_feature (100)..(178): Pfam Id: PF00583 Pfam Desc: Acetyltransferase (GNAT) family
  misc_feature (2)..(125): NCBI GI: 242816110 Blast Desc: conserved [Talaromyces stipitatus ATCC 10500] gi|218715044|gb|EED14467.1| conserved [Talaromyces stipitatus ATCC 10500]
  misc_feature (2)..(177): NCBI GI: 145237354 Blast Desc: An07g02400 [Aspergillus niger] gi|134075793|emb|CAK39329.1| protein product [Aspergillus niger]
  misc_feature (2)..(180): NCBI GI: 256720567 Blast Desc: NECHADRAFT_55801 [Nectria haematococca mpVI 77-13-4]
  misc_feature (2)..(182): NCBI GI: 154298180 Blast Desc: BC1G_12055 [Botryotinia fuckeliana B05.10] gi|150858241|gb|EDN33433.1| BC1G_12055 [Botryotinia fuckeliana B05.10]
  misc_feature (2)..(198): NCBI GI: 156055888 Blast Desc: SS1G_05296 [Sclerotinia sclerotiorum 1980] gi|154703080|gb|EDO02819.1| SS1G_05296 [Sclerotinia sclerotiorum 1980]
  misc_feature (10)..(211): NCBI GI: 258572524 Blast Desc: [Uncinocarpus reesii 1704] gi|237905294|gb|EEP79695.1| [Uncinocarpus reesii 1704]
  misc_feature (2)..(219): NCBI GI: 154302378 Blast Desc: BC1G_09973 [Botryotinia fuckeliana B05.10] gi|150855461|gb|EDN30653.1| BC1G_09973 [Botryotinia fuckeliana B05.10]
  misc_feature (6)..(221): NCBI GI: 70985522 Blast Desc: GNAT family acetyltransferase [Aspergillus fumigatus Af293] gi|66845895|gb|EAL86229.1| GNAT family acetyltransferase, [Aspergillus fumigatus Af293] gi|159125802|gb|EDP50918.1| GNAT
  misc_feature (4)..(186): NCBI GI: 169620794 Blast Desc: SNOG_13603 [Phaeosphaeria nodorum SN15] gi|111057930|gb|EAT79050.1| SNOG_13603 [Phaeosphaeria nodorum SN15]
  misc_feature (2)..(219): NCBI GI: 145254205 Blast Desc: An18g00950 [Aspergillus niger] gi|134084139|emb|CAK47172.1| protein product [Aspergillus niger]
MLKLHELTTDDEFKAMAVVAYEAYSNPFNGIWEILKGRSTEECAARHLSWHRDDPGSHWLYVTDESSGEMVGAAQWNIYKENPYSRGPPDLKAYWFPEGPLKQVGDQLLGGLVVKRPGYMSKPHMLVSYCFVHSAHRRRGVASMMLKWGTEKADQLGLESWVECTEISLSAYERHGFQVVEDIYMDASVGRSRESEEEFNAVRKRLKCPIHGFLLKRGPVLP

SEQ ID NO: 32220 - DNA, 1506 bp, Muscodor strobelii
  misc_feature: SGI cDNA ID NO. 571104
  misc_feature: Encodes the peptide sequence at SEQ ID NO 32221
atgtcgtttctccatttgcaaagcgcgagtggtgtggccactgcggggcttattctgggaaccgtgtatttagttggctcagccatatacaacttgttcttccaccccctgagcaagtaccctggtcctctattgaatcgtatatcataccttcctcgcgtttaccttttgctgtcgggccaattggggttgcgcgttgtcgacttccataagaaatacggccctgtggtgcgccttacacccaccgaacttgctttcagtagccctgaagcttgggatgatatctatgggcataagaaagcaggcgaagaggagtttccgaagtatgagctcttctacagggttcagaaatacttacccactgcaatcataaatgcaggccgtgacgaacacatacttatacgccgccaattgtcgcacgggttcagtgatcgtgcgatgcgcgagcaggaaccgatcataagaggttacgtcgacttgctcatccaaagactacgggaaaatatcgatggatccccaaaggttccactcaacatggtggaatggtataactggactactttcgatatcatcggtgatctcggattcggtggtgctggtggtttcggctgccttgaacatcgtaactatcacccgtgggtacgcttgatcacggacaatatgagacagagtgccgccatgcaggcgctagccagtattgggtttcgtggggtagtgcagattctcggcaagctccccaaagcggccggcagtcaacatcgaagttatatcaaggaaaaggtcatgcaacgtctcgaactcagtggcacaatctcacgcccagacttcatcgaaagcttaatcaagaagaaggatgagctaaattttgataccgggcgcattataatgaactcgtctcttttggtcatagctgggtctgaaacgacagcgaccttgctcagtggtgcaacattcctgctcgctacgcatcctcatgttatggaacgtctcacacacgaagttcgcagcatgtttaagacggaagcagagattaatctcatcagtgttggtcagctcccgtatatgcttgctgttcttaacgaatcccttcgcttgtatccgcctgttgtaatcggtctgccaagagtggtccccacaggcggtggcattgttgatggtaagcctgtgccgcaaggtacagtagtatcggtatatcaatatgcggttaaccacgacgagcgttactggacggagccattcacattcgcgccagagcgcttcctaaatgatcctaaatataagtctgatcgactagaggccatgcaagcgtttggaacaggtccaagaaattgcctcgggaaaaatcttgcatactccgaaatgcgacttatcatggcaagacttatttggaacttcgacttcagcctggctgaggatagtcaggattggatacgccgccagggggcgtacacatcttggatcaaacccaagctcaatgtgttcttaaagccagtagcacgagtatga

SEQ ID NO: 32221 - protein, 501 aa, Muscodor strobelii
  misc_feature: SGI Peptide ID NO. 571104
  misc_feature (41)..(497): Pfam Id: PF00067 Pfam Desc: Cytochrome P450
  misc_feature (151)..(497): Pfam Id: PF00067 Pfam Desc: Cytochrome P450
  misc_feature (14)..(500): NCBI GI: 261202730 Blast Desc: cytochrome P450 monooxygenase [Ajellomyces dermatitidis SLH14081] gi|239590676|gb|EEQ73257.1| cytochrome P450 monooxygenase [Ajellomyces dermatitidis SLH14081]
  misc_feature (14)..(500): NCBI GI: 239612397 Blast Desc: cytochrome P450 monooxygenase [Ajellomyces dermatitidis ER-3]
  misc_feature (27)..(500): NCBI GI: 164423577 Blast Desc: NCU08128 [Neurospora crassa OR74A] gi|157070153|gb|EAA30435.2| conserved [Neurospora crassa OR74A]
  misc_feature (12)..(500): NCBI GI: 224969386 Blast Desc: cytochrome P450 ClCP1 [Glomerella lindemuthiana]
  misc_feature (29)..(498): NCBI GI: 154285174 Blast Desc: [Ajellomyces capsulatus NAm1] gi|150407023|gb|EDN02564.1| [Ajellomyces capsulatus NAm1]
  misc_feature (22)..(498): NCBI GI: 240277542 Blast Desc: trichothecene C-15 hydroxylase [Ajellomyces capsulatus H143]
  misc_feature (29)..(497): NCBI GI: 242801842 Blast Desc: cytochrome P450, [Talaromyces stipitatus ATCC 10500] gi|218717197|gb|EED16618.1| cytochrome P450, [Talaromyces stipitatus ATCC 10500]
  misc_feature (7)..(500): NCBI GI: 225684952 Blast Desc: trichothecene C-15 hydroxylase [Paracoccidioides brasiliensis Pb03]
  misc_feature (7)..(500): NCBI GI: 226294265 Blast Desc: isotrichodermin C-15 hydroxylase [Paracoccidioides brasiliensis Pb18]
  misc_feature (29)..(497): NCBI GI: 212545779 Blast Desc: cytochrome P450 monooxygenase, [Penicillium marneffei ATCC 18224] gi|210064563|gb|EEA18658.1| cytochrome P450 monooxygenase, [Penicillium marneffei ATCC 18224]
  misc_feature (118)..(474): SWISSPROT Homolog: EC 1.14.14.1 Unspecific monooxygenase
MSFLHLQSASGVATAGLILGTVYLVGSAIYNLFFHPLSKYPGPLLNRISYLPRVYLLLSGQLGLRVVDFHKKYGPVVRLTPTELAFSSPEAWDDIYGHKKAGEEEFPKYELFYRVQKYLPTAIINAGRDEHILIRRQLSHGFSDRAMREQEPIIRGYVDLLIQRLRENIDGSPKVPLNMVEWYNWTTFDIIGDLGFGGAGGFGCLEHRNYHPWVRLITDNMRQSAAMQALASIGFRGVVQILGKLPKAAGSQHRSYIKEKVMQRLELSGTISRPDFIESLIKKKDELNFDTGRIIMNSSLLVIAGSETTATLLSGATFLLATHPHVMERLTHEVRSMFKTEAEINLISVGQLPYMLAVLNESLRLYPPVVIGLPRVVPTGGGIVDGKPVPQGTVVSVYQYAVNHDERYWTEPFTFAPERFLNDPKYKSDRLEAMQAFGTGPRNCLGKNLAYSEMRLIMARLIWNFDFSLAEDSQDWIRRQGAYTSWIKPKLNVFLKPVARV

SEQ ID NO: 32222 - DNA, 1264 bp, Muscodor strobelii
  misc_feature: SGI EST ID NO. CUFF.76283.0
  misc_feature: Variant of the nucleotide sequence at SEQ ID NO 32220
ccgccatgcaggcgctagccagtattgggtttcgtggggtagtgcagattctcggcaagctccccaaagcggccggcagtcaacatcgaagttatatcaaggaaaaggtcatgcaacgtctcgaactcagtggcacaatctcacgcccagacttcatcgaaagcttaatcaagaagaaggatgagctaaattttgataccgggcgcattataatgaactcgtctcttttggtcatagctgggtctgaaacgacagcgaccttgctcagtggtgcaacattcctgctcgctacgcatcctcatgttatggaacgtctcacacacgaagttcgcagcatgtttaagacggaagcagagattaatctcatcagtgttggtcagctcccgtatatgcttgctgttcttaacgaatcccttcgcttgtatccgcctgttgtaatcggtctgccaagagtggtccccacaggcggtggcattgttgatggtaagcctgtgccgcaaggtacagtagtatcggtatatcaatatgcggttaaccacgacgagcgttactggacggagccattcacattcgcgccagagcgcttcctaaatgatcctaaatataagtctgatcgactagaggccatgcaagcgtttggaacaggtccaagaaattgcctcgggaaaaatcttgcatactccgaaatgcgacttatcatggcaagacttatttggaacttcgacttcagcctggctgaggatagtcaggattggatacgccgccagggggcgtacacatcttggatcaaacccaagctcaatgtgttcttaaagccagtagcacgagtatgaggattgtgtgatttctcagcatcaaggatacaagaatatgcttcagaggtctatagacaggacttaaaggatgcgacgatattttattcggaggcatacgaaaatttgtactagagtcgccatagtattcaggcactagcttaggcttatgaaaacccaacatatgttgtcatctctaagggccaagttgccatcgagtacttccagacgtgcagaaatctgcgcgccgcatcaatctcactgagcgcgccctggagctttagtctcggctgatgttgtcatttcaagccatgtaattgtgattctacactccgaggtaaacgtacgtaatacagtaagtcatacatcaaataatacttttatcgtttttagcgaaagattccagatcaaaagggaaatgaccaatcatcggggatttccgtacaaacggc

SEQ ID NO: 32223 - DNA, 1599 bp, Muscodor strobelii
  misc_feature: SGI cDNA ID NO. 571105
  misc_feature: Elevated expression when VOC is produced
  misc_feature: Encodes the peptide sequence at SEQ ID NO 32224
atggcttctactatgtcgccagatgaatctggcgcgctcataagcactttcttcaagaactacttaccagaaaacccttatatccgtgctgccattattcttgttgttgcgtggtctttctatgtggatggtctcgtcatatatcgcctcttcttttcaccaattgctcgctttcctggaccgaaactggccgccgcgacaggttggtatgagagctattacgatgttgtcaagcaagggaaattcctcttcgaggttgagaaaatgcacaagcagtacggtccgatcgtaagaatcaacccttacgagctttctatctgtgacccggattattacgacaaactgtatgtggcgggatcggtacgcccaacggataactatatggctttcgcaaacggcttggaccttgaaggttctcatctcctcacgacaggacacgagcttcaccgaaagagaagaaagccgctagagccgtttttctctcgtctcggcgtgtcaagactggaacccatggtcgcagagatgtgtgaaaagctcatcatcggtcgcttcgaggcgttcaaaggcacaggaaaggttgtcaggcttgatcacgctttccttgcctttgctggtgatgtcgtcagcaatatctgcatggacgatccgcccaatttactcgacgatccagagttctcgcccgattggttcaacctgttccatacagtgatcaagtcgcttcctcttttcatggcgctaccttggctaattcggctcatacaactcgtcccagaacacatcctgatgaagttagaccctcgtagccagcagttcaacgacttccgaataatgtcggaaggtcatatcgacgcagcgaagcgggagaaggccgcgtcaggaggcaaggacacatcgctaaacggacccgtcacaattttccgacacctcgtcaatagcgacctaccgccatcagaactgtcgaatgaaagactttcaaaggaatcgcaagttctgttaggtgccggcacagtcagcacagctcgaactcttgacttcatcacctactatattgtcaccaatcctgccattcaaaagcgccttacggaggaagttaaggatgtaatggaagggtatcccgccaagaagcctagttgggctgagctagagaaattgcccttcctacaagctctaattagagaaggtcttcgtctcagctacggggtcatgcaccgattgccgcgtgtctcgcccaacaatgcgctgcagttcaaggattgggtcatcccagctggtgtgcccgttagtatgtcagcatatcttcagcacaacaatgcagatgtattcccgagacctacagaattcctacctgagcgctggatggaaaacgtaacgccggagatgaaccgaaacttcgtgccctttgctaaaggctcacgcaattgtttaggaatgaatctcgtgtactgcgagctgagctatgtcattgcagccctgtttcgaccaggggggcccagcttcgagctttacgagacggacgagtcggacgtggtccaagctcatgaccttgtcatacccctgcctagactagatagtaaaggtatcagggcgaagtttttttag

SEQ ID NO: 32224 - protein, 532 aa, Muscodor strobelii
  misc_feature: SGI Peptide ID NO. 571105
  misc_feature (63)..(531): Pfam Id: PF00067 Pfam Desc: Cytochrome P450
  misc_feature (317)..(493): Pfam Id: PF00067 Pfam Desc: Cytochrome P450
  misc_feature (21)..(531): NCBI GI: 240106733 Blast Desc: Cytochrome P450 family protein [Coccidioides posadasii C735 delta SOWgp]
  misc_feature (21)..(531): NCBI GI: 119174212 Blast Desc: CIMG_09088 [Coccidioides immitis RS]
  misc_feature (18)..(531): NCBI GI: 163931309 Blast Desc: cytochrome P450 monooxygenase [Cochliobolus heterostrophus]
  misc_feature (21)..(531): NCBI GI: 121717305 Blast Desc: cytochrome P450 monooxygenase, [Aspergillus clavatus NRRL 1] gi|119404226|gb|EAW14643.1| cytochrome P450 monooxygenase, [Aspergillus clavatus NRRL 1]
  misc_feature (33)..(529): NCBI GI: 238841666 Blast Desc: CND11p [Microsporum canis CBS 113480]
  misc_feature (40)..(528): NCBI GI: 242827325 Blast Desc: cytochrome P450, [Talaromyces stipitatus ATCC 10500] gi|218712066|gb|EED11494.1| cytochrome P450, [Talaromyces stipitatus ATCC 10500]
  misc_feature (20)..(528): NCBI GI: 212530086 Blast Desc: benzoate 4-monooxygenase cytochrome P450, [Penicillium marneffei ATCC 18224] gi|210074598|gb|EEA28685.1| benzoate 4-monooxygenase cytochrome P450, [Penicillium marneffei ATCC
  misc_feature (18)..(528): NCBI GI: 242761462 Blast Desc: cytochrome P450, [Talaromyces stipitatus ATCC 10500] gi|218723380|gb|EED22797.1| cytochrome P450, [Talaromyces stipitatus ATCC 10500]
  misc_feature (40)..(529): NCBI GI: 169778735 Blast Desc: [Aspergillus oryzae RIB40] gi|83772571|dbj|BAE62699.1| protein product [Aspergillus oryzae]
  misc_feature (41)..(528): NCBI GI: 270124459 Blast Desc: fusicoccadiene C-8 hydroxylase [Alternaria brassicicola]
  misc_feature (59)..(508): SWISSPROT Homolog: EC 1.14.13.94 Lithocholate 6-beta-hydroxylase
  misc_feature: Useful for introducing or modulating the production of volatile compounds
MASTMSPDESGALISTFFKNYLPENPYIRAAIILVVAWSFYVDGLVIYRLFFSPIARFPGPKLAAATGWYESYYDVVKQGKFLFEVEKMHKQYGPIVRINPYELSICDPDYYDKLYVAGSVRPTDNYMAFANGLDLEGSHLLTTGHELHRKRRKPLEPFFSRLGVSRLEPMVAEMCEKLIIGRFEAFKGTGKVVRLDHAFLAFAGDVVSNICMDDPPNLLDDPEFSPDWFNLFHTVIKSLPLFMALPWLIRLIQLVPEHILMKLDPRSQQFNDFRIMSEGHIDAAKREKAASGGKDTSLNGPVTIFRHLVNSDLPPSELSNERLSKESQVLLGAGTVSTARTLDFITYYIVTNPAIQKRLTEEVKDVMEGYPAKKPSWAELEKLPFLQALIREGLRLSYGVMHRLPRVSPNNALQFKDWVIPAGVPVSMSAYLQHNNADVFPRPTEFLPERWMENVTPEMNRNFVPFAKGSRNCLGMNLVYCELSYVIAALFRPGGPSFELYETDESDVVQAHDLVIPLPRLDSKGIRAKFF

SEQ ID NO: 32225 - DNA, 2153 bp, Muscodor strobelii
  misc_feature: SGI EST ID NO. CUFF.76378.1
  misc_feature: Variant of the nucleotide sequence at SEQ ID NO 32223
gtcttaaagacgtagctatctctacccggctactttcgatgcgatgtcaagctttcctcgtaccactgcgatactgatcttgactgacattcaccatggcttctactatgtcgccagatgaatctggcgcgctcataagcactttcttcaagaactacttaccagaaaacccttatatccgtgctgccattattcttgttgttgcgtggtctttctatgtggatggtctcgtcatatatcgcctcttcttttcaccaattgctcgctttcctggaccgaaactggccgccgcgacaggttggtatgagagctattacgatgttgtcaagcaagggaaattcctcttcgaggttgagaaaatgcacaagcagtacggtccgatcgtaagaatcaacccttacgagctttctatctgtgacccggattattacgacaaactgtatgtggcgggatcggtacgcccaacggataactatatggctttcgcaaacggcttggaccttgaaggttctcatctcctcacgacaggacacgagcttcaccgaaagagaagaaagccgctagagccgtttttctctcgtctcggcgtgtcaagactggaacccatggtcgcagagatgtgtgaaaagctcatcatcggtcgcttcgaggcgttcaaaggcacaggaaaggttgtcaggcttgatcacgctttccttgcctttgctggtgatgtcgtcagcaatatctgcatggacgatccgcccaatttactcgacgatccagagttctcgcccgattggttcaacctgttccatacagtgatcaagtcgcttcctcttttcatggcgctaccttggctaattcggctcatacaactcgtcccagaacacatcctgatgaagttagaccctcgtagccagcagttcaacgacttccgaataatgtcggaaggtcatatcgacgcagcgaagcgggagaaggccgcgtcaggaggcaaggacacatcgctaaacggacccgtcacaattttccgacacctcgtcaatagcgacctaccgccatcagaactgtcgaatgaaagactttcaaaggaatcgcaagttctgttaggtgccggcacagtcagcacagctcgaactcttgacttcatcacctactatattgtcaccaatcctgccattcaaaagcgccttacggaggaagttaaggatgtaatggaagggtatcccgccaagaagcctagttgggctgagctagagaaattgcccttcctacaagctctaattagagaaggtcttcgtctcagctacggggtcatgcaccgattgccgcgtgtctcgcccaacaatgcgctgcagttcaaggattgggtcatcccagctggtgtgcccgttagtatgtcagcatatcttcagcacaacaatgcagatgtattcccgagacctacagaattcctacctgagcgctggatggaaaacgtaacgccggagatgaaccgaaacttcgtgccctttgctaaaggctcacgcaattgtttaggaatgaatctcgtgtactgcgagctgagctatgtcattgcagccctgtttcgaccaggggggcccagcttcgagctttacgagacggacgagtcggacgtggtccaagctcatgaccttgtcatacccctgcctagactagatagtaaaggtatcagggcgaagtttttttagaaaccaggccgtttcgatactcgcattggtggcatgcgaaacatctggggtagcagtggggaaaagggcatagaccgatttagacgcatcaacatggaagccatacggcttcgatctatgttagggctgggctgcggctagtcgtcctaactcgggtaccgcaagtacggaacggtacgggtagccttatcagggcctggacaatgtacactgtacttttgtatatagaatttagacgcatgggcttttcgggttcaatatttgattgattagacatttctacaacagcgtttagaatcgagactggatcttctatcagctaggtcggtgataaccctgattgcccatcgtttgctgtgattctctttcggataacagcgagatgcagtgtaatcatacgataggggaatgatgtgtcatggtgatttcgaccccgatgtaagattaagcagagaagcg

SEQ ID NO: 32226 - DNA, 2256 bp, Muscodor strobelii
  misc_feature: SGI cDNA ID NO. 571106
  misc_feature: Elevated expression when VOC is produced
  misc_feature: Encodes the peptide sequence at SEQ ID NO 32227
atggaatacaagtactctaacattgtcgacccctcgacctatgattcgcagggactttgccctggcattgatctccgaaaacatgttgccgccgatatggaggagattggcactctgagagctcaagaggattggcgcaagatggtcggcccggttgcgagaccttacaagggtggtttgaactccaactacagcttcatgactgtctctgtccctgagtgcttgccagagagattggagattatcagctatgcgaatgagtttgctttcctccacgacgatgtcattgaagtcgctagcaaggaggtccgtgactcttccaacgatgaaatgcttgacgcattcgaggagggtgcgaagaccggaaagatcgaagatgccggtgcctcaggcaagcgcaagatcgcagcacagatcctgagggagatgatggccatcgaccaggagaaggccatggttgccatcaagagttgggcaacatttgttgagcacgctagtggccgtcagcaccacgagcacttcgatactctcgagcagtatatcccctaccgatgtctcgatgtcggttacatgttctggcacggcctggtcactttcggatgcgctattaccattcctgacgaggaggccgatgagacaagagagcttctcacttcggctctgatcgccgcctctctggccaacgacctgtactcttatgagaaagagtacgaagacaccatgcgcgctggccttccagatgtcgtcaacgcaatttgggtcatcatgggcgagaacaagtgcacagaagccgaggctaaggaaatttgcaagcagcgcatcctagtcgaaaatgacaattatgtcaagatcgtagaggagacccgaaagcgcaccgacttgtgcgatgacgtcaagcgatacatcgaagtcatgcagtactctctctccggaaaccttgtctggagtatccaatgcccgcgctacaacaagggcgtcgaattcagtgagctgcagatgttgcgggctaagcacggaattgcaaagtatcccgctctctggcctcccaaggacgagaactctaccgccaacagcagcagctccagctccactgccggtgctcagactggagattcatcagttgatggtgactttgagatcgccgagaaggacgatgaactgtactggggaattaacggcgtcggtatccgggtcggccaaggtgtcaacgagcacggtgttggtaaatacagtgcaccggccaagcccgcagctgtcgcaaagcccaacacggactcgttaatcctggaagacatggtttctttggctcttgaccgaaacctcccagaactcagcgatgatgttgtcctgcagccctaccgatacctctcctcccttccttccaagggcttccgtgatcaggccatcgactctctgaacacttggttgcaagtccctgcagctacctgcaataagatcaaggaagttgtcaaaatgctccacaacgcatctcttatgcttgatgatcttgaggacaactcccctctgcgacgaggcagaccctccacacacgacatctacggccctgctcaaacaatcaacagcgctacttatctgtacatcacagccaccgagcttgcctccgacctcagccctgcttgcttgaaggtcttcactgaggagatgaagcgtctatacattggtcagagctacgacttacactggtgccacaacgctcagtgccctacatctatcgcccagtatctgaagatggttgacgacaagactggtggcttattccgcatgctcacccgcatgatggtggcagagagcccgctcgccaagggattgacggacgtcaaccttgaccaactcagctgcctcatcggccgcttcttccagattcgcgatgactaccaaaacctggcttcagcagactatgctaagcagaagggtttcgctgaggacttggacgagggcaagtactcatttgctctgatccactgcatccaggctctcgagtcacagcccaagtttgctggcgatgccatgcagctgcgcgctttcctcgtcaagaggcgtttcaatggcaagctcaccaacgaggctaagcgggaggtattgagcatcatgaagaagacccagagcttggaatacacgctcaatgtcattagacaactccacagcgaactagagaaggaaatcgttagcttggagagcaagttcagccgggagaacttccagctgaagatgatgatggagctgctcaaggtttaa

SEQ ID NO: 32227 - protein, 751 aa, Muscodor strobelii
  misc_feature: SGI Peptide ID NO. 571106
  misc_feature (449)..(718): Pfam Id: PF00348 Pfam Desc: Polyprenyl synthetase
  misc_feature (492)..(665): Pfam Id: PF00348 Pfam Desc: Polyprenyl synthetase
  misc_feature (176)..(282): Pfam Id: PF03936 Pfam Desc: Terpene synthase family, metal binding domain
  misc_feature (1)..(751): NCBI GI: 240106734 Blast Desc: polyprenyl synthetase, [Coccidioides posadasii C735 delta SOWgp]
  misc_feature (1)..(751): NCBI GI: 121717308 Blast Desc: geranylgeranyl pyrophosphate synthase [Aspergillus clavatus NRRL 1] gi|119404227|gb|EAW14644.1| geranylgeranyl pyrophosphate synthase [Aspergillus clavatus NRRL 1]
  misc_feature (1)..(663): NCBI GI: 119174214 Blast Desc: CIMG_09089 [Coccidioides immitis RS]
  misc_feature (1)..(750): NCBI GI: 242827321 Blast Desc: geranylgeranyl diphosphate synthase, [Talaromyces stipitatus ATCC 10500] gi|218712065|gb|EED11493.1| geranylgeranyl diphosphate synthase, [Talaromyces stipitatus ATCC 10500]
  misc_feature (1)..(751): NCBI GI: 46109712 Blast Desc: FG01738.1 [Gibberella zeae PH-1]
  misc_feature (1)..(751): NCBI GI: 124358874 Blast Desc: fusicoccadiene synthase [Phomopsis amygdali] gi|124358876|dbj|BAF45925.1| fusicoccadiene synthase [Phomopsis amygdali]
  misc_feature (1)..(741): NCBI GI: 261399278 Blast Desc: fusicoccadiene synthase [Alternaria brassicicola]
  misc_feature (1)..(751): NCBI GI: 116197531 Blast Desc: CHGG_06921 [Chaetomium globosum CBS 148.51] gi|88178200|gb|EAQ85668.1| CHGG_06921 [Chaetomium globosum CBS 148.51]
  misc_feature (6)..(751): NCBI GI: 119499417 Blast Desc: geranylgeranyl pyrophosphate synthase [Neosartorya fischeri NRRL 181] gi|119414630|gb|EAW24569.1| geranylgeranyl pyrophosphate synthase [Neosartorya fischeri NRRL 181]
  misc_feature (70)..(746): NCBI GI: 115390482 Blast Desc: [Aspergillus terreus NIH2624] gi|114195142|gb|EAU36842.1| [Aspergillus terreus NIH2624]
  misc_feature: Useful for introducing or modulating the production of volatile compounds
MEYKYSNIVDPSTYDSQGLCPGIDLRKHVAADMEEIGTLRAQEDWRKMVGPVARPYKGGLNSNYSFMTVSVPECLPERLEIISYANEFAFLHDDVIEVASKEVRDSSNDEMLDAFEEGAKTGKIEDAGASGKRKIAAQILREMMAIDQEKAMVAIKSWATFVEHASGRQHHEHFDTLEQYIPYRCLDVGYMFWHGLVTFGCAITIPDEEADETRELLTSALIAASLANDLYSYEKEYEDTMRAGLPDVVNAIWVIMGENKCTEAEAKEICKQRILVENDNYVKIVEETRKRTDLCDDVKRYIEVMQYSLSGNLVWSIQCPRYNKGVEFSELQMLRAKHGIAKYPALWPPKDENSTANSSSSSSTAGAQTGDSSVDGDFEIAEKDDELYWGINGVGIRVGQGVNEHGVGKYSAPAKPAAVAKPNTDSLILEDMVSLALDRNLPELSDDVVLQPYRYLSSLPSKGFRDQAIDSLNTWLQVPAATCNKIKEVVKMLHNASLMLDDLEDNSPLRRGRPSTHDIYGPAQTINSATYLYITATELASDLSPACLKVFTEEMKRLYIGQSYDLHWCHNAQCPTSIAQYLKMVDDKTGGLFRMLTRMMVAESPLAKGLTDVNLDQLSCLIGRFFQIRDDYQNLASADYAKQKGFAEDLDEGKYSFALIHCIQALESQPKFAGDAMQLRAFLVKRRFNGKLTNEAKREVLSIMKKTQSLEYTLNVIRQLHSELEKEIVSLESKFSRENFQLKMMMELLKV

SEQ ID NO: 32228 - DNA, 2832 bp, Muscodor strobelii
  misc_feature: SGI EST ID NO. CUFF.76336.0
  misc_feature: Variant of the nucleotide sequence at SEQ ID NO 32226
cggcagtatacacaccttacatttgcatgaagatgccacagtcagaagcgagaccatcctggtcagagactactaggataactaagcatacttgacttgatcagaacttcaagagtttataagtcgatgcatcagcacgcaattctcataaactcgaaacaagcacaagcacaagcacaaccatcctcaacagttgttcaacactgccttggacttttgctcattcttcttttcacgccttcgtgtacttcggtctctatcatttagacttcagtcaaggtctttgacctttcctcttctttcctctttcttcttttcttcttctttcttttcaacgaaatcaaaatggaatacaagtactctaacattgtcgacccctcgacctatgattcgcagggactttgccctggcattgatctccgaaaacatgttgccgccgatatggaggagattggcactctgagagctcaagaggattggcgcaagatggtcggcccggttgcgagaccttacaagggtggtttgaactccaactacagcttcatgactgtctctgtccctgagtgcttgccagagagattggagattatcagctatgcgaatgagtttgctttcctccacgacgatgtcattgaagtcgctagcaaggaggtccgtgactcttccaacgatgaaatgcttgacgcattcgaggagggtgcgaagaccggaaagatcgaagatgccggtgcctcaggcaagcgcaagatcgcagcacagatcctgagggagatgatggccatcgaccaggagaaggccatggttgccatcaagagttgggcaacatttgttgagcacgctagtggccgtcagcaccacgagcacttcgatactctcgagcagtatatcccctaccgatgtctcgatgtcggttacatgttctggcacggcctggtcactttcggatgcgctattaccattcctgacgaggaggccgatgagacaagagagcttctcacttcggctctgatcgccgcctctctggccaacgacctgtactcttatgagaaagagtacgaagacaccatgcgcgctggccttccagatgtcgtcaacgcaatttgggtcatcatgggcgagaacaagtgcacagaagccgaggctaaggaaatttgcaagcagcgcatcctagtcgaaaatgacaattatgtcaagatcgtagaggagacccgaaagcgcaccgacttgtgcgatgacgtcaagcgatacatcgaagtcatgcagtactctctctccggaaaccttgtctggagtatccaatgcccgcgctacaacaagggcgtcgaattcagtgagctgcagatgttgcgggctaagcacggaattgcaaagtatcccgctctctggcctcccaaggacgagaactctaccgccaacagcagcagctccagctccactgccggtgctcagactggagattcatcagttgatggtgactttgagatcgccgagaaggacgatgaactgtactggggaattaacggcgtcggtatccgggtcggccaaggtgtcaacgagcacggtgttggtaaatacagtgcaccggccaagcccgcagctgtcgcaaagcccaacacggactcgttaatcctggaagacatggtttctttggctcttgaccgaaacctcccagaactcagcgatgatgttgtcctgcagccctaccgatacctctcctcccttccttccaagggcttccgtgatcaggccatcgactctctgaacacttggttgcaagtccctgcagctacctgcaataagatcaaggaagttgtcaaaatgctccacaacgcatctcttatgcttgatgatcttgaggacaactcccctctgcgacgaggcagaccctccacacacgacatctacggccctgctcaaacaatcaacagcgctacttatctgtacatcacagccaccgagcttgcctccgacctcagccctgcttgcttgaaggtcttcactgaggagatgaagcgtctatacattggtcagagctacgacttacactggtgccacaacgctcagtgccctacatctatcgcccagtatctgaagatggttgacgacaagactggtggcttattccgcatgctcacccgcatgatggtggcagagagcccgctcgccaagggattgacggacgtcaaccttgaccaactcagctgcctcatcggccgcttcttccagattcgcgatgactaccaaaacctggcttcagcagactatgctaagcagaagggtttcgctgaggacttggacgagggcaagtactcatttgctctgatccactgcatccaggctctcgagtcacagcccaagtttgctggcgatgccatgcagctgcgcgctttcctcgtcaagaggcgtttcaatggcaagctcaccaacgaggctaagcgggaggtattgagcatcatgaagaagacccagagcttggaatacacgctcaatgtcattagacaactccacagcgaactagagaaggaaatcgttagcttggagagcaagttcagccgggagaacttccagctgaagatgatgatggagctgctcaaggtttaaagcttttttgggatgtaaaattatcggcgcagggaatttgtcggagatgtttaggactccgagcacttgacgggaatgtttcagttttagatttcttgtttggggtagcacaacgggtaccatagatggtcggggttcgggtcacaatttagtttcaaaatacaacttttccaattacttcagagttttactgcgatacataaagagaattccatcgtctcgagaaagggg

SEQ ID NO: 32229 - DNA, 1248 bp, Muscodor strobelii
  misc_feature: SGI cDNA ID NO. 571107
  misc_feature: Encodes the peptide sequence at SEQ ID NO 32230
atggcatctctggcgacacgtgatgagccgatgggaggcatttctccgaatggatcgccatctgcggacgaacttgatgtgattgtccttttcgagcgacttggtgctgccttctcacttgtgagcgtcttactcatcttctttgcatttgcagcgtgcaaaagactccgcagtgtgccgaatacgttcatcgtgttcgcctccgttgccaatctaggagctagcatcgcctgtttaataggatactcaggcgtcttggctggctcgactagccctctttgccaagctcaagccttcctattcgaactgtttatgcaatcagatccatggtggtcttttgcgatggcagtcaatgtctttatggtatttttcttttcggcaaatccacagagctttctccgatactggtactgctatgttcttgtctgttacggcgtcccgttcattcccgctctgtggctactcgtcgtccgcgataacgctgggcacaatgtgtacggcaatgcgactgatctattcactaatgcagctgttatgggaacaatccaccatgaggtggtccaggtgacgacgattaacacagatagtggacacactaacgtcgttggttctcctggcacggctccgacaaactggttcgatagtccggccgaagatctgactcgattacatgaaccaaacaaggccgaatcacctgtgccttttgcaagcacagtcacacgcatcactgctgatcccttacccaagaaagaaaatctatggcagcgacttcgagccggttggacacactggtgtaacaaattcaatcacatggacccagtcaagctggcctatcttcgaacatccttcgtattcgcaataagtgtccttataacctggacacccagtagcatcaaccgcgtgcacgacctgattcgacccgacgaattcagtttcgccctcaacctcactagcgccatagtgctccctctccagggtctttggaacgcagccatatttttctcaactagttgggatacgctgggcgaggagctacgtgccaagatcaactacttcaagggcatcccaattggccaagacacagcaaacgccgtgcgtggtgagcgcgagcgacatcgtgtcttggaactggagagaagagctacacatcagaatcaggatgacaccagcagtgaacttagcgcggcaactacgttgggtcaatcttgtagtggaagatatgtaagtcacagcggtggcaatatctaa

SEQ ID NO: 32230 - protein, 415 aa, Muscodor strobelii
  misc_feature: SGI Peptide ID NO. 571107
  misc_feature (21)..(170): NCBI GI: 261353838 Blast Desc: G-protein coupled receptor [Verticillium albo-atrum VaMs.102]
  misc_feature (21)..(170): NCBI GI: 171695726 Blast Desc: protein product [Podospora anserina] gi|170948105|emb|CAP60269.1| protein product [Podospora anserina]
  misc_feature (24)..(170): NCBI GI: 85115820 Blast Desc: NCU00786 [Neurospora crassa OR74A] gi|28926740|gb|EAA35706.1| [Neurospora crassa OR74A] gi|38636395|emb|CAE81932.1| [Neurospora crassa]
  misc_feature (2)..(170): NCBI GI: 145975391 Blast Desc: G-protein coupled receptor [Trichoderma atroviride]
  misc_feature (21)..(170): NCBI GI: 256726847 Blast Desc: [Nectria haematococca mpVI 77-13-4]
  misc_feature (24)..(170): NCBI GI: 46121721 Blast Desc: FG05239.1 [Gibberella zeae PH-1]
  misc_feature (9)..(170): NCBI GI: 46136355 Blast Desc: FG09693.1 [Gibberella zeae PH-1]
  misc_feature (21)..(170): NCBI GI: 256727355 Blast Desc: NECHADRAFT_76147 [Nectria haematococca mpVI 77-13-4]
  misc_feature (19)..(372): NCBI GI: 238503313 Blast Desc: cAMP receptor-like protein, [Aspergillus flavus NRRL3357] gi|220691700|gb|EED48048.1| cAMP receptor-like protein, [Aspergillus flavus NRRL3357]
  misc_feature (21)..(169): NCBI GI: 166714351 Blast Desc: G-protein coupled receptor [Trichoderma atroviride]
MASLATRDEPMGGISPNGSPSADELDVIVLFERLGAAFSLVSVLLIFFAFAACKRLRSVPNTFIVFASVANLGASIACLIGYSGVLAGSTSPLCQAQAFLFELFMQSDPWWSFAMAVNVFMVFFFSANPQSFLRYWYCYVLVCYGVPFIPALWLLVVRDNAGHNVYGNATDLFTNAAVMGTIHHEVVQVTTINTDSGHTNVVGSPGTAPTNWFDSPAEDLTRLHEPNKAESPVPFASTVTRITADPLPKKENLWQRLRAGWTHWCNKFNHMDPVKLAYLRTSFVFAISVLITWTPSSINRVHDLIRPDEFSFALNLTSAIVLPLQGLWNAAIFFSTSWDTLGEELRAKINYFKGIPIGQDTANAVRGERERHRVLELERRATHQNQDDTSSELSAATTLGQSCSGRYVSHSGGNI

SEQ ID NO: 32231 - DNA, 405 bp, Muscodor strobelii
  misc_feature: SGI EST ID NO. CUFF.76300.0
  misc_feature: Variant of the nucleotide sequence at SEQ ID NO 32229
agagtataagcagttgtgcgactcgtcatggcatctctggcgacacgtgatgagccgatgggaggcatttctccgaatggatcgccatctgcggacgaacttgatgtgattgtccttttcgagcgacttggtgctgccttctcacttgtgagcgtcttactcatcttctttgcatttgcagcgtgcaaaagactccgcagtgtgccgaatacgttcatcgtgttcgcctccgttgccaatctaggagctagcatcgcctgtttaataggatactcaggcgtcttggctggctcgactagccctctttgccaagctcaagccttcctattcgaactgtttatgcaatcagatccatggtggtcttttgcgatggcagtcaatgtctttatggtatttttcttttcg

SEQ ID NO: 32232 - DNA, 1518 bp, Muscodor strobelii
  misc_feature: SGI cDNA ID NO. 571108
  misc_feature: Elevated expression when VOC is produced
  misc_feature: Encodes the peptide sequence at SEQ ID NO 32233
atgagtgatctcgaaaagcgctcgtcctcccgggattccaatgcaggagaacggaacataagcggcgtcggcgcaatccacgatgtcgacctgcctcatgatccagatgcccatctaagccaagaagaaagagaacatattgatcgcaagctcgtgtggagactagatctcatgctgatcccttggctctgtctgctatatctcctcgcttttttggatcggacaaacataggaaatgctaaggttgccggtctgaccgaggacttgcatctatcgacgtcgcaatacaacttaactctcactatattttttatctcttattcggtcttcgagccgcttaccaatgtactcctaaaaaaactgcggccttccgttttcatcccaattatcatgttcttctggggtgctagtatgaccggcatgggtttttgttacaattactctggattgttagctgccagatggtttttgggtctgacagaggctggactcttcccgggagtaaactattacttatcgtgctggtataagcgatccgagttcggcatccgcgctgccatcttcttttccgccgctgccctggcgggatctttcggcggcttgcttgctgcagccatagaaaaattagataccaaaggcgggcttgcaggttggcgctggatctttatcctagaaggtctgctcacggtcgttgtagccatagtgtcgttctggatggtccatgatttccccgatgacgcccgcttcttgtcggacgaagatcgtgctcgtgttattcgaagattgaagctggatcagcaatcgtctgccgagcatgagagctggagttcaaaatatctttatgccggccttaaagattggaagatgtggctggggatggtcatttacatgggctgcgacatgcctttgtatggatttagcttgttcctgccgacaatcattcaagcctcgggctggggcacaacccctgttcgaactcagcttttgagtgtcccgccctacgcagttgcagcagtagtcactatccttattggtttcatcgccgatcgaacgcgccaacgtggcttgtgcaatatcattattagcgctatcggtttcgttggattcatacttctcatcgcatccgagagcccatcggtcaaatacgcgggcacttttctcggagctatcggtatctatccgtgtattgcaaacactatttcttggatggccaataacatcgaaggtgtttataaacgtggtgtggtcttaggctttgtcatcggctgggggaatctcaatgggattgtcagttccaacatttttttcgacaaaccaaattattatcaagggtacggggtcatcatcgcatacatggcccttttcctattcggcggcagtatactcatgactaccttacttcgtatcgagaataagaagaggcgtgatgggaagcgggactaccttgcagaaggaaagacacagaaggagctggaggccatgggtgacttgcggcctgacttcttctatactacctaa

SEQ ID NO: 32233 - protein, 505 aa, Muscodor strobelii
  misc_feature: SGI Peptide ID NO. 571108
  misc_feature (63)..(432): Pfam Id: PF07690 Pfam Desc: Major Facilitator Superfamily
  misc_feature (10)..(505): NCBI GI: 171695730 Blast Desc: protein product [Podospora anserina] gi|170948107|emb|CAP60271.1| protein product [Podospora anserina]
  misc_feature (8)..(505): NCBI GI: 85115803 Blast Desc: NCU00782 [Neurospora crassa OR74A] gi|28926736|gb|EAA35702.1| conserved [Neurospora crassa OR74A] gi|38636398|emb|CAE81935.1| related to allantoate permease
  misc_feature (3)..(505): NCBI GI: 116181180 Blast Desc: CHGG_01218 [Chaetomium globosum CBS 148.51] gi|88185515|gb|EAQ92983.1| CHGG_01218 [Chaetomium globosum CBS 148.51]
  misc_feature (13)..(504): NCBI GI: 154319760 Blast Desc: BC1G_02361 [Botryotinia fuckeliana B05.10] gi|150856019|gb|EDN31211.1| BC1G_02361 [Botryotinia fuckeliana B05.10]
  misc_feature (19)..(504): NCBI GI: 67516187 Blast Desc: AN0375.2 [Aspergillus nidulans FGSC A4] gi|40746625|gb|EAA65781.1| AN0375.2 [Aspergillus nidulans FGSC A4]
  misc_feature (34)..(505): NCBI GI: 242795948 Blast Desc: MFS transporter, [Talaromyces stipitatus ATCC 10500] gi|218719284|gb|EED18704.1| MFS transporter, [Talaromyces stipitatus ATCC 10500]
  misc_feature (7)..(504): NCBI GI: 259489383 Blast Desc: TPA: MFS transporter, (AFU_orthologue; AFUA_1G01812) [Aspergillus nidulans FGSC A4]
  misc_feature (11)..(504): NCBI GI: 146322343 Blast Desc: MFS transporter [Aspergillus fumigatus Af293] gi|129556970|gb|EAL87892.2| MFS transporter, [Aspergillus fumigatus Af293]
  misc_feature (1)..(504): NCBI GI: 255950738 Blast Desc: Pc22g22420 [Penicillium chrysogenum Wisconsin 54-1255] gi|211593153|emb|CAP99530.1| Pc22g22420 [Penicillium chrysogenum Wisconsin 54-1255]
  misc_feature (1)..(504): NCBI GI: 256726846 Blast Desc: [Nectria haematococca mpVI 77-13-4]
  misc_feature: Useful for introducing or modulating the production of volatile compounds
MSDLEKRSSSRDSNAGERNISGVGAIHDVDLPHDPDAHLSQEEREHIDRKLVWRLDLMLIPWLCLLYLLAFLDRTNIGNAKVAGLTEDLHLSTSQYNLTLTIFFISYSVFEPLTNVLLKKLRPSVFIPIIMFFWGASMTGMGFCYNYSGLLAARWFLGLTEAGLFPGVNYYLSCWYKRSEFGIRAAIFFSAAALAGSFGGLLAAAIEKLDTKGGLAGWRWIFILEGLLTVVVAIVSFWMVHDFPDDARFLSDEDRARVIRRLKLDQQSSAEHESWSSKYLYAGLKDWKMWLGMVIYMGCDMPLYGFSLFLPTIIQASGWGTTPVRTQLLSVPPYAVAAVVTILIGFIADRTRQRGLCNIIISAIGFVGFILLIASESPSVKYAGTFLGAIGIYPCIANTISWMANNIEGVYKRGVVLGFVIGWGNLNGIVSSNIFFDKPNYYQGYGVIIAYMALFLFGGSILMTTLLRIENKKRRDGKRDYLAEGKTQKELEAMGDLRPDFFYTT

SEQ ID NO: 32234 - DNA, 2343 bp, Muscodor strobelii
  misc_feature: SGI EST ID NO. CUFF.76312.0
  misc_feature: Variant of the nucleotide sequence at SEQ ID NO 32232
gcaagggcgaagacgtaaaatactttattccgcgctggccggttccattcctccatcatccagacttccccatgacctagttcaatgtcgaacttggttttctcttcgtttcctcgtataaggttcattgactatatcctacatcaattccaagcataacttccttacgttcgtggttcttgctgttgtatgctcgtgaattacgcagagaattgcgctgttgtcgaactgcaatcctcaaagcctatctagcgtcattgagcaacgttggagcccgggatatttaatccagccagttcctcctcaactatcaccaatatctcgtcaatcatttcccgcgcacctgcacggctctatgcaccatgagtgatctcgaaaagcgctcgtcctcccgggattccaatgcaggagaacggaacataagcggcgtcggcgcaatccacgatgtcgacctgcctcatgatccagatgcccatctaagccaagaagaaagagaacatattgatcgcaagctcgtgtggagactagatctcatgctgatcccttggctctgtctgctatatctcctcgcttttttggatcggacaaacataggaaatgctaaggttgccggtctgaccgaggacttgcatctatcgacgtcgcaatacaacttaactctcactatattttttatctcttattcggtcttcgagccgcttaccaatgtactcctaaaaaaactgcggccttccgttttcatcccaattatcatgttcttctggggtgctagtatgaccggcatgggtttttgttacaattactctggattgttagctgccagatggtttttgggtctgacagaggctggactcttcccgggagtaaactattacttatcgtgctggtataagcgatccgagttcggcatccgcgctgccatcttcttttccgccgctgccctggcgggatctttcggcggcttgcttgctgcagccatagaaaaattagataccaaaggcgggcttgcaggttggcgctggatctttatcctagaaggtctgctcacggtcgttgtagccatagtgtcgttctggatggtccatgatttccccgatgacgcccgcttcttgtcggacgaagatcgtgctcgtgttattcgaagattgaagctggatcagcaatcgtctgccgagcatgagagctggagttcaaaatatctttatgccggccttaaagattggaagatgtggctggggatggtcatttacatgggctgcgacatgcctttgtatggatttagcttgttcctgccgacaatcattcaagcctcgggctggggcacaacccctgttcgaactcagcttttgagtgtcccgccctacgcagttgcagcagtagtcactatccttattggtttcatcgccgatcgaacgcgccaacgtggcttgtgcaatatcattattagcgctatcggtttcgttggattcatacttctcatcgcatccgagagcccatcggtcaaatacgcgggcacttttctcggagctatcggtatctatccgtgtattgcaaacactatttcttggatggccaataacatcgaaggtgtttataaacgtggtgtggtcttaggctttgtcatcggctgggggaatctcaatgggattgtcagttccaacatttttttcgacaaaccaaattattatcaagggtacggggtcatcatcgcatacatggcccttttcctattcggcggcagtatactcatgactaccttacttcgtatcgagaataagaagaggcgtgatgggaagcgggactaccttgcagaaggaaagacacagaaggagctggaggccatgggtgacttgcggcctgacttcttctatactacctaaggcgaaatcaagtgaatgcttccagttggacgttacgcccagatttcatatggtgaaatttagtgtttcaacgattacttatatcctgttgcgcctggtgctccaatggacatttcaacgttgctatgaacgagaagcgggaagaaagggcagtaaccaggccacgttagctaacacagaccaagattgaattagccttcgcaagctacgtggtcgctgacatttcattctccgtatatattcacatcaatggcaattttattagcaatacggacgaatgaagtcaatttctgtttctgactcgttgccttatctttcgggattcggtgcgtgtatttgtcgcttgaataacagatattgttcaggcctaatccaagtagtgttaaaatgcacatgcaggactgttaccttaccatctagcattcttcaacccggccaaaatcaggtgaaaagatacgtcaag

SEQ ID NO: 32235 - DNA, 2310 bp, Muscodor strobelii
  misc_feature: SGI cDNA ID NO. 571109
  misc_feature: Reduced expression when VOC is produced
  misc_feature: Encodes the peptide sequence at SEQ ID NO 32236
atgacaaagactgtgtgtattatcggtgccggaccctcgggccttgtggccgcaaagagtctcctgcatgaccttactccaggctctttcaaggtcaccatattcgatggtcaatctcgcatcggaggtctatggcctgcgagcaagcatgacaatgacgggctagttcatccactgatgatagcaaatcagagtaaacacacagtccaatttagtgattttgcatggcggccttcggatccagaatttcccagagcctggcaggtaggtggttatctcgagcggtatttgaaggagtatgaaggtgcagagatacacctagatcaaaaggttgtaaagaccgagttacaggatggtggctcctggaaagtctacacggattctcaaaaagggtccaacgccagtgtattcgactacctactgatcgccaccggtttctttgggaaacccttatggccgaagcagatcaccgaagagtgtgatgtgccagtgatacacagcagcaaataccgagatattgagagccttctcacgaagaatacgggctctggtgataagatccttgtggtcggcgggcaaatgtctgggattgaaattgctggcacagttgcaacccatctatcatcgctagtccattcgccgggagagaagtctatatcggatgcagagcgatatactatacaccatgtggcacagcggccaacatggacatttcctctgtacacatcagcaaagcctgatgcacaagcaccaccgtttctacccgttgacttgccgtcttacaaccttgcccttcgcccacatcctcttcacaatagccaggggcacatcactaccgatgcggcgcgtactttcaatgccatttaccaatctgttctaggcacagatcaatcagatttttcgccagagacgaaagtgcacagctctctccgtgataagccaccattccttgcgatgagtatgcactatatggacttcgttcgggctggcttgattaaaatccacaagggccggttgggaagtttaacaaaggacgtggcaacagtatcatctccagattgtgacgagacgatcgatcgcgtggcggctgtgattctcgctactggtttcgactcctctgaatctctctctttccttccggcctccgtgttaaatacactatctcactctccagctcatccagaccaacctctcgcattagcgtttcatggaacacatcatccttcgctgccaacactgggctttgtcggcttttatcgttcgccttactggggcgtcatggagatgcaagcccgtcttgtggcacaactatttcgaacccacgccgagggggatatgtccgcccgatctgcaagcgttcaagcagctttgtctaatgatgatagcatttcgcgaacattagctttacgcgacgatccacgctgctcccaatttcccatgggagactacgcattcctaatgcaggagttcgcatccgcattagatctcaaaatatcgccgcccccgagctctacgcccgtacttgctaatggcttgcctatggacatattgacgcctgcacgttatctcagcagaggggcaacagaatcgcaacaaagacatgcaacccaaaacctagagtctacttacaagaccgcacttgcagggctcctgggcaaacgattcatctctggtgcagttttccggtcccttcttggggaatggagtttggagcgtgatcttgtgtccaagctacccagtcacccttcaggtcgctttgtgggtacagccaaattcttacttcgagcgggtacagttgatgggcgagaagccaaggagccaagttccaagataagtgaaggatcctccccagaaagctttgagggcggtggagacatgggactcgaatatctttacatcgaagacggcgaattcactgctgcaggtacagatatgcgattccgtgcttcacggcgctatgtatggcgatatgacgaagttgatgacaagctcagtgtttggttcacgagaacagacgacctagcacgggcggactatctatttcatgaagtcgaattcacaccgccttcttctctagatgcggggagcgaaaacagtctaaaggcacacggtctgcaagagagacacgttcatacccatcgttggaaagctagatccagtcacctctgtgttgaagatctatataatgtgcactatgatttctctttccaagctgttaatctcagagaatggagactaggctactcggttcgcggcccgaagaaagattataccattgacggtgtttacaagagacgaagtcttaaataa

SEQ ID NO: 32236 - protein, 769 aa, Muscodor strobelii
  misc_feature: SGI Peptide ID NO. 571109
  misc_feature (1)..(765): NCBI GI: 116181178 Blast Desc: CHGG_01217 [Chaetomium globosum CBS 148.51] gi|88185514|gb|EAQ92982.1| CHGG_01217 [Chaetomium globosum CBS 148.51]
  misc_feature (1)..(765): NCBI GI: 256727354 Blast Desc: NECHADRAFT_90778 [Nectria haematococca mpVI 77-13-4]
  misc_feature (1)..(765): NCBI GI: 46136359 Blast Desc: FG09695.1 [Gibberella zeae PH-1]
  misc_feature (9)..(765): NCBI GI: 171695728 Blast Desc: protein product [Podospora anserina] gi|170948106|emb|CAP60270.1| protein product [Podospora anserina]
  misc_feature (1)..(765): NCBI GI: 261353839 Blast Desc: conserved [Verticillium albo-atrum VaMs.102]
  misc_feature (3)..(757): NCBI GI: 39948947 Blast Desc: MGG_08730 [Magnaporthe grisea 70-15] gi|145009274|gb|EDJ93985.1| MGG_08730 [Magnaporthe grisea 70-15]
  misc_feature (2)..(765): NCBI GI: 154313757 Blast Desc: BC1G_05728 [Botryotinia fuckeliana B05.10] gi|150849310|gb|EDN24503.1| BC1G_05728 [Botryotinia fuckeliana B05.10]
  misc_feature (302)..(765): NCBI GI: 85115812 Blast Desc: NCU00784 [Neurospora crassa OR74A] gi|28926738|gb|EAA35704.1| conserved [Neurospora crassa OR74A] gi|38636396|emb|CAE81933.1| conserved [Neurospora crassa]
  misc_feature (2)..(493): NCBI GI: 156061521 Blast Desc: SS1G_02905 [Sclerotinia sclerotiorum 1980] gi|154700307|gb|EDO00046.1| SS1G_02905 [Sclerotinia sclerotiorum 1980]
  misc_feature (1)..(765): NCBI GI: 170092543 Blast Desc: [Laccaria bicolor S238N-H82] gi|164647352|gb|EDR11596.1| [Laccaria bicolor S238N-H82]
  misc_feature: Useful for introducing or modulating the production of volatile compounds
MTKTVCIIGAGPSGLVAAKSLLHDLTPGSFKVTIFDGQSRIGGLWPASKHDNDGLVHPLMIANQSKHTVQFSDFAWRPSDPEFPRAWQVGGYLERYLKEYEGAEIHLDQKVVKTELQDGGSWKVYTDSQKGSNASVFDYLLIATGFFGKPLWPKQITEECDVPVIHSSKYRDIESLLTKNTGSGDKILVVGGQMSGIEIAGTVATHLSSLVHSPGEKSISDAERYTIHHVAQRPTWTFPLYTSAKPDAQAPPFLPVDLPSYNLALRPHPLHNSQGHITTDAARTFNAIYQSVLGTDQSDFSPETKVHSSLRDKPPFLAMSMHYMDFVRAGLIKIHKGRLGSLTKDVATVSSPDCDETIDRVAAVILATGFDSSESLSFLPASVLNTLSHSPAHPDQPLALAFHGTHHPSLPTLGFVGFYRSPYWGVMEMQARLVAQLFRTHAEGDMSARSASVQAALSNDDSISRTLALRDDPRCSQFPMGDYAFLMQEFASALDLKISPPPSSTPVLANGLPMDILTPARYLSRGATESQQRHATQNLESTYKTALAGLLGKRFISGAVFRSLLGEWSLERDLVSKLPSHPSGRFVGTAKFLLRAGTVDGREAKEPSSKISEGSSPESFEGGGDMGLEYLYIEDGEFTAAGTDMRFRASRRYVWRYDEVDDKLSVWFTRTDDLARADYLFHEVEFTPPSSLDAGSENSLKAHGLQERHVHTHRWKARSSHLCVEDLYNVHYDFSFQAVNLREWRLGYSVRGPKKDYTIDGVYKRRSLK

SEQ ID NO: 32237 - DNA, 3181 bp, Muscodor strobelii
  misc_feature: SGI EST ID NO. CUFF.76326.0
  misc_feature: Variant of the nucleotide sequence at SEQ ID NO 32235
gtagaccatgctgacctgtccgagttgacgttgtaactgccaatccgacaatgacaaagactgtgtgtattatcggtgccggaccctcgggccttgtggccgcaaagagtctcctgcatgaccttactccaggctctttcaaggtcaccatattcgatggtcaatctcgcatcggaggtctatggcctgcgagcaagcatgacaatgacgggctagttcatccactgatgatagcaaatcagagtaaacacacagtccaatttagtgattttgcatggcggccttcggatccagaatttcccagagcctggcaggtaggtggttatctcgagcggtatttgaaggagtatgaaggtgcagagatacacctagatcaaaaggttgtaaagaccgagttacaggatggtggctcctggaaagtctacacggattctcaaaaagggtccaacgccagtgtattcgactacctactgatcgccaccggtttctttgggaaacccttatggccgaagcagatcaccgaagagtgtgatgtgccagtgatacacagcagcaaataccgagatattgagagccttctcacgaagaatacgggctctggtgataagatccttgtggtcggcgggcaaatgtctgggattgaaattgctggcacagttgcaacccatctatcatcgctagtccattcgccgggagagaagtctatatcggatgcagagcgatatactatacaccatgtggcacagcggccaacatggacatttcctctgtacacatcagcaaagcctgatgcacaagcaccaccgtttctacccgttgacttgccgtcttacaaccttgcccttcgcccacatcctcttcacaatagccaggggcacatcactaccgatgcggcgcgtactttcaatgccatttaccaatctgttctaggcacagatcaatcagatttttcgccagagacgaaagtgcacagctctctccgtgataagccaccattccttgcgatgagtatgcactatatggacttcgttcgggctggcttgattaaaatccacaagggccggttgggaagtttaacaaaggacgtggcaacagtatcatctccagattgtgacgagacgatcgatcgcgtggcggctgtgattctcgctactggtttcgactcctctgaatctctctctttccttccggcctccgtgttaaatacactatctcactctccagctcatccagaccaacctctcgcattagcgtttcatggaacacatcatccttcgctgccaacactgggctttgtcggcttttatcgttcgccttactggggcgtcatggagatgcaagcccgtcttgtggcacaactatttcgaacccacgccgagggggatatgtccgcccgatctgcaagcgttcaagcagctttgtctaatgatgatagcatttcgcgaacattagctttacgcgacgatccacgctgctcccaatttcccatgggagactacgcattcctaatgcaggagttcgcatccgcattagatctcaaaatatcgccgcccccgagctctacgcccgtacttgctaatggcttgcctatggacatattgacgcctgcacgttatctcagcagaggggcaacagaatcgcaacaaagacatgcaacccaaaacctagagtctacttacaagaccgcacttgcagggctcctgggcaaacgattcatctctggtgcagttttccggtcccttcttggggaatggagtttggagcgtgatcttgtgtccaagctacccagtcacccttcaggtcgctttgtgggtacagccaaattcttacttcgagcgggtacagttgatgggcgagaagccaaggagccaagttccaagataagtgaaggatcctccccagaaagctttgagggcggtggagacatgggactcgaatatctttacatcgaagacggcgaattcactgctgcaggtacagatatgcgattccgtgcttcacggcgctatgtatggcgatatgacgaagttgatgacaagctcagtgtttggttcacgagaacagacgacctagcacgggcggactatctatttcatgaagtcgaattcacaccgccttcttctctagatgcggggagcgaaaacagtctaaaggcacacggtctgcaagagagacacgttcatacccatcgttggaaagctagatccagtcacctctgtgttgaagatctatataatgtgcactatgatttctctttccaagctgttaatctcagagaatggagactaggctactcggttcgcggcccgaagaaagattataccattgacggtgtttacaagagacgaagtcttaaataatgtagcaaccccgacgttaagattcgcaggctaaatgcctaggcagcttacaaatacatcatactatgctagacttaagacgagattgttcgagaaggtgctatgtaggattattagcttgattttgaactaaactatgagcgtgctgatcgcaggcaccattaaatgcattcattatgccaagcatcatctcgacatactcgattaggaaggaatccgagggcgaattgcagatgacgccaatgtaaacatcatactgctttgcttggcatgcaagtctttgataacgtgtaggctaggccaccaatatgcagtcattctgcggggttgggaatttcgtattcccatttgaataattcaataaataagctttcgccaagctcaaagtaaagcctcttgtgttggcacacttattgctcttaattattctagttgctttcacgtgcgcgaagactctctaagcgtcgacgtaaaaatgcaattggtccaacgaagcaattttcttgctggtgtagctgcatgtttgctagcacactgccatgcttgtttgcacgaacacaatttccatccccaagagctcacaaaaagagaaataacacctctgtcgccattgtccccagaagagcaagtgcttgttgattcagtatcaaatgtcacaatatcagaatggtcttactattggtacgtgtagaaagatcccactcgagttttttctcattcgtattcctaagacgtgatactaatttctttacagtgagtgatgtcacttgttaaggaccagaaaccagcccttcgtcttaaaacctgcgaaaatcgtgaca

SEQ ID NO: 32238 - DNA, 1056 bp, Muscodor strobelii
  misc_feature: SGI cDNA ID NO. 571110
  misc_feature: Encodes the peptide sequence at SEQ ID NO 32239
atggtcttactattgatacgcatgggtatcatgttgcgggaacgaatgaatgtttttctaaactatcccgtgaacaaatctttgactctcacatatcctaataacactgtttttcaaccgttactggaggaagaagtcctagcggtagatgaaacaaccagctaccctaatcgcgtgcctactttccatgggtactctgcgagcggtatcgcagaagctgagtttgtttatgttgggcgaggatcgcaggatgactttgcacgactaaaggagctggaagtgccacttgagggcaagatcgccatttcacgctatggcggtccattccgaggtctcaaggtcaagaacgcacaggaaaatggtatgatcggggcaatcctctttacagacacggccgatgatggaaatatcaccgaggcaaatggatatgctccttacccagatggtccagctcgtaatccaaccgccgtccagaggggaagcgtccagtatctttccacttacccgggcgatccaacaacccctggctacccatcaaagaaagattcgcctcgagctgacggccaggttgtcatgccaagaataccttcaatcccaatatcctacatcgatgcgatcccgattctcgccgcgcttgatgggcatggagttgacggccaaacagtgaacggaacccgttgggtcggagcattgaacacaacatactctacagggccagctccaaacacaactatcaagatgagtaattttatgaaaggtgtttatacagacatctgggattcgattggtatcatcaatggcacaaatcccgatgagaccataatcattggaaatcatagggatgcttggatcatcggtggtgctgcagaccctaacagcggaacagcgattatcgtcgaactctccaaagccttcggaaagcttctggcacaaggatggcgaccaaagcgaaatattgttctcggctcatgggatgccgaagagtatggcctggttgggtcgacggaatgggtcgaagagtatattccatggttaaccaacaccgccatatcatag

SEQ ID NO: 32239 - protein, 351 aa, Muscodor strobelii
  misc_feature: SGI Peptide ID NO. 571110
  misc_feature (66)..(169): Pfam Id: PF02225 Pfam Desc: PA domain
  misc_feature (66)..(135): Pfam Id: PF02225 Pfam Desc: PA domain
  misc_feature (18)..(351): NCBI GI: 240105433 Blast Desc: Transferrin receptor-like dimerization domain containing protein [Coccidioides posadasii C735 delta SOWgp]
  misc_feature (18)..(351): NCBI GI: 119194137 Blast Desc: CIMG_01443 [Coccidioides immitis RS]
  misc_feature (17)..(341): NCBI GI: 238844950 Blast Desc: glutamate carboxypeptidase 2 [Microsporum canis CBS 113480]
  misc_feature (12)..(351): NCBI GI: 169624598 Blast Desc: SNOG_15558 [Phaeosphaeria nodorum SN15] gi|160705208|gb|EAT76933.2| SNOG_15558 [Phaeosphaeria nodorum SN15]
  misc_feature (17)..(351): NCBI GI: 258575321 Blast Desc: conserved [Uncinocarpus reesii 1704] gi|237902108|gb|EEP76509.1| conserved [Uncinocarpus reesii 1704]
  misc_feature (17)..(351): NCBI GI: 239611396 Blast Desc: glutamate carboxypeptidase [Ajellomyces dermatitidis ER-3]
  misc_feature (17)..(351): NCBI GI: 261205304 Blast Desc: glutamate carboxypeptidase [Ajellomyces dermatitidis SLH14081] gi|239592448|gb|EEQ75029.1| glutamate carboxypeptidase [Ajellomyces dermatitidis SLH14081]
  misc_feature (18)..(351): NCBI GI: 225557333 Blast Desc: N-acetylated-alpha-linked acidic dipeptidase [Ajellomyces capsulatus G186AR] gi|240277975|gb|EER41482.1| N-acetylated-alpha-linked acidic dipeptidase [Ajellomyces H143]
  misc_feature (18)..(351): NCBI GI: 225679085 Blast Desc: N-acetylated-alpha-linked acidic dipeptidase [Paracoccidioides brasiliensis Pb03]
  misc_feature (18)..(351): NCBI GI: 189199424 Blast Desc: glutamate carboxypeptidase 2 [Pyrenophora tritici-repentis Pt-1C-BFP] gi|187983148|gb|EDU48636.1| glutamate carboxypeptidase 2 [Pyrenophora tritici-repentis Pt-1C-BFP]
  misc_feature (24)..(351): SWISSPROT Homolog: EC 3.4.17.21 Glutamate carboxypeptidase II
MVLLLIRMGIMLRERMNVFLNYPVNKSLTLTYPNNTVFQPLLEEEVLAVDETTSYPNRVPTFHGYSASGIAEAEFVYVGRGSQDDFARLKELEVPLEGKIAISRYGGPFRGLKVKNAQENGMIGAILFTDTADDGNITEANGYAPYPDGPARNPTAVQRGSVQYLSTYPGDPTTPGYPSKKDSPRADGQVVMPRIPSIPISYIDAIPILAALDGHGVDGQTVNGTRWVGALNTTYSTGPAPNTTIKMSNFMKGVYTDIWDSIGIINGTNPDETIIIGNHRDAWIIGGAADPNSGTAIIVELSKAFGKLLAQGWRPKRNIVLGSWDAEEYGLVGSTEWVEEYIPWLTNTAIS

SEQ ID NO: 32240 - DNA, 3821 bp, Muscodor strobelii
  misc_feature: SGI EST ID NO. CUFF.76361.0
  misc_feature: Variant of the nucleotide sequence at SEQ ID NO 32238
ctttgactctcacatatcctaataacactgtttttcaaccgttactggaggaagaagtcctagcggtagatgaaacaaccagctaccctaatcgcgtgcctactttccatgggtactctgcgagcggtatcgcagaagctgagtttgtttatgttgggcgaggatcgcaggatgactttgcacgactaaaggagctggaagtgccacttgagggcaagatcgccatttcacgctatggcggtccattccgaggtctcaaggtcaagaacgcacaggaaaatggtatgatcggggcaatcctctttacagacacggccgatgatggaaatatcaccgaggcaaatggatatgctccttacccagatggtccagctcgtaatccaaccgccgtccagaggggaagcgtccagtatctttccacttacccgggcgatccaacaacccctggctacccatcaaagaaagattcgcctcgagctgacggccaggttgtcatgccaagaataccttcaatcccaatatcctacatcgatgcgatcccgattctcgccgcgcttgatgggcatggagttgacggccaaacagtgaacggaacccgttgggtcggagcattgaacacaacatactctacagggccagctccaaacacaactatcaagatgagtaattttatgaaaggtgtttatacagacatctgggattcgattggtatcatcaatggcacaaatcccgatgagaccataatcattggaaatcatagggatgcttggatcatcggtggtgctgcagaccctaacagcggaacagcgattatcgtcgaactctccaaagccttcggaaagcttctggcacaaggatggcgaccaaagcgaaatattgttctcggctcatgggatgccgaagagtatggcctggttgggtcgacggaatgggtcgaagagtatattccatggttaaccaacaccgccatatcataggcaagtaccaaagaatcttccactagtaatgttcctggagctagtcataaaagttgcgtgctaattgccttgcagtatgtaatgttctcatcagctatatatgttcccttgagacttagcaactggagcaattattgacgtggaatttgaaacaacttttagtctcaatatcgacgtaggggcatccggcgcttggccatattttgatgcttcgcctgaattgcatgccgtagcaactaatgtaatgaaaaaggtattatggatggacacggtaagcataatttctcctttggaaagttctcatgtactgataactgattgatctgcatagtatgtattaaatcttagcgctctatatcctgatgatagtgatgttgtggagtcggaatgatttccacatcttaatggaggcccaacgactgacggattgtagcaatcgaacaatgtacgatgcgtggctcgagtacaccggtggttatataggtgttttgggaagcggaagcgattttactgccttcgtgcacaaaggaatcggtgcgattgatgtcagtgcgaacccgggcaacaatgacccagtataccactaccattcaaactacgactcttttcactggatgacgaattttggggacccagagtttcttgctcataagtatatggcacagtatatgagtttactggcttatgaacttgctacgcaagaagccctgcccttaaatgtaacgaattgggctacacagatggaggtctacttccaggatctcgaaactaccgtcaactcgacagcccagagcattgatattagtccattgcgcagtgcacttgatgagtttgctgccagtaccaaagatatagagagtctcgaacagcaagcaggtgcaaccggagatgcggcacttacaacactagtcaatcataagaaacgagacttccagcgaggatttgtctctcaaggaggtctacctaatagggagttcttccagcatctaatatttgctcctggaatagacactggttacgcgccgacgaccttccctggtattacggaggcattcttgagcggaaatatctcgctcgcaacagagttcgtgaaaagaacagctgatgccatcttagttgctgccaacattgtcaagacttagagggcaatagcagatgatctgtcttccgagttgaatacgaatatcctgcacacttgcttccgaccctcagttgtcctacggatatcacactgcaaatgccggccatgaggaacgccttagattgaagcgcataacagaatagtatcgggttccaaaattcttctctcttcgacactagcaaagtggatgctataggtagagcacagttcaattgaatcgatatacaagttgacacacggagaacgtatcagaacaaataatttctgaatcttgtttctttgcaatactttcatcatatagatacttgtagtgccgaccaggctcctcataccttgcacaatgctggactaagtttggcttacatctattatggaagcgtgtatcctccatcgattaccctacaatgacttgagttagcaattcctatttcgtagtgggaaggcttctagattatgttctcgagcattttcggccactcttcagtccagaaagacgagaaaacgagcctggggattccatacatattcgctccagtcatgtaacagcaagcgtcgctagcaaggaatacgtatgcctatcactgcagtcaataaaacagatcctacgcacgattaatgttgggaagcatacactcttcagttcggcagcatgacaaatccgttttccgggtatcatagacatccaatgatcaaatcgctctttcggctgcttcgtgatcactgtgcgaaagcagtcaacttgagattcttgatgtagaagcaagacaagaaaacatactctcggtccatataaatcccggggagatgcagttcacgcgtgcgaagtcgacccattcgacagcaagactcttagctagatgaacaaccgccgcctttgaagcattgtacgcagcctgtgtctgtggaacgtttaccaaaatggcgctgaccgaggctgtgatgatcaagtttcccttgccttgcttcttgaatattttgccagcggcttgagcagtccacatgacaccatcgaagttgacgctattattgtcattccacgtctcttccgtgtattctaggttgggaatattggcgcagacgccggcgttagctaccatgatgtcaagacggccttgtccgaattcctcggcgatcttgttgataactgtggctgcctcgtctcgcttgcgcacatcgcattgaaaagcctctattctcacacctgtgtccgaggcaatctttgctgcgatttcgggggcatctgagcttgtagcatagataagagcaacatcagcgcctgcttccgcgagtccgcgcacaacttcgacaccaatacctctcgcaccgccggtcacagctgctatcttgcccttcaaagagaattgagacaacacgggagtgttgacatcttcaggctcaaatagaggcatcttggaggttagttgaatctgtggtgcgggaaatggtagattgagttgtcagttcgtgaagagcatcttcgggtatgatgaagagtcatgactgattcagtacgggcatgatctctgtaaacattcggctatcttgagcctgagcaacctcgttcgcttccactatcggaatccataaatactccccaatttcggatgttttagcaataaatctagcagtatgcccatgcgccattagacatcggaggtctggggccgacaatgggggtgcttgagagagcaccagtctgagcg

SEQ ID NO: 32241 - DNA, 699 bp, Muscodor strobelii
  misc_feature: SGI cDNA ID NO. 571111
  misc_feature: Encodes the peptide sequence at SEQ ID NO 32242
atgtacgatgcgtggctcgagtacaccggtggttatataggtgttttgggaagcggaagcgattttactgccttcgtgcacaaaggaatcggtgcgattgatgtcagtgcgaacccgggcaacaatgacccagtataccactaccattcaaactacgactcttttcactggatgacgaattttggggacccagagtttcttgctcataagtatatggcacagtatatgagtttactggcttatgaacttgctacgcaagaagccctgcccttaaatgtaacgaattgggctacacagatggaggtctacttccaggatctcgaaactaccgtcaactcgacagcccagagcattgatattagtccattgcgcagtgcacttgatgagtttgctgccagtaccaaagatatagagagtctcgaacagcaagcaggtgcaaccggagatgcggcacttacaacactagtcaatcataagaaacgagacttccagcgaggatttgtctctcaaggaggtctacctaatagggagttcttccagcatctaatatttgctcctggaatagacactggttacgcgccgacgaccttccctggtattacggaggcattcttgagcggaaatatctcgctcgcaacagagttcgtgaaaagaacagctgatgccatcttagttgctgccaacattgtcaagacttag

SEQ ID NO: 32242 - protein, 232 aa, Muscodor strobelii
  misc_feature: SGI Peptide ID NO. 571111
  misc_feature (101)..(232): Pfam Id: PF04253 Pfam Desc: Transferrin receptor-like dimerisation domain
  misc_feature (1)..(230): NCBI GI: 225679085 Blast Desc: N-acetylated-alpha-linked acidic dipeptidase [Paracoccidioides brasiliensis Pb03]
  misc_feature (1)..(232): NCBI GI: 169624598 Blast Desc: SNOG_15558 [Phaeosphaeria nodorum SN15] gi|160705208|gb|EAT76933.2| SNOG_15558 [Phaeosphaeria nodorum SN15]
  misc_feature (1)..(232): NCBI GI: 256723634 Blast Desc: NECHADRAFT_72738 [Nectria haematococca mpVI 77-13-4]
  misc_feature (1)..(230): NCBI GI: 239611396 Blast Desc: glutamate carboxypeptidase [Ajellomyces dermatitidis ER-3]
  misc_feature (1)..(232): NCBI GI: 189199424 Blast Desc: glutamate carboxypeptidase 2 [Pyrenophora tritici-repentis Pt-1C-BFP] gi|187983148|gb|EDU48636.1| glutamate carboxypeptidase 2 [Pyrenophora tritici-repentis Pt-1C-BFP]
  misc_feature (1)..(232): NCBI GI: 39969439 Blast Desc: MGG_10330 [Magnaporthe grisea 70-15] gi|149211305|ref|XP_001523027.1| MGCH7_ch7g1110 [Magnaporthe grisea 70-15] gi|86197065|gb|EAQ71703.1| MGCH7_ch7g1110 grisea
  misc_feature (1)..(232): NCBI GI: 46114544 Blast Desc: FG03114.1 [Gibberella zeae PH-1]
  misc_feature (1)..(230): NCBI GI: 119194137 Blast Desc: CIMG_01443 [Coccidioides immitis RS]
  misc_feature (1)..(230): NCBI GI: 258575321 Blast Desc: conserved [Uncinocarpus reesii 1704] gi|237902108|gb|EEP76509.1| conserved [Uncinocarpus reesii 1704]
  misc_feature (1)..(230): NCBI GI: 240105433 Blast Desc: Transferrin receptor-like dimerization domain containing protein [Coccidioides posadasii C735 delta SOWgp]
  misc_feature (1)..(218): SWISSPROT Homolog: EC 3.4.17.21 Glutamate carboxypeptidase II
MYDAWLEYTGGYIGVLGSGSDFTAFVHKGIGAIDVSANPGNNDPVYHYHSNYDSFHWMTNFGDPEFLAHKYMAQYMSLLAYELATQEALPLNVTNWATQMEVYFQDLETTVNSTAQSIDISPLRSALDEFAASTKDIESLEQQAGATGDAALTTLVNHKKRDFQRGFVSQGGLPNREFFQHLIFAPGIDTGYAPTTFPGITEAFLSGNISLATEFVKRTADAILVAANIVKT

SEQ ID NO: 32243 - DNA, 3821 bp, Muscodor strobelii; identical to SEQ ID NO: 32240
  misc_feature: SGI EST ID NO. CUFF.76361.0
  misc_feature: Variant of the nucleotide sequence at SEQ ID NO 32241

SEQ ID NO: 32244 - DNA, 804 bp, Muscodor strobelii
  misc_feature: SGI cDNA ID NO. 571112
  misc_feature: Elevated expression when VOC is produced
  misc_feature: Encodes the peptide sequence at SEQ ID NO 32245
atgcctctatttgagcctgaagatgtcaacactcccgtgttgtctcaattctctttgaagggcaagatagcagctgtgaccggcggtgcgagaggtattggtgtcgaagttgtgcgcggactcgcggaagcaggcgctgatgttgctcttatctatgctacaagctcagatgcccccgaaatcgcagcaaagattgcctcggacacaggtgtgagaatagaggcttttcaatgcgatgtgcgcaagcgagacgaggcagccacagttatcaacaagatcgccgaggaattcggacaaggccgtcttgacatcatggtagctaacgccggcgtctgcgccaatattcccaacctagaatacacggaagagacgtggaatgacaataatagcgtcaacttcgatggtgtcatgtggactgctcaagccgctggcaaaatattcaagaagcaaggcaagggaaacttgatcatcacagcctcggtcagcgccattttggtaaacgttccacagacacaggctgcgtacaatgcttcaaaggcggcggttgttcatctagctaagagtcttgctgtcgaatgggtcgacttcgcacgcgtgaactgcatctccccgggatttatatggaccgagatgatcacgaagcagccgaaagagcgatttgatcattggatgtctatgatacccggaaaacggatttgtcatgctgccgaactgaagagtgcatacgtattccttgctagcgacgcttgctgttacatgactggagcgaatatggtaatcgatggaggatacacgcttccataa

SEQ ID NO: 32245 - protein, 267 aa, Muscodor strobelii
  misc_feature: SGI Peptide ID NO. 571112
  misc_feature (22)..(194): Pfam Id: PF00106 Pfam Desc: short chain dehydrogenase
  misc_feature (26)..(199): Pfam Id: PF08659 Pfam Desc: KR domain
  misc_feature (26)..(98): Pfam Id: PF08659 Pfam Desc: KR domain
  misc_feature (1)..(267): NCBI GI: 256723851 Blast Desc: NECHADRAFT_37143 [Nectria haematococca mpVI 77-13-4]
  misc_feature (1)..(267): NCBI GI: 169784932 Blast Desc: [Aspergillus oryzae RIB40] gi|83775674|dbj|BAE65794.1| protein product [Aspergillus oryzae]
  misc_feature (1)..(267): NCBI GI: 238507836 Blast Desc: oxidoreductase, short chain dehydrogenase/reductase family [Aspergillus flavus NRRL3357] gi|220688638|gb|EED44990.1| oxidoreductase, short chain dehydrogenase/reductase family flavus
  misc_feature (1)..(267): NCBI GI: 70992821 Blast Desc: oxidoreductase, short chain dehydrogenase/reductase family [Aspergillus fumigatus Af293] gi|66848892|gb|EAL89221.1| oxidoreductase, short chain dehydrogenase/reductase family Af293]
  misc_feature (1)..(267): NCBI GI: 159130286 Blast Desc: oxidoreductase, short chain dehydrogenase/reductase family [Aspergillus fumigatus A1163]
  misc_feature (1)..(267): NCBI GI: 169777589 Blast Desc: [Aspergillus oryzae RIB40] gi|83771997|dbj|BAE62127.1| protein product [Aspergillus oryzae]
  misc_feature (1)..(267): NCBI GI: 145240629 Blast Desc: An08g08480 [Aspergillus niger] gi|134077484|emb|CAK40049.1| protein product [Aspergillus niger]
  misc_feature (1)..(267): NCBI GI: 255946690 Blast Desc: Pc22g00670 [Penicillium chrysogenum Wisconsin 54-1255] gi|211591129|emb|CAP97355.1| Pc22g00670 [Penicillium chrysogenum Wisconsin 54-1255]
  misc_feature (1)..(267): NCBI GI: 119473131 Blast Desc: oxidoreductase, short chain dehydrogenase/reductase family [Neosartorya fischeri NRRL 181] gi|119406664|gb|EAW16615.1| oxidoreductase, short chain family
  misc_feature (1)..(267): NCBI GI: 115390198 Blast Desc: conserved [Aspergillus terreus NIH2624] gi|114195000|gb|EAU36700.1| conserved [Aspergillus terreus NIH2624]
  misc_feature (10)..(265): SWISSPROT Homolog: EC 1.1.1.138 Mannitol 2-dehydrogenase (NADP(+))
  misc_feature: Useful for introducing or modulating the production of volatile compounds
MPLFEPEDVNTPVLSQFSLKGKIAAVTGGARGIGVEVVRGLAEAGADVALIYATSSDAPEIAAKIASDTGVRIEAFQCDVRKRDEAATVINKIAEEFGQGRLDIMVANAGVCANIPNLEYTEETWNDNNSVNFDGVMWTAQAAGKIFKKQGKGNLIITASVSAILVNVPQTQAAYNASKAAVVHLAKSLAVEWVDFARVNCISPGFIWTEMITKQPKERFDHWMSMIPGKRICHAAELKSAYVFLASDACCYMTGANMVIDGGYTLP

SEQ ID NO: 32246 - DNA, 1982 bp, Muscodor strobelii
  misc_feature: SGI EST ID NO. CUFF.76362.2
  misc_feature: Variant of the nucleotide sequence at SEQ ID NO 32244
ctctctcaagcacccccattgtcggccccagacctccgatgtctaatggcgcatgggcatactgctagatttattgctaaaacatccgaaattggggagtatttatggattccgatagtggaagcgaacgaggttgctcaggctcaagatagccgaatgtttacagagatcatgcccgtactgaatcagtcatgactcttcatcatacccgaagatgctcttcacgaactgacaactcaatctaccatttcccgcaccacagattcaactaacctccaagatgcctctatttgagcctgaagatgtcaacactcccgtgttgtctcaattctctttgaagggcaagatagcagctgtgaccggcggtgcgagaggtattggtgtcgaagttgtgcgcggactcgcggaagcaggcgctgatgttgctcttatctatgctacaagctcagatgcccccgaaatcgcagcaaagattgcctcggacacaggtgtgagaatagaggcttttcaatgcgatgtgcgcaagcgagacgaggcagccacagttatcaacaagatcgccgaggaattcggacaaggccgtcttgacatcatggtagctaacgccggcgtctgcgccaatattcccaacctagaatacacggaagagacgtggaatgacaataatagcgtcaacttcgatggtgtcatgtggactgctcaagccgctggcaaaatattcaagaagcaaggcaagggaaacttgatcatcacagcctcggtcagcgccattttggtaaacgttccacagacacaggctgcgtacaatgcttcaaaggcggcggttgttcatctagctaagagtcttgctgtcgaatgggtcgacttcgcacgcgtgaactgcatctccccgggatttatatggaccgagatgatcacgaagcagccgaaagagcgatttgatcattggatgtctatgatacccggaaaacggatttgtcatgctgccgaactgaagagtgcatacgtattccttgctagcgacgcttgctgttacatgactggagcgaatatggtaatcgatggaggatacacgcttccataatagatgtaagccaaacttagtccagcattgtgcaaggtatgaggagcctggtcggcactacaagtatctatatgatgaaagtattgcaaagaaacaagattcagaaattatttgttctgatacgttctccgtgtgtcaacttgtatatcgattcaattgaactgtgctctacctatagcatccactttgctagtgtcgaagagagaagaattttggaacccgatactattctgttatgcgcttcaatctaaggcgttcctcatggccggcatttgcagtgtgatatccgtaggacaactgagggtcggaagcaagtgtgcaggatattcgtattcaactcggaagacagatcatctgctattgccctctaagtcttgacaatgttggcagcaactaagatggcatcagctgttcttttcacgaactctgttgcgagcgagatatttccgctcaagaatgcctccgtaataccagggaaggtcgtcggcgcgtaacctgtttggtcgtggttaatacagttcttccactagataaaaacgactcaccagtgtctattccaggagcaaatattagatgctggaagaactccctattaggtagacctccttgagagacaaatcctcgctggaagtctcgtttcttatgattgactagtgttgtaagtgccgcatctccggttgcacctgcttgctgttcgagactctctatatctttggtactggcagcaaactcatcaagtgcactgcgcaatggactaatatcaatgctctgggctgtcgagttgacggtagtttcgagatcctggaagtagacctccatctgtgtagcccaattcgttacatttaagggcagggcttcttgcgtagcaagttcataagccagtaaactcatatactac

SEQ ID NO: 32247 - DNA, 771 bp, Muscodor strobelii
  misc_feature: SGI cDNA ID NO. 571113
  misc_feature: Encodes the peptide sequence at SEQ ID NO 32248
atgggtgtctcactctcaaccgcgcgatggctcgcgcctacatcattcgtgattgatttcgcagcccaacaatacggaatgctgagcaaaccaaacatgaaagatgtgcacgacgcgaatctatcgttcttcagtccacagccattcttcattgctggcttcttcttccctcagcagatcttccaagtcatctggctgtggaagctgtggcgcgcaacaccagaaaaggtagcgacggatcgttcggttgcgcaaatggtcgattttgcgccttattactcgattggaaacctctgtattgcgacatggatgattttctggaataactcagacctaaagacttccaatatcttcgtcattataaattcgcttgcccagctttactacgtatttgggcgactaccaaggatgaacccgaattcgtgggactcgatcttgacccatgttgtatcaaaaacgtttgctggcattggtgtcctcgatcttctccacaacgggtctgttgcatacgctgttggacagcaacccacgaccttggtcaaagttctaacggggcttggatttggtatcctttccgcatcaagcgactggatttttggaggctgtttggtgtatgatttagtcgctctttctgtcggacagagtatctatggcaatcagtcatggagccaactccttggtgtattcgctgcgggatccgctggcattgttggattgaagaactggatcagacccccgtatattagagatgtcgagtatcaaccagtatga

SEQ ID NO: 32248 - protein, 256 aa, Muscodor strobelii
  misc_feature: SGI Peptide ID NO. 571113
  misc_feature (1)..(222): NCBI GI: 256731482 Blast Desc: NECHADRAFT_84975 [Nectria haematococca mpVI 77-13-4]
  misc_feature (1)..(244): NCBI GI: 145611532 Blast Desc: [Magnaporthe grisea 70-15] gi|145018806|gb|EDK03085.1| [Magnaporthe grisea 70-15]
  misc_feature (33)..(255): NCBI GI: 154319197 Blast Desc: BC1G_02550 [Botryotinia fuckeliana B05.10] gi|150856981|gb|EDN32173.1| BC1G_02550 [Botryotinia fuckeliana B05.10]
  misc_feature (1)..(245): NCBI GI: 189207889 Blast Desc: conserved [Pyrenophora tritici-repentis Pt-1C-BFP] gi|187976371|gb|EDU42997.1| conserved [Pyrenophora tritici-repentis Pt-1C-BFP]
  misc_feature (9)..(226): NCBI GI: 169615196 Blast Desc: SNOG_10754 [Phaeosphaeria nodorum SN15] gi|111061028|gb|EAT82148.1| SNOG_10754 [Phaeosphaeria nodorum SN15]
  misc_feature (99)..(242): NCBI GI: 256725110 Blast Desc: NECHADRAFT_88559 [Nectria haematococca mpVI 77-13-4]
  misc_feature (121)..(256): NCBI GI: 261361127 Blast Desc: conserved [Verticillium albo-atrum VaMs.102]
  misc_feature (1)..(248): NCBI GI: 242212395 Blast Desc: [Postia placenta Mad-698-R] gi|220728854|gb|EED82739.1| [Postia placenta Mad-698-R]
  misc_feature (1)..(248): NCBI GI: 242207471 Blast Desc: [Postia placenta Mad-698-R] gi|220731393|gb|EED85238.1| [Postia placenta Mad-698-R]
  misc_feature (1)..(119): NCBI GI: 145611534 Blast Desc: MGG_11603 [Magnaporthe grisea 70-15] gi|145018807|gb|EDK03086.1| MGG_11603 [Magnaporthe grisea 70-15]
MGVSLSTARWLAPTSFVIDFAAQQYGMLSKPNMKDVHDANLSFFSPQPFFIAGFFFPQQIFQVIWLWKLWRATPEKVATDRSVAQMVDFAPYYSIGNLCIATWMIFWNNSDLKTSNIFVIINSLAQLYYVFGRLPRMNPNSWDSILTHVVSKTFAGIGVLDLLHNGSVAYAVGQQPTTLVKVLTGLGFGILSASSDWIFGGCLVYDLVALSVGQSIYGNQSWSQLLGVFAAGSAGIVGLKNWIRPPYIRDVEYQPV

SEQ ID NO: 32249 - DNA, 1854 bp, Muscodor strobelii
  misc_feature: SGI EST ID NO. CUFF.76348.0
  misc_feature: Variant of the nucleotide sequence at SEQ ID NO 32247
gtagcgacggatcgttcggttgcgcaaatggtcgattttgcgccttattactcgattggaaacctctgtattgcgacatggatgattttctggaataactcagacctaaagacttccaatatcttcgtcattataaattcgcttgcccagctttactacgtatttgggcgactaccaaggatgaacccgaattcgtgggactcgatcttgacccatgttgtatcaaaaacgtttgctggcattggtgtcctcgatcttctccacaacgggtctgttgcatacgctgttggacagcaacccacgaccttggtcaaagttctaacggggcttggatttggtatcctttccgcatcaagcgactggatttttggaggctgttgtaagtcaaacattctttatcttcttcagacgactgctatattgttttctcctcctcgggggaacttgtgccaaaacttgtcacaagtggtgtatgatttagtcgctctttctgtcggacagagtatctatggcaatcagtcatggagccaactccttggtgtattcgctgcgggatccgctggcattgttggattgaagaactggatcagacccccgtatattagagatgtcgagtatcaaccagtatgaaggcggttcatcggtgtagatatagcaaattagcagaatttgtataatattgtaattcgtccaagtacatgaccacatctcactaagactattatgcttctctgaataccttgaggcctaccgaggtatgtggagacaaactcaatttgcctggagaaatttgctgcttcaccttaaaccttttcagcgtgctcggcagccagcagagaacttttgtaatctcttccactttgccgttcaatgtctttcgaagctttgtcgataatggtagtatggtacgtcttaaaatttcggacagagactcggttgttgaacaactcgtcaatttcctccaacgaccgacctttagtctctgggacaagcagatagaagaacgcaaagcaggcaagattagaagcagcccatatatacccatacttggcgccctgtataactcatcagcttgcaaacaagacgcattctactcagaggcacgtacccaattgaggtattcggggttaatgaaataaggcgacgtaaaactatcttgtgctgactagttcagtcgatgttggatatgtcgcatcgccaacaaatgcgttatatgagaaattgtagatagcgaggaaggcgataaggcagtttttagccgcatatgtcccaggtgcaacagtggccgaaacagccaaacctagcatagcagagccttgcgcgatcgcgccaatcatgagaacagtccttcgacccatcacgtgtcgcattagatacattccaatgttaacaccgatgaatccaaggacggtgtttatgacagagtatttgaaagcctcgtcgacggacagcccggccacaatgaagaaacagcttgctataagaagtgacagaacatccagggattcaagtaaccaggctacataccgaaccggcttgtgtggcaatcacaccaaaacagagtagcgttcgtctcaattcagtccctatttaatgagtcagatatttgaaagtgtctggtaatgttctccatacctttaaacatatccaaaggcccaatggtcttcgccattcgtttctcctcctcaatacctttcaccatttcaacccattccagctctagctcctctgataatagcgaattacctctcaaggcctcgagagctttcctggctgcctcagagtggcccttatacagcagatatcgcgggctctctggaacaaaaataaggccaatcgacagaacagttggta

SEQ ID NO: 32250 - DNA, 735 bp, Muscodor strobelii
  misc_feature: SGI cDNA ID NO. 571114
  misc_feature: Encodes the peptide sequence at SEQ ID NO 32251
atgggtgtctcactctcaaccgcgcgatggctcgcgcctacatcattcgtgattgatttcgcagcccaacaatacggaatgctgagcaaaccaaacatgaaagatgtgcacgacgcgaatctatcgttcttcagtccacagccattcttcattgctggcttcttcttccctcagcagatcttccaagtcatctggctgtggaagctgtggcgcgcaacaccagaaaaggtagcgacggatcgttcggttgcgcaaatggtcgattttgcgccttattactcgattggaaacctctgtattgcgacatggatgattttctggaataactcagacctaaagacttccaatatcttcgtcattataaattcgcttgcccagctttactacgtatttgggcgactaccaaggatgaacccgaattcgtgggactcgatcttgacccatgttgtatcaaaaacgtttgctggcattggtgtcctcgatcttctccacaacgggtctgttgcatacgctgttggacagcaacccacgaccttggtcaaagttctaacggggcttggatttggtatcctttccgcatcaagcgactggatttttggaggctgtttggtgtatgatttagtcgctctttctgtcggacagagtatctatggcaatcagtcatggagccaactccttggtgtattcgctgcgggatccgctggcattgttggattgaagaactggatcaggtag

SEQ ID NO: 32251 - protein, 244 aa, Muscodor strobelii
  misc_feature: SGI Peptide ID NO. 571114
  misc_feature (1)..(222): NCBI GI: 256731482 Blast Desc: NECHADRAFT_84975 [Nectria haematococca mpVI 77-13-4]
  misc_feature (1)..(244): NCBI GI: 145611532 Blast Desc: [Magnaporthe grisea 70-15] gi|145018806|gb|EDK03085.1| [Magnaporthe grisea 70-15]
  misc_feature (33)..(244): NCBI GI: 154319197 Blast Desc: BC1G_02550 [Botryotinia fuckeliana B05.10] gi|150856981|gb|EDN32173.1| BC1G_02550 [Botryotinia fuckeliana B05.10]
  misc_feature (1)..(241): NCBI GI: 189207889 Blast Desc: conserved [Pyrenophora tritici-repentis Pt-1C-BFP] gi|187976371|gb|EDU42997.1| conserved [Pyrenophora tritici-repentis Pt-1C-BFP]
  misc_feature (9)..(226): NCBI GI: 169615196 Blast Desc: SNOG_10754 [Phaeosphaeria nodorum SN15] gi|111061028|gb|EAT82148.1| SNOG_10754 [Phaeosphaeria nodorum SN15]
  misc_feature (99)..(242): NCBI GI: 256725110 Blast Desc: NECHADRAFT_88559 [Nectria haematococca mpVI 77-13-4]
  misc_feature (1)..(243): NCBI GI: 242212395 Blast Desc: [Postia placenta Mad-698-R] gi|220728854|gb|EED82739.1| [Postia placenta Mad-698-R]
  misc_feature (1)..(243): NCBI GI: 242207471 Blast Desc: [Postia placenta Mad-698-R] gi|220731393|gb|EED85238.1| [Postia placenta Mad-698-R]
  misc_feature (121)..(244): NCBI GI: 261361127 Blast Desc: conserved [Verticillium albo-atrum VaMs.102]
  misc_feature (1)..(119): NCBI GI: 145611534 Blast Desc: MGG_11603 [Magnaporthe grisea 70-15] gi|145018807|gb|EDK03086.1| MGG_11603 [Magnaporthe grisea 70-15]
MGVSLSTARWLAPTSFVIDFAAQQYGMLSKPNMKDVHDANLSFFSPQPFFIAGFFFPQQIFQVIWLWKLWRATPEKVATDRSVAQMVDFAPYYSIGNLCIATWMIFWNNSDLKTSNIFVIINSLAQLYYVFGRLPRMNPNSWDSILTHVVSKTFAGIGVLDLLHNGSVAYAVGQQPTTLVKVLTGLGFGILSASSDWIFGGCLVYDLVALSVGQSIYGNQSWSQLLGVFAAGSAGIVGLKNWIR

SEQ ID NO: 32252 - DNA, 1854 bp, Muscodor strobelii; identical to SEQ ID NO: 32249
  misc_feature: SGI EST ID NO. CUFF.76348.0
  misc_feature: Variant of the nucleotide sequence at SEQ ID NO 32250

SEQ ID NO: 32253 - DNA, 1575 bp, Muscodor strobelii
  misc_feature: SGI cDNA ID NO. 571115
  misc_feature: Encodes the peptide sequence at SEQ ID NO 32254
atgtcgacacctaaactcgccgaaacttccctttgggcgaataggaaatgtcttgttatatgtgcagtcgtagccattgccaatatgcaatacggccttgattctgcgtgtataggagcgttacaggccattccaggatttctccaggttttcggctatccagatccttcccagcaaggcggctatggcatagatgccacatttcagcaactcataagctccttggtaacattaggtgcctttctgtcctcgctactggccggcgcattcgctcattacttcggccgcaaacctgcgttatggtcagcatgtgttctcaatatagtcgcttgtataattcagatcgcaacaacaaacaaaattgccgtgtacattgggcgcctggttcttggtatatcgaatggattcttggtgacattttcgaacatatatacagccgaggcatcgccagctcatttgcgtgccgtcatggtggctctgttttctgaatgggttaacattggcagtataataggcactgctgttacaaacgagacgaaaaattatctgagcaaggtatcttacgagataccgctggggattctctttattgtaccaactgttctgtcgattggccttatttttgttccagagagcccgcgatatctgctgtataagggccactctgaggcagccaggaaagctctcgaggccttgagaggtaattcgctattatcagaggagctagagctggaatgggttgaaatggtgaaaggtattgaggaggagaaacgaatggcgaagaccattgggcctttggatatgtttaaagggactgaattgagacgaacgctactctgttttggtgtgattgccacacaagccggttcgggttcatggtttgtcattagctatgcgacgtacttcttcattgtggccgggctgtccgtcgacgaggctttcaaatactctgtcataaacaccgtccttggattcatcggtgttaacattggaatgtatctaatgcgacacgtgatgggtcgaaggactgttctcatgattggcgcgatcgcgcaaggctctgctatgctaggtttggctgtttcggccactgttgcacctgggacatatgcggctaaaaactgccttatcgccttcctcgctatctacaatttctcatataacgcatttgttggcgatgcgacatatccaacatcgactgaactagtcagcacaagactgcgatcctgggcagttggatcagctattagtctaggatatttgctggcgtggctcactagttttacgtcgccttatttcattaaccccgaatacctcaattggggcgccaagtatgggtatatatgggctgcttctaatcttgcctgctttgcgttcttctatctgcttgtcccagagactaaaggtcggtcgttggaggaaattgacgagttgttcaacaaccgagtctctgtccgaaattttaagacgtaccatactaccattatcgacaaagcttcgaaagacattgaacggcaaagtggaagagattacaaaagttctctgctggctgccgagcacgctgaaaaggtttaa

SEQ ID NO: 32254 - protein, 524 aa, Muscodor strobelii
  misc_feature: SGI Peptide ID NO. 571115
  misc_feature (18)..(431): Pfam Id: PF07690 Pfam Desc: Major Facilitator Superfamily
  misc_feature (20)..(479): Pfam Id: PF00083 Pfam Desc: Sugar (and other) transporter
  misc_feature (1)..(510): NCBI GI: 238492981 Blast Desc: sugar transporter, [Aspergillus flavus NRRL3357] gi|220696221|gb|EED52563.1| sugar transporter, [Aspergillus flavus NRRL3357]
  misc_feature (5)..(498): NCBI GI: 189203421 Blast Desc: maltose permease MAL61 [Pyrenophora tritici-repentis Pt-1C-BFP] gi|187985145|gb|EDU50633.1| maltose permease MAL61 [Pyrenophora tritici-repentis Pt-1C-BFP]
  misc_feature (6)..(503): NCBI GI: 169602923 Blast Desc: SNOG_04466 [Phaeosphaeria nodorum SN15] gi|111067106|gb|EAT88226.1| SNOG_04466 [Phaeosphaeria nodorum SN15]
  misc_feature (4)..(523): NCBI GI: 212532729 Blast Desc: maltose permease, [Penicillium marneffei ATCC 18224] gi|210071885|gb|EEA25974.1| maltose permease, [Penicillium marneffei ATCC 18224]
  misc_feature (4)..(510): NCBI GI: 189207749 Blast Desc: conserved [Pyrenophora tritici-repentis Pt-1C-BFP] gi|187976301|gb|EDU42927.1| conserved [Pyrenophora tritici-repentis Pt-1C-BFP]
  misc_feature (1)..(524): NCBI GI: 256726309 Blast Desc: NECHADRAFT_94696 [Nectria haematococca mpVI 77-13-4]
  misc_feature (7)..(492): NCBI GI: 46115710 Blast Desc: FG03697.1 [Gibberella zeae PH-1]
  misc_feature (4)..(523): NCBI GI: 116194081 Blast Desc: CHGG_06758 [Chaetomium globosum CBS 148.51] gi|88182671|gb|EAQ90139.1| CHGG_06758 [Chaetomium globosum CBS 148.51]
  misc_feature (13)..(452): NCBI GI: 164424540 Blast Desc: NCU07054 [Neurospora crassa OR74A] gi|157070557|gb|EAA30900.2| conserved [Neurospora crassa OR74A]
  misc_feature (10)..(509): NCBI GI: 256729574 Blast Desc: NECHADRAFT_47283 [Nectria haematococca mpVI 77-13-4]
MSTPKLAETSLWANRKCLVICAVVAIANMQYGLDSACIGALQAIPGFLQVFGYPDPSQQGGYGIDATFQQLISSLVTLGAFLSSLLAGAFAHYFGRKPALWSACVLNIVACIIQIATTNKIAVYIGRLVLGISNGFLVTFSNIYTAEASPAHLRAVMVALFSEWVNIGSIIGTAVTNETKNYLSKVSYEIPLGILFIVPTVLSIGLIFVPESPRYLLYKGHSEAARKALEALRGNSLLSEELELEWVEMVKGIEEEKRMAKTIGPLDMFKGTELRRTLLCFGVIATQAGSGSWFVISYATYFFIVAGLSVDEAFKYSVINTVLGFIGVNIGMYLMRHVMGRRTVLMIGAIAQGSAMLGLAVSATVAPGTYAAKNCLIAFLAIYNFSYNAFVGDATYPTSTELVSTRLRSWAVGSAISLGYLLAWLTSFTSPYFINPEYLNWGAKYGYIWAASNLACFAFFYLLVPETKGRSLEEIDELFNNRVSVRNFKTYHTTIIDKASKDIERQSGRDYKSSLLAAEHAEKV

SEQ ID NO: 32255 - DNA, 1066 bp, Muscodor strobelii
  misc_feature: SGI EST ID NO. CUFF.76349.2
  misc_feature: Variant of the nucleotide sequence at SEQ ID NO 32253
gtcattagctatgcgacgtacttcttcattgtggccgggctgtccgtcgacgaggctttcaaatactctgtcataaacaccgtccttggattcatcggtgttaacattggaatgtatctaatgcgacacgtgatgggtcgaaggactgttctcatgattggcgcgatcgcgcaaggctctgctatgctaggtttggctgtttcggccactgttgcacctgggacatatgcggctaaaaactgccttatcgccttcctcgctatctacaatttctcatataacgcatttgttggcgatgcgacatatccaacatcgactgaactagtcagcacaagactgcgatcctgggcagttggatcagctattagtctaggatatttgctggcgtggctcactagttttacgtcgccttatttcattaaccccgaatacctcaattggggcgccaagtatgggtatatatgggctgcttctaatcttgcctgctttgcgttcttctatctgcttgtcccagagactaaaggtcggtcgttggaggaaattgacgagttgttcaacaaccgagtctctgtccgaaattttaagacgtaccatactaccattatcgacaaagcttcgaaagacattgaacggcaaagtggaagagattacaaaagttctctgctggctgccgagcacgctgaaaaggtttaaggtgaagcagcaaatttctccaggcaaattgagtttgtctccacatacctcggtaggcctcaaggtattcagagaagcataatagtcttagtgagatgtggtcatgtacttggacgaattacaatattatacaaattctgctaatttgctatatctacaccgatgaaccgccttcatactggttgatactcgacatctctaatatacgggggtcttgtaggtgattagtcgctctaatcggacttgttggcgggacaggcgtctgcctacctgatccagttcttcaatccaacaatgccagcggatcccgcagcgaatacaccaaggagttggctccatgactgattgccatagatactctgtccgacagaaa

SEQ ID NO: 32256 - DNA, 1281 bp, Muscodor strobelii
  misc_feature: SGI cDNA ID NO. 571116
  misc_feature: Reduced expression when VOC is produced
  misc_feature: Encodes the peptide sequence at SEQ ID NO 32257
atgaggttctccgtgctagcagtcggcctcacggccctgcttgcgcctctgaccgccgcgtggtcgaaagaagaccgtgagatcttccgcgttcgcgacgagctagccacgcacgagggcgccaatgtgaccttctacgacttcctcggcgtcaagccgtcggcctcgctcgaagagatcaacaaggcgtacaagaagaagacggtggcgctgcacccggacaaggtcaagcagcgcgtcatagcggagcaggccaagaagaagaagaacaaggacaagaagcccggcgtcaacgtgtcccggcccccgtcccagtccaccatcaaggccgaggtcaagaaggccagcgaccgccaggcccgcctgtccatcgtcaccaacgtcctgcgcgggcccggccgcgaccgctacgaccacttcctcgccaacggcttccccacctggaagggcaccgagtactactacagccgctatcgcccgggcctcggcaccgtgctggccggctgtctgctcgtcatgggcggcggcttccactacctggccctgtacatgagctggaagcggcagcgcgatttcgtcgagcgctacgtcaagttcgcacgacacaccgcctggggcgacaacctcaacatcaccggcgtcgacaccaccaccgccgcacctgcgcagcccccgacccctcccccaggcgacgaggaccagccacagatggcgctgaaccgcaagcagcgacgcatgcaagagaaggagtcccgcagggagtcggccaaggaagggaagcaatcccgccgcaccaggggccgaggtgcacagcaggccagcggcagtgctacacccgtgccccaatcccagaaccagtctcctggtcccaccggcaccaggaagcgcgtccaggccgagaacggcaaggtcctcatcgttgactccctaggtgacgtctatctcgagcaagaagacgaggaaggacacgttattgaattccttctagatcctaatgagctccctgctcctacgattcacgacacgatgctcttcaagctccccggatggatctacggtgccgttaccggcaagaagaccaaagcgccagcatccgaagaagtcgaggagctcgaggatgacagttcggactcgaacccgccgcagcacacaccctcaactggctccactgatgacttcgagttcctcgagaagagcgtcgatgagttgcccaaatccaagaccactagtagccaggcgcagagcggtggaaagtcgaagaagagaaacaagaagaggtag

SEQ ID NO: 32257 - protein, 426 aa, Muscodor strobelii
  misc_feature: SGI Peptide ID NO. 571116
  misc_feature (44)..(138): Pfam Id: PF00226 Pfam Desc: DnaJ domain
  misc_feature (44)..(85): Pfam Id: PF00226 Pfam Desc: DnaJ domain
  misc_feature (1)..(426): NCBI GI: 39972843 Blast Desc: MGG_07716 [Magnaporthe grisea 70-15] gi|145012483|gb|EDJ97137.1| MGG_07716 [Magnaporthe grisea 70-15]
  misc_feature (1)..(426): NCBI GI: 116181046 Blast Desc: CHGG_01151 [Chaetomium globosum CBS 148.51] gi|88185448|gb|EAQ92916.1| CHGG_01151 [Chaetomium globosum CBS 148.51]
  misc_feature (1)..(426): NCBI GI: 171695834 Blast Desc: protein product [Podospora anserina] gi|170948159|emb|CAP60323.1| protein product [Podospora anserina]
  misc_feature (11)..(426): NCBI GI: 38567099 Blast Desc: [Neurospora crassa]
  misc_feature (25)..(426): NCBI GI: 164427927 Blast Desc: NCU02490 [Neurospora crassa OR74A] gi|157071939|gb|EAA35848.2| NCU02490 [Neurospora crassa OR74A]
  misc_feature (1)..(426): NCBI GI: 256733090 Blast Desc: [Nectria haematococca mpVI 77-13-4]
  misc_feature (1)..(426): NCBI GI: 46125963 Blast Desc: FG07359.1 [Gibberella zeae PH-1]
  misc_feature (1)..(390): NCBI GI: 115400944 Blast Desc: conserved [Aspergillus terreus NIH2624] gi|114190001|gb|EAU31701.1| conserved [Aspergillus terreus NIH2624]
  misc_feature (1)..(367): NCBI GI: 119467944 Blast Desc: DnaJ domain protein [Neosartorya fischeri NRRL 181] gi|119405930|gb|EAW15881.1| DnaJ domain protein [Neosartorya fischeri NRRL 181]
  misc_feature (1)..(367): NCBI GI: 70991409 Blast Desc: endoplasmic reticulum DnaJ domain protein Erj5 [Aspergillus fumigatus Af293] gi|66848186|gb|EAL88515.1| endoplasmic reticulum DnaJ domain protein Erj5, [Aspergillus
  misc_feature: Useful for introducing or modulating the production of volatile compounds
MRFSVLAVGLTALLAPLTAAWSKEDREIFRVRDELATHEGANVTFYDFLGVKPSASLEEINKAYKKKTVALHPDKVKQRVIAEQAKKKKNKDKKPGVNVSRPPSQSTIKAEVKKASDRQARLSIVTNVLRGPGRDRYDHFLANGFPTWKGTEYYYSRYRPGLGTVLAGCLLVMGGGFHYLALYMSWKRQRDFVERYVKFARHTAWGDNLNITGVDTTTAAPAQPPTPPPGDEDQPQMALNRKQRRMQEKESRRESAKEGKQSRRTRGRGAQQASGSATPVPQSQNQSPGPTGTRKRVQAENGKVLIVDSLGDVYLEQEDEEGHVIEFLLDPNELPAPTIHDTMLFKLPGWIYGAVTGKKTKAPASEEVEELEDDSSDSNPPQHTPSTGSTDDFEFLEKSVDELPKSKTTSSQAQSGGKSKKRNKKR

SEQ ID NO: 32258 - DNA, 1604 bp, Muscodor strobelii
  misc_feature: SGI EST ID NO. CUFF.76355.0
  misc_feature: Variant of the nucleotide sequence at SEQ ID NO 32256
actttttccccttccgcccagacgatacccacgcttgggatacactgatggtgccattggtcaaaccgccggcgtctgtaccacctgtataatatagaggagaatcctgtaccttttccaaggctgtgctgatcggcagatctcgcccattactctgtcactcactcgctcggtcactcgatcgctagctgggcggcagcgacaccgacgccatgaggttctccgtgctagcagtcggcctcacggccctgcttgcgcctctgaccgccgcgtggtcgaaagaagaccgtgagatcttccgcgttcgcgacgagctagccacgcacgagggcgccaatgtgaccttctacgacttcctcggcgtcaagccgtcggcctcgctcgaagagatcaacaaggcgtacaagaagaagacggtggcgctgcacccggacaaggtcaagcagcgcgtcatagcggagcaggccaagaagaagaagaacaaggacaagaagcccggcgtcaacgtgtcccggcccccgtcccagtccaccatcaaggccgaggtcaagaaggccagcgaccgccaggcccgcctgtccatcgtcaccaacgtcctgcgcgggcccggccgcgaccgctacgaccacttcctcgccaacggcttccccacctggaagggcaccgagtactactacagccgctatcgcccgggcctcggcaccgtgctggccggctgtctgctcgtcatgggcggcggcttccactacctggccctgtacatgagctggaagcggcagcgcgatttcgtcgagcgctacgtcaagttcgcacgacacaccgcctggggcgacaacctcaacatcaccggcgtcgacaccaccaccgccgcacctgcgcagcccccgacccctcccccaggcgacgaggaccagccacagatggcgctgaaccgcaagcagcgacgcatgcaagagaaggagtcccgcagggagtcggccaaggaagggaagcaatcccgccgcaccaggggccgaggtgcacagcaggccagcggcagtgctacacccgtgccccaatcccagaaccagtctcctggtcccaccggcaccaggaagcgcgtccaggccgagaacggcaaggtcctcatcgttgactccctaggtgacgtctatctcgagcaagaagacgaggaaggacacgttattgaattccttctagatcctaatgagctccctgctcctacgattcacgacacgatgctcttcaagctccccggatggatctacggtgccgttaccggcaagaagaccaaagcgccagcatccgaagaagtcgaggagctcgaggatgacagttcggactcgaacccgccgcagcacacaccctcaactggctccactgatgacttcgagttcctcgagaagagcgtcgatgagttgcccaaatccaagaccactagtagccaggcgcagagcggtggaaagtcgaagaagagaaacaagaagaggtagccttcatatcgcctatttcaatcgttttaaagagcatatctggggtcacattatcgcagttaaacatatagacatatatatattatcctgggagaatctatcttatcatca

SEQ ID NO: 32259 - DNA, 1578 bp, Muscodor strobelii
  misc_feature: SGI cDNA ID NO. 571117
  misc_feature: Encodes the peptide sequence at SEQ ID NO 32260
atgtcggctaacgaagatgcttcgtgggtgcaagttctgttagatcaaggatttatagttctagctctgacagtgatcgtgacgtatacaacgtctcggtgcatttatctgctatatttccacccgttgtcgaaatttccaggccccaaaattgcagccgtttcgaacatttggtacggatatcactggttctctcagcgatggccatgggcagttgagaatgccctgaaaaagtacggtaatgttgtaagaattggacctaacgaacttgcatttgggcacccacaagcctcgatagatatttacggtgcacacgacaagagtctcgaaacgttcgtcaaaacagacatcaatgattatgctcaagacaaagatggcggtatcatctggcaacaagatcccgtcagacatcgccgaatagccaagcaaatggcgccagctttcagtcagaaagcaacgcgagtgaaggattctatcctatatcgatatgccgacatattcgtcaagaagataaccgagcacagtggagataaagaaggtatcagtcttccaacttgggtgcaatggctagctatggatatcgcagctgagatggcatattctcatcaagtcaattgcatggagaacgagctgatcttaggcttcacttttccatcagagacggactccgattatctcagcatagttctcaccttcaacaggttcgcgaccataacacaagtcctacgacgattcccctggctcagcatactgcgtttcatcgccgtgcccgtctcgctcatgggcaagttgatgcagctaagaaaagtcagcctcgaagagatgcatcgccgcctctcactgaagggtgcgacggagcacatcgactacttcgagcaactgatgcctgccgacggccacgtacccgagacctcagaagagattctgcacctatctaagatctcaacccagctcatgttcgccggctacctccctccatctgactggtattacgggacgttcttccatttgattcataaccaaacctcgctcacaaccgtaacccacgaaatcaggactacattctcaacctatgacgaaataactcccgagctggcagcccaactaccgttcttagccgcctgcctcaaagaatcactccgatgcttcaacaccagcgccctaataaacggcatgccagtctacagccccggcgccatcgtcgacggccacttcatccccaaaggcacgacctgccaatacagtgggttttccgtgtcgcacaactctcgatatttcagcgaacctctgcactatcgtccagagcgctggctacaagcagaccatgatctgtttgatgcgaaatatgcagatggcgacctcgaagctttcaacccgttcagtcacggtccgagaatgtgcgcagggaaggagatagcgtggtggcaggcaagacttataatggctaaggtcttgtggtcttttgatctggagatgatcccaggccaagatgttgacttggaaagggatctaagatgttgggggtattgggttaaacctgagttaagagtacggttcattccggttgtgagacgctga

SEQ ID NO: 32260 - protein, 525 aa, Muscodor strobelii
  misc_feature: SGI Peptide ID NO. 571117
  misc_feature (47)..(521): Pfam Id: PF00067 Pfam Desc: Cytochrome P450
  misc_feature (333)..(498): Pfam Id: PF00067 Pfam Desc: Cytochrome P450
  misc_feature (77)..(524): NCBI GI: 156054726 Blast Desc: SS1G_06211 [Sclerotinia sclerotiorum 1980] gi|154703991|gb|EDO03730.1| SS1G_06211 [Sclerotinia sclerotiorum 1980]
  misc_feature (77)..(524): NCBI GI: 154296440 Blast Desc: BC1G_13046 [Botryotinia fuckeliana B05.10] gi|150843407|gb|EDN18600.1| BC1G_13046 [Botryotinia fuckeliana B05.10]
  misc_feature (19)..(519): NCBI GI: 154289577 Blast Desc: BC1G_16084 [Botryotinia fuckeliana B05.10] gi|150849019|gb|EDN24212.1| BC1G_16084 [Botryotinia fuckeliana B05.10] gi|169635728|emb|CAP58782.1| cytochrome P40 monooxygenase
  misc_feature (107)..(514): NCBI GI: 145606883 Blast Desc: MGG_03819 [Magnaporthe grisea 70-15] gi|145014505|gb|EDJ99073.1| MGG_03819 [Magnaporthe grisea 70-15]
  misc_feature (27)..(519): NCBI GI: 259485752 Blast Desc: TPA: cytochrome P450, (Eurofung) [Aspergillus nidulans FGSC A4]
  misc_feature (7)..(524): NCBI GI: 225684952 Blast Desc: trichothecene C-15 hydroxylase [Paracoccidioides brasiliensis Pb03]
  misc_feature (7)..(524): NCBI GI: 226294265 Blast Desc: isotrichodermin C-15 hydroxylase [Paracoccidioides brasiliensis Pb18]
  misc_feature (22)..(521): NCBI GI: 259485758 Blast Desc: TPA: cytochrome P450, (Eurofung) [Aspergillus nidulans FGSC A4]
  misc_feature (7)..(519): NCBI GI: 121707561 Blast Desc: toxin biosynthesis cytochrome P450 monooxygenase, [Aspergillus clavatus NRRL 1] gi|119400022|gb|EAW10448.1| toxin biosynthesis cytochrome P450 monooxygenase, [Aspergillus clavatus
  misc_feature (13)..(521): NCBI GI: 242777790 Blast Desc: cytochrome P450 monooxygenase, [Talaromyces stipitatus ATCC 10500] gi|218722724|gb|EED22142.1| cytochrome P450 monooxygenase, [Talaromyces stipitatus ATCC 10500]
  misc_feature (138)..(508): SWISSPROT Homolog: EC 1.14.14.1 Unspecific monooxygenase
MSANEDASWVQVLLDQGFIVLALTVIVTYTTSRCIYLLYFHPLSKFPGPKIAAVSNIWYGYHWFSQRWPWAVENALKKYGNVVRIGPNELAFGHPQASIDIYGAHDKSLETFVKTDINDYAQDKDGGIIWQQDPVRHRRIAKQMAPAFSQKATRVKDSILYRYADIFVKKITEHSGDKEGISLPTWVQWLAMDIAAEMAYSHQVNCMENELILGFTFPSETDSDYLSIVLTFNRFATITQVLRRFPWLSILRFIAVPVSLMGKLMQLRKVSLEEMHRRLSLKGATEHIDYFEQLMPADGHVPETSEEILHLSKISTQLMFAGYLPPSDWYYGTFFHLIHNQTSLTTVTHEIRTTFSTYDEITPELAAQLPFLAACLKESLRCFNTSALINGMPVYSPGAIVDGHFIPKGTTCQYSGFSVSHNSRYFSEPLHYRPERWLQADHDLFDAKYADGDLEAFNPFSHGPRMCAGKEIAWWQARLIMAKVLWSFDLEMIPGQDVDLERDLRCWGYWVKPELRVRFIPVVRR

SEQ ID NO: 32261 - DNA, 1724 bp, Muscodor strobelii
  misc_feature: SGI EST ID NO. CUFF.76358.0
  misc_feature: Variant of the nucleotide sequence at SEQ ID NO 32259
gtatgtatgcgtccatactcattacgctttaatccggtctagaccacacttctgaaccatctggcaatactcggctgtatctcaccggcatgcaaatttgcctccaatgtcggctaacgaagatgcttcgtgggtgcaagttctgttagatcaaggatttatagttctagctctgacagtgatcgtgacgtatacaacgtctcggtgcatttatctgctatatttccacccgttgtcgaaatttccaggccccaaaattgcagccgtttcgaacatttggtacggatatcactggttctctcagcgatggccatgggcagttgagaatgccctgaaaaagtacggtaatgttgtaagaattggacctaacgaacttgcatttgggcacccacaagcctcgatagatatttacggtgcacacgacaagagtctcgaaacgttcgtcaaaacagacatcaatgattatgctcaagacaaagatggcggtatcatctggcaacaagatcccgtcagacatcgccgaatagccaagcaaatggcgccagctttcagtcagaaagcaacgcgagtgaaggattctatcctatatcgatatgccgacatattcgtcaagaagataaccgagcacagtggagataaagaaggtatcagtcttccaacttgggtgcaatggctagctatggatatcgcagctgagatggcatattctcatcaagtcaattgcatggagaacgagacggactccgattatctcagcatagttctcaccttcaacaggttcgcgaccataacacaagtcctacgacgattcccctggctcagcatactgcgtttcatcgccgtgcccgtctcgctcatgggcaagttgatgcagctaagaaaagtcagcctcgaagagatgcatcgccgcctctcactgaagggtgcgacggagcacatcgactacttcgagcaactgatgcctgccgacggccacgtacccgagacctcagaagagattctgcacctatctaagatctcaacccagctcatgttcgccggctacctccctccatctgactggtattacgggacgttcttccatttgattcataaccaaacctcgctcacaaccgtaacccacgaaatcaggactacattctcaacctatgacgaaataactcccgagctggcagcccaactaccgttcttagccgcctgcctcaaagaatcactccgatgcttcaacaccagcgccctaataaacggcatgccagtctacagccccggcgccatcgtcgacggccacttcatccccaaaggcacgacctgccaatacagtgggttttccgtgtcgcacaactctcgatatttcagcgaacctctgcactatcgtccagagcgctggctacaagcagaccatgatctgtttgatgcgaaatatgcagatggcgacctcgaagctttcaacccgttcagtcacggtccgagaatgtgcgcagggaaggagatagcgtggtggcaggcaagacttataatggctaaggtcttgtggtcttttgatctggagatgatcccaggccaagatgttgacttggaaagggatctaagatgttgggggtattgggttaaacctgagttaagagtacggttcattccggttgtgagacgctgaaaaaatccatctgaattttatcataaattaagtatgtataaactattaacggcgatcaatatttatcaag

SEQ ID NO: 32262 - DNA, 840 bp, Muscodor strobelii
  misc_feature: SGI cDNA ID NO. 571118
  misc_feature: Elevated expression when VOC is produced
  misc_feature: Encodes the peptide sequence at SEQ ID NO 32263
atgaactatctacagcaggacgcgcaggcaagcgaggagctcgctgcactgctgtcccgcaacttgaccttccaaccacagccacaacaacagatgacccaacaacaaccgacgagcgaacaaacacagcaggagcccattacatactcgatatctcagcattatcatcattctgcccatgtcatccaccaggagccagtcgtcgaggtcccacggccgtcctctgaacctccgccgactcaatatccctccaacgagcaagttcgacaagttctcgcccagcacggtgttgactattccggcttgactatgaaccaatttgagctattcaaaacgggcgacaccccccagcaattacgactaatcgagctatggcgcatttgtcctcctaccaatcctcagaatcacgccaacgtcgatttgataaatacgtctgttgagcaagaagaacgcttcgcacagctccgatatgagcagcaaatggccgcagaagaggctaagcgaaattctgtcatcagcctagatggcactcccctcactcccgtgcagaccaccgacggccactgggtcattgcatcggaccctgagccatacatggcgtctggatatgaaatgatggctcgacgcgagtacgaggaaacagctaggcgccaacttactgaggagtggccacaatctaagagcctcaatgatcacatcaacagctatcgcccatctacggacccggtgtaccagaattcacagccgggcgtcatcgtcagcttcggagctaacgactacgcgcgtcaacagcaagccatggaggaccaatacggcgcgtatcagcagatggaatattaa

SEQ ID NO: 32263 - protein, 279 aa, Muscodor strobelii
  misc_feature: SGI Peptide ID NO. 571118
  misc_feature (8)..(277): NCBI GI: 116181042 Blast Desc: CHGG_01149 [Chaetomium globosum CBS 148.51] gi|88185446|gb|EAQ92914.1| CHGG_01149 [Chaetomium globosum CBS 148.51]
  misc_feature (12)..(274): NCBI GI: 85116596 Blast Desc: NCU02492 [Neurospora crassa OR74A] gi|28926888|gb|EAA35850.1| [Neurospora crassa OR74A] gi|38567097|emb|CAE76393.1| [Neurospora crassa]
  misc_feature (12)..(279): NCBI GI: 156036268 Blast Desc: SS1G_12822 [Sclerotinia sclerotiorum 1980] gi|154698228|gb|EDN97966.1| SS1G_12822 [Sclerotinia sclerotiorum 1980]
  misc_feature (1)..(273): NCBI GI: 46107360 Blast Desc: FG00563.1 [Gibberella zeae PH-1]
  misc_feature (12)..(246): NCBI GI: 154308420 Blast Desc: BC1G_08270 [Botryotinia fuckeliana B05.10] gi|150852811|gb|EDN28003.1| BC1G_08270 [Botryotinia fuckeliana B05.10]
  misc_feature (9)..(279): NCBI GI: 39972845 Blast Desc: MGG_07717 [Magnaporthe grisea 70-15] gi|145012484|gb|EDJ97138.1| MGG_07717 [Magnaporthe grisea 70-15]
  misc_feature (9)..(279): NCBI GI: 261356489 Blast Desc: conserved [Verticillium albo-atrum VaMs.102]
  misc_feature (1)..(275): NCBI GI: 256734505 Blast Desc: NECHADRAFT_74840 [Nectria haematococca mpVI 77-13-4]
  misc_feature (1)..(229): NCBI GI: 171695838 Blast Desc: protein product [Podospora anserina] gi|170948161|emb|CAP60325.1| protein product [Podospora anserina]
  misc_feature (12)..(274): NCBI GI: 189205427 Blast Desc: conserved [Pyrenophora tritici-repentis Pt-1C-BFP] gi|187975141|gb|EDU41767.1| conserved [Pyrenophora tritici-repentis Pt-1C-BFP]
  misc_feature: Useful for introducing or modulating the production of volatile compounds
MNYLQQDAQASEELAALLSRNLTFQPQPQQQMTQQQPTSEQTQQEPITYSISQHYHHSAHVIHQEPVVEVPRPSSEPPPTQYPSNEQVRQVLAQHGVDYSGLTMNQFELFKTGDTPQQLRLIELWRICPPTNPQNHANVDLINTSVEQEERFAQLRYEQQMAAEEAKRNSVISLDGTPLTPVQTTDGHWVIASDPEPYMASGYEMMARREYEETARRQLTEEWPQSKSLNDHINSYRPSTDPVYQNSQPGVIVSFGANDYARQQQAMEDQYGAYQQMEY

SEQ ID NO: 32264 - DNA, 1884 bp, Muscodor strobelii
  misc_feature: SGI EST ID NO. CUFF.76396.1
  misc_feature: Variant of the nucleotide sequence at SEQ ID NO 32262
ctgttgaatcccgattcccagacctcatcgtcatcgtcatcaataattcccatttttggttgaccacgcttttgctacgctacgacagggcagggacatccgcataactctcatatttcaaggataacagcctgtagcctgcaaagcacaagcagagttctcacggccgaataccttcttggcaggttgcaatctctttgttcctgcagtctaacaggttggacaaccaccaaacgctaccccctttctttgtctgcgactacccccgctatagactcgaacggactctgtccaggggctagttcgacgactaattaccagcctatctttactgtttgtcaccgttccttgaagaatccagaatccctggccgtcgagtcacagataaaggagctgttccacattccatccattcatctctgaaccctcgattcattgttgtgacccaaataggtcaaaggtcaacaaacacgtgcacttcagtatcgctgcccaagtacatagcatattcaatataagacacagattttccaaaccgcctcgccctcgctctcgttattgcagctttcttacaggttgacactgtcatcgagccaaccaccatctctagtacctcgctatacacagcacgcagatcactaaaaagacaaacttgatcaggtctgacagacagctccgggcccgacaatgaactatctacagcaggacgcgcaggcaagcgaggagctcgctgcactgctgtcccgcaacttgaccttccaaccacagccacaacaacagatgacccaacaacaaccgacgagcgaacaaacacagcaggagcccattacatactcgatatctcagcattatcatcattctgcccatgtcatccaccaggagccagtcgtcgaggtcccacggccgtcctctgaacctccgccgactcaatatccctccaacgagcaagttcgacaagttctcgcccagcacggtgttgactattccggcttgactatgaaccaatttgagctattcaaaacgggcgacaccccccagcaattacgactaatcgagctatggcgcatttgtcctcctaccaatcctcagaatcacgccaacgtcgatttgataaatacgtctgttgagcaagaagaacgcttcgcacagctccgatatgagcagcaaatggccgcagaagaggctaagcgaaattctgtcatcagcctagatggcactcccctcactcccgtgcagaccaccgacggccactgggtcattgcatcggaccctgagccatacatggcgtctggatatgaaatgatggctcgacgcgagtacgaggaaacagctaggcgccaacttactgaggagtggccacaatctaagagcctcaatgatcacatcaacagctatcgcccatctacggacccggtgtaccagaattcacagccgggcgtcatcgtcagcttcggagctaacgactacgcgcgtcaacagcaagccatggaggaccaatacggcgcgtatcagcagatggaatattaaacttgcacctgcatttgcatttgattgcactaaacgactatcgtacgaacagcatagcatagtactgcatggcggataccctttgttgaaattgcaactgttagattcatgttagcatggctggcgaactggcattgggcgtgcaaactggccgaattattagtatatgacccagggaaatgaaattgtcgtcggcacgcattgcatagcatagattgttcatgtcatcggggcggcgttctgggttgaatgccggcatggatttcatagtctactcgttctctaaaaaattgctcacttactcacgccttccccatccccaataccaaataatgtgttcgcaatgttctataggaa

SEQ ID NO: 32265 - DNA, 1275 bp, Muscodor strobelii
  misc_feature: SGI cDNA ID NO. 571119
  misc_feature: Encodes the peptide sequence at SEQ ID NO 32266
atggtcgacctccgtatgagcagcagcgctatgacagtcatgatcaaaggcaagaatactatcctccaagacaggatcatgggcctcctccaggccagtacggtggtggctacggtggtcaataccctccgcctggtcctcctcgccatgacggatatggcccgccgagctacagtccgtatcctcaacatggtggtccgccgcctcagcagtatcaaagacctccatatgctccacctccaggactcgattcatagtggatattccaccgttcagggctatggtggtgttcacagagctggccctccgccgcctcaagcgccgcaggcattcggccatggggcgccagacggctacactttccagtattctaattgtaccggtaaacgcaaagccttactaattggcatcaattactttggtcaaggcagcacggagttgaaaggctgcatcaacgacaccaggaatctctcccagttcctcattgagaggtacggctacaagagagaagatatgattattctcacagatgacgctcgcgaaccgatgcttcaacctaacaagcgaaacattatccgcgccatgcaatggcttgttaatggagcacagccgaacgatgcccttttcttgcactactctggccacggtggccggactgaagatctggatggtgacgaggatgatggttacgatgaaactatctatcctgtggactacaaagaagctggtcatatcaacgatgatgagttgcaccatgtcgtggtcacaccgctacaggcaggtgtcagattaacagcaatttttgacagttgtcactcaggatctgttctggacctgccctacatctactcaacaaagggtgtccttaaagagcctaatctggcggctgaagccggacaaggtttgctcaaagcgttctcatcatacgcctcaggagacactggtggtgtggccagtgccttgatgggcttcgcgaagtccgcatataagggtaactcgggctataagaagacgattgagacaaaaacatccgctgccgatgtcatcatgtggtcaggcagtaaagacgaccagacaagcgcggacgctactgttgcctcaacggccacaggcgccatgtcgtgggctttcgtcacggcacttaaacaggatccgaagcaaagctatgttgagttactcaatagcattcgggatctcctcgagacaaagtacagccagaagccccagctgtcatgtagtcatccattagataccgatcttctcttcgtgatgtga

SEQ ID NO: 32266 - protein, 424 aa, Muscodor strobelii
  misc_feature: SGI Peptide ID NO. 571119
  misc_feature (130)..(421): Pfam Id: PF00656 Pfam Desc: Caspase domain
  misc_feature (99)..(424): NCBI GI: 171694554 Blast Desc: protein product [Podospora anserina] gi|170947519|emb|CAP59680.1| protein product [Podospora anserina]
  misc_feature (92)..(424): NCBI GI: 256732291 Blast Desc: NECHADRAFT_69680 [Nectria haematococca mpVI 77-13-4]
  misc_feature (111)..(424): NCBI GI: 189091870 Blast Desc: [Podospora anserina] gi|188219288|emb|CAP49268.1| protein product [Podospora anserina]
  misc_feature (84)..(424): NCBI GI: 164422645 Blast Desc: NCU09882 [Neurospora crassa OR74A] gi|189081665|sp|Q7S232.2|MCA1A_NEUCR RecName: Full=Metacaspase-1A; Flags: Precursor gi|157069759|gb|EAA29413.2|
  misc_feature (108)..(424): NCBI GI: 146322507 Blast Desc: metacaspase CasA [Aspergillus fumigatus Af293] gi|129557051|gb|EAL88381.2| metacaspase CasA [Aspergillus fumigatus Af293]
  misc_feature (108)..(424): NCBI GI: 121702445 Blast Desc: metacaspase CasA [Aspergillus clavatus NRRL 1] gi|119397630|gb|EAW08061.1| metacaspase CasA [Aspergillus clavatus NRRL 1]
  misc_feature (108)..(424): NCBI GI: 189081667 Blast Desc: metacaspase CasA [Aspergillus clavatus NRRL 1] gi|119397630|gb|EAW08061.1| metacaspase CasA [Aspergillus clavatus NRRL 1]
  misc_feature (106)..(416): NCBI GI: 154300330 Blast Desc: conserved [Botryotinia fuckeliana B05.10] gi|189081572|sp|A6SDT7.1|MCA1_BOTFB RecName: Full=Metacaspase-1; Flags: Precursor gi|150856677|gb|EDN31869.1| conserved fuckeliana
  misc_feature (108)..(424): NCBI GI: 189081668 Blast Desc: MCA1A_ASPFC RecName: Full=Metacaspase-1A; Flags: Precursor gi|189081678|sp|Q4WJA1.3|MCA1A_ASPFU RecName: Full=Metacaspase-1A; Flags: Precursor gi|103060424|gb|ABF71662.1|
  misc_feature (108)..(424): NCBI GI: 159130894 Blast Desc: metacaspase CasA [Aspergillus fumigatus A1163]
MVDLRMSSSAMTVMIKGKNTILQDRIMGLLQASTVVATVVNTLRLVLLAMTDMARRATVRILNMVVRRLSSIKDLHMLHLQDSIHSGYSTVQGYGGVHRAGPPPPQAPQAFGHGAPDGYTFQYSNCTGKRKALLIGINYFGQGSTELKGCINDTRNLSQFLIERYGYKREDMIILTDDAREPMLQPNKRNIIRAMQWLVNGAQPNDALFLHYSGHGGRTEDLDGDEDDGYDETIYPVDYKEAGHINDDELHHVVVTPLQAGVRLTAIFDSCHSGSVLDLPYIYSTKGVLKEPNLAAEAGQGLLKAFSSYASGDTGGVASALMGFAKSAYKGNSGYKKTIETKTSAADVIMWSGSKDDQTSADATVASTATGAMSWAFVTALKQDPKQSYVELLNSIRDLLETKYSQKPQLSCSHPLDTDLLFVM

SEQ ID NO: 32267 - DNA, 1335 bp, Muscodor strobelii
  misc_feature: SGI EST ID NO. CUFF.76369.0
  misc_feature: Variant of the nucleotide sequence at SEQ ID NO 32265
gatattccaccgttcagggctatggtggtgttcacagagctggccctccgccgcctcaagcgccgcaggcattcggccatggggcgccagacggctacactttccagtattctaattgtaccggtaaacgcaaagccttactaattggcatcaattactttggtcaaggcagcacggagttgaaaggctgcatcaacgacaccaggaatctctcccagttcctcattgagaggtacggctacaagagagaagatatgattattctcacagatgacgctcgcgaaccgatgcttcaacctaacaagcgaaacattatccgcgccatgcaatggcttgttaatggagcacagccgaacgatgcccttttcttgcactactctggccacggtggccggactgaagatctggatggtgacgaggatgatggttacgatgaaactatctatcctgtggactacaaagaagctggtcatatcaacgatgatgagttgcaccatgtcgtggtcacaccgctacaggcaggtgtcagattaacagcaatttttgacagttgtcactcaggatctgttctggacctgccctacatctactcaacaaagggtgtccttaaagagcctaatctggcggctgaagccggacaaggtttgctcaaagcgttctcatcatacgcctcaggagacactggtggtgtggccagtgccttgatgggcttcgcgaagtccgcatataagggtaactcgggctataagaagacgattgagacaaaaacatccgctgccgatgtcatcatgtggtcaggcagtaaagacgaccagacaagcgcggacgctactgttgcctcaacggccacaggcgccatgtcgtgggctttcgtcacggcacttaaacaggatccgaagcaaagctatgttgagttactcaatagcattcgggatctcctcgagacaaagtacagccagaagccccagctgtcatgtagtcatccattagataccgatcttctcttcgtgatgtgagaggaattttcaacgtagctgagatttctggtagacatgtgagatagcagaataaatcagataggattcataaatactgatttcgcaagttctgaaaatgatctaaatttatattggccacaacaggtagattggcgatagatgtgtttgcggactctgatttttgcgaatacaacttggttctctttcaaatttgaatagagtatgggtagtgagagcgtcactcacctctgatatatagtctctgtattgagagttgcgactattgagatgcagcactgcgagtagagatcttgcaccacgttatccctagcttttg

SEQ ID NO: 32268 - DNA, 960 bp, Muscodor strobelii
  misc_feature: SGI cDNA ID NO. 571120
  misc_feature: Elevated expression when VOC is produced
  misc_feature: Encodes the peptide sequence at SEQ ID NO 32269
atgtcgtaccttaatcagttaacaagtcggttcgatgatttgaacgtgggccgcagggatgaccgcagagatgacggctatcgtcaagactaccctcccccttcgcagcaatatggtggaggccaccccgatgatcagtacaaatactcggaacatcaccaacagtcgtacaatagtccgcctccaccccaacaaggaggctatccaggacaacatcagcaatcctcttatagcgaacattcgggaggatatcctccaagccaatacgaccggccttacgagggttcgcgtggcagcgcagaaccaacgtactctccgcctcctggaaaaccaccgcttcctcaaggttggattccccagtacgaccagcaataccagcggtggtattatgccgagcaagctactggtcgaacacaatgggaagcaccgggtcagcaacatggaatgggtgctcctggacacgatacccgcggtgccgattcctacggcggtcacgactctagttacggacatagttccggttatggtcacgaaccctctggctatagtcatgaatctggccatggatatgaagggcatagcgagtatagaggcgaggaaaagaaaaagaaggacaacacattgctatatgccgccggtggcctagcagctggcgctattggcggcgcactcatcgccaacgcattagatgattcagacgatgagcatcattactctgctcctccgcagcaatcctatgcacctcaagagtacgctccaggacccgcatacgaaccagcatacaacgccgacggggaatatgtaagtgggagcgatcgagagtccgttgctgaggcgcgcgaggattacgaggcggcgcagagagctgctgccgactccgacgcaagtagtagtgaggaggaggaattggaggaggctcgtgaagagtattatgaagaatacgaagagaattatgagtaa

SEQ ID NO: 32269 - protein, 319 aa, Muscodor strobelii
  misc_feature: SGI Peptide ID NO. 571120
  misc_feature (61)..(169): NCBI GI: 85090918 Blast Desc: NCU09881 [Neurospora crassa OR74A] gi|28920026|gb|EAA29412.1| [Neurospora crassa OR74A]
  misc_feature (1)..(165): NCBI GI: 171694556 Blast Desc: protein product [Podospora anserina] gi|170947520|emb|CAP59681.1| protein product [Podospora anserina]
  misc_feature (117)..(294): NCBI GI: 259488928 Blast Desc: TPA: [Aspergillus nidulans FGSC A4]
  misc_feature (1)..(164): NCBI GI: 116182938 Blast Desc: [Chaetomium globosum CBS 148.51] gi|88186394|gb|EAQ93862.1| [Chaetomium globosum CBS 148.51]
  misc_feature (1)..(141): NCBI GI: 46134131 Blast Desc: FG09205.1 [Gibberella zeae PH-1]
  misc_feature (1)..(278): NCBI GI: 261355934 Blast Desc: [Verticillium albo-atrum VaMs.102]
  misc_feature (1)..(142): NCBI GI: 226495399 Blast Desc: LOC100273024 [Zea mays] gi|194701888|gb|ACF85028.1| [Zea mays]
  misc_feature (109)..(141): NCBI GI: 240108060 Blast Desc: WW domain containing protein [Coccidioides posadasii C735 delta SOWgp]
  misc_feature (111)..(141): NCBI GI: 119187815 Blast Desc: [Coccidioides immitis RS]
  misc_feature (106)..(147): NCBI GI: 254569764 Blast Desc: [Pichia pastoris GS115] gi|238031789|emb|CAY69712.1| [Pichia pastoris GS115]
  misc_feature: Useful for introducing or modulating the production of volatile compounds
MSYLNQLTSRFDDLNVGRRDDRRDDGYRQDYPPPSQQYGGGHPDDQYKYSEHHQQSYNSPPPPQQGGYPGQHQQSSYSEHSGGYPPSQYDRPYEGSRGSAEPTYSPPPGKPPLPQGWIPQYDQQYQRWYYAEQATGRTQWEAPGQQHGMGAPGHDTRGADSYGGHDSSYGHSSGYGHEPSGYSHESGHGYEGHSEYRGEEKKKKDNTLLYAAGGLAAGAIGGALIANALDDSDDEHHYSAPPQQSYAPQEYAPGPAYEPAYNADGEYVSGSDRESVAEAREDYEAAQRAAADSDASSSEEEELEEAREEYYEEYEENYE

SEQ ID NO: 32270 - DNA, 1451 bp, Muscodor strobelii
  misc_feature: SGI EST ID NO. CUFF.76387.0
  misc_feature: Variant of the nucleotide sequence at SEQ ID NO 32268
gctgcatcctcgttgtaagggttcagctcaggaacccctcaaagaatcttagagaaccggcatttttgtgccgaactgtctcgcaatatatcctgcaacataggaaacattcgcgcaactcgtctttggtgggttctgcagcacagtctaccagtgcggtgtacagctttcaaactgggtcggttgcctcacaacgcatcaacacataggttgcatgtgagatcagttcttggctcagaaatataagcaacgtacttaagttgacatcccgcgacaacccctcagccttcgtcaacaacttttcgtagactatcggtttcggtgttcagcatgtcgtaccttaatcagttaacaagtcggttcgatgatttgaacgtgggccgcagggatgaccgcagagatgacggctatcgtcaagactaccctcccccttcgcagcaatatggtggaggccaccccgatgatcagtacaaatactcggaacatcaccaacagtcgtacaatagtccgcctccaccccaacaaggaggctatccaggacaacatcagcaatcctcttatagcgaacattcgggaggatatcctccaagccaatacgaccggccttacgagggttcgcgtggcagcgcagaaccaacgtactctccgcctcctggaaaaccaccgcttcctcaaggttggattccccagtacgaccagcaataccagcggtggtattatgccgagcaagctactggtcgaacacaatgggaagcaccgggtcagcaacatggaatgggtgctcctggacacgatacccgcggtgccgattcctacggcggtcacgactctagttacggacatagttccggttatggtcacgaaccctctggctatagtcatgaatctggccatggatatgaagggcatagcgagtatagaggcgaggaaaagaaaaagaaggacaacacattgctatatgccgccggtggcctagcagctggcgctattggcggcgcactcatcgccaacgcattagatgattcagacgatgagcatcattactctgctcctccgcagcaatcctatgcacctcaagagtacgctccaggacccgcatacgaaccagcatacaacgccgacggggaatatgtaagtgggagcgatcgagagtccgttgctgaggcgcgcgaggattacgaggcggcgcagagagctgctgccgactccgacgcaagtagtagtgaggaggaggaattggaggaggctcgtgaagagtattatgaagaatacgaagagaattatgagtaacggctgtagagtagcgtgtctccgatatctgtctgattcacctagccactatgcgcttacgagaatgagtctgatgagatacggccggttcaatataggtgataaatgaagatccgatttaagatcatggcatacatattgctcctatggcattccagaag

SEQ ID NO: 32271 - DNA, 1950 bp, Muscodor strobelii
  misc_feature: SGI cDNA ID NO. 571121
  misc_feature: Elevated expression when VOC is produced
  misc_feature: Encodes the peptide sequence at SEQ ID NO 32272
atggcggccgaatttgccaaagtccaggagaagtatgctatcgaggcgcagaagcgtgtaaatgccgacggtcttggccagtttgagtcgttagcgttgagcaatagcgatcgtctgcgccatctagtagacgatatttgggccgaccatgccgccttggatgcaacgccaccggcgctgaaggaaggcgatagccccaaatttctcatcgccggcgccggcatttgcggtgtcatgtgcgccgtccatcttattcagaaagggttcactgctgagcagatacgaatcgtcgagacggccggtggtgtaggtggcacatggtattggaaccgctatcctggccttcactgcgatgtggaggcatacgtgtacatgccgctgctggaggaaatgggtttcatgccctcccacaagtatagttctggtgttgagattcgccactacctcgagtctatagtcaagaaattcgatctggaagacaagatcctgtttcgaactcggatgaccaaagctgagtgggacgatgctgcgcaccactggaagatagacttcactacaggaaagggacccaaaggacaggatcaaacacctttctctgctacggccgaattcgtctatctgaccgccggcctattggccaagccacagatccctaagctcccaggagtcgggttcgagggctttaaaggcgatatattccacacgtcgctgtggaactacgacgtcacaggcggttcgtcagaggatgttttccctgatatgtctaaactgaaggataagagagtcgggatcattggcacgggtgccactgccattcaagcggtaccatgtcttgccaaatatgccaaagagttatacgttttccaacgcacacctagcgcagtctacggccgtggccaaagccagacggaccccgaggagtggaaaacgtctatcgctggccagaagggttggtatgatgcgcgccggcttaacttcatcaagaagatggcaaatgatctacccgagggtgagaaggacttggtaaatgatgagtggtcttcacagcccgcgtactcggcactgactggcagtcccgacttcgccgtgatcgacccggcgaaggcacctgagactatcggccacttcttagcagttgatgctccaaacgccgcgcgtgtgcgccagcgagtcaaagacatcgtcaaagacccagaaactgccgagaaactcactccatggtacccggcctggtgcaagcgtcctactttcagcgacatgtacctccaggctttcaacaacgagaatgtacacctcatcgatacggatggtaaaggttgcgagagtgttacaccgaacggcatcgttgcaaaaggaaccgagtacccgctggatgtgctgattttgggcacgggatacaccacgcctgctgcagatggtggtgacccgtcgatccgcgccggtgtcaaggtttacggcaggaacggccgtgacatgtcggagaagttcttcacaaatggatttgcctctctttacggcaacaccacgaatggattccccaatctgttctggccgggtccctcacaatcaggtgtcagtgcgtgccactcaatggtgctcgactcacatgccgaactgtccgcctatctagccgctgaagcccacgagcgtgtgggcgacaagagcaagacgcagaaaggtgttactgtcgaggtgaactcagactttgaagaagcctggactatgcgctgcgtgcaaggcgctgcacgcttcgcaacgatcgctgtctgcacgccgagttacatcaacggggagatggcgcctggtgccatgggtcagggcagtccagaggagttgttcaagaatgcgagacgatcgccgttcagcgctggtttgcccgcgttcctcaaggagattgagaactggcgtgctgaggggaaactgagtggcgttaccgttagtgctgcttga

SEQ ID NO: 32272 - protein, 649 aa, Muscodor strobelii
  misc_feature: SGI Peptide ID NO. 571121
  misc_feature (9)..(649): NCBI GI: 169611905 Blast Desc: SNOG_09067 [Phaeosphaeria nodorum SN15] gi|111062139|gb|EAT83259.1| SNOG_09067 [Phaeosphaeria nodorum SN15]
  misc_feature (11)..(647): NCBI GI: 39944218 Blast Desc: MGG_04120 [Magnaporthe grisea 70-15] gi|145014855|gb|EDJ99423.1| MGG_04120 [Magnaporthe grisea 70-15]
  misc_feature (7)..(646): NCBI GI: 116198583 Blast Desc: CHGG_07447 [Chaetomium globosum CBS 148.51] gi|88178726|gb|EAQ86194.1| CHGG_07447 [Chaetomium globosum CBS 148.51]
  misc_feature (1)..(647): NCBI GI: 171692579 Blast Desc: protein product [Podospora anserina] gi|170946238|emb|CAP73039.1| protein product [Podospora anserina]
  misc_feature (2)..(649): NCBI GI: 240105075 Blast Desc: Flavin-binding monooxygenase-like family protein [Coccidioides posadasii C735 delta SOWgp]
  misc_feature (2)..(649): NCBI GI: 119194991 Blast Desc: CIMG_01870 [Coccidioides immitis RS]
  misc_feature (6)..(648): NCBI GI: 115401920 Blast Desc: [Aspergillus terreus NIH2624] gi|114190489|gb|EAU32189.1| [Aspergillus terreus NIH2624]
  misc_feature (8)..(641): NCBI GI: 121703487 Blast Desc: monooxygenase [Aspergillus clavatus NRRL 1] gi|119398151|gb|EAW08582.1| monooxygenase [Aspergillus clavatus NRRL 1]
  misc_feature (41)..(496): NCBI GI: 238584109 Blast Desc: MPER_10257 [Moniliophthora perniciosa FA553] gi|215453884|gb|EEB91388.1| MPER_10257 [Moniliophthora perniciosa FA553]
  misc_feature (3)..(647): NCBI GI: 259484313 Blast Desc: TPA: conserved [Aspergillus nidulans FGSC A4]
  misc_feature (69)..(538): SWISSPROT Homolog: EC 1.14.13.92 Phenylacetone monooxygenase
  misc_feature: Useful for introducing or modulating the production of volatile compounds
MAAEFAKVQEKYAIEAQKRVNADGLGQFESLALSNSDRLRHLVDDIWADHAALDATPPALKEGDSPKFLIAGAGICGVMCAVHLIQKGFTAEQIRIVETAGGVGGTWYWNRYPGLHCDVEAYVYMPLLEEMGFMPSHKYSSGVEIRHYLESIVKKFDLEDKILFRTRMTKAEWDDAAHHWKIDFTTGKGPKGQDQTPFSATAEFVYLTAGLLAKPQIPKLPGVGFEGFKGDIFHTSLWNYDVTGGSSEDVFPDMSKLKDKRVGIIGTGATAIQAVPCLAKYAKELYVFQRTPSAVYGRGQSQTDPEEWKTSIAGQKGWYDARRLNFIKKMANDLPEGEKDLVNDEWSSQPAYSALTGSPDFAVIDPAKAPETIGHFLAVDAPNAARVRQRVKDIVKDPETAEKLTPWYPAWCKRPTFSDMYLQAFNNENVHLIDTDGKGCESVTPNGIVAKGTEYPLDVLILGTGYTTPAADGGDPSIRAGVKVYGRNGRDMSEKFFTNGFASLYGNTTNGFPNLFWPGPSQSGVSACHSMVLDSHAELSAYLAAEAHERVGDKSKTQKGVTVEVNSDFEEAWTMRCVQGAARFATIAVCTPSYINGEMAPGAMGQGSPEELFKNARRSPFSAGLPAFLKEIENWRAEGKLSGVTVSAA

SEQ ID NO: 32273 - DNA, 2592 bp, Muscodor strobelii
  misc_feature: SGI EST ID NO. CUFF.76381.0
  misc_feature: Variant of the nucleotide sequence at SEQ ID NO 32271
gaaaacagcccgaatggaggaatacaaccactgttcttcctagaacctactatttcagatatatgcgaactagcacatgtcaagatagaggatattcacgacctgtcattgatgactaggagaaccgaccggaaagagccaatcccgccgccagatgtgcattgtcaagtttctttgaggagtatcgttacaacgcacctagtgctgggcgcggattgatatccactcccccggcgagacgccattctgggtcttggtaaagggacccttgcccgtatcagcacttatgtatgccataggcgacttgtcgtccactacttattcatgtgctcccccaaaggctgaaggaatcacgttctcgcaactgtctcttgctcaacaatcattcccttcaaatcaacttatactgggaacaacatggcggccgaatttgccaaagtccaggagaagtatgctatcgaggcgcagaagcgtgtaaatgccgacggtcttggccagtttgagtcgttagcgttgagcaatagcgatcgtctgcgccatctagtagacgatatttgggccgaccatgccgccttggatgcaacgccaccggcgctgaaggaaggcgatagccccaaatttctcatcgccggcgccggcatttgcggtgtcatgtgcgccgtccatcttattcagaaagggttcactgctgagcagatacgaatcgtcgagacggccggtggtgtaggtggcacatggtattggaaccgctatcctggccttcactgcgatgtggaggcatacgtgtacatgccgctgctggaggaaatgggtttcatgccctcccacaagtatagttctggtgttgagattcgccactacctcgagtctatagtcaagaaattcgatctggaagacaagatcctgtttcgaactcggatgaccaaagctgagtgggacgatgctgcgcaccactggaagatagacttcactacaggaaagggacccaaaggacaggatcaaacacctttctctgctacggccgaattcgtctatctgaccgccggcctattggccaagccacagatccctaagctcccaggagtcgggttcgagggctttaaaggcgatatattccacacgtcgctgtggaactacgacgtcacaggcggttcgtcagaggatgttttccctgatatgtctaaactgaaggataagagagtcgggatcattggcacgggtgccactgccattcaagcggtaccatgtcttgccaaatatgccaaagagttatacgttttccaacgcacacctagcgcagtctacggccgtggccaaagccagacggaccccgaggagtggaaaacgtctatcgctggccagaagggttggtatgatgcgcgccggcttaacttcatcaagaagatggcaaatgatctacccgagggtgagaaggacttggtaaatgatgagtggtcttcacagcccgcgtactcggcactgactggcagtcccgacttcgccgtgatcgacccggcgaaggcacctgagactatcggccacttcttagcagttgatgctccaaacgccgcgcgtgtgcgccagcgagtcaaagacatcgtcaaagacccagaaactgccgagaaactcactccatggtacccggcctggtgcaagcgtcctactttcagcgacatgtacctccaggctttcaacaacgagaatgtacacctcatcgatacggatggtaaaggttgcgagagtgttacaccgaacggcatcgttgcaaaaggaaccgagtacccgctggatgtgctgattttgggcacgggatacaccacgcctgctgcagatggtggtgacccgtcgatccgcgccggtgtcaaggtttacggcaggaacggccgtgacatgtcggagaagttcttcacaaatggatttgcctctctttacggcaacaccacgaatggattccccaatctgttctggccgggtccctcacaatcaggtgtcagtgcgtgccactcaatggtgctcgactcacatgccgaactgtccgcctatctagccgctgaagcccacgagcgtgtgggcgacaagagcaagacgcagaaaggtgttactgtcgaggtgaactcagactttgaagaagcctggactatgcgctgcgtgcaaggcgctgcacgcttcgcaacgatcgctgtctgcacgccgagttacatcaacggggagatggcgcctggtgccatgggtcagggcagtccagaggagttgttcaagaatgcgagacgatcgccgttcagcgctggtttgcccgcgttcctcaaggagattgagaactggcgtgctgaggggaaactgagtggcgttaccgttagtgctgcttgacagatgattggcttcgatgggcgctcttgatataccctagagctatagactagcgtaacaggaactatatattgagtaaggaaaacaaataagcagaaagttgtacgacctgtgatcgagtaaagttatagtgtgttggtccttatccgaaatgcgtacaaaatgcttgcacatccgaccctcctctcacatgaagtagttggctatataataattgcaatggag

SEQ ID NO: 32274 - DNA, 1044 bp, Muscodor strobelii
  misc_feature: SGI cDNA ID NO. 571122
  misc_feature: Elevated expression when VOC is produced
  misc_feature: Encodes the peptide sequence at SEQ ID NO 32275
atggcctcgtcacaaattccggatttcgatgacctcccccaggtgaaagacatgccccagggttgcgcttggggtatttttgataaagacggcaagaaagatctacttggcacacttaatcttctaactccagaggttgtcaaagccgcatgtgctgaagcgcgagatggcgtgtcagtctctctgaactggccgttgaatgccatggcattccccttgccaggtcgaatagcgcctgagcacaggcaagtcactctgaaggagataggcttgtcggaaggaattgggtgggatgatgagatccatttcaacacacaactcagcagtcagtgggatagcttggttcactggcaacatcaggagtccggtcttgcttacaacggcattaccgtgacaaaggaggcactgggcgtaaaaaccacagcggagaatgagatgccaacgcttgaccactggcactcggctggtggactcgttgcccgaggtgtcctgatcgattacaaggagtgggcggagaagaaggcgcgagcggagggcaagagtggtacagatgccatagtccatgccatggacggtcatcgcatcacgacggatgagatcgaggccattgctaaggatcagggagttgagttccgctccggtgatgtgcttatcatccgcacgggcttgacggaccatctccaggcgccaactccggaagatttccagaagctacagacaacgaagatctctggtgtcgatggaaccattgagacggcgaaatggatttggaacaagcattttgcagcggtagcgggtgatgcgtgggcgtttgaagcgctcccacctcggaaggaagacggtagcccagcaacgcataatgatctggtgctccatccctggctcctgtccatgtttggcatgtcgattggcgaactatggaagctgaacgcgctctcggagcactgtaaggcgtctggacgttatagtttcatgttgacgtcggcgccgttgaatatcccaggtctaattggatcgccgccaaatgcacttgccatattttaa

SEQ ID NO: 32275 - protein, 347 aa, Muscodor strobelii
  misc_feature: SGI Peptide ID NO. 571122
  misc_feature (1)..(347): NCBI GI: 116198581 Blast Desc: CHGG_07446 [Chaetomium globosum CBS 148.51] gi|88178725|gb|EAQ86193.1| CHGG_07446 [Chaetomium globosum CBS 148.51]
  misc_feature (4)..(347): NCBI GI: 171692581 Blast Desc: protein product [Podospora anserina] gi|170946239|emb|CAP73040.1| protein product [Podospora anserina]
  misc_feature (4)..(347): NCBI GI: 256726754 Blast Desc: [Nectria haematococca mpVI 77-13-4]
  misc_feature (4)..(347): NCBI GI: 46122723 Blast Desc: FG05739.1 [Gibberella zeae PH-1]
  misc_feature (4)..(347): NCBI GI: 67537780 Blast Desc: AN5060.2 [Aspergillus nidulans FGSC A4] gi|40740864|gb|EAA60054.1| AN5060.2 [Aspergillus nidulans FGSC A4] gi|259482060|tpe|CBF76177.1| TPA: conserved [Aspergillus FGSC
  misc_feature (4)..(347): NCBI GI: 115399358 Blast Desc: conserved [Aspergillus terreus NIH2624] gi|114192151|gb|EAU33851.1| conserved [Aspergillus terreus NIH2624]
  misc_feature (5)..(347): NCBI GI: 145604292 Blast Desc: MGG_08476 [Magnaporthe grisea 70-15] gi|145012311|gb|EDJ96967.1| MGG_08476 [Magnaporthe grisea 70-15]
  misc_feature (6)..(347): NCBI GI: 255941322 Blast Desc: Pc16g11260 [Penicillium chrysogenum Wisconsin 54-1255] gi|211586053|emb|CAP93796.1| Pc16g11260 [Penicillium chrysogenum Wisconsin 54-1255]
  misc_feature (5)..(347): NCBI GI: 189199068 Blast Desc: conserved [Pyrenophora tritici-repentis Pt-1C-BFP] gi|187982970|gb|EDU48458.1| conserved [Pyrenophora tritici-repentis Pt-1C-BFP]
  misc_feature (5)..(347): NCBI GI: 212527642 Blast Desc: conserved [Penicillium marneffei ATCC 18224] gi|210073376|gb|EEA27463.1| conserved [Penicillium marneffei ATCC 18224]
  misc_feature: Useful for introducing or modulating the production of volatile compounds
MASSQIPDFDDLPQVKDMPQGCAWGIFDKDGKKDLLGTLNLLTPEVVKAACAEARDGVSVSLNWPLNAMAFPLPGRIAPEHRQVTLKEIGLSEGIGWDDEIHFNTQLSSQWDSLVHWQHQESGLAYNGITVTKEALGVKTTAENEMPTLDHWHSAGGLVARGVLIDYKEWAEKKARAEGKSGTDAIVHAMDGHRITTDEIEAIAKDQGVEFRSGDVLIIRTGLTDHLQAPTPEDFQKLQTTKISGVDGTIETAKWIWNKHFAAVAGDAWAFEALPPRKEDGSPATHNDLVLHPWLLSMFGMSIGELWKLNALSEHCKASGRYSFMLTSAPLNIPGLIGSPPNALAIF

SEQ ID NO: 32276 - DNA, 1949 bp, Muscodor strobelii
  misc_feature: SGI EST ID NO. CUFF.76457.0
  misc_feature: Variant of the nucleotide sequence at SEQ ID NO 32274
tgagaatccgaggggtagctgacgggacccgaggggtaaaagataggattaaacgtattcgtaaactccattcgcaaacaaaggcacgaatgcgaggtgcctgctcgtatgggctcgtaccctctaaccgagctggatggtgattcttgtttcaaatataataaatcttcaatgcagatcatttcacacatatcagtccagactggtcttcgcttaggccaaatgaggctggtgccgaagatgcatgttctttgtcgaatcgacatctgcggggtttctggacttctgaatgagggctcgtaaccgcccattgatgacatgatccacacccatcattatcaaattctgggcagggcggtacctcaatgagagaagagcggatctgctccatcgtgccttgtcgtaggattggggggtgccttagtcaagatgcgtcagtcagatggtggacttgatgtcccttgcttcctagcaaaaatagaacttggctaaagccgattgcttggagggcgcatttctacggtcgtctaagattgggcgtatcgatgctctttccctctagaactacatcctatcaaatacattgcaagcataatggcctcgtcacaaattccggatttcgatgacctcccccaggtgaaagacatgccccagggttgcgcttggggtatttttgataaagacggcaagaaagatctacttggcacacttaatcttctaactccagaggttgtcaaagccgcatgtgctgaagcgcgagatggcgtgtcagtctctctgaactggccgttgaatgccatggcattccccttgccaggtcgaatagcgcctgagcacaggcaagtcactctgaaggagataggcttgtcggaaggaattgggtgggatgatgagatccatttcaacacacaactcagcagtcagtgggatagcttggttcactggcaacatcaggagtccggtcttgcttacaacggcattaccgtgacaaaggaggcactgggcgtaaaaaccacagcggagaatgagatgccaacgcttgaccactggcactcggctggtggactcgttgcccgaggtgtcctgatcgattacaaggagtgggcggagaagaaggcgcgagcggagggcaagagtggtacagatgccatagtccatgccatggacggtcatcgcatcacgacggatgagatcgaggccattgctaaggatcagggagttgagttccgctccggtgatgtgcttatcatccgcacgggcttgacggaccatctccaggcgccaactccggaagatttccagaagctacagacaacgaagatctctggtgtcgatggaaccattgagacggcgaaatggatttggaacaagcattttgcagcggtagcgggtgatgcgtgggcgtttgaagcgctcccacctcggaaggaagacggtagcccagcaacgcataatgatctggtgctccatccctggctcctgtccatgtttggcatgtcgattggcgaactatggaagctgaacgcgctctcggagcactgtaaggcgtctggacgttatagtttcatgttgacgtcggcgccgttgaatatcccaggtctaattggatcgccgccaaatgcacttgccatattttaataaacaagctagcaggcgaaggaaagcaattaacaacagaggagttgcgatcaagttgtaaataacaatcagaaagcagctacgtgtatgtcagagccgtcgtttccgtcatggagttgtacatgcaagtcagctggtatcgattgcatgccttccaagctcgttgagaggaatgagtggttggtaacacctaactattgtgctaccacatgcaggtagtggaaacattcgacaacagaaaccagttaactccaaaagaacgtagatggtagaacacacagacttaatgaccattcatcgatccagaccca

SEQ ID NO: 32277 - DNA, 2679 bp, Muscodor strobelii
  misc_feature: SGI cDNA ID NO. 571123
  misc_feature: Reduced expression when VOC is produced
  misc_feature: Encodes the peptide sequence at SEQ ID NO 32278
atggacccggcctcgctagacccgcgtctgcgagaggaccaggactcgatcgtcgtccacgacccggcccagtccgacagcgacgaggacgagcacgacgaccatgactcgccgcagacgcaacacttccacggctcaggcacgtcgccggccttcacgccacagacaccgtcgctcgctggcaacacgccgagcctcgcccatgcgggactgctggaccccaacgaccccaagcggccgcgtgcctgcgaggcctgtcgcgggctgaaggtcaagtgcgaacctgagccctcgaacccggacgggccctgcaagcgctgcaccaaggccgggcgcaactgcgtcgtcacgcagcctacccgcaaacgccagaagaagacggacagccgcgtcgccgagctcgagaagaagatcgatgccctgacggcgagcctccaagccacccgcggtgcgccctcgcactcccagcccgccgcccatgccaatgccccgccgcatcacccgcaagccttcgtccccgacaatcccacagccaagtctctgcgcgaatggggaccgcccatcgtgcccgggctcgacaacaaccagccctatggctccaagtccgaccagcagcagccgcaccaggcgcaggcctacgcgcagccgtcgctggtcatggccggccagaagcgcaagttcaccgagcccagagacgcctcggtcgacaccccgcgcgagtccagcgtgccccggtcctcgaccatcgtccgtcaatactcggacatcgtcgaccgcggcatcatcaccatggacgatgccgccctgctgttccgcaggtacaccgacggcatggcgccccatctgcccgccgtcgtcttccccgcgggcacgaccgtcgccgaggtgcgcaagacgcggcccatcctgttcctctccgtcatgtccgtcgctgcgtccgagacgcccaacatccagcgccagatggtcaaggagctgatgcagatctttgccgagaagatcgtcctcaccggcgagaagagcctcgagctcgtccaggccattatgatcagtgttatctggtacttcccgcccgagcatttcgaggagctcaggttctatcagatggtccacatggctgctgtcatggccatcgacataggcctagggcgcaggcagaacagccccaagtcccgcctcattccctacacctggagagaccaccccttccgaaaagagccgctcccagaccccctcaccatcgaggcgcgccggacatggctcgcgtgctacttcttggctgctaatgtcgccatggcgctgcaccgccccaacctggtccgctggcagcaattcatgaatgaatgtgtcgacatcttgtcgtcttcgcaagaggctgcgccgaccgatcggtatctctgccacctggtctggacccatcgtctggccgaagaggttggtgtgcagttctccatggatgaccccaccgtcttcatcaacatcacggaccagaaagtccagtatgctcttcgcgggtacgaacagaacttggctaagtacagcgacaatgtgcccaaggaagagaaccaaccatctctcatgctcagcttccatgtagtcaatctttacatgcatgaaattgcgctgtatgtcgataaaaacaacgaagaatatcgcgcccctaccaacgccgaagctttgcgtgacccgattcctggcttgggcgatggcttaacctctgcccacataggtgccctgtcatcctgcctcaccgccatcgatggcatatttgaggtcttcctctctctcgacgtacagagtatacgctgtctgcccatctttaacttcgttcgggttgcatatgcagtcgtcgttctcatcaagatctacttcagtgccagctcccccaattcggagctgggcaaggtcatcgacaaggacaacatgaaagtcgctgagtacctggacaagcttctcgacaagtttcgggagacagccgctcaggacaagtctcggcccgccggcaaattcctcgtggtgctggtcatgctccgtggttggttccataaacaaggtcaacctcggccacaacccgatgagcagcagatcgacccagccctcagatcctcacgcccttcccagggcgcagctatgggtaatcagagttcacaggacaacggatctagttccaaaacaacaacccaggatggccagatacagcagccaacccaacacagccagcagcaagcgggatacaatccggctaacacgccgcttcaactactatctgagatcgcgaccgggaatggtatggctagagacggccagacgagtggtccgacttcgagtaccggtgtcccaacaaccgcatacccagcctggatggccgacataccaccccaatttgcttataatccaaacgcaggtgttcccgcaggggcagatggcagcgctggcggcttaggagcagccatgcagcaatcattcatgccttggatgggcgccgggaacgacatagactacgcgagcatgggcgacggcttcgagcaagccatgggtctcaccctcaccgggtttggaggcgccagccccagcgatcctaattatgagaacaacatccgcatgatggcgcaaaacgacactttgctcatgaacatgatggacgcgttccaaggcggtggaaaccccttcagtttctga

SEQ ID NO: 32278 - protein, 892 aa, Muscodor strobelii
  misc_feature: SGI Peptide ID NO. 571123
  misc_feature (81)..(123): Pfam Id: PF00172 Pfam Desc: Fungal Zn(2)-Cys(6) binuclear cluster domain
  misc_feature (6)..(849): NCBI GI: 154301173 Blast Desc: BC1G_10559 [Botryotinia fuckeliana B05.10] gi|150856307|gb|EDN31499.1| BC1G_10559 [Botryotinia fuckeliana B05.10]
  misc_feature (46)..(852): NCBI GI: 171696314 Blast Desc: protein product [Podospora anserina] gi|170948399|emb|CAP60563.1| protein product [Podospora anserina]
  misc_feature (54)..(762): NCBI GI: 156057027 Blast Desc: SS1G_04244 [Sclerotinia sclerotiorum 1980] gi|154702030|gb|EDO01769.1| SS1G_04244 [Sclerotinia sclerotiorum 1980]
  misc_feature (51)..(892): NCBI GI: 256734429 Blast Desc: NECHADRAFT_31076 [Nectria haematococca mpVI 77-13-4]
  misc_feature (30)..(885): NCBI GI: 46108378 Blast Desc: FG01071.1 [Gibberella zeae PH-1]
  misc_feature (61)..(854): NCBI GI: 85119541 Blast Desc: NCU02525 [Neurospora crassa OR74A] gi|28927468|gb|EAA36420.1| [Neurospora crassa OR74A]
  misc_feature (263)..(872): NCBI GI: 116180946 Blast Desc: CHGG_01101 [Chaetomium globosum CBS 148.51] gi|88185398|gb|EAQ92866.1| CHGG_01101 [Chaetomium globosum CBS 148.51]
  misc_feature (76)..(713): NCBI GI: 39958659 Blast Desc: MGG_09276 [Magnaporthe grisea 70-15] gi|145013269|gb|EDJ97910.1| MGG_09276 [Magnaporthe grisea 70-15]
  misc_feature (33)..(762): NCBI GI: 240111469 Blast Desc: Fungal specific transcription factor, [Coccidioides posadasii C735 delta SOWgp]
  misc_feature (33)..(762): NCBI GI: 119188819 Blast Desc: CIMG_04457 [Coccidioides immitis RS]
  misc_feature: Useful for introducing or modulating the production of volatile compounds
MDPASLDPRLREDQDSIVVHDPAQSDSDEDEHDDHDSPQTQHFHGSGTSPAFTPQTPSLAGNTPSLAHAGLLDPNDPKRPRACEACRGLKVKCEPEPSNPDGPCKRCTKAGRNCVVTQPTRKRQKKTDSRVAELEKKIDALTASLQATRGAPSHSQPAAHANAPPHHPQAFVPDNPTAKSLREWGPPIVPGLDNNQPYGSKSDQQQPHQAQAYAQPSLVMAGQKRKFTEPRDASVDTPRESSVPRSSTIVRQYSDIVDRGIITMDDAALLFRRYTDGMAPHLPAVVFPAGTTVAEVRKTRPILFLSVMSVAASETPNIQRQMVKELMQIFAEKIVLTGEKSLELVQAIMISVIWYFPPEHFEELRFYQMVHMAAVMAIDIGLGRRQNSPKSRLIPYTWRDHPFRKEPLPDPLTIEARRTWLACYFLAANVAMALHRPNLVRWQQFMNECVDILSSSQEAAPTDRYLCHLVWTHRLAEEVGVQFSMDDPTVFINITDQKVQYALRGYEQNLAKYSDNVPKEENQPSLMLSFHVVNLYMHEIALYVDKNNEEYRAPTNAEALRDPIPGLGDGLTSAHIGALSSCLTAIDGIFEVFLSLDVQSIRCLPIFNFVRVAYAVVVLIKIYFSASSPNSELGKVIDKDNMKVAEYLDKLLDKFRETAAQDKSRPAGKFLVVLVMLRGWFHKQGQPRPQPDEQQIDPALRSSRPSQGAAMGNQSSQDNGSSSKTTTQDGQIQQPTQHSQQQAGYNPANTPLQLLSEIATGNGMARDGQTSGPTSSTGVPTTAYPAWMADIPPQFAYNPNAGVPAGADGSAGGLGAAMQQSFMPWMGAGNDIDYASMGDGFEQAMGLTLTGFGGASPSDPNYENNIRMMAQNDTLLMNMMDAFQGGGNPFSF

SEQ ID NO: 32279 - DNA, 3380 bp, Muscodor strobelii
  misc_feature: SGI EST ID NO. CUFF.76393.0
  misc_feature: Variant of the nucleotide sequence at SEQ ID NO 32277
ctagcctgcaatggaacggccagggtctagcagctccccagccatttgcattccttcccccttcgcgttgggctgaaaggtcgtctggccatcggcgtcccggttgtaaagacctccgttcagcattcgggaaatcgtcacatcggcgcctcactttgccgcgtccactgcgattcggtgcctgttcggccatcgacgaacacttaattactgtgccagaataggtagtattcagccgcgatggacccggcctcgctagacccgcgtctgcgagaggaccaggactcgatcgtcgtccacgacccggcccagtccgacagcgacgaggacgagcacgacgaccatgactcgccgcagacgcaacacttccacggctcaggcacgtcgccggccttcacgccacagacaccgtcgctcgctggcaacacgccgagcctcgcccatgcgggactgctggaccccaacgaccccaagcggccgcgtgcctgcgaggcctgtcgcgggctgaaggtcaagtgcgaacctgagccctcgaacccggacgggccctgcaagcgctgcaccaaggccgggcgcaactgcgtcgtcacgcagcctacccgcaaacgccagaagaagacggacagccgcgtcgccgagctcgagaagaagatcgatgccctgacggcgagcctccaagccacccgcggtgcgccctcgcactcccagcccgccgcccatgccaatgccccgccgcatcacccgcaagccttcgtccccgacaatcccacagccaagtctctgcgcgaatggggaccgcccatcgtgcccgggctcgacaacaaccagccctatggctccaagtccgaccagcagcagccgcaccaggcgcaggcctacgcgcagccgtcgctggtcatggccggccagaagcgcaagttcaccgagcccagagacgcctcggtcgacaccccgcgcgagtccagcgtgccccggtcctcgaccatcgtccgtcaatactcggacatcgtcgaccgcggcatcatcaccatggacgatgccgccctgctgttccgcaggtacaccgacggcatggcgccccatctgcccgccgtcgtcttccccgcgggcacgaccgtcgccgaggtgcgcaagacgcggcccatcctgttcctctccgtcatgtccgtcgctgcgtccgagacgcccaacatccagcgccagatggtcaaggagctgatgcagatctttgccgagaagatcgtcctcaccggcgagaagagcctcgagctcgtccaggccattatgatcagtgttatctggtacttcccgcccgagcatttcgaggagctcaggttctatcagatggtccacatggctgctgtcatggccatcgacataggcctagggcgcaggcagaacagccccaagtcccgcctcattccctacacctggagagaccaccccttccgaaaagagccgctcccagaccccctcaccatcgaggcgcgccggacatggctcgcgtgctacttcttggctgctaatgtcgccatggcgctgcaccgccccaacctggtccgctggcagcaattcatgaatgaatgtgtcgacatcttgtcgtcttcgcaagaggctgcgccgaccgatcggtatctctgccacctggtctggacccatcgtctggccgaagaggttggtgtgcagttctccatggatgaccccaccgtcttcatcaacatcacggaccagaaagtccagtatgctcttcgcgggtacgaacagaacttggctaagtacagcgacaatgtgcccaaggaagagaaccaaccatctctcatgctcagcttccatgtagtcaatctttacatgcatgaaattgcgctgtatgtcgataaaaacaacgaagaatatcgcgcccctaccaacgccgaagctttgcgtgacccgattcctggcttgggcgatggcttaacctctgcccacataggtgccctgtcatcctgcctcaccgccatcgatggcatatttgaggtcttcctctctctcgacgtacagagtatacgctgtctgcccatctttaacttcgttcgggttgcatatgcagtcgtcgttctcatcaagatctacttcagtgccagctcccccaattcggagctgggcaaggtcatcgacaaggacaacatgaaagtcgctgagtacctggacaagcttctcgacaagtttcgggagacagccgctcaggacaagtctcggcccgccggcaaattcctcgtggtgctggtcatgctccgtggttggttccataaacaaggtcaacctcggccacaacccgatgagcagcagatcgacccagccctcagatcctcacgcccttcccagggcgcagctatgggtaatcagagttcacaggacaacggatctagttccaaaacaacaacccaggatggccagatacagcagccaacccaacacagccagcagcaagcgggatacaatccggctaacacgccgcttcaactactatctgagatcgcgaccgggaatggtatggctagagacggccagacgagtggtccgacttcgagtaccggtgtcccaacaaccgcatacccagcctggatggccgacataccaccccaatttgcttataatccaaacgcaggtgttcccgcaggggcagatggcagcgctggcggcttaggagcagccatgcagcaatcattcatgccttggatgggcgccgggaacgacatagactacgcgagcatgggcgacggcttcgagcaagccatgggtctcaccctcaccgggtttggaggcgccagccccagcgatcctaattatgagaacaacatccgcatgatggcgcaaaacgacactttgctcatgaacatgatggacgcgttccaaggcggtggaaaccccttcagtttctgaccgtcctgatccatgtcctacacaacaaccctcgctgatacgctaacaatgaaatgcgctgctttcaattttggtagaaaatttgtggaaagaagggtaaacaaaagttatgacaatgacaacggcaatgatttgatttccctcggcgtcttcgaggatcttagttccaagcgaaatgcaagcggttgccatccactctctagctttgctgtacaacaacaatcatgtccgggactttgacctcactacaagcgggaggttatgccaatcgacgattatctgtgtatgtatgattagatgacgcttatcgcacctagctacggctatatatgatgaataattatgggattcaaactgtaaaaccacatcatttcgcgccctgcacgcatgttcataggttgtgcatactcatattcataggttgtggtattcatgttcataggttgtgaatactcacgact

SEQ ID NO: 32280 - DNA, 654 bp, Muscodor strobelii
  misc_feature: SGI cDNA ID NO. 571124
  misc_feature: Encodes the peptide sequence at SEQ ID NO 32281
atgtcgaacgactctcccaacaacggcccccccaacgaccgccgtggctctgtcacatccgctgcattctccagcctgtttcaacgaagcaactcgatttccaccggcaatggcaccggtcgcgagtccgtctcatcagctgcagcacgcgaccagcgtcggcgtctctctgtcaccacactaggtttatctggtacatctcctccagctggcacaacgcctttcggtctccgtcgcggcagcatctcaactaccaactccgactccattgatgagagtgccgtagaggacgaggagtcagctaggatgccgccagtatcgccgttcgcccgccgagtaagctttggtgcacaggcaatgcgcaatatgcgcacgggtcaatcaagcccaggttccgacaacggttacaattggactgagcagcttagatctcgtgctgagagtagcgttgcagcccaacgcccaagccttggctctggagccgcctctggctccccaccgcgtggtagcgtccatcacgaccgtgccaaatccgtttcggacatgcctatccctcctcgacagcctgaggttatgaaacccaagcaacccgagagacccaagcctgatcatatgcaggagcgtatcctgaagggtgatttctatatggactga

SEQ ID NO: 32281 - protein, 217 aa, Muscodor strobelii
  misc_feature: SGI Peptide ID NO. 571124
  misc_feature (1)..(217): NCBI GI: 156056869 Blast Desc: SS1G_04165 [Sclerotinia sclerotiorum 1980] gi|154701951|gb|EDO01690.1| SS1G_04165 [Sclerotinia sclerotiorum 1980]
  misc_feature (2)..(217): NCBI GI: 154323628 Blast Desc: BC1G_00213 [Botryotinia fuckeliana B05.10] gi|150842442|gb|EDN17635.1| BC1G_00213 [Botryotinia fuckeliana B05.10]
  misc_feature (14)..(217): NCBI GI: 171696320 Blast Desc: protein product [Podospora anserina] gi|170948402|emb|CAP60566.1| protein product [Podospora anserina]
  misc_feature (1)..(217): NCBI GI: 116180944 Blast Desc: CHGG_01100 [Chaetomium globosum CBS 148.51] gi|88185397|gb|EAQ92865.1| CHGG_01100 [Chaetomium globosum CBS 148.51]
  misc_feature (1)..(217): NCBI GI: 169601314 Blast Desc: SNOG_03521 [Phaeosphaeria nodorum SN15] gi|160705906|gb|EAT88726.2| SNOG_03521 [Phaeosphaeria nodorum SN15]
  misc_feature (13)..(217): NCBI GI: 46108372 Blast Desc: FG01068.1 [Gibberella zeae PH-1]
  misc_feature (84)..(217): NCBI GI: 261356469 Blast Desc: conserved [Verticillium albo-atrum VaMs.102]
  misc_feature (11)..(133): NCBI GI: 145605439 Blast Desc: MGG_11737 [Magnaporthe grisea 70-15] gi|145013268|gb|EDJ97909.1| MGG_11737 [Magnaporthe grisea 70-15]
  misc_feature (135)..(217): NCBI GI: 256735145 Blast Desc: NECHADRAFT_74686 [Nectria haematococca mpVI 77-13-4]
  misc_feature (5)..(217): NCBI GI: 169775541 Blast Desc: [Aspergillus oryzae RIB40] gi|238495793|ref|XP_002379132.1| conserved [Aspergillus flavus NRRL3357] gi|83770101|dbj|BAE60236.1| protein product oryzae]
MSNDSPNNGPPNDRRGSVTSAAFSSLFQRSNSISTGNGTGRESVSSAAARDQRRRLSVTTLGLSGTSPPAGTTPFGLRRGSISTTNSDSIDESAVEDEESARMPPVSPFARRVSFGAQAMRNMRTGQSSPGSDNGYNWTEQLRSRAESSVAAQRPSLGSGAASGSPPRGSVHHDRAKSVSDMPIPPRQPEVMKPKQPERPKPDHMQERILKGDFYMD

SEQ ID NO: 32282 - DNA, 2212 bp, Muscodor strobelii
  misc_feature: SGI EST ID NO. CUFF.76572.1
  misc_feature: Variant of the nucleotide sequence at SEQ ID NO 32280
ataggagtcacattaaaccttcgttggagccttccattcagaatctattcacaggagtgctattgattccattacccacgcccctgcacttgctgctaaatccgaccttcataatcgatcctgtccatcattcccttgcggttcctgtcccaagcccatcctgatcccatcctcattccttcattctctttcatttcagcctaccatctgttcaagtaaaccactagactcagcctgtctaacacacacgacagttaccccgctctcattcactttcaacctctcctggacctcgactatcggctatctattgtccactgtttgtcatcagtggattcgtgtaccttgagctactggcctaaacgtcgactacaggcctaagtctgaacctattcgagtcaggaccatctacaataccaaactggactgtctgcataacttcgccttgtgtgcgtgttgcaattcggtctaattcacgtctcaactctgtctctctcggacagtagcgtcaaaggagtggctgtcctacttgtctcaagtcatttgcccccgaacgattcaacacgatacatcgtcccatacaaaggacgtgctctgccggttgtttgttccacacattagctcaagatctagcccccaggaccattcgtgctagacttgacctataaaagctccccgcacctggtcgattacgcaccttggcagggttcctacagagctatcggcgtgtctgtacaaccacgactgccctcaccaacgaccagactgtttcgtcacgtggctccgactgggacgctgtctttatttgtgcatcatctactctgctggcagcaacttcctactttactccaatcattctcgcacactcgtcaacatgtcgaacgactctcccaacaacggcccccccaacgaccgccgtggctctgtcacatccgctgcattctccagcctgtttcaacgaagcaactcgatttccaccggcaatggcaccggtcgcgagtccgtctcatcagctgcagcacgcgaccagcgtcggcgtctctctgtcaccacactaggtttatctggtacatctcctccagctggcacaacgcctttcggtctccgtcgcggcagcatctcaactaccaactccgactccattgatgagagtgccgtagaggacgaggagtcagctaggatgccgccagtatcgccgttcgcccgccgagtaagctttggtgcacaggcaatgcgcaatatgcgcacgggtcaatcaagcccaggttccgacaacggttacaattggactgagcagcttagatctcgtgctgagagtagcgttgcagcccaacgcccaagccttggctctggagccgcctctggctccccaccgcgtggtagcgtccatcacgaccgtgccaaatccgtttcggacatgcctatccctcctcgacagcctgaggttatgaaacccaagcaacccgagagacccaagcctgatcatatgcaggagcgtatcctgaagggtgatttctatatggactgagacatgctggtctcaatgaagactcataatgaaatgtcgtccacggtttgacgacatgttgcccgccaaccatcacattggtcggagtttgatttccagttgattttgcacgccggaatggctagccgcctcacatttgctccgtgtcgctttttttcgtctgtttcctgtcggtgttaagggccgagaaaacaaaagaataactaaaggaaggtcgcactgaaagtgccgtgtacgatccagcaatgttgatatgaagaacacatagtcttcgagtggcgtcgtgggcgagacatgcaaatctttggcggctcgtcctgttatgcgatatgatgcaatgagatgaatcattccgggaagatttgaggaagcatcgggcggtacgattagcagagggtatctgaaatgggtaccaaagtcgagatttgatgtgagtcctcaactcgaatggattttccaaacgccaacgcggctctatctgcatgtatgatatggggcgttcatctgggcggataaaggtcgagagaacacaactgccgacctatctatttagcttcgtacatagcttcggctgagatgccaacaactagacagacgtcttcagccaatgaaagtaattggtcaagtctggtagttgtcaatatgagatcttcaagttacataaatgcattgcctgtatcgaac

SEQ ID NO: 32283 - DNA, 1230 bp, Muscodor strobelii
  misc_feature: SGI cDNA ID NO. 571125
  misc_feature: Encodes the peptide sequence at SEQ ID NO 32284
atgttagttataaaagccaaggtaatccctcctcgtgggacgccggctgagtccaaatcgcgtttgtcttcactgcctcttctccttcccaacaacaattatctaaacgtagctgagaagcatgtcattctcaatctcaagcctccttcaatggggaagacggccggtaaccgggacggcatatggagtcttccgtatccgcccgacgcacttcccggcggacgtgttgtagaaacaccatatggttctattcaggtctacgagtggggtccagaagacggcgaacgtatgcttttcgttcatggcattagcacacctattgttgctcttggagacttgggacatgagatggtggctaaaggctgtagagttatgatgttcgatctgttcggccgcggctattccgacgccccaaacgacctggcttatgactcacgactttatgtaacacaattgcttctagttatcgcttcgtctaagttgccgtggtgctcgggcttcaatcttgtgggctattctctaggaggcggtctctcagtagctttcactcgttactttccgcatcttgtgcgctcactcattctcattgcaccatgcggactaatcagggcccatcacgtgggctggagaagctggctattctataattcaagacttctacccgaatttcttgtgaaacggctagtgaagcgccgtattcgccccgaagtagattctgcttacgcggtacatgaaccgggagccggcgccacggacatcattgttgctgagagcgggggcaagcttaccgtgaaaggcgacggagatacgaacgggggcgcagggttcaacagcgccgcgatctcaaagacccgaccgcacgttactgtatcgtcagttgtcgcctggcaagttgataaccatgaaggctttgtcgacgcattcatgagcacaattcgccaggcgccaatctacgcgccacaggaagactggacgaagctagcttctattcttgaagatcgacggaccactagttcccgtactcgagatttgcacggtcttgaaagcggtaaaatactcatcgtgttgggtgaagatgatggcgtgatcgttcgggacgagaccgtgcatgacgcagaggcggtgctaggctcaaacggtgtcgagtttgctgtattggtgggagggcatgagttgccaatcactaacagcgagagcgttgcagaagttatagacacttttttgcggtaa

SEQ ID NO: 32284 - protein, 409 aa, Muscodor strobelii
  misc_feature: SGI Peptide ID NO. 571125
  misc_feature (122)..(406): Pfam Id: PF00561 Pfam Desc: alpha/beta hydrolase fold
  misc_feature (63)..(407): NCBI GI: 145610141 Blast Desc: MGG_12616 [Magnaporthe grisea 70-15] gi|145017511|gb|EDK01874.1| MGG_12616 [Magnaporthe grisea 70-15]
  misc_feature (57)..(407): NCBI GI: 171683891 Blast Desc: protein product [Podospora anserina] gi|170941906|emb|CAP67558.1| protein product [Podospora anserina]
  misc_feature (57)..(407): NCBI GI: 85113693 Blast Desc: NCU03158 [Neurospora crassa OR74A] gi|28926351|gb|EAA35328.1| conserved [Neurospora crassa OR74A]
  misc_feature (63)..(330): NCBI GI: 149209879 Blast Desc: MGCH7_ch7g421 [Magnaporthe grisea 70-15] gi|86196376|gb|EAQ71014.1| MGCH7_ch7g421 [Magnaporthe grisea 70-15]
  misc_feature (64)..(404): NCBI GI: 169763964 Blast Desc: [Aspergillus oryzae RIB40] gi|238489941|ref|XP_002376208.1| alpha/beta hydrolase family protein, [Aspergillus flavus NRRL3357] protein product oryzae]
  misc_feature (65)..(408): NCBI GI: 67538010 Blast Desc: AN5175.2 [Aspergillus nidulans FGSC A4] gi|40743166|gb|EAA62356.1| AN5175.2 [Aspergillus nidulans FGSC A4] gi|259484631|tpe|CBF81019.1| TPA: alpha/beta hydrolase family
  misc_feature (67)..(409): NCBI GI: 212540580 Blast Desc: alpha/beta hydrolase family protein, [Penicillium marneffei ATCC 18224] gi|210067744|gb|EEA21836.1| alpha/beta hydrolase family protein, [Penicillium marneffei ATCC 18224]
  misc_feature (64)..(408): NCBI GI: 145238718 Blast Desc: An07g09320 [Aspergillus niger] gi|134076501|emb|CAK39697.1| protein product [Aspergillus niger]
  misc_feature (63)..(409): NCBI GI: 70991501 Blast Desc: alpha/beta hydrolase family protein [Aspergillus fumigatus Af293] gi|66848232|gb|EAL88561.1| alpha/beta hydrolase family protein, [Aspergillus fumigatus Af293]
  misc_feature (63)..(409): NCBI GI: 159124155 Blast Desc: alpha/beta hydrolase, [Aspergillus fumigatus A1163]
MLVIKAKVIPPRGTPAESKSRLSSLPLLLPNNNYLNVAEKHVILNLKPPSMGKTAGNRDGIWSLPYPPDALPGGRVVETPYGSIQVYEWGPEDGERMLFVHGISTPIVALGDLGHEMVAKGCRVMMFDLFGRGYSDAPNDLAYDSRLYVTQLLLVIASSKLPWCSGFNLVGYSLGGGLSVAFTRYFPHLVRSLILIAPCGLIRAHHVGWRSWLFYNSRLLPEFLVKRLVKRRIRPEVDSAYAVHEPGAGATDIIVAESGGKLTVKGDGDTNGGAGFNSAAISKTRPHVTVSSVVAWQVDNHEGFVDAFMSTIRQAPIYAPQEDWTKLASILEDRRTTSSRTRDLHGLESGKILIVLGEDDGVIVRDETVHDAEAVLGSNGVEFAVLVGGHELPITNSESVAEVIDTFLR

SEQ ID NO: 32285 - DNA, 2094 bp, Muscodor strobelii
  misc_feature: SGI EST ID NO. CUFF.76412.2
  misc_feature: Variant of the nucleotide sequence at SEQ ID NO 32283
ctggctatcttaccgaacacttgaccattaattatctcttaaccttgaacgtttaatatgcggaacgtcgcttacttcacgagaactagatcatgaggcattgagccgatgttagttataaaagccaaggtaatccctcctcgtgggacgccggctgagtccaaatcgcgtttgtcttcactgcctcttctccttcccaacaacaattatctaaacgtagctgagaagcatgtcattctcaatctcaagcctccttcaatggggaagacggccggtaaccggtacgtctccagctttaccgggtcttctggtgatagcagcggcttgcgtatctcttggattgatattccgacctatgaaagcaaagaaagaactgttcacgccatccccgaaaaaattaacagtagccgaatcgtctagggacggcatatggagtcttccgtatccgcccgacgcacttcccggcggacgtgttgtagaaacaccatatggttctattcaggtctacgagtggggtccagaagacggcgaacgtatgcttttcgttcatggcattagcacacctattgttgctcttggagacttgggacatgagatggtggctaaaggctgtagagttatgatgttcgatctgttcggccgcggctattccgacgccccaaacgacctggcttatgactcacgactttatgtaacacaattgcttctagttatcgcttcgtctaagttgccgtggtgctcgggcttcaatcttgtgggctattctctaggaggcggtctctcagtagctttcactcgttactttccgcatcttgtgcgctcactcattctcattgcaccatgcggactaatcagggcccatcacgtgggctggagaagctggctattctataattcaagacttctacccgaatttcttgtgaaacggctagtgaagcgccgtattcgccccgaagtagattctgcttacgcggtacatgaaccgggagccggcgccacggacatcattgttgctgagagcgggggcaagcttaccgtgaaaggcgacggagatacgaacgggggcgcagggttcaacagcgccgcgatctcaaagacccgaccgcacgttactgtatcgtcagttgtcgcctggcaagttgataaccatgaaggctttgtcgacgcattcatgagcacaattcgccaggcgccaatctacgcgccacaggaagactggacgaagctagcttctattcttgaagatcgacggaccactagttcccgtactcgagatttgcacggtcttgaaagcggtaaaatactcatcgtgttgggtgaagatgatggcgtgatcgttcgggacgagaccgtgcatgacgcagaggcggtgctaggctcaaacggtgtcgagtttgctgtattggtgggagggcatgagttgccaatcactaacagcgagagcgttgcagaagttatagacacttttttgcggtaatcaccgaaacattgacgacaaacgttggaactagcttagaattctaagcggctcgctccatagtgatcgctctcgggatttcggtggtgcttaggttcctcggccccttttctttgacttcaaagatagccaagcaacactcatagaccttatgcctagaatttatttgagcttgttaaagagtggcctaacctatttaacgtactttccaccgtgcaacatcacgaagatacagcaaagtggcctaattgatatccacccgttgactattctagccatttcagcttctcacctctcatagtatggttagatacaatttgaagtcctttcaacttaatgtcgagttgcacttggaggatgaaaacttatcactttgttcctcgaagctctccaggaaacagagaacggatatggtagggtggtagcaggttttcacatgctccacggacccagcaagtcaaagtgaccggttcattctatgcagaatcgagaacttgttttggccatgtctaagcaatgattgtgagtatgaataagccactttgctaccaaactgcaaggcccccagaatgaggaatattgcagcgcgcagcatgcagcatgcaggtcaggtagct

SEQ ID NO: 32286 - DNA, 1551 bp, Muscodor strobelii
  misc_feature: SGI cDNA ID NO. 571126
  misc_feature: Elevated expression when VOC is produced
  misc_feature: Encodes the peptide sequence at SEQ ID NO 32287
atgtcggccctcatgaaaacgcccccaaaatatgtccttgcctgcctgggcgcctccatcggtgggcttatgaacggctacgacacaggctcaatcggcgcaataacctccatgccgcaattctctgcttccatcggttcgctgacgccgacattaatcggtatcacggtctcaatgatcatgctcaccggcataatcccctctattttcgttggtcaccttgccgataaaatcggccgtttacgagttattgcaccaggcgctattctcttcggtctcggcagtattctacaaggcacctcctattctctcgcacaattcctagttgggagaagtatagctggaatcgggcagggtgttttcctgagtaatgtgtcggtatacatttgcgagattgcgccagtgaggcaccgcggtgcgttgtctggattgccccaatttatggctacagcgggtatcgtgctgggctacttcacttgctatggaagtgtcgatatagcaagtgactgggcgtggcggatcccttttgttgtgcagagcttcctgtcgctgaccctgatgatggcgtgtagagtggcaccagagagccccagatggttgctgctgcacggacgacgagaagacgctgtgaattcgttgacgagactgaatattgatggggcggaggaaataagggagattctctcagccagtgaccaagcgaatggattgagcccgtggcagggatttttgctacttttccgccgcgcatatcgcgcgaggactatacttgcgttgtttatcctcggcatggtacaactgagtggtattgatgctgtcatctactacgcccctactctatttagaaaagccggtctgtcgtcagatagtgcttctttcctcgcctcgggggtgtcgggaattctcatgttcgccatctcgatccctgggttcctactcgctgataaatgggggcgaaggacgtctgccctcactggaggaattatactttctagttgtatgtttttgatgggaagtctttatgcagccggagttgtgcatgcggacggggttgcgagatggttcgtcatacttgctgtttttgtctttggactgacatattgcgttacctggggtatcgttggaaagatctatgcgagcgaaattcagcctgggaacacaagagcggctgcgaactgtgtggctttggggttgagcttcttcacaaactggctcgtcgcgattcttgctccgatcttgctagatgcttcatcattcgcagcctatttcctttttggaacactcgctttagggactgttgttgtgttggctgcatatatgccagagacccgaggacgaactctcgaagatattcaagaggcgttccatcgacccgctctaagctccctgaccagctcccttcaacagctcgtgcctcttcgacgacgccgagcccctcatacagagtctccagtcgagttagaattgcggagcgtgagcgactccggagcagcgagttcggtgtcggttgaggcacctgtaatgtctatgagactggaaatggcagcctaa

SEQ ID NO: 32287 - protein, 516 aa, Muscodor strobelii
  misc_feature: SGI Peptide ID NO. 571126
  misc_feature (18)..(411): Pfam Id: PF07690 Pfam Desc: Major Facilitator Superfamily
  misc_feature (14)..(455): Pfam Id: PF00083 Pfam Desc: Sugar (and other) transporter
  misc_feature (5)..(462): NCBI GI: 70990308 Blast Desc: MFS sugar transporter [Aspergillus fumigatus Af293] gi|66847635|gb|EAL87965.1| MFS sugar transporter, [Aspergillus fumigatus Af293] gi|159130483|gb|EDP55596.1| MFS sugar fumigatus
  misc_feature (8)..(501): NCBI GI: 156045882 Blast Desc: SS1G_09217 [Sclerotinia sclerotiorum 1980] gi|154693613|gb|EDN93351.1| SS1G_09217 [Sclerotinia sclerotiorum 1980]
  misc_feature (3)..(482): NCBI GI: 169613272 Blast Desc: SNOG_09766 [Phaeosphaeria nodorum SN15] gi|111061911|gb|EAT83031.1| SNOG_09766 [Phaeosphaeria nodorum SN15]
  misc_feature (5)..(469): NCBI GI: 212528920 Blast Desc: MFS sugar transporter, [Penicillium marneffei ATCC 18224] gi|210074015|gb|EEA28102.1| MFS sugar transporter, [Penicillium marneffei ATCC 18224]
  misc_feature (6)..(476): NCBI GI: 169766782 Blast Desc: [Aspergillus oryzae RIB40] gi|83765717|dbj|BAE55860.1| protein product [Aspergillus oryzae]
  misc_feature (6)..(470): NCBI GI: 242765121 Blast Desc: MFS sugar transporter, [Talaromyces stipitatus ATCC 10500] gi|218724106|gb|EED23523.1| MFS sugar transporter, [Talaromyces stipitatus ATCC 10500]
  misc_feature (19)..(476): NCBI GI: 238483553 Blast Desc: MFS sugar transporter, [Aspergillus flavus NRRL3357] gi|220701065|gb|EED57403.1| MFS sugar transporter, [Aspergillus flavus NRRL3357]
  misc_feature (5)..(455): NCBI GI: 115396012 Blast Desc: [Aspergillus terreus NIH2624] gi|114193214|gb|EAU34914.1| [Aspergillus terreus NIH2624]
  misc_feature (6)..(456): NCBI GI: 255940202 Blast Desc: Pc16g05260 [Penicillium chrysogenum Wisconsin 54-1255] gi|211585493|emb|CAP93196.1| Pc16g05260 [Penicillium chrysogenum Wisconsin 54-1255]
  misc_feature (28)..(462): NCBI GI: 119497269 Blast Desc: MFS sugar transporter, [Neosartorya fischeri NRRL 181] gi|119413557|gb|EAW23498.1| MFS sugar transporter, [Neosartorya fischeri NRRL 181]
  misc_feature: Useful for introducing or modulating the production of volatile compounds
MSALMKTPPKYVLACLGASIGGLMNGYDTGSIGAITSMPQFSASIGSLTPTLIGITVSMIMLTGIIPSIFVGHLADKIGRLRVIAPGAILFGLGSILQGTSYSLAQFLVGRSIAGIGQGVFLSNVSVYICEIAPVRHRGALSGLPQFMATAGIVLGYFTCYGSVDIASDWAWRIPFVVQSFLSLTLMMACRVAPESPRWLLLHGRREDAVNSLTRLNIDGAEEIREILSASDQANGLSPWQGFLLLFRRAYRARTILALFILGMVQLSGIDAVIYYAPTLFRKAGLSSDSASFLASGVSGILMFAISIPGFLLADKWGRRTSALTGGIILSSCMFLMGSLYAAGVVHADGVARWFVILAVFVFGLTYCVTWGIVGKIYASEIQPGNTRAAANCVALGLSFFTNWLVAILAPILLDASSFAAYFLFGTLALGTVVVLAAYMPETRGRTLEDIQEAFHRPALSSLTSSLQQLVPLRRRRAPHTESPVELELRSVSDSGAASSVSVEAPVMSMRLEMAA

SEQ ID NO: 32288 - DNA, 1563 bp, Muscodor strobelii
  misc_feature: SGI EST ID NO. CUFF.76409.0
  misc_feature: Variant of the nucleotide sequence at SEQ ID NO 32286
tgaagatctctgaccaaaatgtcggccctcatgaaaacgcccccaaaatatgtccttgcctgcctgggcgcctccatcggtgggcttatgaacggctacgacacaggctcaatcggcgcaataacctccatgccgcaattctctgcttccatcggttcgctgacgccgacattaatcggtatcacggtctcaatgatcatgctcaccggcataatcccctctattttcgttggtcaccttgccgataaaatcggccgtttacgagttattgcaccaggcgctattctcttcggtctcggcagtattctacaaggcacctcctattctctcgcacaattcctagttgggagaagtatagctggaatcgggcagggtgttttcctgagtaatgtgtcggtatacatttgcgagattgcgccagtgaggcaccgcggtgcgttgtctggattgccccaatttatggctacagcgggtatcgtgctgggctacttcacttgctatggaagtgtcgatatagcaagtgactgggcgtggcggatcccttttgttgtgcagagcttcctgtcgctgaccctgatgatggcgtgtagagtggcaccagagagccccagatggttgctgctgcacggacgacgagaagacgctgtgaattcgttgacgagactgaatattgatggggcggaggaaataagggagattctctcagccagtgaccaagcgaatggattgagcccgtggcagggatttttgctacttttccgccgcgcatatcgcgcgaggactatacttgcgttgtttatcctcggcatggtacaactgagtggtattgatgctgtcatctactacgcccctactctatttagaaaagccggtctgtcgtcagatagtgcttctttcctcgcctcgggggtgtcgggaattctcatgttcgccatctcgatccctgggttcctactcgctgataaatgggggcgaaggacgtctgccctcactggaggaattatactttctagttgtatgtttttgatgggaagtctttatgcagccggagttgtgcatgcggacggggttgcgagatggttcgtcatacttgctgtttttgtctttggactgacatattgcgttacctggggtatcgttggaaagatctatgcgagcgaaattcagcctgggaacacaagagcggctgcgaactgtgtggctttggggttgagcttcttcacaaactggctcgtcgcgattcttgctccgatcttgctagatgcttcatcattcgcagcctatttcctttttggaacactcgctttagggactgttgttgtgttggctgcatatatgccagagacccgaggacgaactctcgaagatattcaagaggcgttccatcgacccgctctaagctccctgaccagctcccttcaacagctcgtgcctcttcgacgacgccgagcccctcatacagagtctccagtcgagttagaattgcggagcgtgagcgactccggagcagcgagttcggtgtcggttgaggcacctgtaatgtctatgagactggaaatggca

SEQ ID NO: 32289 - DNA, 1593 bp, Muscodor strobelii
  misc_feature: SGI cDNA ID NO. 571127
  misc_feature: Encodes the peptide sequence at SEQ ID NO 32290
atgtctatagagcccgagaacctgagtcgacacgaagagacggcaaatacaaatgagaagacaacaagggaagagctcgccaacgtagaagccggtccagagcggtatgacgacgaagaaatagctcggctggagaagctgaggaaacaatatggcgcaacatgggaaagtccagacgacccatcagatccatacaactggccattcgtcaggaaaaccatcataggcgtcgtcatgtcactcggagcgctagtgacactgatcggagcaagcgtaacggcaccggcactcgataagatagcagcagacacaggtctcgatcccgaaacggcacaaatcagtttctctatctattttctgggccttgcgtttggaccgttcgtcatcgctgcgattagcgagatgaacggtaggagaaatatttggattgtgtcaaatctttggtttatactatggaacacgctttgccccgttggatataataagggcctgttgattgcgggaagatttttggcggcgacaggggctagtgctgggaatactcttatcggtcccttaatggcagacatgttcagagcgaaagatcgcggaatgtcgcaagccatcgccgcctttcttccatatcttggtcctgcccttgggcccatcatcggcggctcggtaagcgacaggattgactggccatggctcttttacgtcgtgagtataatcaacgccgtcgttcttgtaatcggctttcttgcaattccagagacctatacacctgctcttttgcgtcgtaaagcggcagcgctttggcaaagtacagatggagttcttgagtcgccgacgaagatgagcgactgggagttttggcgagtgtttctctcgcaactaggcacgaacttgcttcgaccagtgcttatccttgtttatcgtcctgtcatgtacattatctgtatcaacttggctgtctcttttggtgtctacactttaatgttgtctacgttttcgtcattatggatcgaccagtatggggaatcggaagtcacgagcagtctgcattatatcactatcagcgtgggaatcactctggcgacacaagtcggtgggcgagcgatggacagaatatatcgccatctgcgcgagcgtgatgcggccaggagaggcgttgatattgcggctggagggaagcttcctgaaggaaaaccagagtatcgtgttccatacatgattctccccattttccttcttccagcaggcctattctggtacggttggagcgcacaataccgctaccactggatcgtcgtggacctcggagctgccgtgttcgccgtaggcgattttgcgtattctcaagcactcgcggcgtacacactggatgagtttggtcaatacgccgcgtctgctgttgcagggcagcgagtactgtcccagatctttggttttgcgttccctattttcgcgccccaactttataagatgttgaactacggctgggccaacagtttattgggtttaattttcatcgtcatcgcttttcctacacctgtatgtttgtggatatggggcgaaaggctccgggcaattggtagacagcgtttcgattga

SEQ ID NO: 32290 - protein, 530 aa, Muscodor strobelii
  misc_feature: SGI Peptide ID NO. 571127
  misc_feature (79)..(480): Pfam Id: PF07690 Pfam Desc: Major Facilitator Superfamily
  misc_feature (29)..(527): NCBI GI: 238489921 Blast Desc: efflux pump antibiotic resistance protein, [Aspergillus flavus NRRL3357] gi|220698586|gb|EED54926.1| efflux pump antibiotic resistance protein, [Aspergillus flavus NRRL3357]
  misc_feature (29)..(527): NCBI GI: 169763946 Blast Desc: [Aspergillus oryzae RIB40] gi|83770901|dbj|BAE61034.1| protein product [Aspergillus oryzae]
  misc_feature (42)..(526): NCBI GI: 169597159 Blast Desc: SNOG_01362 [Phaeosphaeria nodorum SN15] gi|160707460|gb|EAT91011.2| SNOG_01362 [Phaeosphaeria nodorum SN15]
  misc_feature (15)..(527): NCBI GI: 242769211 Blast Desc: florfenicol exporter, [Talaromyces stipitatus ATCC 10500] gi|218724920|gb|EED24337.1| florfenicol exporter, [Talaromyces stipitatus ATCC 10500]
  misc_feature (15)..(528): NCBI GI: 225562434 Blast Desc: conserved [Ajellomyces capsulatus G186AR]
  misc_feature (13)..(526): NCBI GI: 225680941 Blast Desc: membrane transport protein [Paracoccidioides brasiliensis Pb03]
  misc_feature (4)..(522): NCBI GI: 259483026 Blast Desc: TPA: MFS multidrug transporter, (AFU_orthologue; AFUA_6G03040) [Aspergillus nidulans FGSC A4]
  misc_feature (54)..(524): NCBI GI: 238495919 Blast Desc: efflux pump antibiotic resistance protein, [Aspergillus flavus NRRL3357] gi|220694075|gb|EED50419.1| efflux pump antibiotic resistance protein, [Aspergillus flavus NRRL3357]
  misc_feature (11)..(524): NCBI GI: 242781573 Blast Desc: MFS multidrug transporter, [Talaromyces stipitatus ATCC 10500] gi|218719974|gb|EED19393.1| MFS multidrug transporter, [Talaromyces stipitatus ATCC 10500]
  misc_feature (18)..(522): NCBI GI: 119467378 Blast Desc: MFS multidrug transporter, [Neosartorya fischeri NRRL 181] gi|119405647|gb|EAW15598.1| MFS multidrug transporter, [Neosartorya fischeri NRRL 181]
MSIEPENLSRHEETANTNEKTTREELANVEAGPERYDDEEIARLEKLRKQYGATWESPDDPSDPYNWPFVRKTIIGVVMSLGALVTLIGASVTAPALDKIAADTGLDPETAQISFSIYFLGLAFGPFVIAAISEMNGRRNIWIVSNLWFILWNTLCPVGYNKGLLIAGRFLAATGASAGNTLIGPLMADMFRAKDRGMSQAIAAFLPYLGPALGPIIGGSVSDRIDWPWLFYVVSIINAVVLVIGFLAIPETYTPALLRRKAAALWQSTDGVLESPTKMSDWEFWRVFLSQLGTNLLRPVLILVYRPVMYIICINLAVSFGVYTLMLSTFSSLWIDQYGESEVTSSLHYITISVGITLATQVGGRAMDRIYRHLRERDAARRGVDIAAGGKLPEGKPEYRVPYMILPIFLLPAGLFWYGWSAQYRYHWIVVDLGAAVFAVGDFAYSQALAAYTLDEFGQYAASAVAGQRVLSQIFGFAFPIFAPQLYKMLNYGWANSLLGLIFIVIAFPTPVCLWIWGERLRAIGRQRFD

SEQ ID NO: 32291 - DNA, 4509 bp, Muscodor strobelii
  misc_feature: SGI cDNA ID NO. 571128
  misc_feature: Encodes the peptide sequence at SEQ ID NO 32292
atgctccggcgtagcgagtccccggctaccgctgtcgagaacggggtcgacgacagcagcgacagtcctcgcagcggcagaagtgcgcccaaccatcctgcagacgactctgctctggctgcatcatcaactcgattgtctccggcaccgtcgtcgaccgcctccgtgccactgccgggcgctgcaagatctcaacgcacaccggtacccagtccttcacaaacgagtaccgctgcgtcactccctacgtcgctctcctctagcgcgagtccacaccacttgcggtttccctcgcccgaccgcaagtctcccacgctctccctctcgctgcctccgaagcgatttcagcggctgtcgcgactcgaaggctcaagtctcgcaggcacgagcttcctcgagatctccccgcccacaactcccgccgatgcgaagcctagtttgaccttgcatcccaaccctctggatgactcccgaagcagccagaaatccgttgtcaggactcagtcggtaggctctgccactgccggcctactcaatatggcgagcggatcggccatctcacagagcgatgccgcaagaggcgcccctcggacctcgtccatcgactcggccgtctccgccatgtcgtctcgcaccgcatctcagcagagctctcaggactccgccaccgacgttgctggtctcatcagggctgctgggagccccgaagccgtcatacaatacctcctcaaagagaagcaatctcagtctcaacagaatgcccagctctggcgcctcgtagacaagcagagggccatgatcttgggcctcaataaagatctggagcgagtattaaaggataaggagaggtataggaagaagctgaaagaggtcgtcgcagctcacgatgagcagatgaagcctgaatcctcttccacggctgcaggcagtctgcccagtgtcgaggtcaaggcgtccaaagaggcggtggacgatgtacctccgtcgccctccaatcttgactcggacagcgtcaagaattcgcctatcgatgcgtctcttgcgccatatcccatcactcctcctgctgaccatgttccgaacaaccctccctcgaaagtgggcgatatcttgaacccgactcgaacgatgcccaagtcttctgaacacgcgttggatcacttcgaccacgaggaagaggagcgggtggcggatcaggcaaagaaagccgccgacgcgatgcaggatcttcctatccatattggactgccgccctcacgaagttttccaagtgagcctccgcgcatgccgcccccagcgcctccttcgaatcatccgcatccacctcccactgtatctatcatggaggctacaccactcatagatcaaggcatatcgcaatttccgcctccttccgctcctccaccgcggaaacctcccccggcgcccttacagctaagaaaggactcaaacaccgtccagcccctacctctagacgattacaacgactccgagtcagactatgattctttgttggaagtcgacgaattgcccgccatcgagagacgaggacgcagacgaaccagagaagaggatgacgaagaacgagaagtgcttgctcaacaggaagccgaggcccgtagtctttccaagaagagcaagaaaggtagccagaaagggacgcccatactaccagaccctcaacctgccgagcccgaaatgcccatcagtccacgcaccaagatggtgcccaagccgatattggtgcgcgactatcctcaggcctcactcgctgacgtcttgaacggcaacgaacagacattacgacctgcgatgatgagtcccggcttgcccgcaagtccacggcccatgggaatgcggtctctcgtgagctcaccgactttgtcaccaggaaacatgagttccggttctggacctctttcaccccgggctccgcgtcatcccatcccactgccgagtactcctcggtctcaagtcccttctgcagatgctttgaaactcacatcccccaagcctcttaatatcacaaagcacggattggaatcccaagataccaatcgtcaaatcgaaagtccggttgaacgcaatgcgatctttcaaggatttactaccgaagaatatccggatttgctgctaccgcccaatgctcttccatcagtagcggtgaaggtggcctcgtctcgtatgaagccatctcgcgccagcctcctttcacttacacaattagaggaagatccggtcttcactctcgccatcatctctcgctctgaaggtggcgagctttggagagtagagaaggacagcgcatctctcgcaaaattggatcagaggatgaaacaatgtccctctttcactgccaaaacaccagatcgatcattgttcagtggccacgctcccgccaagttagatgcccgacgtaatattctggatcattatctggatgaattgctcaacactcctctcgacctatctactgccctggatctctgcaggtatctctcgaccaatgcgctaccacccaataccgacgaaacatcattggacgagtcaagtaatgacgtagcgactgtaaaggaagggccaggcggtcggcctttcaaaaatggttatctcaccaaaagaggaaagaatttcgggggatggaaagcccgatatttcgtactcgatggaccgaatctgagatattatgagactcctggtggtgctcacctagggaccattaagcttcaaaacgcacagattggaaagcagtcgcaccaaagcactgacgggtcacccgcgggggccgcaaacggggacgagctggacaaccaatatcgccatgcgttcttggtaatggagccaaagaagaaggactcgagcagtcacgtcaaacatgttttatgtgccgagagcgaccaagagcgcgaccaatgggtagatgctctcctccgctggatcgattatcgagacgccaaagacgacgaagtgtctctcaaatccgacggacagggctccggtagtagctctcatgtcacaagcacgaatacgaagaaaaagtcacatgggcaggccaagtcccacggccaacgtcacgatagcgaagagggactcatcgggatgaactacaaggcaacgaagcagggcaatgtaccggatggtgcccctccccttcgacgagccactgccagtcctgattatgtcgagaagccggcagctcagccatatatgatttcagctcccagagatccccaaattatttccgactctgcttcctggggtagcaaggctagcttatctctgccgggcccttctttagaggagaaaaagcagcgaaaacggagcttctttggatttggcccgaagacaaggtcctcttctgacgatcaagaacctttatataactctagcggaggcagcacaccacaacctcaagttgagcctcgtggcccggtccgacaagtcttcggggcatcacttgcagaagccgtcaggtactgtggtccttcagatatcaacgtgccactaccggcagtggtgtaccgatgcattcagtatctggacttgaagaatgcaatcctggaggaaggtatcttccgactcagcgggtcaaacgttgttattaaacagcttcgtgaacgatttaatgtagagggcgacattgacctcatgacggacgagacttattatgacatccatgctgtcgcttcgctactcaagttatacttgcgtgagcttcccacgactatactcactcgcgacttacacatgcagttcgtggctgtcacggagatgaacaaccaccgcgagaagatcatggctctatccgaattagtacagagattgccgctcgctaatgtgaccttgctcaagtacctcattgcattcttgatcaagatcatcaaccacgccgatatgaacaaaatgactgtacgaaatgttggcattgttttctcaccaacactgaatattcctgcaccaatctttgcacttctcttacaaaattttgctggagtatttggcatagaggccgaggaatatgagctatctccaatagtgcccgaaagcgagtcgcccttggaagcacagcctcgacgtccctcgaccgcggggatagcagagtcgccacaccgacagcgactcatcgagcaaatgcatcaacggtctacgcccacgccaccacctggcacaggcttgtcaaatagtcgccagaacgcaacgccgccaccccgggggatgtacgatatccagtatcttcaacaacagggttctaggcaaatgaattctcggccagcgtatgaaagcggtttcactgttccatctggtctcgatccagcctcgatacaaccggcagcattcaaacaaccgacatatgatcgaccccactatgggtacgcaccctctcaggagcaagatgttgatgcttcttttgccagcaaatctaaaaggagagaaagttcaatgtttatgggtaacgtattgaaccagcaggcttctaacagccgcctgcgagaagagacgaggatgtag

SEQ ID NO: 32292 - protein, 1502 aa, Muscodor strobelii
  misc_feature: SGI Peptide ID NO. 571128
  misc_feature (865)..(981): Pfam Id: PF00169 Pfam Desc: PH domain
  misc_feature (1170)..(1321): Pfam Id: PF00620 Pfam Desc: RhoGAP domain
  misc_feature (179)..(1498): NCBI GI: 171696312 Blast Desc: protein product [Podospora anserina] gi|170948398|emb|CAP60562.1| protein product [Podospora anserina]
  misc_feature (190)..(1501): NCBI GI: 145605441 Blast Desc: MGG_09275 [Magnaporthe grisea 70-15] gi|145013270|gb|EDJ97911.1| MGG_09275 [Magnaporthe grisea 70-15]
  misc_feature (63)..(1437): NCBI GI: 256734429 Blast Desc: NECHADRAFT_31076 [Nectria haematococca mpVI 77-13-4]
  misc_feature (63)..(1437): NCBI GI: 46108378 Blast Desc: FG01071.1 [Gibberella zeae PH-1]
  misc_feature (50)..(1481): NCBI GI: 85119537 Blast Desc: NCU02524 [Neurospora crassa OR74A] gi|28927467|gb|EAA36419.1| NCU02524 [Neurospora crassa OR74A]
  misc_feature (129)..(1498): NCBI GI: 156057529 Blast Desc: SS1G_04496 [Sclerotinia sclerotiorum 1980] gi|154702281|gb|EDO02020.1| SS1G_04496 [Sclerotinia sclerotiorum 1980]
  misc_feature (180)..(1498): NCBI GI: 154324018 Blast Desc: BC1G_00408 [Botryotinia fuckeliana B05.10] gi|150842637|gb|EDN17830.1| BC1G_00408 [Botryotinia fuckeliana B05.10]
  misc_feature (179)..(1502): NCBI GI: 261356467 Blast Desc: N-chimaerin [Verticillium albo-atrum VaMs.102]
  misc_feature (223)..(1333): NCBI GI: 242786386 Blast Desc: Rho GTPase activator (Bem3), [Talaromyces stipitatus ATCC 10500] gi|218720941|gb|EED20360.1| Rho GTPase activator (Bem3), [Talaromyces stipitatus ATCC 10500]
  misc_feature (221)..(1488): NCBI GI: 67539234 Blast Desc: AN5787.2 [Aspergillus nidulans FGSC A4] gi|40743690|gb|EAA62880.1| AN5787.2 [Aspergillus nidulans FGSC A4]
MLRRSESPATAVENGVDDSSDSPRSGRSAPNHPADDSALAASSTRLSPAPSSTASVPLPGAARSQRTPVPSPSQTSTAASLPTSLSSSASPHHLRFPSPDRKSPTLSLSLPPKRFQRLSRLEGSSLAGTSFLEISPPTTPADAKPSLTLHPNPLDDSRSSQKSVVRTQSVGSATAGLLNMASGSAISQSDAARGAPRTSSIDSAVSAMSSRTASQQSSQDSATDVAGLIRAAGSPEAVIQYLLKEKQSQSQQNAQLWRLVDKQRAMILGLNKDLERVLKDKERYRKKLKEVVAAHDEQMKPESSSTAAGSLPSVEVKASKEAVDDVPPSPSNLDSDSVKNSPIDASLAPYPITPPADHVPNNPPSKVGDILNPTRTMPKSSEHALDHFDHEEEERVADQAKKAADAMQDLPIHIGLPPSRSFPSEPPRMPPPAPPSNHPHPPPTVSIMEATPLIDQGISQFPPPSAPPPRKPPPAPLQLRKDSNTVQPLPLDDYNDSESDYDSLLEVDELPAIERRGRRRTREEDDEEREVLAQQEAEARSLSKKSKKGSQKGTPILPDPQPAEPEMPISPRTKMVPKPILVRDYPQASLADVLNGNEQTLRPAMMSPGLPASPRPMGMRSLVSSPTLSPGNMSSGSGPLSPRAPRHPIPLPSTPRSQVPSADALKLTSPKPLNITKHGLESQDTNRQIESPVERNAIFQGFTTEEYPDLLLPPNALPSVAVKVASSRMKPSRASLLSLTQLEEDPVFTLAIISRSEGGELWRVEKDSASLAKLDQRMKQCPSFTAKTPDRSLFSGHAPAKLDARRNILDHYLDELLNTPLDLSTALDLCRYLSTNALPPNTDETSLDESSNDVATVKEGPGGRPFKNGYLTKRGKNFGGWKARYFVLDGPNLRYYETPGGAHLGTIKLQNAQIGKQSHQSTDGSPAGAANGDELDNQYRHAFLVMEPKKKDSSSHVKHVLCAESDQERDQWVDALLRWIDYRDAKDDEVSLKSDGQGSGSSSHVTSTNTKKKSHGQAKSHGQRHDSEEGLIGMNYKATKQGNVPDGAPPLRRATASPDYVEKPAAQPYMISAPRDPQIISDSASWGSKASLSLPGPSLEEKKQRKRSFFGFGPKTRSSSDDQEPLYNSSGGSTPQPQVEPRGPVRQVFGASLAEAVRYCGPSDINVPLPAVVYRCIQYLDLKNAILEEGIFRLSGSNVVIKQLRERFNVEGDIDLMTDETYYDIHAVASLLKLYLRELPTTILTRDLHMQFVAVTEMNNHREKIMALSELVQRLPLANVTLLKYLIAFLIKIINHADMNKMTVRNVGIVFSPTLNIPAPIFALLLQNFAGVFGIEAEEYELSPIVPESESPLEAQPRRPSTAGIAESPHRQRLIEQMHQRSTPTPPPGTGLSNSRQNATPPPRGMYDIQYLQQQGSRQMNSRPAYESGFTVPSGLDPASIQPAAFKQPTYDRPHYGYAPSQEQDVDASFASKSKRRESSMFMGNVLNQQASNSRLREETRM

SEQ ID NO: 32293 - DNA, 6640 bp, Muscodor strobelii
  misc_feature: SGI EST ID NO. CUFF.76467.0
  misc_feature: Variant of the nucleotide sequence at SEQ ID NO 32291
ttgcctgttacggacaaacagggtagcggtaatgatggatctgcaagccgcaaacataatgcaggtcctaggatgacgatattaggggatgtacaagcggtaaagatacatacctgtaggtaccaataacgccgaaaatggaagacgcggtattgcgggatatcagaggcaggcgagtagttgcaatatgttctgccacgatttgctatcatttgtagcaaaactaaagtgaccagcacgagacgctgtttagacggttgttgatgaagctgagatttggtccgtcgtcggtatatgatattttgaacattgtgacatgtctctcggagtgcgtctgtccatgttctttagacagatattaccatctgctgtcgagggtcgcatctcaatatttgttcgtgcaggtgctctgctttagtcaaaaggtaggctccgaatccctgatgggggctggcttttcggcgtaagtagcgacgatagacgagagcatccggctctcaatcgtcgaagacgcgtcaaccggtcatatagtaaaattcttccatcctcctattcttctagcccccttctttgttcccattcagcactctctctcctatcataactgtttcctgcgttctgagctctaatttcgaccctgacctgggtattcccgtggatatcgttgagattgcaggcatctgatcgactagtaataatccgagcgagaaaacggatagccaaaacccagcagtatccagcatccgtgcgccgaggacaggggacgacccatctgggccgaagacagccatcagccatcgaaagccatctactgtagccgagcagttcgcaaaggccgcagctgtgaaggagagagcacgcttttgcgctgtgcaccctggcgcatcagctgccggattaggccgttcagcgacaggtgcatgcgacgtcaatcagggtcagcatcttgttctgtctgggatgtcggggtgtgtctcgaaacgatgagccagcgccctcgacccgctgcacaaccttgatcacagcgtgtttccagtgctcgtagcacaccgtacagtacctctggccgtacgcacctctgtaccctccacatccaggcacatccaggctcgagtgcgtggagggttggttcggttggggagctctgacctttggaacccccgaacttttcgacgccaatcacaccccggcagcccccggcccccctcgtctgcaacccatctacgctgcaggctcgccagaatagccgcaagaattaggtagcgtagcgggtgccgaaaacgtgaggcacgagagggccagtgcaagggccagtacaagtagtatgtcgcacttaatgctccggcgtagcgagtccccggctaccgctgtcgagaacggggtcgacgacagcagcgacagtcctcgcagcggcagaagtgcgcccaaccatcctgcagacgactctgctctggctgcatcatcaactcgattgtctccggcaccgtcgtcgaccgcctccgtgccactgccgggcgctgcaagatctcaacgcacaccggtacccagtccttcacaaacgagtaccgctgcgtcactccctacgtcgctctcctctagcgcgagtccacaccacttgcggtttccctcgcccgaccgcaagtctcccacgctctccctctcgctgcctccgaagcgatttcagcggctgtcgcgactcgaaggctcaagtctcgcaggcacgagcttcctcgagatctccccgcccacaactcccgccgatgcgaagcctagtttgaccttgcatcccaaccctctggatgactcccgaagcagccagaaatccgttgtcaggactcagtcggtaggctctgccactgccggcctactcaatatggcgagcggatcggccatctcacagagcgatgccgcaagaggcgcccctcggacctcgtccatcgactcggccgtctccgccatgtcgtctcgcaccgcatctcagcagagctctcaggactccgccaccgacgttgctggtctcatcagggctgctgggagccccgaagccgtcatacaatacctcctcaaagagaagcaatctcagtctcaacagaatgcccagctctggcgcctcgtagacaagcagagggccatgatcttgggcctcaataaagatctggagcgagtattaaaggataaggagaggtataggaagaagctgaaagaggtcgtcgcagctcacgatgagcagatgaagcctgaatcctcttccacggctgcaggcagtctgcccagtgtcgaggtcaaggcgtccaaagaggcggtggacgatgtacctccgtcgccctccaatcttgactcggacagcgtcaagaattcgcctatcgatgcgtctcttgcgccatatcccatcactcctcctgctgaccatgttccgaacaaccctccctcgaaagtgggcgatatcttgaacccgactcgaacgatgcccaagtcttctgaacacgcgttggatcacttcgaccacgaggaagaggagcgggtggcggatcaggcaaagaaagccgccgacgcgatgcaggatcttcctatccatattggactgccgccctcacgaagttttccaagtgagcctccgcgcatgccgcccccagcgcctccttcgaatcatccgcatccacctcccactgtatctatcatggaggctacaccactcatagatcaaggcatatcgcaatttccgcctccttccgctcctccaccgcggaaacctcccccggcgcccttacagctaagaaaggactcaaacaccgtccagcccctacctctagacgattacaacgactccgagtcagactatgattctttgttggaagtcgacgaattgcccgccatcgagagacgaggacgcagacgaaccagagaagaggatgacgaagaacgagaagtgcttgctcaacaggaagccgaggcccgtagtctttccaagaagagcaagaaaggtagccagaaagggacgcccatactaccagaccctcaacctgccgagcccgaaatgcccatcagtccacgcaccaagatggtgcccaagccgatattggtgcgcgactatcctcaggcctcactcgctgacgtcttgaacggcaacgaacagacattacgacctgcgatgatgagtcccggcttgcccgcaagtccacggcccatgggaatgcggtctctcgtgagctcaccgactttgtcaccaggaaacatgagttccggttctggacctctttcaccccgggctccgcgtcatcccatcccactgccgagtactcctcggtctcaagtcccttctgcagatgctttgaaactcacatcccccaagcctcttaatatcacaaagcacggattggaatcccaagataccaatcgtcaaatcgaaagtccggttgaacgcaatgcgatctttcaaggatttactaccgaagaatatccggatttgctgctaccgcccaatgctcttccatcagtagcggtgaaggtggcctcgtctcgtatgaagccatctcgcgccagcctcctttcacttacacaattagaggaagatccggtcttcactctcgccatcatctctcgctctgaaggtggcgagctttggagagtagagaaggacagcgcatctctcgcaaaattggatcagaggatgaaacaatgtccctctttcactgccaaaacaccagatcgatcattgttcagtggccacgctcccgccaagttagatgcccgacgtaatattctggatcattatctggatgaattgctcaacactcctctcgacctatctactgccctggatctctgcaggtatctctcgaccaatgcgctaccacccaataccgacgaaacatcattggacgagtcaagtaatgacgtagcgactgtaaaggaagggccaggcggtcggcctttcaaaaatggttatctcaccaaaagaggaaagaatttcgggggatggaaagcccgatatttcgtactcgatggaccgaatctgagatattatgagactcctggtggtgctcacctagggaccattaagcttcaaaacgcacagattggaaagcagtcgcaccaaagcactgacgggtcacccgcgggggccgcaaacggggacgagctggacaaccaatatcgccatgcgttcttggtaatggagccaaagaagaaggactcgagcagtcacgtcaaacatgttttatgtgccgagagcgaccaagagcgcgaccaatgggtagatgctctcctccgctggatcgattatcgagacgccaaagacgacgaagtgtctctcaaatccgacggacagggctccggtagtagctctcatgtcacaagcacgaatacgaagaaaaagtcacatgggcaggccaagtcccacggccaacgtcacgatagcgaagagggactcatcgggatgaactacaaggcaacgaagcagggcaatgtaccggatggtgcccctccccttcgacgagccactgccagtcctgattatgtcgagaagccggcagctcagccatatatgatttcagctcccagagatccccaaattatttccgactctgcttcctggggtagcaaggctagcttatctctgccgggcccttctttagaggagaaaaagcagcgaaaacggagcttctttggatttggcccgaagacaaggtcctcttctgacgatcaagaacctttatataactctagcggaggcagcacaccacaacctcaagttgagcctcgtggcccggtccgacaagtcttcggggcatcacttgcagaagccgtcaggtactgtggtccttcagatatcaacgtgccactaccggcagtggtgtaccgatgcattcagtatctggacttgaagaatgcaatcctggaggaaggtatcttccgactcagcgggtcaaacgttgttattaaacagcttcgtgaacgatttaatgtagagggcgacattgacctcatgacggacgagacttattatgacatccatgctgtcgcttcgctactcaagttatacttgcgtgagcttcccacgactatactcactcgcgacttacacatgcagttcgtggctgtcacggagatgaacaaccaccgcgagaagatcatggctctatccgaattagtacagagattgccgctcgctaatgtgaccttgctcaagtacctcattgcattcttgatcaagatcatcaaccacgccgatatgaacaaaatgactgtacgaaatgttggcattgttttctcaccaacactgaatattcctgcaccaatctttgcacttctcttacaaaattttgctggagtatttggcatagaggccgaggaatatgagctatctccaatagtgcccgaaagcgagtcgcccttggaagcacagcctcgacgtccctcgaccgcggggatagcagagtcgccacaccgacagcgactcatcgagcaaatgcatcaacggtctacgcccacgccaccacctggcacaggcttgtcaaatagtcgccagaacgcaacgccgccaccccgggggatgtacgatatccagtatcttcaacaacagggttctaggcaaatgaattctcggccagcgtatgaaagcggtttcactgttccatctggtctcgatccagcctcgatacaaccggcagcattcaaacaaccgacatatgatcgaccccactatgggtacgcaccctctcaggagcaagatgttgatgcttcttttgccagcaaatctaaaaggagagaaagttcaatgtttatgggtaacgtattgaaccagcaggcttctaacagccgcctgcgagaagagacgaggatgtagtctcatctgaaaccataataaggcgaccggcgtccaggaatacttaaagatcatgcattgttatgacataccagcatattgcccatcgtaaggcatatttttcagcagcgacgataatatctcaaattttcagttcatttacgcaagataccctgcaagggcgatctcttcgatcgccaaagctagcaatatcttttatcgtcttcacacatttttatcgatagttcacgatggttgcctcatccggaggattgttattggcagaggattccgtaatcggaaacgaatgacaatcaaaatttattggatagatgtaatgataggatttatacccaagtttggcgttgtcagattggttcgtccaaccttgtgattaatgcgaatcacaatttagaacatgttctctcttcaagtcaagaagtcacaccaaggactgacatgagcgagagtggtgtagtgtaagctaactaacgtacgtttggatcagacatgagatataaaaatgccaggttaatctcgtggcattgggtcattgtgaatttgtgctgagtcggagtactaattaagtctcaacgtgcattacagatcttgagcacacgcctgtcacttcataaaactcagtagtcaatcaagttcaccgaccccgagtttggatccatgcatacagaacgtcctctgaccactcgacatggagaagcaatcaatcgaaacgctgtctaccaattgcccggagcctttcgccccatatccacaaacatacaggtgtaggaaaagcgatgacgatgaaaattaaac

SEQ ID NO: 32294 - DNA, 2811 bp, Muscodor strobelii
  misc_feature: SGI cDNA ID NO. 571129
  misc_feature: Encodes the peptide sequence at SEQ ID NO 32295
atgcccatcagtccacgcaccaagatggtgcccaagccgatattggtgcgcgactatcctcaggcctcactcgctgacgtcttgaacggcaacgaacagacattacgacctgcgatgatgagtcccggcttgcccgcaagtccacggcccatgggaatgcggtctctcgtgagctcaccgactttgtcaccaggaaacatgagttccggttctggacctctttcaccccgggctccgcgtcatcccatcccactgccgagtactcctcggtctcaagtcccttctgcagatgctttgaaactcacatcccccaagcctcttaatatcacaaagcacggattggaatcccaagataccaatcgtcaaatcgaaagtccggttgaacgcaatgcgatctttcaaggatttactaccgaagaatatccggatttgctgctaccgcccaatgctcttccatcagtagcggtgaaggtggcctcgtctcgtatgaagccatctcgcgccagcctcctttcacttacacaattagaggaagatccggtcttcactctcgccatcatctctcgctctgaaggtggcgagctttggagagtagagaaggacagcgcatctctcgcaaaattggatcagaggatgaaacaatgtccctctttcactgccaaaacaccagatcgatcattgttcagtggccacgctcccgccaagttagatgcccgacgtaatattctggatcattatctggatgaattgctcaacactcctctcgacctatctactgccctggatctctgcaggtatctctcgaccaatgcgctaccacccaataccgacgaaacatcattggacgagtcaagtaatgacgtagcgactgtaaaggaagggccaggcggtcggcctttcaaaaatggttatctcaccaaaagaggaaagaatttcgggggatggaaagcccgatatttcgtactcgatggaccgaatctgagatattatgagactcctggtggtgctcacctagggaccattaagcttcaaaacgcacagattggaaagcagtcgcaccaaagcactgacgggtcacccgcgggggccgcaaacggggacgagctggacaaccaatatcgccatgcgttcttggtaatggagccaaagaagaaggactcgagcagtcacgtcaaacatgttttatgtgccgagagcgaccaagagcgcgaccaatgggtagatgctctcctccgctggatcgattatcgagacgccaaagacgacgaagtgtctctcaaatccgacggacagggctccggtagtagctctcatgtcacaagcacgaatacgaagaaaaagtcacatgggcaggccaagtcccacggccaacgtcacgatagcgaagagggactcatcgggatgaactacaaggcaacgaagcagggcaatgtaccggatggtgcccctccccttcgacgagccactgccagtcctgattatgtcgagaagccggcagctcagccatatatgatttcagctcccagagatccccaaattatttccgactctgcttcctggggtagcaaggctagcttatctctgccgggcccttctttagaggagaaaaagcagcgaaaacggagcttctttggatttggcccgaagacaaggtcctcttctgacgatcaagaacctttatataactctagcggaggcagcacaccacaacctcaagttgagcctcgtggcccggtccgacaagtcttcggggcatcacttgcagaagccgtcaggtactgtggtccttcagatatcaacgtgccactaccggcagtggtgtaccgatgcattcagtatctggacttgaagaatgcaatcctggaggaaggtatcttccgactcagcgggtcaaacgttgttattaaacagcttcgtgaacgatttaatgtagagggcgacattgacctcatgacggacgagacttattatgacatccatgctgtcgcttcgctactcaagttatacttgcgtgagcttcccacgactatactcactcgcgacttacacatgcagttcgtggctgtcacggagatgaacaaccaccgcgagaagatcatggctctatccgaattagtacagagattgccgctcgctaatgtgaccttgctcaagtacctcattgcattcttgatcaagatcatcaaccacgccgatatgaacaaaatgactgtacgaaatgttggcattgttttctcaccaacactgaatattcctgcaccaatctttgcacttctcttacaaaattttgctggagtatttggcatagaggccgaggaatatgagctatctccaatagtgcccgaaagcgagtcgcccttggaagcacagcctcgacgtccctcgaccgcggggatagcagagtcgccacaccgacagcgactcatcgagcaaatgcatcaacggtctacgcccacgccaccacctggcacaggcttgtcaaatagtcgccagaacgcaacgccgccaccccgggggatgtacgatatccagtatcttcaacaacagggttctaggcaaatgaattctcggccagcgtatgaaagcggtttcactgttccatctggtctcgatccagcctcgatacaaccggcagcattcaaacaaccgacatatgatcgaccccactatgggtacgcaccctctcaggagcaagatgttgatgcttcttttgccagcaaatctaaaaggagagaaagttcaatgtttatgggtaacgtattgaaccagcaggcttctaacagccgcctgcgagaagagacgaggatgtag

SEQ ID NO: 32295 - protein, 936 aa, Muscodor strobelii
  misc_feature: SGI Peptide ID NO. 571129
  misc_feature (299)..(415): Pfam Id: PF00169 Pfam Desc: PH domain
  misc_feature (604)..(755): Pfam Id: PF00620 Pfam Desc: RhoGAP domain
  misc_feature (1)..(933): NCBI GI: 116180946 Blast Desc: CHGG_01101 [Chaetomium globosum CBS 148.51] gi|88185398|gb|EAQ92866.1| CHGG_01101 [Chaetomium globosum CBS 148.51]
  misc_feature (1)..(932): NCBI GI: 171696312 Blast Desc: protein product [Podospora anserina] gi|170948398|emb|CAP60562.1| protein product [Podospora anserina]
  misc_feature (70)..(935): NCBI GI: 145605441 Blast Desc: MGG_09275 [Magnaporthe grisea 70-15] gi|145013270|gb|EDJ97911.1| MGG_09275 [Magnaporthe grisea 70-15]
  misc_feature (2)..(871): NCBI GI: 46108378 Blast Desc: FG01071.1 [Gibberella zeae PH-1]
  misc_feature (17)..(871): NCBI GI: 256734429 Blast Desc: NECHADRAFT_31076 [Nectria haematococca mpVI 77-13-4]
  misc_feature (1)..(932): NCBI GI: 154324018 Blast Desc: BC1G_00408 [Botryotinia fuckeliana B05.10] gi|150842637|gb|EDN17830.1| BC1G_00408 [Botryotinia fuckeliana B05.10]
  misc_feature (1)..(915): NCBI GI: 85119537 Blast Desc: NCU02524 [Neurospora crassa OR74A] gi|28927467|gb|EAA36419.1| NCU02524 [Neurospora crassa OR74A]
  misc_feature (1)..(932): NCBI GI: 156057529 Blast Desc: SS1G_04496 [Sclerotinia sclerotiorum 1980] gi|154702281|gb|EDO02020.1| SS1G_04496 [Sclerotinia sclerotiorum 1980]
  misc_feature (132)..(936): NCBI GI: 261356467 Blast Desc: N-chimaerin [Verticillium albo-atrum VaMs.102]
  misc_feature (41)..(936): NCBI GI: 145255867 Blast Desc: An18g06730 [Aspergillus niger] gi|134084723|emb|CAK43380.1| protein product [Aspergillus niger]
MPISPRTKMVPKPILVRDYPQASLADVLNGNEQTLRPAMMSPGLPASPRPMGMRSLVSSPTLSPGNMSSGSGPLSPRAPRHPIPLPSTPRSQVPSADALKLTSPKPLNITKHGLESQDTNRQIESPVERNAIFQGFTTEEYPDLLLPPNALPSVAVKVASSRMKPSRASLLSLTQLEEDPVFTLAIISRSEGGELWRVEKDSASLAKLDQRMKQCPSFTAKTPDRSLFSGHAPAKLDARRNILDHYLDELLNTPLDLSTALDLCRYLSTNALPPNTDETSLDESSNDVATVKEGPGGRPFKNGYLTKRGKNFGGWKARYFVLDGPNLRYYETPGGAHLGTIKLQNAQIGKQSHQSTDGSPAGAANGDELDNQYRHAFLVMEPKKKDSSSHVKHVLCAESDQERDQWVDALLRWIDYRDAKDDEVSLKSDGQGSGSSSHVTSTNTKKKSHGQAKSHGQRHDSEEGLIGMNYKATKQGNVPDGAPPLRRATASPDYVEKPAAQPYMISAPRDPQIISDSASWGSKASLSLPGPSLEEKKQRKRSFFGFGPKTRSSSDDQEPLYNSSGGSTPQPQVEPRGPVRQVFGASLAEAVRYCGPSDINVPLPAVVYRCIQYLDLKNAILEEGIFRLSGSNVVIKQLRERFNVEGDIDLMTDETYYDIHAVASLLKLYLRELPTTILTRDLHMQFVAVTEMNNHREKIMALSELVQRLPLANVTLLKYLIAFLIKIINHADMNKMTVRNVGIVFSPTLNIPAPIFALLLQNFAGVFGIEAEEYELSPIVPESESPLEAQPRRPSTAGIAESPHRQRLIEQMHQRSTPTPPPGTGLSNSRQNATPPPRGMYDIQYLQQQGSRQMNSRPAYESGFTVPSGLDPASIQPAAFKQPTYDRPHYGYAPSQEQDVDASFASKSKRRESSMFMGNVLNQQASNSRLREETRM

SEQ ID NO: 32296 - DNA, 6640 bp, Muscodor strobelii; identical to SEQ ID NO: 32293
  misc_feature: SGI EST ID NO. CUFF.76467.0
  misc_feature: Variant of the nucleotide sequence at SEQ ID NO 32294

SEQ ID NO: 32297 - DNA, 1077 bp, Muscodor strobelii
  misc_feature: SGI cDNA ID NO. 571130
  misc_feature: Encodes the peptide sequence at SEQ ID NO 32298
atggcgccaattacgactcggcttaccgagcaactagggattaagcacccagtcttgctcgcgggcatgggcatgacgtcgacggcctcactcgcggcagcagtttccaatgctggaggcttgggtgtcataggaggcgtgggatatacagttgcacaactacgtgacatgattcacgatctgaaatcacagctcacggatccatcgctcccattcggtgtcgatctactgctcccaaaggtgggcgagggagcccgcaagacaaattacgactataccaaaggcaaccttgacgatctgatagacctcgtcatcgcagaaaaggcgaagttgtttgtgtctgctgtgggtatcccgccgaagagaattgtggataaattgcacaagaatggcattttgtatatgaacatggtaggacacccgaaacatgttcctaaagcttgcgctgtgggtgcagatatcatatgtgcgcagggaggcgaggcgggaggacacaccggcgatatcgctttcagtgtccttgtaccggcctgtgcagacctttgtgccaaatacacatcgcccttgaccgggaaacccgtgtcgctcgtcgcagctggaggagtcaacgatggacgcagtcttgccgctgcccttatgctgggagcagaagctgtctgggttggtacgagattcgtcacagctcgggagtcgggtgcttcggattatgcgaagcgggttatcatcgactctgggttcgaagatgtcgtcaagagccttgtgtggagcggcagaccgctgcgcgcgcacaagagcaaatatgtggctgattgggaaaataatagacaacaggagatcagagagctcacggcaaagggtattgttcccattgagcatgagctggaccgcttacaggaagagggcaagctcacggatgagattatggagcaagctgaattgcggccgatgggaatcgtgaccggacttatcaacaagcctgatcaacccgcgaaggagattgttgatgagattgtaactcaggcggctgagctgttggcttcagctagcaagtataccggctcaaagtcgcgactgtga

SEQ ID NO: 32298 - protein, 358 aa, Muscodor strobelii
  misc_feature: SGI Peptide ID NO. 571130
  misc_feature (5)..(340): Pfam Id: PF03060 Pfam Desc: 2-nitropropane dioxygenase
  misc_feature (5)..(278): Pfam Id: PF03060 Pfam Desc: 2-nitropropane dioxygenase
  misc_feature (4)..(350): NCBI GI: 67539722 Blast Desc: AN6031.2 [Aspergillus nidulans FGSC A4] gi|40738816|gb|EAA58006.1| AN6031.2 [Aspergillus nidulans FGSC A4] gi|259479785|tpe|CBF70324.1| TPA: oxidoreductase, dioxygenase
  misc_feature (1)..(345): NCBI GI: 170087696 Blast Desc: [Laccaria bicolor S238N-H82] gi|164650271|gb|EDR14512.1| [Laccaria bicolor S238N-H82]
  misc_feature (4)..(351): NCBI GI: 116194644 Blast Desc: conserved [Chaetomium globosum CBS 148.51] gi|88179833|gb|EAQ87301.1| conserved [Chaetomium globosum CBS 148.51]
  misc_feature (4)..(350): NCBI GI: 121715364 Blast Desc: oxidoreductase, 2-nitropropane dioxygenase family, [Aspergillus clavatus NRRL 1] gi|119403448|gb|EAW13865.1| oxidoreductase, 2-nitropropane dioxygenase family, [Aspergillus
  misc_feature (4)..(350): NCBI GI: 115395916 Blast Desc: ATEG_04419 [Aspergillus terreus NIH2624] gi|114193166|gb|EAU34866.1| ATEG_04419 [Aspergillus terreus NIH2624]
  misc_feature (4)..(350): NCBI GI: 71001274 Blast Desc: oxidoreductase, 2-nitropropane dioxygenase family [Aspergillus fumigatus Af293] gi|66852956|gb|EAL93280.1| oxidoreductase, 2-nitropropane dioxygenase family, [Aspergillus
  misc_feature (4)..(350): NCBI GI: 226288645 Blast Desc: oxidoreductase 2-nitropropane dioxygenase family [Paracoccidioides brasiliensis Pb18]
  misc_feature (4)..(350): NCBI GI: 225681505 Blast Desc: 2-nitropropane dioxygenase [Paracoccidioides brasiliensis Pb03]
  misc_feature (4)..(350): NCBI GI: 119480891 Blast Desc: oxidoreductase, 2-nitropropane dioxygenase family, [Neosartorya fischeri NRRL 181] gi|119408628|gb|EAW18577.1| oxidoreductase, 2-nitropropane dioxygenase family, [Neosartorya
  misc_feature (4)..(345): NCBI GI: 261192126 Blast Desc: enoyl-(acyl-carrier-protein) reductase II [Ajellomyces dermatitidis SLH14081] gi|239589345|gb|EEQ71988.1| enoyl-(acyl-carrier-protein) reductase II [Ajellomyces SLH14081]
  misc_feature (4)..(268): SWISSPROT Homolog: EC 1.13.11.32 2-nitropropane dioxygenase
MAPITTRLTEQLGIKHPVLLAGMGMTSTASLAAAVSNAGGLGVIGGVGYTVAQLRDMIHDLKSQLTDPSLPFGVDLLLPKVGEGARKTNYDYTKGNLDDLIDLVIAEKAKLFVSAVGIPPKRIVDKLHKNGILYMNMVGHPKHVPKACAVGADIICAQGGEAGGHTGDIAFSVLVPACADLCAKYTSPLTGKPVSLVAAGGVNDGRSLAAALMLGAEAVWVGTRFVTARESGASDYAKRVIIDSGFEDVVKSLVWSGRPLRAHKSKYVADWENNRQQEIRELTAKGIVPIEHELDRLQEEGKLTDEIMEQAELRPMGIVTGLINKPDQPAKEIVDEIVTQAAELLASASKYTGSKSRL

SEQ ID NO: 32299 - DNA, 1495 bp, Muscodor strobelii
  misc_feature: SGI EST ID NO. CUFF.76449.0
  misc_feature: Variant of the nucleotide sequence at SEQ ID NO 32297
tgttcatcttgctgtcaatactttcttacctattttctttcgaactcttcaagtcattgcagtattgcactattccaaaatatcaatgctctgattgtaattggttgctgcattcttatactcgtggagtaaaagcatatagatatatctgatacaatggcgccaattacgactcggcttaccgagcaactagggattaagcacccagtcttgctcgcgggcatgggcatgacgtcgacggcctcactcgcggcagcagtttccaatgctggaggcttgggtgtcataggaggcgtgggatatacagttgcacaactacgtgacatgattcacgatctgaaatcacagctcacggatccatcgctcccattcggtgtcgatctactgctcccaaaggtgggcgagggagcccgcaagacaaattacgactataccaaaggcaaccttgacgatctgatagacctcgtcatcgcagaaaaggcgaagttgtttgtgtctgctgtgggtatcccgccgaagagaattgtggataaattgcacaagaatggcattttgtatatgaacatggtaggacacccgaaacatgttcctaaagcttgcgctgtgggtgcagatatcatatgtgcgcagggaggcgaggcgggaggacacaccggcgatatcgctttcagtgtccttgtaccggcctgtgcagacctttgtgccaaatacacatcgcccttgaccgggaaacccgtgtcgctcgtcgcagctggaggagtcaacgatggacgcagtcttgccgctgcccttatgctgggagcagaagctgtctgggttggtacgagattcgtcacagctcgggagtcgggtgcttcggattatgcgaagcgggttatcatcgactctgggttcgaagatgtcgtcaagagccttgtgtggagcggcagaccgctgcgcgcgcacaagagcaaatatgtggctgattgggaaaataatagacaacaggagatcagagagctcacggcaaagggtattgttcccattgagcatgagctggaccgcttacaggaagagggcaagctcacggatgagattatggagcaagctgaattgcggccgatgggaatcgtgaccggacttatcaacaagcctgatcaacccgcgaaggagattgttgatgagattgtaactcaggcggctgagctgttggcttcagctagcaagtataccggctcaaagtcgcgactgtgaacataatgtgaatcggatcgcgaggctacggtggtcctcgcagttgaaacgcgaaatctatgcttaggattcaaattctgtctgtatacgtatcgcatttcaccatggttcacaggcataattatatgcatttcaagtcctaattggtatgagatgatgaagatgatcgagcttcaaatgcactcatcgaaagcttctccatatacttttatgtacgaggtaatagttcgagtaaggagatagtctatgatatgacccaaac

SEQ ID NO: 32300 - DNA, 612 bp, Muscodor strobelii
  misc_feature: SGI cDNA ID NO. 571131
  misc_feature: Reduced expression when VOC is produced
  misc_feature: Encodes the peptide sequence at SEQ ID NO 32301
atgtacttctatgtttcgacagtgccccgagagaagcgctatagtaaatataagaaggttctctatctagagccaccttccaatggcagtgtcactgtcaagaagcgggtgactactattgtcccgccgccaataccaccgccacctcctccaccagcgccgatactgttggaacctgtgcctatacctgaaccagaaccaacgatcatcgaagtacgaccgccgccacctcctccagctcctgtcttgccgcttcctgagccagaaccagaaccggattcgccgatcgatgtcattgcggtggacgttgacccctcggagacatcatcagttcggtcttcaaaaacatccaaaacatctaagagctccaagtcttcacgctctagaaagagtcacagccacgaccgcagccgagatcgcgaagtatacgtcgaacgtgagaggcttgtacccgttcgtgtgccggtaccttatcctgtgcaagtcgagccacaatatgagactttccgctatgttgaagcaccgcggcgttatgaacctcgccgaccaagtcccgaaaacgagattgtgatcgaggatcatcaccgcagacgatatatccgagattactga

SEQ ID NO: 32301 - protein, 203 aa, Muscodor strobelii
  misc_feature: SGI Peptide ID NO. 571131
  misc_feature: Useful for introducing or modulating the production of volatile compounds
MYFYVSTVPREKRYSKYKKVLYLEPPSNGSVTVKKRVTTIVPPPIPPPPPPPAPILLEPVPIPEPEPTIIEVRPPPPPPAPVLPLPEPEPEPDSPIDVIAVDVDPSETSSVRSSKTSKTSKSSKSSRSRKSHSHDRSRDREVYVERERLVPVRVPVPYPVQVEPQYETFRYVEAPRRYEPRRPSPENEIVIEDHHRRRYIRDY

SEQ ID NO: 32302 - DNA, 1107 bp, Muscodor strobelii
  misc_feature: SGI cDNA ID NO. 571132
  misc_feature: Reduced expression when VOC is produced
  misc_feature: Encodes the peptide sequence at SEQ ID NO 32303
atgggtcttgcgtcgcagaaaaacaagaggaagctcgacttcgatccgaataacacgagatggactcgcgacgagactactttcggccaaaagattcttcgctctcaaggatgggaaccgggcaagttcctcggtgcacagaatgccgcacacgccgaattgcacagcgccgccagtttcgcgcccatcaaaatcaatctgaaagacgatacccttgggctgggcgctaagatcttagcaaaacagaacgacgaatgcaccggtctggatgtcttcaaagacctgctcggtagactgaatggcaaatccgaagtcgctctcgagaaggagagacaagtccgctccgaaatcaaaaccaacctttacgtcgagaggaaatatggaccgatgcgttttgtcagcggtggcctgctagtgggagatcaacagaagatggctgagcttgctaaggcaaacccctcaacgaagtcaattaaagacgagcctaccaccgaatcggacggagcgaaatcgctgaagaaacagaagaaggagaagaaatccaggaagcggaaagccgaggactctgaggatgcagttagctctggagatacacccaaggagaagcgcaagaagcggtctaaggcggatgttcctagtgatattgacgctgaaatcgaggaatcatcgaagaaagaaaagaaacataagaagtccaaaaaatcgcaagaaacggcggcagatctggaatctgaaataaccgagctcgaagggaaacgtaagaagagcaagaagtccaaagacacgtccaatagttctaccgagacttcggaagtcgtagaggcatgtaaagccacgaggaaaggaaagaagaaggaaaagaaggaaaagaagcggaagcagagcaacgaggaagacactaccaacactacaacgctggcatccacaacaacgactaccgcctcaacctccaacgatagcggctcttcaacacccctgacaaccggcacttctacacctgtgctgtcagctcgtcatcgctcacgctcacgccatattgcctccaagagacaagccttcggtgacatgacggcattgaatcagatattcatggtcaagccagtttga

SEQ ID NO: 32303 - protein, 368 aa, Muscodor strobelii
  misc_feature: SGI Peptide ID NO. 571132
  misc_feature (25)..(77): Pfam Id: PF01585 Pfam Desc: G-patch domain
  misc_feature (1)..(361): NCBI GI: 116180940 Blast Desc: CHGG_01098 [Chaetomium globosum CBS 148.51] gi|88185395|gb|EAQ92863.1| CHGG_01098 [Chaetomium globosum CBS 148.51]
  misc_feature (1)..(141): NCBI GI: 39958695 Blast Desc: MGG_09279 [Magnaporthe grisea 70-15] gi|172044423|sp|A4R0T9.1|PXR1_MAGGR RecName: Full=Protein PXR1; AltName: Full=PinX1-related protein 1 gi|145013263|gb|EDJ97904.1|
  misc_feature (1)..(186): NCBI GI: 85119553 Blast Desc: NCU02528 [Neurospora crassa OR74A] gi|74619001|sp|Q7SHT5.1|PXR1_NEUCR RecName: Full=Protein pxr-1; AltName: Full=PinX1-related protein 1 gi|28927471|gb|EAA36423.1|
  misc_feature (1)..(141): NCBI GI: 171696324 Blast Desc: protein product [Podospora anserina] gi|170948404|emb|CAP60568.1| protein product [Podospora anserina]
  misc_feature (1)..(144): NCBI GI: 256734418 Blast Desc: NECHADRAFT_74657 [Nectria haematococca mpVI 77-13-4]
  misc_feature (1)..(147): NCBI GI: 46108446 Blast Desc: FG01105.1 [Gibberella zeae PH-1]
  misc_feature (1)..(142): NCBI GI: 154323626 Blast Desc: BC1G_00212 [Botryotinia fuckeliana B05.10] gi|172052489|sp|A6RIE1.1|PXR1_BOTFB RecName: Full=Protein pxr1; AltName: Full=PinX1-related protein 1 gi|150842441|gb|EDN17634.1|
  misc_feature (1)..(142): NCBI GI: 156056867 Blast Desc: SS1G_04164 [Sclerotinia sclerotiorum 1980] gi|171704393|sp|A7EFS3.1|PXR1_SCLS1 RecName: Full=Protein pxr1; AltName: Full=PinX1-related protein 1 gi|154701950|gb|EDO01689.1|
  misc_feature (1)..(144): NCBI GI: 261356438 Blast Desc: G-patch domain-containing protein [Verticillium albo-atrum VaMs.102]
  misc_feature (1)..(209): NCBI GI: 145247793 Blast Desc: An13g00030 [Aspergillus niger] gi|171769757|sp|A2R156.1|PXR1_ASPNC RecName: Full=Protein pxr1; AltName: Full=PinX1-related protein 1 protein product niger]
  misc_feature: Useful for introducing or modulating the production of volatile compounds
MGLASQKNKRKLDFDPNNTRWTRDETTFGQKILRSQGWEPGKFLGAQNAAHAELHSAASFAPIKINLKDDTLGLGAKILAKQNDECTGLDVFKDLLGRLNGKSEVALEKERQVRSEIKTNLYVERKYGPMRFVSGGLLVGDQQKMAELAKANPSTKSIKDEPTTESDGAKSLKKQKKEKKSRKRKAEDSEDAVSSGDTPKEKRKKRSKADVPSDIDAEIEESSKKEKKHKKSKKSQETAADLESEITELEGKRKKSKKSKDTSNSSTETSEVVEACKATRKGKKKEKKEKKRKQSNEEDTTNTTTLASTTTTTASTSNDSGSSTPLTTGTSTPVLSARHRSRSRHIASKRQAFGDMTALNQIFMVKPV

SEQ ID NO: 32304 - DNA, 1567 bp, Muscodor strobelii
  misc_feature: SGI EST ID NO. CUFF.76491.2
  misc_feature: Variant of the nucleotide sequence at SEQ ID NO 32302
cttcaaggtgaatagacatacagtgctggcagccacaacagcaggtgccagctgatagcatatttgatagcatttcggacttatcgctcaaaaattcggggacaagcagtggaccccaccaatcgtccgccaaccaccgaaagatcctgagttgaatctggacatttcccaaactttttgcattacagcatgatagcgtccaggttttgaatacgtcgctcatttgttcatttttacaatgggtcttgcgtcgcagaaaaacaagaggaagctcgacttcgatccgaataacacgagatggactcgcgacgagactactttcggccaaaagattcttcgctctcaaggatgggaaccgggcaagttcctcggtgcacagaatgccgcacacgccgaattgcacagcgccgccagtttcgcgcccatcaaaatcaatctgaaagacgatacccttgggctgggcgctaagatcttagcaaaacagaacgacgaatgcaccggtctggatgtcttcaaagacctgctcggtagactgaatggcaaatccgaagtcgctctcgagaaggagagacaagtccgctccgaaatcaaaaccaacctttacgtcgagaggaaatatggaccgatgcgttttgtcagcggtggcctgctagtgggagatcaacagaagatggctgagcttgctaaggcaaacccctcaacgaagtcaattaaagacgagcctaccaccgaatcggacggagcgaaatcgctgaagaaacagaagaaggagaagaaatccaggaagcggaaagccgaggactctgaggatgcagttagctctggagatacacccaaggagaagcgcaagaagcggtctaaggcggatgttcctagtgatattgacgctgaaatcgaggaatcatcgaagaaagaaaagaaacataagaagtccaaaaaatcgcaagaaacggcggcagatctggaatctgaaataaccgagctcgaagggaaacgtaagaagagcaagaagtccaaagacacgtccaatagttctaccgagacttcggaagtcgtagaggcatgtaaagccacgaggaaaggaaagaagaaggaaaagaaggaaaagaagcggaagcagagcaacgaggaagacactaccaacactacaacgctggcatccacaacaacgactaccgcctcaacctccaacgatagcggctcttcaacacccctgacaaccggcacttctacacctgtgctgtcagctcgtcatcgctcacgctcacgccatattgcctccaagagacaagccttcggtgacatgacggcattgaatcagatattcatggtcaagccagtttgatcggtcgagtttacctcgtcattttgagagcgttattgcatagcatcggggtgtttctcgatttgggcattgtttcgtagactctagttctcgatacccaatacacatgattagaaaagtgcgcatattgtagattgatctatacagcttgcccaagtggcaaacggttgctacgttcatacttaggttcgcatatttgggttcgtacactctgtcgctgcg

SEQ ID NO: 32305 - DNA, 648 bp, Muscodor strobelii
  misc_feature: SGI cDNA ID NO. 571133
  misc_feature: Encodes the peptide sequence at SEQ ID NO 32306
atgccaccccgcaagagagtccgagagcagaccgaggagatctcagaagacgaagtcgtcattcttcctcggaacaacccaacatcgatgataccaagcactttgcagaatatcacaaacatcaaagagagacgtgcaaaggcccgtgaggaaatcaagaagcaacacaagacctgggtcaaggagaagacttcccagctcgaacgcagctacaatgcagttgtagcgcagagaagagccaaagaaaaggatctctacgagcgccttgccgcagccaaggcacgacgcactagtatcgagcaagaaatcatcaagactctggaagacgcggatcaggactatgacgaagctcttatgttcttccgcgccgtctactcagggaaacacgatgatgcggctaagtcattagagacacacaatcccaccccgattcgcacgccgcccgaggagaagaagcttgccacagaaacaagagaccaggcaatgaatcgacttttagatgtcaaggccatgaatgctcactacgatacgagtaatcgtaaaggtaagggtaaagagattgttggtcaagaccactatgctcgtgatagggcctatgaatctgagcgggaggataggagacccaccaatcgatcgatttggtcgtag

SEQ ID NO: 32306 - protein, 215 aa, Muscodor strobelii
  misc_feature: SGI Peptide ID NO. 571133
MPPRKRVREQTEEISEDEVVILPRNNPTSMIPSTLQNITNIKERRAKAREEIKKQHKTWVKEKTSQLERSYNAVVAQRRAKEKDLYERLAAAKARRTSIEQEIIKTLEDADQDYDEALMFFRAVYSGKHDDAAKSLETHNPTPIRTPPEEKKLATETRDQAMNRLLDVKAMNAHYDTSNRKGKGKEIVGQDHYARDRAYESEREDRRPTNRSIWS

SEQ ID NO: 32307 - DNA, 3486 bp, Muscodor strobelii
  misc_feature: SGI cDNA ID NO. 571134
  misc_feature: Reduced expression when VOC is produced
  misc_feature: Encodes the peptide sequence at SEQ ID NO 32308
atgtatcgtgcaggagacaagcgagcacggcccgaccccaaggagccagactacatcaatgagctgagcgatgaggatctggaaggcctcgaggtttccggcgtcactgttccggcctcctcgccctacttcacacaaccaactcagatcgtcaaccgcagcaccgccactggcactggcactggcacgcagcctacccagatagtgggacgagcaaccgagtccacgccaacccaactgctcgatcgatcaacacagcccactcagattacaggtcggaccaccctgcagcttccgtcctcgccaagcactaccattgaggtccctgcttcctccccattccaaccgaaacaccattcgtcacccttcatagaaaagaagaagcctgccactcggcctcttgggtcattcatggcccctgccggaactgatttcaggccacccggcgcaaagccgtataccaacccgaacaggagtatacccgatgtcaagtccaggcattacgtggacgtatcagacgatgaactccagaaggattacaagcatgacgacagctctgagaatgagactccaatgcgcggcgacatcaagccttcctccttcgccaaaaagaaccctgtcgataatttcaagccgaagtctacatggtcactcaagcccttcgatgccaatgacattaaggaccttggggcgcgtcacaggacgaacacagtatacaagatcgtgtccaagtacagaccagccgtcactctcaaagcatgctacgatgtcgttgctaagagcaaagtcggcggtggggttgaggaggctgttaagctactattgggcggtaccgtacccaacaagggaaggatatcgagaccatctacacttggtagcttcagtggttcgactggctctaccgactcatctacgtctcaaaacagtagctcgactgctcaacatacctcgatagattcgacgaaaccaccacggagacgtctggtgcacggccgaaggtcaccttcctctcctcctatattctctgtatcatcttccgcttcgtcacagcccaccacaccggctaagtcagagattggttccccggaagaccagttcataaaagctcgatcgaataacacaataagcgaaccgctcaagaaatcccgccctgttgaggccgagccaaagtcccacgtcaaacctcgccgtcctgggagactgcaacgtggccgccggaaccctacccctcctccaacaactattaccgtggattctgagtctgagtctgatgcgaaattgccctctctcgataagattgtctctcggaagcgaaaggcaacgccggagattacagccgtttcgtcagacgatgagttccaacgattacctccaccgagtcctctaccttctgtcagccccactcgcaagcccacggccaacgagctgcaggtcctccagtacctgaatacatgcacccctgaatcgctttctcagatcaccggattcagcgcagctgactcgcgcctcatgacaaacactcgccctttcaactcgataactgatgctgaaatcgtgtcaaagaaaggtacggccaaggccaaggccagacgaacccaggtcggctcactcttcgtcgagaagctgacttcatggttcgaggcttttacggcagcttccgaggtgatcgaggaatgtgagggccgtggtcggcagctacagaaagctatggctagatggtcgatggacaaaaatggtcgccaacagacgggcacagaactgcaactgccaatcacagcgaaacctaagcttatggctgacgacgttgtactgaaatcgtaccagcttcttggtttgaactggatgaacctcttacattctaaaaggttcagtggcatcctcgcggacgacatgggcttggggaagacttgtcaagttatctccatggttgcccatttggtcggctcctataatgaagatgaggagtccgagaatgagaggccttggccagttctgatcgtcgttcctcccagtgtctgcgagaattggatggctgaattggaacgcttcgctcccgaattgacggtttgcccatacataggctccgatcgacgcaacatagatccggaggaagcaagagagaaccatgttgtcttgacaagttattcccaggttgagagacagaaagaggatcttcaatggctacgggcacttgagccgtatgcagccatattcgatgaaggtcacaaattgaagaaccgaaaaaatcttgtgtacaagcagatgatgcgagtcccaactcagtggcgtctgattcttagcggtacgcctgtacagaacaacttaaaggaacttctgacccttcttcatttcgtcgagcctgacctttttggcgatgagatttttgaccaactcgatactatattcgaagccaaggttccaaacaaagagattcacaactttgctgcacttgccaaggagcgagtctcgaacgctcgtaagattatggaacctttcattctgcagcgcagaaaggaggatgttctcgacttagcgaagaaaattgaacgcaacgtggaggtcgacatgcaccctaaacagaaggcgatctatgatgaggtcaaaggtcgctacctagtcccaaagacgcagcgagcttcttcaacgatcaaagaacaacatccctggcttcagcttcgaaaggcttcgattcaccatcaactattccgcgtccatttcaccgatcagattgtgaagaagatggtggatatcctgtgggagaagtgtagcgaggaggaactctacgttcagagcaaagcagatcggcacaagaccctgttcctggagaattaccaagagaaatccgattttcagctgcatgttgaatgcaaacacttcaaaaagtacatcggcaaattcgatatcccccataggtcttgggaggaaagccctaaagtgcaaaagttactggagcttgttcggggctacatgaaaactggtgaccgcgtgctcatctttagtcggttcgatctcgtcattgacattcttcgcgagacatttgcttttgcggacattccctactgtgagctcactggcgctaccgacattagcgaccgcttccccgagattgagagatttaataagaaccctgacattcctgtattcttgctcacgactggcgccggtggaactggtttgaacttgacagccgccaacaagattatcatatttgatcagtcagacaatccccaagatgatgtgcaggcatcgaatcgtgcccaccgtatcggccagacgcgtgacgttgaggtcattcgtctcatcaccaagggttcggttgagggcctcatcttcaattcgtgcgtcaagaagcttatgcttgctcgcgttgtggagggaaattttccagtggacgaaggtgaagacagttccactatcgaatcactctgtcggcagcagatgatacaacaagaagagagcacggcaacgcagcccgatcatgattaa

SEQ ID NO: 32308 - protein, 1161 aa, Muscodor strobelii
  misc_feature: SGI Peptide ID NO. 571134
  misc_feature (1012)..(1090): Pfam Id: PF00271 Pfam Desc: Helicase conserved C-terminal domain
  misc_feature (607)..(902): Pfam Id: PF00176 Pfam Desc: SNF2 family N-terminal domain
  misc_feature (607)..(872): Pfam Id: PF00176 Pfam Desc: SNF2 family N-terminal domain
  misc_feature (80)..(1154): NCBI GI: 256734339 Blast Desc: NECHADRAFT_65429 [Nectria haematococca mpVI 77-13-4]
  misc_feature (385)..(1159): NCBI GI: 39965277 Blast Desc: MGG_09930 [Magnaporthe grisea 70-15] gi|145013168|gb|EDJ97809.1| MGG_09930 [Magnaporthe grisea 70-15]
  misc_feature (459)..(1126): NCBI GI: 164424946 Blast Desc: NCU09106 [Neurospora crassa OR74A] gi|157070726|gb|EAA29079.2| conserved [Neurospora crassa OR74A]
  misc_feature (475)..(1126): NCBI GI: 171687365 Blast Desc: protein product [Podospora anserina] gi|170943644|emb|CAP69296.1| protein product [Podospora anserina]
  misc_feature (477)..(1151): NCBI GI: 46108786 Blast Desc: FG01275.1 [Gibberella zeae PH-1]
  misc_feature (65)..(1154): NCBI GI: 67525031 Blast Desc: AN2973.2 [Aspergillus nidulans FGSC A4] gi|40744368|gb|EAA63544.1| AN2973.2 [Aspergillus nidulans FGSC A4] gi|259486081|tpe|CBF83639.1| TPA: SNF2 family AFUA_3G08400)
  misc_feature (475)..(1161): NCBI GI: 156036384 Blast Desc: SS1G_12881 [Sclerotinia sclerotiorum 1980] gi|154698286|gb|EDN98024.1| SS1G_12881 [Sclerotinia sclerotiorum 1980]
  misc_feature (367)..(1120): NCBI GI: 154291059 Blast Desc: BC1G_15417 [Botryotinia fuckeliana B05.10] gi|150847107|gb|EDN22300.1| BC1G_15417 [Botryotinia fuckeliana B05.10]
  misc_feature (56)..(1120): NCBI GI: 258564262 Blast Desc: UREG_07649 [Uncinocarpus reesii 1704] gi|237908383|gb|EEP82784.1| UREG_07649 [Uncinocarpus reesii 1704]
  misc_feature (359)..(1126): NCBI GI: 115384896 Blast Desc: conserved [Aspergillus terreus NIH2624] gi|114196687|gb|EAU38387.1| conserved [Aspergillus terreus NIH2624]
  misc_feature: Useful for introducing or modulating the production of volatile compounds
MYRAGDKRARPDPKEPDYINELSDEDLEGLEVSGVTVPASSPYFTQPTQIVNRSTATGTGTGTQPTQIVGRATESTPTQLLDRSTQPTQITGRTTLQLPSSPSTTIEVPASSPFQPKHHSSPFIEKKKPATRPLGSFMAPAGTDFRPPGAKPYTNPNRSIPDVKSRHYVDVSDDELQKDYKHDDSSENETPMRGDIKPSSFAKKNPVDNFKPKSTWSLKPFDANDIKDLGARHRTNTVYKIVSKYRPAVTLKACYDVVAKSKVGGGVEEAVKLLLGGTVPNKGRISRPSTLGSFSGSTGSTDSSTSQNSSSTAQHTSIDSTKPPRRRLVHGRRSPSSPPIFSVSSSASSQPTTPAKSEIGSPEDQFIKARSNNTISEPLKKSRPVEAEPKSHVKPRRPGRLQRGRRNPTPPPTTITVDSESESDAKLPSLDKIVSRKRKATPEITAVSSDDEFQRLPPPSPLPSVSPTRKPTANELQVLQYLNTCTPESLSQITGFSAADSRLMTNTRPFNSITDAEIVSKKGTAKAKARRTQVGSLFVEKLTSWFEAFTAASEVIEECEGRGRQLQKAMARWSMDKNGRQQTGTELQLPITAKPKLMADDVVLKSYQLLGLNWMNLLHSKRFSGILADDMGLGKTCQVISMVAHLVGSYNEDEESENERPWPVLIVVPPSVCENWMAELERFAPELTVCPYIGSDRRNIDPEEARENHVVLTSYSQVERQKEDLQWLRALEPYAAIFDEGHKLKNRKNLVYKQMMRVPTQWRLILSGTPVQNNLKELLTLLHFVEPDLFGDEIFDQLDTIFEAKVPNKEIHNFAALAKERVSNARKIMEPFILQRRKEDVLDLAKKIERNVEVDMHPKQKAIYDEVKGRYLVPKTQRASSTIKEQHPWLQLRKASIHHQLFRVHFTDQIVKKMVDILWEKCSEEELYVQSKADRHKTLFLENYQEKSDFQLHVECKHFKKYIGKFDIPHRSWEESPKVQKLLELVRGYMKTGDRVLIFSRFDLVIDILRETFAFADIPYCELTGATDISDRFPEIERFNKNPDIPVFLLTTGAGGTGLNLTAANKIIIFDQSDNPQDDVQASNRAHRIGQTRDVEVIRLITKGSVEGLIFNSCVKKLMLARVVEGNFPVDEGEDSSTIESLCRQQMIQQEESTATQPDHD

SEQ ID NO: 32309 - DNA, 4390 bp, Muscodor strobelii
  misc_feature: SGI EST ID NO. CUFF.76617.0
  misc_feature: Variant of the nucleotide sequence at SEQ ID NO 32307
gttccctgtcactggcgtcgcgccaaccccggggctactgtattctttagacccaccattttttctcgccgttcactcaacgcacacactattcttaacctcttaacctcgacgccgtccctgccaccacccgcttccgttctcctttctccgccatgatctaaccacaagatccaatttcgctacgccccttctatacccaatcttgaacgtggcatcattgcgggcatgtcacggttatcgtcaccttccaaaccccatcttcgaaccattcctgcaacgcccaagatgtatcgtgcaggagacaagcgagcacggcccgaccccaaggagccagactacatcaatgagctgagcgatgaggatctggaaggcctcgaggtttccggcgtcactgttccggcctcctcgccctacttcacacaaccaactcagatcgtcaaccgcagcaccgccactggcactggcactggcacgcagcctacccagatagtgggacgagcaaccgagtccacgccaacccaactgctcgatcgatcaacacagcccactcagattacaggtcggaccaccctgcagcttccgtcctcgccaagcactaccattgaggtccctgcttcctccccattccaaccgaaacaccattcgtcacccttcatagaaaagaagaagcctgccactcggcctcttgggtcattcatggcccctgccggaactgatttcaggccacccggcgcaaagccgtataccaacccgaacaggagtatacccgatgtcaagtccaggcattacgtggacgtatcagacgatgaactccagaaggattacaagcatgacgacagctctgagaatgagactccaatgcgcggcgacatcaagccttcctccttcgccaaaaagaaccctgtcgataatttcaagccgaagtctacatggtcactcaagcccttcgatgccaatgacattaaggaccttggggcgcgtcacaggacgaacacagtatacaagatcgtgtccaagtacagaccagccgtcactctcaaagcatgctacgatgtcgttgctaagagcaaagtcggcggtggggttgaggaggctgttaagctactattgggcggtaccgtacccaacaagggaaggatatcgagaccatctacacttggtagcttcagtggttcgactggctctaccgactcatctacgtctcaaaacagtagctcgactgctcaacatacctcgatagattcgacgaaaccaccacggagacgtctggtgcacggccgaaggtcaccttcctctcctcctatattctctgtatcatcttccgcttcgtcacagcccaccacaccggctaagtcagagattggttccccggaagaccagttcataaaagctcgatcgaataacacaataagcgaaccgctcaagaaatcccgccctgttgaggccgagccaaagtcccacgtcaaacctcgccgtcctgggagactgcaacgtggccgccggaaccctacccctcctccaacaactattaccgtggattctgagtctgagtctgatgcgaaattgccctctctcgataagattgtctctcggaagcgaaaggcaacgccggagattacagccgtttcgtcagacgatgagttccaacgattacctccaccgagtcctctaccttctgtcagccccactcgcaagcccacggccaacgagctgcaggtcctccagtacctgaatacatgcacccctgaatcgctttctcagatcaccggattcagcgcagctgactcgcgcctcatgacaaacactcgccctttcaactcgataactgatgctgaaatcgtgtcaaagaaaggtacggccaaggccaaggccagacgaacccaggtcggctcactcttcgtcgagaagctgacttcatggttcgaggcttttacggcagcttccgaggtgatcgaggaatgtgagggccgtggtcggcagctacagaaagctatggctagatggtcgatggacaaaaatggtcgccaacagacgggcacagaactgcaactgccaatcacagcgaaacctaagcttatggctgacgacgttgtactgaaatcgtaccagcttcttggtttgaactggatgaacctcttacattctaaaaggttcagtggcatcctcgcggacgacatgggcttggggaagacttgtcaagttatctccatggttgcccatttggtcggctcctataatgaagatgaggagtccgagaatgagaggccttggccagttctgatcgtcgttcctcccagtgtctgcgagaattggatggctgaattggaacgcttcgctcccgaattgacggtttgcccatacataggctccgatcgacgcaacatagatccggaggaagcaagagagaaccatgttgtcttgacaagttattcccaggttgagagacagaaagaggatcttcaatggctacgggcacttgagccgtatgcagccatattcgatgaaggtcacaaattgaagaaccgaaaaaatcttgtgtacaagcagatgatgcgagtcccaactcagtggcgtctgattcttagcggtacgcctgtacagaacaacttaaaggaacttctgacccttcttcatttcgtcgagcctgacctttttggcgatgagatttttgaccaactcgatactatattcgaagccaaggttccaaacaaagagattcacaactttgctgcacttgccaaggagcgagtctcgaacgctcgtaagattatggaacctttcattctgcagcgcagaaaggaggatgttctcgacttagcgaagaaaattgaacgcaacgtggaggtcgacatgcaccctaaacagaaggcgatctatgatgaggtcaaaggtcgctacctagtcccaaagacgcagcgagcttcttcaacgatcaaagaacaacatccctggcttcagcttcgaaaggcttcgattcaccatcaactattccgcgtccatttcaccgatcagattgtgaagaagatggtggatatcctgtgggagaagtgtagcgaggaggaactctacgttcagagcaaagcagatcggcacaagaccctgttcctggagaattaccaagagaaatccgattttcagctgcatgttgaatgcaaacacttcaaaaagtacatcggcaaattcgatatcccccataggtcttgggaggaaagccctaaagtgcaaaagttactggagcttgttcggggctacatgaaaactggtgaccgcgtgctcatctttagtcggttcgatctcgtcattgacattcttcgcgagacatttgcttttgcggacattccctactgtgagctcactggcgctaccgacattagcgaccgcttccccgagattgagagatttaataagaaccctgacattcctgtattcttgctcacgactggcgccggtggaactggtttgaacttgacagccgccaacaagattatcatatttgatcagtcagacaatccccaagatgatgtgcaggcatcgaatcgtgcccaccgtatcggccagacgcgtgacgttgaggtcattcgtctcatcaccaagggttcggttgagggcctcatcttcaattcgtgcgtcaagaagcttatgcttgctcgcgttgtggagggaaattttccagtggacgaaggtgaagacagttccactatcgaatcactctgtcggcagcagatgatacaacaagaagagagcacggcaacgcagcccgatcatgattaacatgtacagtcatttctcggctgatcattgggtcagacttgatctgaatgtgacttacagcattcagttccctgaccctacatattcactgttggacgtgcttcggactcgggataacggtctataagagacttgggacgaaattttccttctagcattttatccttgtacaaaagatgacacaggaagaggagttcaaaagacatcggatgacaaacacgaacaaggcgtttctggcatagatcctagaaggatatgcgttacctagagtggcatttccaaactgcttttacacagagctcgtaatagataaatcacaaagctggcattgacggcacggtcctacagatcttaacttttaggagagcacaacaacgacacttggtacacgtacccagatggagtcatggtggatataccccatttgcgagtttctctacaggctattcaaccgctctcgccgtctttatagacgtgcaaataagacgataaacgatgacaggaaatgaagggatgaaagaagtggcacgtctaatcgttgctacacagatttagctaaatagttttatttagctatctacatacataagctaatacatcatgtgatgcatcaacc

SEQ ID NO: 32310 - DNA, 351 bp, Muscodor strobelii
  misc_feature: SGI cDNA ID NO. 571135
  misc_feature: Encodes the peptide sequence at SEQ ID NO 32311
atggcaactcgacgcattatctcgtctgaaaagaccatccttgataaggatgacgatgacctcaaagttagccctagtggcccgtccagcacagcaccagcagtgcccatggatgtgatccttaagctccttgcgtttactctcgccatggtcgtcattcccattggatcctacttcctaactgtgaatacattgttcaaaggcaactcaacctatgccggcattctagccgcaatcctcgcaaacgtggtgcttgttggctacgtcatcgtggcctacaatgaagatcagagcgaccagctagaggcagagaagaagaagaccaaggagcgccagggtaaagctgagtga

SEQ ID NO: 32311 - protein, 116 aa, Muscodor strobelii
  misc_feature: SGI Peptide ID NO. 571135
  misc_feature (36)..(93): Pfam Id: PF09446 Pfam Desc: VMA21-like domain
  misc_feature (1)..(101): NCBI GI: 171687363 Blast Desc: protein product [Podospora anserina] gi|170943643|emb|CAP69295.1| protein product [Podospora anserina]
  misc_feature (1)..(109): NCBI GI: 46108788 Blast Desc: FG01276.1 [Gibberella zeae PH-1]
  misc_feature (1)..(102): NCBI GI: 116181942 Blast Desc: conserved [Chaetomium globosum CBS 148.51] gi|121790477|sp|Q2HDV5.1|VMA21_CHAGB RecName: Full=Vacuolar ATPase assembly integral membrane protein VMA21 conserved CBS
  misc_feature (1)..(109): NCBI GI: 261356414 Blast Desc: conserved [Verticillium albo-atrum VaMs.102]
  misc_feature (1)..(100): NCBI GI: 85090226 Blast Desc: NCU09107 [Neurospora crassa OR74A] gi|74614756|sp|Q7S158.1|VMA21_NEUCR RecName: Full=Vacuolar ATPase assembly integral membrane protein VMA21 [Neurospora crassa
  misc_feature (1)..(112): NCBI GI: 256735044 Blast Desc: NECHADRAFT_74492 [Nectria haematococca mpVI 77-13-4]
  misc_feature (1)..(109): NCBI GI: 189203987 Blast Desc: conserved [Pyrenophora tritici-repentis Pt-1C-BFP] gi|239977707|sp|B2WDD8.1|VMA21_PYRTR RecName: Full=Vacuolar ATPase assembly integral membrane protein VMA21 conserved
  misc_feature (1)..(111): NCBI GI: 39965264 Blast Desc: MGG_09929 [Magnaporthe grisea 70-15] gi|239977710|sp|A4R0J5.1|VMA21_MAGGR RecName: Full=Vacuolar ATPase assembly integral membrane protein VMA21 MGG_09929 grisea
  misc_feature (1)..(110): NCBI GI: 169602771 Blast Desc: SNOG_04388 [Phaeosphaeria nodorum SN15] gi|121749645|sp|Q0UV26.1|VMA21_PHANO RecName: Full=Vacuolar ATPase assembly integral membrane protein VMA21 SNOG_04388 SN15]
  misc_feature (29)..(98): NCBI GI: 156036386 Blast Desc: SS1G_12882 [Sclerotinia sclerotiorum 1980] gi|239977706|sp|A7F5K4.1|VMA21_SCLS1 RecName: Full=Vacuolar ATPase assembly integral membrane protein VMA21 SS1G_12882 1980]
MATRRIISSEKTILDKDDDDLKVSPSGPSSTAPAVPMDVILKLLAFTLAMVVIPIGSYFLTVNTLFKGNSTYAGILAAILANVVLVGYVIVAYNEDQSDQLEAEKKKTKERQGKAE

SEQ ID NO: 32312 - DNA, 3621 bp, Muscodor strobelii
  misc_feature: SGI EST ID NO. CUFF.76793.0
  misc_feature: Variant of the nucleotide sequence at SEQ ID NO 32310
ggtgattctggctagcagttgagattggcgtgataagccatgccttcatgatgttcacactggaatcttgaatagtagtacaattagatggttgagacttatttgaatggctttctacctgaggccggtagtaagtgtggacatgccgcacttgcggtctcatgaagttgtttttgtcgattacttgacaaagaactcttacaagttgggacccgtccacgttcccgagggacagagggacagaagaacacgcttccgtcactgctccactttgccagtctgcacagagcacgagagcctcgaacctgacgttcaggcatccaatcatatttcacacaccccaaccgtccatcaaacatagcattgctcaagctgcacgccatggcaactcgacgcattatctcgtctgaaaagaccatccttgataaggatgacgatgacctcaaagttagccctagtggcccgtccagcacagcaccagcagtgcccatggatgtgatccttaagctccttgcgtttactctcgccatggtcgtcattcccattggatcctacttcctaactgtgaatacattgttcaaaggcaactcaacctatgccggcattctagccgcaatcctcgcaaacgtggtgcttgttggctacgtcatcgtggcctacaatgaagatcagagcgaccagctagaggcagagaagaagaagaccaaggagcgccagggtaaagctgagtgatctagctgttgttcacactacatgacagatcagagattgcatttcaatgggagcatggcattgccatcctactccgtagtgacattaagtcatttgctttggcacttttttgccacaacttgagattaaccatcaagatctagggggaggggagaccagcctgcaaccgcttgatccttcgagtcccttcatactgtaacacaccaagatggttggcattactttatctgctcattgactgagggccttcggttgtggatcagcattcgcagagtatagtcatgaacatgcaattttgacccggtacttgcaatcggatgtctatcgaatgagtgatgatcaatttgtgtgcaactactggcagccttttcagaccacccacagcgttgcacatatgccagtatattatctcttcgctatctagtagaattgtcatgcgtgcactacgcaggattgagtttcgaggcgtatgtgcgttcgctcccaagcgtcccgacaccaggcctcttcaggtctcctcatccatttcaatttgccagcggcgctggctctttaccttaaaatcccatcgctcgggcttgatacccgtagtactagtttggcagctccctgcgtgcctaaccatcggtttgaataaatgaccacctcgggtgcccaacaacccaacagcagtttgccaccccgaatacaatgactcgagcaactaggaaatgccatcaagcacaatcaaccagaataacaccgtcgaaagaaatataaggaatgggtatctacatcgtcatcgtcaagtggcgtggtctagaagcgtgctccaaaccgattgtatgtgcaacaatactaagaattcttgctgaagcgtcgcatgaaccagcttttgcgcttctcgcccatgtcgggtcgttcttgcgagccggtgacggcggcctttgacggtttcctcagcatggctcctccagcatccttacgaggcactgcgggtggctgttgaggaattgtatagtccggcgctatgccgaaccctgacgtctgatagttggaagactggccaaagctgatgccatagtcgttcatgggctcttggcgtttgggtggtgacctgcgatcgatcgaactgttctcgctgctagtaggatcagtttgatagcccatcggttcacccatactgccggttccagatcctgacgcaacggtctcataggaccggtggttattcggcatcggatagacgttacgttcacgaccgttgagttgaggttcggattgcatacgcgaatatctatttcgcgaccccatccccggtcctccgtagccgttctgtccaccgtcgtaccctccgtcgtagaggctgtctcgcgagccgccgagcattgcggattggcgatagtcgagcatgccactgtctgtgcggtttggccgcccaccgccgtagccatacggcccatcctgtgtttgccgaggtgcattgcctagagttgttaggttttctcagatcagcggaatcaggaacgtggctccagcttaccgccataatagctacttcttctgttccagtttgcgacggagtccgaatcggatcgataaacagatttgcggttgtaaccgccgtcaatggcagcttcgaaacttcgaatagtatcaagcggccgctcccatcggctccgcgtcgggttcgatcgatcggggtcagctggtacggaatttagcattggcaccaaaaggatcccactgaaagtgcgactgtcgaacataccaattgggtttccagaagaatctctatgctgtatggctcgcaaggcgggcctctcggaaacggtttgggcctccatggctagttaaaaatattaggccggatcttgaactgaggtgtctttggggcgagagtaagtcgacttaccaggctctctttccgtcattgccatccttggatcagctttactgtgtaatctcttggcctccttctccgctgaagtctcatgtaggttgatcttgtgagatgggccgttagcgctcttctgggacttgtcggatcggaagctgaaggctctcgacttggggcgtgttcgctgttgttgctgcgccggaggaggcttctgaagcggaggaggcaacggttggaagtctggttgctgctgatactgtggttgagatggctgatattcagactgatatcggtactgttggggtggctgctgctgctgatgcccgtaaggcgggtagtcttcttgctcgggcggcggagcaggcagcggatggtggttgtagttggcagaggaagccatcgtgcgaaaggccagtgcggcttcgtttgattgcggtgtttctgatatccctgacaggggccaggccaggctcgtggagcaggcgactaggcaagcgtggtgagtggagtgaatcgctgatgatgatagctatcttagaactatcctggtgggttttcccgtagcgctggtccggatcctccttgcctgtttttaaaattgttaatattgcgggctgatgtttctgtttcaaagtgtggggagatgcaggacttgcaacgtgcaagatgaggccgagagatgaattggcccgagcgagaatgaagattggcgttgcggtctgtgttctggaggacgataataataaacacaaaagggcacaaaagaggcaggggaggtaggtcaggtactttaggtaggtcgggtagctgtttgtgtctggagctgcaggcaggggagtaatgacaagcaggagatacggtggtgtggactgtgacacccgtctcagaatgggcaaaattcagggaaatcgagtttcgatggtggctgggagggacttggagcgccaagggcgtcgcaatacactcttcgccctcacacacatatacgggtcctcgtacgtgttggcctc

SEQ ID NO: 32313 - DNA, 1257 bp, Muscodor strobelii
  misc_feature: SGI cDNA ID NO. 571136
  misc_feature: Reduced expression when VOC is produced
  misc_feature: Encodes the peptide sequence at SEQ ID NO 32314
atggcttcctctgccaactacaaccaccatccgctgcctgctccgccgcccgagcaagaagactacccgccttacgggcatcagcagcagcagccaccccaacagtaccgatatcagtctgaatatcagccatctcaaccacagtatcagcagcaaccagacttccaaccgttgcctcctccgcttcagaagcctcctccggcgcagcaacaacagcgaacacgccccaagtcgagagccttcagcttccgatccgacaagtcccagaagagcgctaacggcccatctcacaagatcaacctacatgagacttcagcggagaaggaggccaagagattacacagtaaagctgatccaaggatggcaatgacggaaagagagcctgccatggaggcccaaaccgtttccgagaggcccgccttgcgagccatacagcatagagattcttctggaaacccaattgctgaccccgatcgatcgaacccgacgcggagccgatgggagcggccgcttgatactattcgaagtttcgaagctgccattgacggcggttacaaccgcaaatctgtttatcgatccgattcggactccgtcgcaaactggaacagaagaagtagctattatggcggcaatgcacctcggcaaacacaggatgggccgtatggctacggcggtgggcggccaaaccgcacagacagtggcatgctcgactatcgccaatccgcaatgctcggcggctcgcgagacagcctctacgacggagggtacgacggtggacagaacggctacggaggaccggggatggggtcgcgaaatagatattcgcgtatgcaatccgaacctcaactcaacggtcgtgaacgtaacgtctatccgatgccgaataaccaccggtcctatgagaccgttgcgtcaggatctggaaccggcagtatgggtgaaccgatgggctatcaaactgatcctactagcagcgagaacagttcgatcgatcgcaggtcaccacccaaacgccaagagcccatgaacgactatggcatcagctttggccagtcttccaactatcagacgtcagggttcggcatagcgccggactatacaattcctcaacagccacccgcagtgcctcgtaaggatgctggaggagccatgctgaggaaaccgtcaaaggccgccgtcaccggctcgcaagaacgacccgacatgggcgagaagcgcaaaagctggttcatgcgacgcttcagcaagaattcttag

SEQ ID NO: 32314 - protein, 418 aa, Muscodor strobelii
  misc_feature: SGI Peptide ID NO. 571136
  misc_feature (77)..(417): NCBI GI: 171687361 Blast Desc: protein product [Podospora anserina] gi|170943642|emb|CAP69294.1| protein product [Podospora anserina]
  misc_feature (73)..(418): NCBI GI: 145605353 Blast Desc: MGG_09928 [Magnaporthe grisea 70-15] gi|145013170|gb|EDJ97811.1| MGG_09928 [Magnaporthe grisea 70-15]
  misc_feature (44)..(418): NCBI GI: 46108790 Blast Desc: FG01277.1 [Gibberella zeae PH-1]
  misc_feature (56)..(346): NCBI GI: 256734338 Blast Desc: NECHADRAFT_98672 [Nectria haematococca mpVI 77-13-4]
  misc_feature (123)..(417): NCBI GI: 116181944 Blast Desc: CHGG_01600 [Chaetomium globosum CBS 148.51] gi|88185897|gb|EAQ93365.1| CHGG_01600 [Chaetomium globosum CBS 148.51]
  misc_feature (123)..(417): NCBI GI: 156036388 Blast Desc: SS1G_12883 [Sclerotinia sclerotiorum 1980] gi|154698288|gb|EDN98026.1| SS1G_12883 [Sclerotinia sclerotiorum 1980]
  misc_feature (123)..(417): NCBI GI: 154291055 Blast Desc: BC1G_15415 [Botryotinia fuckeliana B05.10] gi|150847105|gb|EDN22298.1| BC1G_15415 [Botryotinia fuckeliana B05.10]
  misc_feature (57)..(416): NCBI GI: 164424944 Blast Desc: NCU09108 [Neurospora crassa OR74A] gi|157070725|gb|EAA29081.2| conserved [Neurospora crassa OR74A]
  misc_feature (78)..(417): NCBI GI: 238484679 Blast Desc: conserved [Aspergillus flavus NRRL3357] gi|220701628|gb|EED57966.1| conserved [Aspergillus flavus NRRL3357]
  misc_feature (67)..(417): NCBI GI: 119492457 Blast Desc: NFIA_068670 [Neosartorya fischeri NRRL 181] gi|119411754|gb|EAW21697.1| conserved [Neosartorya fischeri NRRL 181]
  misc_feature: Useful for introducing or modulating the production of volatile compounds
MASSANYNHHPLPAPPPEQEDYPPYGHQQQQPPQQYRYQSEYQPSQPQYQQQPDFQPLPPPLQKPPPAQQQQRTRPKSRAFSFRSDKSQKSANGPSHKINLHETSAEKEAKRLHSKADPRMAMTEREPAMEAQTVSERPALRAIQHRDSSGNPIADPDRSNPTRSRWERPLDTIRSFEAAIDGGYNRKSVYRSDSDSVANWNRRSSYYGGNAPRQTQDGPYGYGGGRPNRTDSGMLDYRQSAMLGGSRDSLYDGGYDGGQNGYGGPGMGSRNRYSRMQSEPQLNGRERNVYPMPNNHRSYETVASGSGTGSMGEPMGYQTDPTSSENSSIDRRSPPKRQEPMNDYGISFGQSSNYQTSGFGIAPDYTIPQQPPAVPRKDAGGAMLRKPSKAAVTGSQERPDMGEKRKSWFMRRFSKNS

SEQ ID NO: 32315 - DNA, 2638 bp, Muscodor strobelii
  misc_feature: SGI EST ID NO. CUFF.76794.1
  misc_feature: Variant of the nucleotide sequence at SEQ ID NO 32313
ctaaagtacctgacctacctcccctgcctcttttgtgcccttttgtgtttattattatcgtcctccagaacacagaccgcaacgccaatcttcattctcgctcgggccaattcatctctcggcctcatcttgcacgttgcaagtcctgcatctccccacactttgaaacagaaacatcagcccgcaatattaacaattttaaaaacaggcaaggaggatccggaccagcgctacgggaaaacccaccaggatagttctaagatagctatcatcatcagcgattcactccactcaccacgcttgcctagtcgcctgctccacgagcctggcctggcccctgtcagggatatcagaaacaccgcaatcaaacgaagccgcactggcctttcgcacgatggcttcctctgccaactacaaccaccatccgctgcctgctccgccgcccgagcaagaagactacccgccttacgggcatcagcagcagcagccaccccaacagtaccgatatcagtctgaatatcagccatctcaaccacagtatcagcagcaaccagacttccaaccgttgcctcctccgcttcagaagcctcctccggcgcagcaacaacagcgaacacgccccaagtcgagagccttcagcttccgatccgacaagtcccagaagagcgctaacggcccatctcacaagatcaacctacatgagacttcagcggagaaggaggccaagagattacacagtaaagctgatccaaggatggcaatgacggaaagagagcctgccatggaggcccaaaccgtttccgagaggcccgccttgcgagccatacagcatagagattcttctggaaacccaattgctgaccccgatcgatcgaacccgacgcggagccgatgggagcggccgcttgatactattcgaagtttcgaagctgccattgacggcggttacaaccgcaaatctgtttatcgatccgattcggactccgtcgcaaactggaacagaagaagtagctattatggcggcaatgcacctcggcaaacacaggatgggccgtatggctacggcggtgggcggccaaaccgcacagacagtggcatgctcgactatcgccaatccgcaatgctcggcggctcgcgagacagcctctacgacggagggtacgacggtggacagaacggctacggaggaccggggatggggtcgcgaaatagatattcgcgtatgcaatccgaacctcaactcaacggtcgtgaacgtaacgtctatccgatgccgaataaccaccggtcctatgagaccgttgcgtcaggatctggaaccggcagtatgggtgaaccgatgggctatcaaactgatcctactagcagcgagaacagttcgatcgatcgcaggtcaccacccaaacgccaagagcccatgaacgactatggcatcagctttggccagtcttccaactatcagacgtcagggttcggcatagcgccggactatacaattcctcaacagccacccgcagtgcctcgtaaggatgctggaggagccatgctgaggaaaccgtcaaaggccgccgtcaccggctcgcaagaacgacccgacatgggcgagaagcgcaaaagctggttcatgcgacgcttcagcaagaattcttagtattgttgcacatacaatcggtttggagcacgcttctagaccacgccacttgacgatgacgatgtagatacccattccttatatttctttcgacggtgttattctggttgattgtgcttgatggcatttcctagttgctcgagtcattgtattcggggtggcaaactgctgttgggttgttgggcacccgaggtggtcatttattcaaaccgatggttaggcacgcagggagctgccaaactagtactacgggtatcaagcccgagcgatgggattttaaggtaaagagccagcgccgctggcaaattgaaatggatgaggagacctgaagaggcctggtgtcgggacgcttgggagcgaacgcacatacgcctcgaaactcaatcctgcgtagtgcacgcatgacaattctactagatagcgaagagataatatactggcatatgtgcaacgctgtgggtggtctgaaaaggctgccagtagttgcacacaaattgatcatcactcattcgatagacatccgattgcaagtaccgggtcaaaattgcatgttcatgactatactctgcgaatgctgatccacaaccgaaggccctcagtcaatgagcagataaagtaatgccaaccatcttggtgtgttacagtatgaagggactcgaaggatcaagcggttgcaggctggtctcccctccccctagatcttgatggttaatctcaagttgtggcaaaaaagtgccaaagcaaatgacttaatgtcactacggagtaggatggcaatgccatgctcccattgaaatgcaatctctgatctgtcatgtagtgtgaacaacagctagatcactcagctttaccctggcgctccttggtcttcttcttctctgcctctagctggtcgctctgatcttcattgtaggccacgatgacgtagccaacaagcaccacgtttgcgaggattgcggctagaatgccggcataggttgagttgcc

SEQ ID NO: 32316 - DNA, 330 bp, Muscodor strobelii
  misc_feature: SGI cDNA ID NO. 571137
  misc_feature: Reduced expression when VOC is produced
  misc_feature: Encodes the peptide sequence at SEQ ID NO 32317
atgccttcagaagccggtcaccgactctacgtcaagggccgtcatctgtcctacacgcgcaacaagcacaccacccaccccaagacctctttgatcaagatcgagggcgtcgacgaccccagcgccgccaacttctacctcggtaagaagattgcctacgtctacaagggtcagaaggagatccgcggcactaagatccgcgtgatctggggcaaagtcacccgctcccacggcaactccggtgtcgtccgcgccaagttctccacccctcttccctctaagtctttcggcgcctccgttcgtattatgttatacccatcctcgatataa

SEQ ID NO: 32317 - protein, 109 aa, Muscodor strobelii
  misc_feature: SGI Peptide ID NO. 571137
  misc_feature (9)..(103): Pfam Id: PF01247 Pfam Desc: Ribosomal protein L35Ae
  misc_feature (1)..(109): NCBI GI: 164424942 Blast Desc: 60S ribosomal protein L33 [Neurospora crassa OR74A] gi|157070724|gb|EAA29082.2| 60S ribosomal protein L33 [Neurospora crassa OR74A]
  misc_feature (1)..(109): NCBI GI: 46108792 Blast Desc: FG01278.1 [Gibberella zeae PH-1]
  misc_feature (1)..(109): NCBI GI: 145605355 Blast Desc: MGG_09927 [Magnaporthe grisea 70-15] gi|145013171|gb|EDJ97812.1| MGG_09927 [Magnaporthe grisea 70-15]
  misc_feature (1)..(109): NCBI GI: 68160369 Blast Desc: 60S ribosomal protein L33-A [Chaetomium globosum]
  misc_feature (1)..(109): NCBI GI: 256734337 Blast Desc: [Nectria haematococca mpVI 77-13-4]
  misc_feature (1)..(109): NCBI GI: 261356411 Blast Desc: 60S ribosomal protein L33-A [Verticillium albo-atrum VaMs.102]
  misc_feature (1)..(109): NCBI GI: 171687359 Blast Desc: protein product [Podospora anserina] gi|170943641|emb|CAP69293.1| protein product [Podospora anserina]
  misc_feature (1)..(109): NCBI GI: 212546573 Blast Desc: 60S ribosomal protein L35Ae [Penicillium marneffei ATCC 18224] gi|210064960|gb|EEA19055.1| 60S ribosomal protein L35Ae [Penicillium marneffei ATCC 18224]
  misc_feature (1)..(109): NCBI GI: 239611526 Blast Desc: 60S ribosomal protein L33 [Ajellomyces dermatitidis ER-3]
  misc_feature (1)..(109): NCBI GI: 242822929 Blast Desc: 60S ribosomal protein L35Ae [Talaromyces stipitatus ATCC 10500] gi|218712909|gb|EED12334.1| 60S ribosomal protein L35Ae [Talaromyces stipitatus ATCC 10500]
  misc_feature: Useful for introducing or modulating the production of volatile compounds
MPSEAGHRLYVKGRHLSYTRNKHTTHPKTSLIKIEGVDDPSAANFYLGKKIAYVYKGQKEIRGTKIRVIWGKVTRSHGNSGVVRAKFSTPLPSKSFGASVRIMLYPSSI

SEQ ID NO: 32318 - DNA, 1005 bp, Muscodor strobelii
  misc_feature: SGI EST ID NO. CUFF.76482.0
  misc_feature: Variant of the nucleotide sequence at SEQ ID NO 32316
tagcggcagggctcatctcgcctaaatctacgttcgcaccattccctttacccacttgcaaccatcaacccgcagtcgcagttcgaggttcgacatcacgacaactaacctccagtgcacgcagtcctgatctctcaaatcccgccgacttaaggatctctgagagtgccatcacaaccagccaagatgccttcagaagccggtcaccgactctacgtcaagggccgtcatctgtcctacacgcgcaacaagcacaccacccaccccaagacctctttgatcaagatcgagggcgtcgacgaccccagcgccgccaacttctacctcggtaagaagattgcctacgtctacaagggtcagaaggagatccgcggcactaagatccgcgtgatctggggcaaagtcacccgctcccacggcaactccggtgtcgtccgcgccaagttctccacccctcttccctctaagtctttcggcgcctccgttcgtattatgttatacccatcctcgatataaatggaggttatgggctggagttggtgtgtgatcggttcatcatgactggcattggctgcatcagggtttggcaaggtttgcggcttcagccttgtcactaggcatcaacaaaatcaagaaataccaacaacaatggatcgctagattttctcgcgtgaatgaatggctgcgatcaggggcatcgggactcggtcgcgaacggaggttcatgctggttccatatgtttccggccatctacagtctcgagggctgcaaaaaggctatagtgctcgattcacttctgagtggcccaggagatggttctcactctgtgtcttgcacccgttaatgagagcaaaagaaatgaagttacgcgaatccaatcaaggataaattctacgtccaactcgcctgccaatcgtttgatgatgcctgaggtccatcggttcggattactgcatgtttaacaacaaagtgattgtcctcattcccaacccctaaagcaggac

SEQ ID NO: 32319 - DNA, 1512 bp, Muscodor strobelii
  misc_feature: SGI cDNA ID NO. 571138
  misc_feature: Encodes the peptide sequence at SEQ ID NO 32320
atggaaactccagcaggttccatggagctcaaggacaacaccgtcattgttgtcctgggagcatctggtgatcttgccaagaagaagacttttcctgctctctttggcctttaccgcaaccaattcctgcccaagaacatcaagatcatcggatatgcgcggacaaagatggatcatgaggaatacctcaagcgggtgaagtcatatatcaagactcctaccaaagacatggagaagcagctttcagacttctgcgacctatgcacctatgtctctggacagtacgaccaggacgagtctttcctcgagctcaacaagcacctcgaggaaatcgaaaagggccgcaaggagaccaaccgcctattctatatggctcttcctcccagcgtcttcacagttgtctcgcagcatctgaagaggtgctgctatcctagaaatggcattgctcgtgttatcgtcgagaagccgtttggcaaggatttggcgagctcgcgggaattgcagaagtcattggaacccgactggaaagaggatgagctctaccgcattgatcactatctcggcaaggagatggtcaagaacattctgattctcagattcggtaacgagttcttcggtgctacttggaacagacaccacatcgacaacgttcagattaccttcaaagagcccttcggcacagaaggccgtggcggttactttgacgagttcggaattattcgagacgttatgcagaaccatctgctccaagttttgacgttgctggctatggagcgacccatttctttctcagccgaggacattcgagatgagaaagtgcgggttctgagaggtatcccagccatcgagcccaagaacgttatcatcggccaatacggaaaatcgttggatggcagcaagccttcgtacaaagaggatgacactgtccccaaggactcgcgctgcccgactttctgcgctctggtggcttacatcaagaacgagagatgggatggtgtgcctttcatcatgaaggccggcaaggcgcttaatgaacagaagacggagattcgcatccaattcaaggacgtcacaagtggtatttttaaggatatacccagaaacgaacttgtcatgcgcattcagcccaacgagagtgtctatatcaagatgaactctaaattgccaggtctcagcatgcagaccgtagtcacggaacttgacttgacataccggcgacgtttctcggatctgaagatcccagaggcttatgaatcgctcatcttagatgcgctcaaaggcgaccattccaactttgtgcgagacgacgaactcgacgctagctggaggatattcacgcctttactgcactatttggatgataacaaggagatcgtacctatggaatatccctatggctcgcgtggaccggctgtgttggacgacttcacttcctcgtacggttataagttcagcgacgcaactggctatcaatggcccatgacctccgcggcgccgccgaacaagttttga

SEQ ID NO: 32320 - protein, 503 aa, Muscodor strobelii
  misc_feature: SGI Peptide ID NO. 571138
  misc_feature (196)..(487): Pfam Id: PF02781 Pfam Desc: Glucose-6-phosphate dehydrogenase, C-terminal domain
  misc_feature (17)..(194): Pfam Id: PF00479 Pfam Desc: Glucose-6-phosphate dehydrogenase, NAD binding domain
  misc_feature (5)..(503): NCBI GI: 145605357 Blast Desc: glucose-6-phosphate 1-dehydrogenase [Magnaporthe grisea 70-15] gi|145013172|gb|EDJ97813.1| glucose-6-phosphate 1-dehydrogenase [Magnaporthe grisea 70-15]
  misc_feature (5)..(499): NCBI GI: 156036394 Blast Desc: SS1G_12886 [Sclerotinia sclerotiorum 1980] gi|154698291|gb|EDN98029.1| SS1G_12886 [Sclerotinia sclerotiorum 1980]
  misc_feature (5)..(503): NCBI GI: 171687357 Blast Desc: protein product [Podospora anserina] gi|170943640|emb|CAP69292.1| protein product [Podospora anserina]
  misc_feature (2)..(495): NCBI GI: 189190004 Blast Desc: glucose-6-phosphate 1-dehydrogenase [Pyrenophora tritici-repentis Pt-1C-BFP] gi|187972947|gb|EDU40446.1| glucose-6-phosphate 1-dehydrogenase [Pyrenophora tritici-repentis
  misc_feature (8)..(501): NCBI GI: 116181954 Blast Desc: glucose-6-phosphate 1-dehydrogenase [Chaetomium globosum CBS 148.51] gi|88185902|gb|EAQ93370.1| glucose-6-phosphate 1-dehydrogenase [Chaetomium globosum CBS
  misc_feature (7)..(499): NCBI GI: 154308576 Blast Desc: glucose-6-phosphate 1-dehydrogenase [Botryotinia fuckeliana B05.10] gi|150852889|gb|EDN28081.1| glucose-6-phosphate 1-dehydrogenase [Botryotinia fuckeliana
  misc_feature (5)..(499): NCBI GI: 212546577 Blast Desc: glucose-6-phosphate 1-dehydrogenase [Penicillium marneffei ATCC 18224] gi|210064962|gb|EEA19057.1| glucose-6-phosphate 1-dehydrogenase [Penicillium marneffei ATCC
  misc_feature (5)..(497): NCBI GI: 164424940 Blast Desc: glucose-6-phosphate 1-dehydrogenase [Neurospora crassa OR74A] gi|157070723|gb|EAA29084.2| glucose-6-phosphate 1-dehydrogenase [Neurospora crassa OR74A]
  misc_feature (8)..(503): NCBI GI: 46108794 Blast Desc: G6PD_ASPNG Glucose-6-phosphate 1-dehydrogenase (G6PD) [Gibberella zeae PH-1]
  misc_feature (6)..(499): NCBI GI: 212546579 Blast Desc: glucose-6-phosphate 1-dehydrogenase [Penicillium marneffei ATCC 18224] gi|210064963|gb|EEA19058.1| glucose-6-phosphate 1-dehydrogenase [Penicillium marneffei ATCC
  misc_feature (5)..(503): SWISSPROT Homolog: EC 1.1.1.49 Glucose-6-phosphate dehydrogenase
METPAGSMELKDNTVIVVLGASGDLAKKKTFPALFGLYRNQFLPKNIKIIGYARTKMDHEEYLKRVKSYIKTPTKDMEKQLSDFCDLCTYVSGQYDQDESFLELNKHLEEIEKGRKETNRLFYMALPPSVFTVVSQHLKRCCYPRNGIARVIVEKPFGKDLASSRELQKSLEPDWKEDELYRIDHYLGKEMVKNILILRFGNEFFGATWNRHHIDNVQITFKEPFGTEGRGGYFDEFGIIRDVMQNHLLQVLTLLAMERPISFSAEDIRDEKVRVLRGIPAIEPKNVIIGQYGKSLDGSKPSYKEDDTVPKDSRCPTFCALVAYIKNERWDGVPFIMKAGKALNEQKTEIRIQFKDVTSGIFKDIPRNELVMRIQPNESVYIKMNSKLPGLSMQTVVTELDLTYRRRFSDLKIPEAYESLILDALKGDHSNFVRDDELDASWRIFTPLLHYLDDNKEIVPMEYPYGSRGPAVLDDFTSSYGYKFSDATGYQWPMTSAAPPNKF

SEQ ID NO: 32321 - DNA, 2936 bp, Muscodor strobelii
  misc_feature: SGI EST ID NO. CUFF.76688.2
  misc_feature: Variant of the nucleotide sequence at SEQ ID NO 32319
gcgggtttaagcgggccagccgacagcgcagtgatgacatcggtgggataggaaaccttggtagatagctcgatcgcttgcccttgattaacacatccatgatgcatcagtctattgggggagcacaagaatggcagagggcgaagtagagatgactggtcaagtgactggaggtgtgccgtgcatgatgggatgaagcaacagagctaacaatgcagaatgaatacacgtttgaggtttctgacatggatgagagctcttgttgacttgacggcttcccccattaaaaccatttccacagctgttcggccttaagctttcaagcagccccgggtaccttaggtacattgtgatccggcccgtccgcgctctgcttactttatctcgctgccagacttacctcactcatcctttgcgcccgcatcctgctgctccgaccttctgtcccgaccttctgtcccgacctccttttacgacccggctcccactccaccaccctactctacgcaccccaatcctcacaaatttctgcccattttacttccactgccgagcttgttcgatcattataagacttgcgtttacatctttaaaagcatttattatagctcggccagctcgacaaaatggaaactccagcaggttccatggagctcaaggacaacaccgtcattgttgtcctgggagcatctggtgatcttgccaagaagaagacttttcctgctctctttggcctttaccgcaaccaattcctgcccaagaacatcaagatcatcggatatgcgcggacaaagatggatcatgaggaatacctcaagcgggtgaagtcatatatcaagactcctaccaaagacatggagaagcagctttcagacttctgcgacctatgcacctatgtctctggacagtacgaccaggacgagtctttcctcgagctcaacaagcacctcgaggaaatcgaaaagggccgcaaggagaccaaccgcctattctatatggctcttcctcccagcgtcttcacagttgtctcgcagcatctgaagaggtgctgctatcctagaaatggcattgctcgtgttatcgtaagtgcctacactgcgcgtttatctgcgcctgatcagccctaattaacgtcaccggaacgtaggtcgagaagccgtttggcaaggatttggcgagctcgcgggaattgcagaagtcattggaacccgactggaaagaggatgagctctaccgcattgatcactatctcggcaaggagatggtcaagaacattctgattctcagattcggtaacgagttcttcggtgctacttggaacagacaccacatcgacaacgttcagattaccttcaaagagcccttcggcacagaaggccgtggcggttactttgacgagttcggaattattcgagacgttatgcagaaccatctgctccaagttttgacgttgctggctatggagcgacccatttctttctcagccgaggacattcgagatgagaaagtgcgggttctgagaggtatcccagccatcgagcccaagaacgttatcatcggccaatacggaaaatcgttggatggcagcaagccttcgtacaaagaggatgacactgtccccaaggactcgcgctgcccgactttctgcgctctggtggcttacatcaagaacgagagatgggatggtgtgcctttcatcatgaaggccggcaaggcgcttaatgaacagaagacggagattcgcatccaattcaaggacgtcacaagtggtatttttaaggatatacccagaaacgaacttgtcatgcgcattcagcccaacgagagtgtctatatcaagatgaactctaaattgccaggtctcagcatgcagaccgtagtcacggaacttgacttgacataccggcgacgtttctcggatctgaagatcccagaggcttatgaatcgctcatcttagatgcgctcaaaggcgaccattccaactttgtgcgagacgacgaactcgacgctagctggaggatattcacgcctttactgcactatttggatgataacaaggagatcgtacctatggaatatccctatggctcgcgtggaccggctgtgttggacgacttcacttcctcgtacggttataagttcagcgacgcaactggctatcaatggcccatgacctccgcggcgccgccgaacaagttttgaaaataaataaggcacatagacgggcatctgtgattgtagaacacagcaccgggaagatgtagaccaagatacccactacatctcaagatcgcacaagttgaagccacattgacaaatggccacatactgcaggtcgtgtttaaagatgcatggcgatggtggacgacgtaacccagatgatttaggcgttgttatctggttgctatatcggttatagaaaagtaaattcagagccacacgttcgatagcgtgaaacaattggcagaatgatcctgctctcattatggcgactacctggtcccctgagcaaagagcgagtgatttgtattcgatgcgattccatttcaatcaagttctcaggtcagatccacgcccgatgactatcaagccagaagaaagcagtatcctactctctatacatatgtaaatgcattcattgcctcagtttggcgaataaattcttgatgaatcatcatatgactagcgatagggcaacgtgtttgattgctttcagaggaatgccaagcatcggataaaaatgcagggaatttaaattgagcggcgatgatacgagatacgattatgactcgatagtaagctgaatatcaatgcgtaggcacgtacaaggcgacgttcttttaccagttccgtagtggttttggccaatactcatgctgtgagtcaagtgtaggggatgtcgttagtagagaagaccaattcaattgactcttcg

SEQ ID NO: 32322 - DNA, 3912 bp, Muscodor strobelii
  misc_feature: SGI cDNA ID NO. 571139
  misc_feature: Encodes the peptide sequence at SEQ ID NO 32323
atggggtctctagaattgaagccaggagcgaccggcgaaaaggaggcagaagccgcagcgacccctggaactggagtgatcgcgatcactaaggaagagttagctgagcaagatgcgaagcttcgtcctgagagagaagctgcaataggagatttccttcgtgtcttttcctatgctaaaagatgggatcttgttctctttgctgctgcaggtatcgcggcaataggatccggagttactctccccttgatgaacatcatatttggccggctggtcaataacttcaatggctactttcttgatcctccaaccataaacgagtctcagtttcgtgctctgctgaatagaaatgcactctacatcttcctcctgtttcttggtcgcttcatcctgacctatatcaataagtttgcgtaccgtatgataggcatccgaatgtcggcggccatcaggcttgattacttgcgtgccctattcggacagactgtccatgttctcgattcgatgcccccaggtgccgctgcaggaactattacaacgactgccaatactctgcaactaggaatttccgagaaactcggtaccctcgtggaatacacaacaacgatcattgctgcaaccattatcgccttcaaatatagttggtcacaggctctcgtcaccagttctgtactgctgttcatcagtttggtgcttgctgtcttgcttcctttcatcctgaaagggacaagcagattaaccaatgcggagactaagtcatctgctgtcgccagcgaagcattctcgtcaatccgaatggtgacagcttgtggtgcagaggaacaaatgtccaagcgcttcgccgtttgggtcgccgctgctaaacgacacgggcaaacgacgtcacccttcattgccgttcagttcggccttattttcttctccatatttgcagctttcgggttgtctttctggtatggcaccaaatcctatgccgagggaaggatccatgatgttggcactatcactgttgtgttgatgtctgtcatatttctggtcctatccctggaacgagtatcaacgcccctcattgctataggcaaggctaccgttgctgcttgcgaatttttcattgtcatcgacgcccctagacccgagccgggctccctcaaagagccagatgttacagcaaccaatgatattgtttttgaaggtgttgatttcgcttaccctagtcgcccgcatgtgaaggttctggatcagctcgacttgacactcgaagcagggaagcttacagcaatcgttggaccatctggatctggaaagagcacgattgtcggtctgatagagcgttggtacacactccatgaccagcatatcattgccaaggctatcgacaaagaagagaagaagaagcaagagaagaagaagaagaaaggacaagaaggttctatcaaaacctgcgagcaggatctggataaagttgaattgaaatggtggcgatctcaaatcggcctggtacaacaagagccatttctattcaatgataccatttaccgcaacgtggcctacggacttgtggggtcagcatgggaagatgaatccgaggaacgcaaggaagagctcgtgaaagaagcatgcaaagaagcatttgctgacgagttcatcgaccgacttcctgatggctaccaaactcttgttggcgatagcggaactaagctcagtggtggacagcggcaaagaatttgcattgccagagccattatcaagaaaccaaagatcttgattttagatgaggcaacatccgcaattgatgtgcgcggggagcggattgtacaagctgcattagacaaagtatcgcaaggtcgaaccaccgttactattgcccatcgtctatcaactatcaagaaagcggacacaattgtagtgctgaagaaaggcaaggtcgtcgagaagggcaatcatgaatctcttctagagaatgcacaaggagtatattatggattggtgcacgcacagcaactctctctcggcgagccgacagcggctgatgactccaactcggaagaaattgaggaggaagatatcagcgcttatctaagtcgtgaaaaaagtgcggcgttgtcggatatggcagaccaaccgaaaggggaagagtggaagaaccgaggcttatttggtagttttggaaaactgctttatgagcaacgcagtcgttttcccttctacgctatcatcatcattgcagctgcgggagccggcgcaacatcaccattgcaagcatacctcttcgcaaagattatccttgtcttcaattacataaatgatctaccgaaattcacctcagaggctaatttctggtcgttggtatgggtctatcttgcgataggtgctggctttgcgtacttcgtactcggcatcatagcgacaaatctcgcctaccacgtgtctgcaacgtacagacagcaatacttcgagggtattctgtatcaagatacaacattttttgacgcggaagataattcggctggtacactcacctcaagagtcggtagcgatccgaagcaactcgaggaattgctaggcatgaacatggcgcttgtgtatacctcattcttcactctgattggtgcccttgcgatcgcgtatgctttcggatggaagctcgctctcgtggccactaccgtcacagcccccttaggtctattcgcaggttactatcggttcaagtacgaattagaatttgtcaagctgaacaacgcagtattcgccgagtcttctcaattcgccgccgagtctattggtgccttccgaactgttgcttctctcactctcgaagacaccataactgatcgctacgctaccctactaagtacgcatgtaggtgatgctttcaagaaagcaatatggagaacacttgtattcgccttctcagatagcgttagtcttggagtacaggcgttgatcttctggtacggagggactttgctggcatctcacgaatatggcatcctcaacttctttacctgctatattgcagttattcagggcgctgagggcgcgggacagggcttcagtttcggtcctaacgctgcccaagccactgccgccgcaaatcgcatcttgagtattcgagaatcccgacaccaagacttatcatccaagactgcatccatccccgataccgacggcggtatcaaaatcgaactgaaggacgtgcattttagatacccgacccgcaacgtatcggtcttcaagggaatcaacatcactgtcgaaaaaggtcaatttgccgcgctcgttggagcaagcggctgcgggaaaaccagtatcatctcgctattggagcgcttctacaacgtgcatcgtggccaaatccttgccaacgggacggatatttcggacgtcaacgtttacgactatcggaaacaattgtcacttgtagcacaagaaccgacccttttccaaggaactctgcgcgagaacattctgctaggcgttgacgccaactcgatatctgaggagcagatacacgccatctgtcgcgatgccagtatccacgacttcattatgtcattacccgatggctacaatacagaaatcggtagtcgaggcgtaagtctgtctggaggacagaaacagcgcatcgctatagctcgtgctctgattcgtagaccaaacgtcctgctgcttgacgaggcgacaagctctctcgattccgagagcgagaaactggttcaagcggcattcgaacgtgcggccagtggtagaacgatgattgttgttgctcatcgtctggctaccgtgcagaatgcagatgttatatttgtcctcggcgaagggaaggttctcgagaagggcacacactttgagctcttgaagaagaggggcgtatactggaatatgtgccaaagccaagccctcgatcgatga

SEQ ID NO: 32323 - protein, 1303 aa, Muscodor strobelii
  misc_feature: SGI Peptide ID NO. 571139
  misc_feature (736)..(1014): Pfam Id: PF00664 Pfam Desc: ABC transporter transmembrane region
  misc_feature (67)..(349): Pfam Id: PF00664 Pfam Desc: ABC transporter transmembrane region
  misc_feature (1088)..(1274): Pfam Id: PF00005 Pfam Desc: ABC transporter
  misc_feature (422)..(640): Pfam Id: PF00005 Pfam Desc: ABC transporter
  misc_feature (483)..(640): Pfam Id: PF00005 Pfam Desc: ABC transporter
  misc_feature (10)..(1303): NCBI GI: 171687329 Blast Desc: protein product [Podospora anserina] gi|170943626|emb|CAP69278.1| protein product [Podospora anserina]
  misc_feature (32)..(1303): NCBI GI: 256727932 Blast Desc: NECHADRAFT_95357 [Nectria haematococca mpVI 77-13-4]
  misc_feature (22)..(1303): NCBI GI: 256732673 Blast Desc: [Nectria haematococca mpVI 77-13-4]
  misc_feature (13)..(1303): NCBI GI: 46125007 Blast Desc: FG06881.1 [Gibberella zeae PH-1]
  misc_feature (42)..(1303): NCBI GI: 46114962 Blast Desc: FG03323.1 [Gibberella zeae PH-1]
  misc_feature (39)..(1303): NCBI GI: 256722953 Blast Desc: NECHADRAFT_97432 [Nectria haematococca mpVI 77-13-4]
  misc_feature (43)..(1303): NCBI GI: 240106516 Blast Desc: ABC transporter family protein [Coccidioides posadasii C735 delta SOWgp]
  misc_feature (30)..(1302): NCBI GI: 154323564 Blast Desc: BC1G_00181 [Botryotinia fuckeliana B05.10] gi|150842410|gb|EDN17603.1| BC1G_00181 [Botryotinia fuckeliana B05.10]
  misc_feature (30)..(1303): NCBI GI: 225559200 Blast Desc: ABC multidrug transporter [Ajellomyces capsulatus G186AR]
  misc_feature (31)..(1303): NCBI GI: 226286267 Blast Desc: lipid A export ATP-binding/permease protein msbA [Paracoccidioides brasiliensis Pb01]
  misc_feature (53)..(1300): SWISSPROT Homolog: EC 3.6.3.44 Xenobiotic-transporting ATPase
MGSLELKPGATGEKEAEAAATPGTGVIAITKEELAEQDAKLRPEREAAIGDFLRVFSYAKRWDLVLFAAAGIAAIGSGVTLPLMNIIFGRLVNNFNGYFLDPPTINESQFRALLNRNALYIFLLFLGRFILTYINKFAYRMIGIRMSAAIRLDYLRALFGQTVHVLDSMPPGAAAGTITTTANTLQLGISEKLGTLVEYTTTIIAATIIAFKYSWSQALVTSSVLLFISLVLAVLLPFILKGTSRLTNAETKSSAVASEAFSSIRMVTACGAEEQMSKRFAVWVAAAKRHGQTTSPFIAVQFGLIFFSIFAAFGLSFWYGTKSYAEGRIHDVGTITVVLMSVIFLVLSLERVSTPLIAIGKATVAACEFFIVIDAPRPEPGSLKEPDVTATNDIVFEGVDFAYPSRPHVKVLDQLDLTLEAGKLTAIVGPSGSGKSTIVGLIERWYTLHDQHIIAKAIDKEEKKKQEKKKKKGQEGSIKTCEQDLDKVELKWWRSQIGLVQQEPFLFNDTIYRNVAYGLVGSAWEDESEERKEELVKEACKEAFADEFIDRLPDGYQTLVGDSGTKLSGGQRQRICIARAIIKKPKILILDEATSAIDVRGERIVQAALDKVSQGRTTVTIAHRLSTIKKADTIVVLKKGKVVEKGNHESLLENAQGVYYGLVHAQQLSLGEPTAADDSNSEEIEEEDISAYLSREKSAALSDMADQPKGEEWKNRGLFGSFGKLLYEQRSRFPFYAIIIIAAAGAGATSPLQAYLFAKIILVFNYINDLPKFTSEANFWSLVWVYLAIGAGFAYFVLGIIATNLAYHVSATYRQQYFEGILYQDTTFFDAEDNSAGTLTSRVGSDPKQLEELLGMNMALVYTSFFTLIGALAIAYAFGWKLALVATTVTAPLGLFAGYYRFKYELEFVKLNNAVFAESSQFAAESIGAFRTVASLTLEDTITDRYATLLSTHVGDAFKKAIWRTLVFAFSDSVSLGVQALIFWYGGTLLASHEYGILNFFTCYIAVIQGAEGAGQGFSFGPNAAQATAAANRILSIRESRHQDLSSKTASIPDTDGGIKIELKDVHFRYPTRNVSVFKGINITVEKGQFAALVGASGCGKTSIISLLERFYNVHRGQILANGTDISDVNVYDYRKQLSLVAQEPTLFQGTLRENILLGVDANSISEEQIHAICRDASIHDFIMSLPDGYNTEIGSRGVSLSGGQKQRIAIARALIRRPNVLLLDEATSSLDSESEKLVQAAFERAASGRTMIVVAHRLATVQNADVIFVLGEGKVLEKGTHFELLKKRGVYWNMCQSQALDR

SEQ ID NO: 32324 - DNA, 4122 bp, Muscodor strobelii
  misc_feature: SGI EST ID NO. CUFF.76741.1
  misc_feature: Variant of the nucleotide sequence at SEQ ID NO 32322
gttgagaacaagcacaatttgcgcctcttggccggtcctatgttgaagaccccttgtggttctattttcgaaacccgaataagctaaattacaatgtcatatactgatcttggaaatctagtcatatttggccggctggtcaataacttcaatggctactttcttgatcctccaaccataaacgagtctcagtttcgtgctctgctgaatagaaatgcactctacatcttcctcctgtttcttggtcgcttcatcctgacctatatcaataagtttgcgtaccgtatgataggcatccgaatgtcggcggccatcaggcttgattacttgcgtgccctattcggacagactgtccatgttctcgattcgatgcccccaggtgccgctgcaggaactattacaacgactgccaatactctgcaactaggaatttccgagaaactcggtaccctcgtggaatacacaacaacgatcattgctgcaaccattatcgccttcaaatatagttggtcacaggctctcgtcaccagttctgtactgctgttcatcagtttggtgcttgctgtcttgcttcctttcatcctgaaagggacaagcagattaaccaatgcggagactaagtcatctgctgtcgccagcgaagcattctcgtcaatccgaatggtgacagcttgtggtgcagaggaacaaatgtccaagcgcttcgccgtttgggtcgccgctgctaaacgacacgggcaaacgacgtcacccttcattgccgttcagttcggccttattttcttctccatatttgcagctttcgggttgtctttctggtatggcaccaaatcctatgccgagggaaggatccatgatgttggcactatcactgttgtgttgatgtctgtcatatttctggtcctatccctggaacgagtatcaacgcccctcattgctataggcaaggctaccgttgctgcttgcgaatttttcattgtcatcgacgcccctagacccgagccgggctccctcaaagagccagatgttacagcaaccaatgatattgtttttgaaggtgttgatttcgcttaccctagtcgcccgcatgtgaaggttctggatcagctcgacttgacactcgaagcagggaagcttacagcaatcgttggaccatctggatctggaaagagcacgattgtcggtctgatagagcgttggtacacactccatgaccagcatatcattgccaaggctatcgacaaagaagagaagaagaagcaagagaagaagaagaagaaaggacaagaagtcagactctgatacctccgatgttgacgaggcctccagtaactcagaagagaccgggcccattgttgagcttaagggttctatcaaaacctgcgagcaggatctggataaagttgaattgaaatggtggcgatctcaaatcggcctggtacaacaagagccatttctattcaatgataccatttaccgcaacgtggcctacggacttgtggggtcagcatgggaagatgaatccgaggaacgcaaggaagagctcgtgaaagaagcatgcaaagaagcatttgctgacgagttcatcgaccgacttcctgatggctaccaaactcttgttggcgatagcggaactaagctcagtggtggacagcggcaaagaatttgcattgccagagccattatcaagaaaccaaagatcttgattttagatgaggcaacatccgcaattgatgtgcgcggggagcggattgtacaagctgcattagacaaagtatcgcaaggtcgaaccaccgttactattgcccatcgtctatcaactatcaagaaagcggacacaattgtagtgctgaagaaaggcaaggtcgtcgagaagggcaatcatgaatctcttctagagaatgcacaaggagtatattatggattggtgcacgcacagcaactctctctcggcgagccgacagcggctgatgactccaactcggaagaaattgaggaggaagatatcagcgcttatctaagtcgtgaaaaaagtgcggcgttgtcggatatggcagaccaaccgaaaggggaagagtggaagaaccgaggcttatttggtagttttggaaaactgctttatgagcaacgcagtcgttttcccttctacgctatcatcatcattgcagctgcgggagccggcgcaacatcaccattgcaagcatacctcttcgcaaagattatccttgtcttcaattacataaatgatctaccgaaattcacctcagaggctaatttctggtcgttggtatgggtctatcttgcgataggtgctggctttgcgtacttcgtactcggcatcatagcgacaaatctcgcctaccacgtgtctgcaacgtacagacagcaatacttcgagggtattctgtatcaagatacaacattttttgacgcggaagataattcggctggtacactcacctcaagagtcggtagcgatccgaagcaactcgaggaattgctaggcatgaacatggcgcttgtgtatacctcattcttcactctgattggtgcccttgcgatcgcgtatgctttcggatggaagctcgctctcgtggccactaccgtcacagcccccttaggtctattcgcaggttactatcggttcaagtacgaattagaatttgtcaagctgaacaacgcagtattcgccgagtcttctcaattcgccgccgagtctattggtgccttccgaactgttgcttctctcactctcgaagacaccataactgatcgctacgctaccctactaagtacgcatgtaggtgatgctttcaagaaagcaatatggagaacacttgtattcgccttctcagatagcgttagtcttggagtacaggcgttgatcttctggtacggagggactttgctggcatctcacgaatatggcatcctcaacttctttacctgctatattgcagttattcagggcgctgagggcgcgggacagggcttcagtttcggtcctaacgctgcccaagccactgccgccgcaaatcgcatcttgagtattcgagaatcccgacaccaagacttatcatccaagactgcatccatccccgataccgacggcggtatcaaaatcgaactgaaggacgtgcattttagatacccgacccgcaacgtatcggtcttcaagggaatcaacatcactgtcgaaaaaggtcaatttgccgcgctcgttggagcaagcggctgcgggaaaaccagtatcatctcgctattggagcgcttctacaacgtgcatcgtggccaaatccttgccaacgggacggatatttcggacgtcaacgtttacgactatcggaaacaattgtcacttgtagcacaagaaccgacccttttccaaggaactctgcgcgagaacattctgctaggcgttgacgccaactcgatatctgaggagcagatacacgccatctgtcgcgatgccagtatccacgacttcattatgtcattacccgatggctacaatacagaaatcggtagtcgaggcgtaagtctgtctggaggacagaaacagcgcatcgctatagctcgtgctctgattcgtagaccaaacgtcctgctgcttgacgaggcgacaagctctctcgattccgagagcgagaaactggttcaagcggcattcgaacgtgcggccagtggtagaacgatgattgttgttgctcatcgtctggctaccgtgcagaatgcagatgttatatttgtcctcggcgaagggaaggttctcgagaagggcacacactttgagctcttgaagaagaggggcgtatactggaatatgtgccaaagccaagccctcgatcgatgattcgctccggcttggtagaaaaacttaaacaaaaaagggaggtagttcgcattcgttacgcggttgtaaagatacccagctctgtatttcacctccattctctgtaattattagtcaagactccaatcagtcctgaatttggtcgagtccatcttcatttcggcatacaaaagtcaatcttagctttagactacaccatcctccctcattcccccattctacgcggtctcataacagtaacagtccttctgagaggtaggtgcttctag

SEQ ID NO: 32325 - DNA, 816 bp, Muscodor strobelii
  misc_feature: SGI cDNA ID NO. 571140
  misc_feature: Encodes the peptide sequence at SEQ ID NO 32326
atgccttcttctaaaatagttctcccttggattgcaggaatcgcttcgattattgattatgtctctgcgcagaagtacttgcttgtcttaggcgattcatactcgacgaccaattcgtgggtcggttcgactgcgccatctacttcgaatccgatagggaaccctacattcccggggcagacaacggccgctgggctcaactgggtcgggaatgcaatcgccgtatacaacagcacgcaagtatttgcatacgatttagcagagacgggcgccacgacggataacgacattgtatctacctacactcagcataactttgacgaccaagtagagactctcgttccccaatacctccttccctggacgaaagcaagtgcaagcaacacacttgttgcgatttggattgggattaatgatgttggaaacccggaccgttattggggacttatggatgatttatacgccgatggcttcaggaattatgtcttatttactgttccgcccttcaaccatgcgccagctttccaatatgaagagacagcgtccctaatctctgatatccaaagctacaactctaatctatcttcacgcttggcagcgttcaagtccagccacggtgatgtgacggcaaccctcttcgataccgccccaaccttcaacacagtgatttcaaacccaacggcttatggtgcgacagatgctacctgtatcgctggagatggcactagttgtctgtggacagatagttatcatcccggtctggtaatccacaagctcctcgctcaggctctggtgaaggctgtgaagttcttttga

SEQ ID NO: 32326 - protein, 271 aa, Muscodor strobelii
  misc_feature: SGI Peptide ID NO. 571140
  misc_feature (22)..(269): NCBI GI: 46115540 Blast Desc: FG03612.1 [Gibberella zeae PH-1]
  misc_feature (31)..(269): NCBI GI: 256725478 Blast Desc: NECHADRAFT_45774 [Nectria haematococca mpVI 77-13-4]
  misc_feature (31)..(271): NCBI GI: 70988657 Blast Desc: cellulose-binding GDSL lipase/acylhydrolase [Aspergillus fumigatus Af293] gi|66846818|gb|EAL87149.1| cellulose-binding GDSL lipase/acylhydrolase, [Aspergillus Af293]
  misc_feature (31)..(271): NCBI GI: 159128601 Blast Desc: cellulose-binding GDSL lipase/acylhydrolase, [Aspergillus fumigatus A1163]
  misc_feature (41)..(271): NCBI GI: 119497689 Blast Desc: NFIA_032700 [Neosartorya fischeri NRRL 181] gi|119413766|gb|EAW23705.1| conserved [Neosartorya fischeri NRRL 181]
  misc_feature (5)..(269): NCBI GI: 46110949 Blast Desc: FG02356.1 [Gibberella zeae PH-1]
  misc_feature (12)..(268): NCBI GI: 261354308 Blast Desc: fungal cellulose binding domain-containing protein [Verticillium albo-atrum VaMs.102]
  misc_feature (25)..(269): NCBI GI: 154313577 Blast Desc: BC1G_05638 [Botryotinia fuckeliana B05.10] gi|150849220|gb|EDN24413.1| BC1G_05638 [Botryotinia fuckeliana B05.10]
  misc_feature (25)..(269): NCBI GI: 156061131 Blast Desc: SS1G_02708 [Sclerotinia sclerotiorum 1980] gi|154700112|gb|EDN99850.1| SS1G_02708 [Sclerotinia sclerotiorum 1980]
  misc_feature (25)..(269): NCBI GI: 116204507 Blast Desc: CHGG_10137 [Chaetomium globosum CBS 148.51] gi|88176265|gb|EAQ83733.1| CHGG_10137 [Chaetomium globosum CBS 148.51]
MPSSKIVLPWIAGIASIIDYVSAQKYLLVLGDSYSTTNSWVGSTAPSTSNPIGNPTFPGQTTAAGLNWVGNAIAVYNSTQVFAYDLAETGATTDNDIVSTYTQHNFDDQVETLVPQYLLPWTKASASNTLVAIWIGINDVGNPDRYWGLMDDLYADGFRNYVLFTVPPFNHAPAFQYEETASLISDIQSYNSNLSSRLAAFKSSHGDVTATLFDTAPTFNTVISNPTAYGATDATCIAGDGTSCLWTDSYHPGLVIHKLLAQALVKAVKFF

SEQ ID NO: 32327 - DNA, 1182 bp, Muscodor strobelii
  misc_feature: SGI cDNA ID NO. 571141
  misc_feature: Encodes the peptide sequence at SEQ ID NO 32328
atgaatattgtcgagccattgcactcacagactgattggaatttggcgcattgtagattgatgatgaaggtgaaagtcgtcaacgttgatcctatcgagacccaagcagactacgagtaccaatactcatcaagggcacaagctaacggtcctgtgagagcacaattcaacacgtcgtttcacacccaagacgaagtgccagacctcccaagcaaacctagtgaaaagccgtattcctttaagcgatggcttcctcttatcttacgatctcgtggactagcaccatcagacgcccagactatcaaattctcactcgggcaaacacgactgctctttcaggtagcggacgcgtcaataccatccggagttattaaccgcatgtaccgagaggatattgatgaagaaatcatgccgtcttttgagtcgttggtttttccatcagagggactgttcatgagactcgaagcttgttctgccaaagatgggcggcaaagactaccgccaggcgaatctggatacgggcattatagcactcacggcaagaaacctggctcgttaccgctgcgttctgtcccagagattatgctactcctcttaacatcaatgcgggcacgtaatgctttgttccatgccaccgaggaaaggtcggaggaatttgagctatttttccttccctacaatgaccgtatgcaaagtaggagagaatttcgtgttttctgtgcgcctttccagtcgacagcgtcgttacgtataacgggcatcagccagtacagatggtatgaaccctggtttctaggttggatgtacgatgacacaagggaacgggcaatagaaagagtttcccaggcaagtgggacgatatctaaacagatcgccgcggaactggacaccagagacgaaaaggatatgctattgatgaaacaagggttcacatttgatatcttctacgacgagaaagatggcttggtcgagctggtcgagctcaatgtgtttggccccagatcagcttgtggtagctgccttttccactggatcaaagatagaaagacgcttgagggccatggtgatcccgagaacgtagagtttcgggtaagctaccgagagatcaccaaaggcgtgccatcagatgaagaagacgacgacgacgaatcattgcagtctgagtatgagcatgaggaataa

SEQ ID NO: 32328 - protein, 393 aa, Muscodor strobelii
  misc_feature: SGI Peptide ID NO. 571141
  misc_feature (54)..(366): NCBI GI: 256730318 Blast Desc: NECHADRAFT_82683 [Nectria haematococca mpVI 77-13-4]
  misc_feature (55)..(365): NCBI GI: 238842467 Blast Desc: conserved [Microsporum canis CBS 113480]
  misc_feature (139)..(364): NCBI GI: 119193614 Blast Desc: [Coccidioides immitis RS]
  misc_feature (139)..(364): NCBI GI: 240105638 Blast Desc: CPC735_052010 [Coccidioides posadasii C735 delta SOWgp]
  misc_feature (21)..(356): NCBI GI: 169604296 Blast Desc: SNOG_05159 [Phaeosphaeria nodorum SN15] gi|160706542|gb|EAT87550.2| SNOG_05159 [Phaeosphaeria nodorum SN15]
  misc_feature (186)..(376): NCBI GI: 226282724 Blast Desc: conserved [Paracoccidioides brasiliensis Pb01]
  misc_feature (186)..(376): NCBI GI: 225681182 Blast Desc: [Paracoccidioides brasiliensis Pb03]
  misc_feature (186)..(376): NCBI GI: 226292109 Blast Desc: conserved [Paracoccidioides brasiliensis Pb18]
MNIVEPLHSQTDWNLAHCRLMMKVKVVNVDPIETQADYEYQYSSRAQANGPVRAQFNTSFHTQDEVPDLPSKPSEKPYSFKRWLPLILRSRGLAPSDAQTIKFSLGQTRLLFQVADASIPSGVINRMYREDIDEEIMPSFESLVFPSEGLFMRLEACSAKDGRQRLPPGESGYGHYSTHGKKPGSLPLRSVPEIMLLLLTSMRARNALFHATEERSEEFELFFLPYNDRMQSRREFRVFCAPFQSTASLRITGISQYRWYEPWFLGWMYDDTRERAIERVSQASGTISKQIAAELDTRDEKDMLLMKQGFTFDIFYDEKDGLVELVELNVFGPRSACGSCLFHWIKDRKTLEGHGDPENVEFRVSYREITKGVPSDEEDDDDESLQSEYEHEE

SEQ ID NO: 32329 - DNA, 2775 bp, Muscodor strobelii
  misc_feature: SGI EST ID NO. CUFF.76496.0
  misc_feature: Variant of the nucleotide sequence at SEQ ID NO 32327
ctgcctttagctttattcgatttaacctcggcgagttcggttcctttgcgcctcatcgtcactgtttcactgctgccaaacaatggttgccttgagcaaccttgctaaccattgccgagtaccggatgtgaaaaggcatcgctgtgatatgtgaaccaggccagtatactacgtttgcattgcaagagacagtctctctgtgtgaactgaacatataacgattacacatatatgtctctactactaggaactaatgcaaaaggcgttgcagtgttgaatgtagacagaaaacatgaaagttacacattgaaatgaacgtagctgtcaaatggagacacgttgcgatgtggataccggagcaaaacgcagggttttagcgaagacacactcgggaaacatgaatattgtcgagccattgcactcacagactgattggaatttggcgcattgtagattgatgatgaaggtgaaagtcgtcaacgttgatcctatcgagacccaagcagactacgagtaccaatactcatcaagggcacaagctaacggtcctgtgagagcacaattcaacacgtcgtttcacacccaagacgaagtgccagacctcccaagcaaacctagtgaaaagccgtattcctttaagcgatggcttcctcttatcttacgatctcgtggactagcaccatcagacgcccagactatcaaattctcactcgggcaaacacgactgctctttcaggtagcggacgcgtcaataccatccggagttattaaccgcatgtaccgagaggatattgatgaagaaatcatgccgtcttttgagtcgttggtttttccatcagagggactgttcatgagactcgaagcttgttctgccaaagatgggcggcaaagactaccgccaggcgaatctggatacgggcattatagcactcacggcaagaaacctggctcgttaccgctgcgttctgtcccagagattatgctactcctcttaacatcaatgcgggcacgtaatgctttgttccatgccaccgaggaaaggtcggaggaatttgagctatttttccttccctacaatgaccgtatgcaaagtaggagagaatttcgtgttttctgtgcgcctttccagtcgacagcgtcgttacgtataacgggcatcagccagtacagatggtatgaaccctggtttctaggttggatgtacgatgacacaagggaacgggcaatagaaagagtttcccaggcaagtgggacgatatctaaacagatcgccgcggaactggacaccagagacgaaaaggatatgctattgatgaaacaagggttcacatttgatatcttctacgacgagaaagatggcttggtcgagctggtcgagctcaatgtgtttggccccagatcagcttgtggtagctgccttttccactggatcaaagatagaaagacgcttgagggccatggtgatcccgagaacgtagagtttcgggtaagctaccgagagatcaccaaaggcgtgccatcagatgaagaagacgacgacgacgaatcattgcagtctgagtatgagcatgaggaataagccacatatcacttcaaactcgttgctattagcatctttcctagggatcatcatcgcaatgcaagggcgtttgtgccctatcctcccgaggctatcggaggaaacaaataatacaccttcgcaccgaaatttgctgtggagaatctcactttttcgtctgatagcctcgcctctctacagcaaatctaaaggcagcatcagacgatcatgatgcgggagtaggaaggaagctcatgtacacacatgttccatacgagatgctgctgtgtccgtatcatgtatggttcgcggcaacgcggttacacgatgatgcggggcacgccagcctcgttcacaggacgacatgaatacacatcatgctgtaccgtagacgacgaccaaacatccatgctagacctgccacatactccatgacacggcaccagccgtaccgtacgacgcacgatcgcaatgacatcacaaatgaagatcatctcaccatgacatccgacgtgcagggagcactgaccgtcgaaaaagtggctcgagtgggcagaaaatgaacaaatctgaaacaccaaagctgacaagcattcacgcaaatcccaatttcgttccatcttcagcccggtgcgatccacacgtactcaggatccgccggcccaagacccagttgcatcggctacacagttccgaacggagccccgtcatgagaaagctctcgctatgcgtactttcttatcaaagctaacatgccatacgtctttcattctggaacacatcaactagtagttcaagtctgggtcgagtacgtgatcatgataatgtgcatattgtttcatgactacgattaaaggacatgaagcaatccattcaagaatgccagctcatctcaatgcctacctccttctagtacttgtgaaaaattctgacgactcaatcttgacgctccaaattcaagatatgggggtgcattgacgaagatggttcggctcggatgatacaaaaggcagacaaggcagatcatcatcaacctcaccgacatttccctgtcgcagacctcgtgctcaaatttgcgaacgtgtgtgggtatgggtagcgtgcgtatcatgcatgaagttcggcgactttactcgagatggtcatgggagtggtgatcgccggcaccactcgtgacaccttattattagataatcctacacacaactattctgcac

SEQ ID NO: 32330 - DNA, 459 bp, Muscodor strobelii
  misc_feature: SGI cDNA ID NO. 571142
  misc_feature: Encodes the peptide sequence at SEQ ID NO 32331
atgaacaatacaacatcgatgtacgcgaacgcgaaaccgcatcctcctgcgaggtccagttcgtcatcttcttcctcggcagactcccacgaactgcatacgcctgttcccattcgaccgccgttactcagcagaaaaagcagtggcacactaatagtaccccgggattcgagcgaggttggcccgatcgagcatgtgtacgaacctgatgatgtacgggcgatgagccctcggcggacaagtgaagacctagagaatctgggccgcgaggcgcgcgaagaactccacaagcacgccagagctcttcaagaatcactgctgatgatttttcaccgtatcgaggctgtgaaagaagagcacgacaagcttgacagcaataacaaattcttacagaagtacattggtgatctcatgagcaccagtaagatcacagcgtcggggagtcggggtagaaaataa

SEQ ID NO: 32331 - protein, 152 aa, Muscodor strobelii
  misc_feature: SGI Peptide ID NO. 571142
  misc_feature (28)..(152): NCBI GI: 261353920 Blast Desc: conserved [Verticillium albo-atrum VaMs.102]
  misc_feature (32)..(152): NCBI GI: 85111160 Blast Desc: NCU00805 [Neurospora crassa OR74A] gi|28925541|gb|EAA34569.1| conserved [Neurospora crassa OR74A]
  misc_feature (32)..(151): NCBI GI: 256726699 Blast Desc: NECHADRAFT_19733 [Nectria haematococca mpVI 77-13-4]
  misc_feature (32)..(152): NCBI GI: 46121357 Blast Desc: FG05057.1 [Gibberella zeae PH-1]
  misc_feature (12)..(152): NCBI GI: 171695670 Blast Desc: protein product [Podospora anserina] gi|170948077|emb|CAP60241.1| protein product [Podospora anserina]
  misc_feature (35)..(152): NCBI GI: 145605132 Blast Desc: MGG_02117 [Magnaporthe grisea 70-15] gi|145013000|gb|EDJ97641.1| MGG_02117 [Magnaporthe grisea 70-15]
  misc_feature (20)..(152): NCBI GI: 154297596 Blast Desc: BC1G_12643 [Botryotinia fuckeliana B05.10] gi|150858466|gb|EDN33658.1| BC1G_12643 [Botryotinia fuckeliana B05.10]
  misc_feature (20)..(152): NCBI GI: 156030981 Blast Desc: SS1G_14271 [Sclerotinia sclerotiorum 1980] gi|154700662|gb|EDO00401.1| SS1G_14271 [Sclerotinia sclerotiorum 1980]
  misc_feature (16)..(119): NCBI GI: 116181244 Blast Desc: CHGG_01250 [Chaetomium globosum CBS 148.51] gi|88185547|gb|EAQ93015.1| CHGG_01250 [Chaetomium globosum CBS 148.51]
  misc_feature (35)..(148): NCBI GI: 189196899 Blast Desc: conserved [Pyrenophora tritici-repentis Pt-1C-BFP] gi|187980735|gb|EDU47361.1| conserved [Pyrenophora tritici-repentis Pt-1C-BFP]
MNNTTSMYANAKPHPPARSSSSSSSSADSHELHTPVPIRPPLLSRKSSGTLIVPRDSSEVGPIEHVYEPDDVRAMSPRRTSEDLENLGREAREELHKHARALQESLLMIFHRIEAVKEEHDKLDSNNKFLQKYIGDLMSTSKITASGSRGRK

SEQ ID NO: 32332 - DNA, 2067 bp, Muscodor strobelii
  misc_feature: SGI EST ID NO. CUFF.76550.1
  misc_feature: Variant of the nucleotide sequence at SEQ ID NO 32330
gaagccgttaccacctcccagtccccccccctggttagcagcagttaccacaagtattgcggtgtaataccctcaaatcccacccgtgtgtccccgttctcgttgggcaggccattgtgcttgtttggaaacgcaactgcaacagcccctacgatccgtctgaggggcctgcactgagcgccgcctgctcgcacccccgtcccagtttgcgggcagtcaccctcacctcgcccacccagtcaccgtcgccttggaccgacgatcacttcattctacactaacgttcttcgcgcccacaccgtctgtcaaataataataatcagcacatcctcctgccgctgccccccgcccatcgctgccccctccgctacaccctcctacgctacatgcgcctggcagccctggaccctttactcctttccctctctgctaccaccccgaggctctgtctctccaacctctagtccgcttcgtcttcctcccttagatttttgctccgccacccacaccaccacttaagctctcgtgtagcgtagactcttcgtatcagcctcttcgtaactacatgtactagccgggacttcaagacggtcggatgttgaacgtcaccaacagttaggcaatcctttgcccgacgccatccacctgttgcctcccctgcctctacgctggtgtcccaactaaccggctcaaccaaagtctgaaaacaccctcaccacgaccaggacagacttcttgagtgttgaagagccaacgccgaatgtgacggggggcaacactgcggataacaacatcgactagcagttaatatctgcccagttcggccatctcgtcgcttcgacatccacgttacctatttgataattggaggagtctggcagtcgcgttggtcactgtgaatacagaccgccggctacaatgaacaatacaacatcgatgtacgcgaacgcgaaaccgcatcctcctgcgaggtccagttcgtcatcttcttcctcggcagactcccacgaactgcatacgcctgttcccattcgaccgccgttactcagcagaaaaagcagtggcacactaatagtaccccgggattcgagcgaggttggcccgatcgagcatgtgtacgaacctgatgatgtacgggcgatgagccctcggcggacaagtgaagacctagagaatctgggccgcgaggcgcgcgaagaactccacaagcacgccagagctcttcaagaatcactgctgatgatttttcaccgtatcgaggctgtgaaagaagagcacgacaagcttgacagcaataacaaattcttacagaagtacattggtgatctcatgagcaccagtaagatcacagcgtcggggagtcggggtagaaaataaatggccgccgaaatcgacaacgctgtcaagtatgatatcggataaacacaagctggaccaactacaagcgttcatcgcctctcagccgcagccgagagcgcatcacatctgtctagccagaacactcacatctgggctaggctttgtcttagagtgtcccatcgcactcgacatcatctaacagactaaagatgacactcagcaatcctaccaacttccgttctgacaagttcggtttctctccctcttttgttgtgatttgctcaatcaaggacaacggtgttgaaaaagatggttataccactgcccggaggcacattatcacagcatcactaggcttacgggccagttaacatgggaatatagcatagttagtcggcgtttggacatggatcgcattttgaaattcgcaaacatcaagaggttcccaattgcacctcattgatgcatgtacgagagcacccgccattaaagcctagtcctttttttttattgctgttactacaataccaaacaacgagcgtatgaaactcgtttagcatgaatcgacaattgagcgaatcgaatccattttctcttacttaagtgatcgctgatgagagacgatgggcctaagactcgatgacgacatgaggaaggccattcacccgctagagaggacctaacgctctgttgagctgccacctccgc

SEQ ID NO: 32333 - DNA, 1065 bp, Muscodor strobelii
  misc_feature: SGI cDNA ID NO. 571143
  misc_feature: Encodes the peptide sequence at SEQ ID NO 32334
atggcggaacttgcccagaggaactttttacggtgggatgttcaaggtgttgagcaggtgcctaataccgagggcgacgatgttcaacatgttattgaactcatcaatgagtcgcagcgtcggatcttcgaccagtcgcgacattgcttcggcggcgtcttccaaatgttcgccctcacaagctctgagcctggcgacccgagcttagatgatcgtgttccacaaccgcggggcttcgcaatgaaagttttcgacgtgcaaggaaagatgatggaaggcagtccaggtgttcctacgcaggacatcgaattcaacagcacgccagctattgaacttgcagacgcccgtactacacgcgagataatgactttacgcttacgatatggagaaaacaaagaaaagctgtatgaagctctgcaccaacgtaaagattcggacctccaaacttcccgtgataaagtaccgaacctccatctcgcgagtttgacctggtactcccaaagtgcctttcgatttggagacttcgttgtcaaatacagtcttgtgccagcaccggagaccatggaagtactcaagagatcttgggacgaagttagaaaacggcgagaccagaccaacgggcatatagtatctgtgaaaactatcgaaggaaatggcgacctgagtgtcgatcctgctcatgaccgtcgagatgttctgcactgttggctgcgagagtttcacgctaagcacgaagctgaattcatatttcgagtccagctactcgaaaacctggacgagcagcccgttgagtactccggtaaagcttgggatgaggagaagtttccatggcaagaggttgcgagacttgctataccaccccaggagagcttttctgcggctcgaagagccttctgggaggatcacatgcgcgttgatccatggcacgggctggaaactttccgtcctttaggaagctcaaatcggctgcgcaaagccttatatccggcgagtagcgctctcaggaggcaactcaatgcaaaagaggaggttcatgttactagcattgatcaaattcccgactga

SEQ ID NO: 32334 - protein, 354 aa, Muscodor strobelii
  misc_feature: SGI Peptide ID NO. 571143
  misc_feature (61)..(354): NCBI GI: 154316018 Blast Desc: BC1G_04581 [Botryotinia fuckeliana B05.10] gi|150846977|gb|EDN22170.1| BC1G_04581 [Botryotinia fuckeliana B05.10]
  misc_feature (5)..(353): NCBI GI: 169595134 Blast Desc: SNOG_00301 [Phaeosphaeria nodorum SN15] gi|111070676|gb|EAT91796.1| SNOG_00301 [Phaeosphaeria nodorum SN15]
  misc_feature (5)..(342): NCBI GI: 169623197 Blast Desc: SNOG_14830 [Phaeosphaeria nodorum SN15] gi|160704931|gb|EAT77682.2| SNOG_14830 [Phaeosphaeria nodorum SN15]
  misc_feature (8)..(353): NCBI GI: 15807815 Blast Desc: DR_A0146 [Deinococcus radiodurans R1] gi|6460511|gb|AAF12217.1|AE001862_43 conserved [Deinococcus radiodurans R1]
  misc_feature (17)..(354): NCBI GI: 262377553 Blast Desc: conserved [Acinetobacter lwoffii SH145] gi|262307440|gb|EEY88582.1| conserved [Acinetobacter lwoffii SH145]
  misc_feature (69)..(353): NCBI GI: 254562253 Blast Desc: METDI3860 [Methylobacterium extorquens DM4] gi|254269531|emb|CAX25497.1| conserved ; heme-linked catalase domain [Methylobacterium extorquens DM4]
  misc_feature (34)..(354): NCBI GI: 153012004 Blast Desc: Oant_4800 [Ochrobactrum anthropi ATCC 49188] gi|151563892|gb|ABS17387.1| conserved [Ochrobactrum anthropi ATCC 49188]
  misc_feature (69)..(353): NCBI GI: 163852502 Blast Desc: catalase [Methylobacterium extorquens PA1] gi|163664107|gb|ABY31474.1| catalase [Methylobacterium extorquens PA1]
  misc_feature (6)..(354): NCBI GI: 255319361 Blast Desc: catalase [Acinetobacter radioresistens SK82] gi|262379803|ref|ZP_06072959.1| catalase [Acinetobacter radioresistens SH164] gi|255303754|gb|EET82954.1| catalase SK82]
  misc_feature (61)..(340): NCBI GI: 170739959 Blast Desc: M446_1687 [Methylobacterium sp. 4-46] gi|168194233|gb|ACA16180.1| conserved [Methylobacterium sp. 4-46]
MAELAQRNFLRWDVQGVEQVPNTEGDDVQHVIELINESQRRIFDQSRHCFGGVFQMFALTSSEPGDPSLDDRVPQPRGFAMKVFDVQGKMMEGSPGVPTQDIEFNSTPAIELADARTTREIMTLRLRYGENKEKLYEALHQRKDSDLQTSRDKVPNLHLASLTWYSQSAFRFGDFVVKYSLVPAPETMEVLKRSWDEVRKRRDQTNGHIVSVKTIEGNGDLSVDPAHDRRDVLHCWLREFHAKHEAEFIFRVQLLENLDEQPVEYSGKAWDEEKFPWQEVARLAIPPQESFSAARRAFWEDHMRVDPWHGLETFRPLGSSNRLRKALYPASSALRRQLNAKEEVHVTSIDQIPD

SEQ ID NO: 32335 - DNA, 1922 bp, Muscodor strobelii
  misc_feature: SGI EST ID NO. CUFF.76508.0
  misc_feature: Variant of the nucleotide sequence at SEQ ID NO 32333
gaactttttacggtgggatgttcaaggtgttgagcaggtgcctaataccgagggcgacgatgttcaacatgttattgaactcatcaatgagtcgcagcgtcggatcttcgaccagtcgcgacattgcttcggcggcgtatgtttttctgacatgagacttgccagtcttccaaatgttcgccctcacagtgaaggtgctgtgaaatgactaacacaggaatctccttattactagacacatgcgcgcacacaaggtctcgtgaaggggaaattgatcgtgtccgatggcttgccccaatatcttcgacagaccgagcttttccagaagccgggcgtatttccagtagcatgtcgatatgtacgtacactttacttggcatcgcatgcggcttcaatacatgtattgagcttgtgactaagggggaaaacggaactgacgttctccctattgttagagctctgagcctggcgacccgagcttagatgtaagcaacaattcctcttaatcctaaagaccctcgaattgctcatcatgacaactgcccgaccacagtggtggacataccgttccatagcaattattaatctgcactatttctaatataattcaactattcttacacagtgggtaggatcgtgttccacaaccgcggggcttcgcaatgaaagttttcgacgtgcaaggaaagatgatggaaggcagtccaggtgttcctacgcaggacatcgaattcaacagcacgccagctattgaacttgcagacgcccgtactacacgcgagataatgactttacgcttacgatatggagaaaacaaagaaaagctgtatgaagctctgcaccaacgtaaagattcggacctccaaacttcccgtgataaagtaccgaacctccatctcgcgagtttgacctggtactcccaaagtgcctttcgatttggagacttcgttgtcaaatacagtcttgtgccagcaccggagaccatggaagtactcaagagatcttgggacgaagttagaaaacggcgagaccagaccaacgggcatatagtatctgtgaaaactatcgaaggaaatggcgacctgagtgtcgatcctgctcatgaccgtcgagatgttctgcactgttggctgcgagagtttcacgctaagcacgaagctgaattcatatttcgagtccagctactcgaaaacctggacgagcagcccgttgagtactccggtaaagcttgggatgaggagaagtttccatggcaagaggttgcgagacttgctataccaccccaggagagcttttctgcggctcgaagagccttctgggaggatcacatgcgcgttgatccatggcacgggctggaaactttccgtcctttaggaagctcaaatcggctgcgcaaagccttatatccggcgagtagcgctctcaggaggcaactcaatgcaaaagaggaggttcatgttactagcattgatcaaattcccgactgatgtaggactgtcacggatatgataccattgaaaagagcaggtgtagtattgcagattgatctgctgttaaaactgagctatatacatttcaggggttctcaggtaagtgggactcatggtttgttatatacaatgaagtagtaacgactgtctgacccaaaagagtgtgataaatgagtgactgaacgagataacaagaaggatggggaggcaacgtatgtcggaatatgaacgaggagaaatatgtacagcgtgcaactcaagcaccacgaagaagagaagggcatcaacggaggagagtttagttaattcagtatcgacagacccaaccatgactgcccaatgtcagacatgactctaaaccacaaatcgtcggtatcgagggattgggccggaacctggttgcggacacggtccagcaacagctgcgcgctt

SEQ ID NO: 32336 - DNA, 1908 bp, Muscodor strobelii
  misc_feature: SGI cDNA ID NO. 571144
  misc_feature: Encodes the peptide sequence at SEQ ID NO 32337
atggtccctaccttccgctctttagcggtggcagcctgcttggccgcagggggcatagctcaaactgtctacgaggaaaagatcccagccgagcaagcactcgcattgtctcagattgtagaagacgagcctgatactaccttcgctgcgctgaaaaatggcgtcaaggaccagattagcccggcattccccctaatttatcaagttgcccttcctatcccacctgtaaagcaaccgaaacaaatcattacgaacccagtgaccggggaagacatctggtattacgagatcgagatcaagccgttccaagatcaggtctatcccaaccttcttcccgcgactcttgtcggttatgatggaatctcccctgggcctagctttgtcatccctagagggcaagagacagttgttcgttttgtgaacaatgcggagcgtatgaactctgtccatctccacggttcgccctctcgagctcccttcgatggctgggcaaacgacacaacgcagcctggagagtttaaggactattactatcctaacttccagtctgctcggttgctgtggtaccatgatcatgctttgggaattactgctgaaaatgcgtatttcggacaagctggtgcttacatcttgaccgacccagccgaggatgctcttggtttgccttccgggtacggcgaattcgatattcctctcatcctaggtgcaaaattctacaacaagaacggtactcttcagtctcagctgcaagagagaaccagcacatggggtgacattattcacgtcaatggtcagccatggccattcctagatgtacagcctcgcaaataccgcttcagaatcctcgatacgggtatttctcgaagctacgctctttattttgccaggtctgttgggacatcggtccagttgccattccaggtgattgcctctgattccggtctcctcgaaatcccagtcactgttgataccctgttcatctctgtcgcagagcggtacgagatcgtcttcgactttaccaacttcgcaggtcaacaaattgaactgcgcaacctccctaaagtcggcgatttcggcgttgatgacgactacgagaacaccgacaaggttatgcgtttcaatgttgctaaaggaccagttaacgacccctcgactgtgcctgcaaatctccgcgatgtccccttcccacctgataccactggtatcgaccaacacttcagattccatcgccaaaatggcgagtggcgtatcaatggtgttggattcgaggatgttgcaaatcgggtcctcgccaaggttcctcgtggtaccgttgagatctgggagcttgagaatggatctggcggctggactcaccccatccatgtccatctcgttgacttccgagtcatccaacgtacgggtggcaagcgtgatgtggaaccctacgaggagcatggtctgaaggatgtcgtctggcttgctgtcggcgagactgtccttgttgaggctcactacgagccatggactggcctgtacatgttccattgccacaatctgatccacgaggaccacgacatgatggctgccttcaacgtcacaatgctccagaacttcggctacaacgagactactgacttcagcgaccccgaggaccctcggtgggctgccgagccttacaacctcgccgatttccgtgcaagcgctggcatcttctctcccgaagccgtcatggagaaggtacagcgacttgctctggagcagccatacagcgaattgccacaagtggaggctgctctcgatgagttttgggagggcaaggacattggcgatcccaacgcggcgctccaaaagcgcgcagctgttgctggaccgtgtccgcaaccaggttccggcccaatccctcgataccgacgatttgtggtttag

SEQ ID NO: 32337 - protein, 635 aa, Muscodor strobelii
  misc_feature: SGI Peptide ID NO. 571144
  misc_feature (394)..(527): Pfam Id: PF07731 Pfam Desc: Multicopper oxidase
  misc_feature (100)..(216): Pfam Id: PF07732 Pfam Desc: Multicopper oxidase
  misc_feature (13)..(633): NCBI GI: 256722723 Blast Desc: NECHADRAFT_53105 [Nectria haematococca mpVI 77-13-4]
  misc_feature (104)..(635): NCBI GI: 169611030 Blast Desc: SNOG_08624 [Phaeosphaeria nodorum SN15] gi|160702204|gb|EAT83792.2| SNOG_08624 [Phaeosphaeria nodorum SN15]
  misc_feature (8)..(589): NCBI GI: 62948002 Blast Desc: phenol oxidase A [Stachybotrys chartarum]
  misc_feature (28)..(630): NCBI GI: 145602870 Blast Desc: MGG_13764 [Magnaporthe grisea 70-15] gi|145011233|gb|EDJ95889.1| MGG_13764 [Magnaporthe grisea 70-15]
  misc_feature (58)..(584): NCBI GI: 2833236 Blast Desc: BLRO_MYRVE RecName: Full=Bilirubin oxidase; Flags: Precursor gi|456710|dbj|BAA03166.1| bilirubin oxidase [Myrothecium verrucaria] gi|456712|dbj|BAA02123.1| bilirubin
  misc_feature (56)..(617): NCBI GI: 170940401 Blast Desc: protein product [Podospora anserina]
  misc_feature (24)..(635): NCBI GI: 145609309 Blast Desc: MGG_07500 [Magnaporthe grisea 70-15] gi|145016694|gb|EDK01124.1| MGG_07500 [Magnaporthe grisea 70-15]
  misc_feature (92)..(598): NCBI GI: 171678419 Blast Desc: protein product [Podospora anserina] gi|170937279|emb|CAP61936.1| protein product [Podospora anserina]
  misc_feature (1)..(583): NCBI GI: 6996278 Blast Desc: polyphenol oxidase [Acremonium murorum]
  misc_feature (50)..(600): NCBI GI: 261357270 Blast Desc: bilirubin oxidase [Verticillium albo-atrum VaMs.102]
  misc_feature (58)..(584): SWISSPROT Homolog: EC 1.3.3.5 Bilirubin oxidase
MVPTFRSLAVAACLAAGGIAQTVYEEKIPAEQALALSQIVEDEPDTTFAALKNGVKDQISPAFPLIYQVALPIPPVKQPKQIITNPVTGEDIWYYEIEIKPFQDQVYPNLLPATLVGYDGISPGPSFVIPRGQETVVRFVNNAERMNSVHLHGSPSRAPFDGWANDTTQPGEFKDYYYPNFQSARLLWYHDHALGITAENAYFGQAGAYILTDPAEDALGLPSGYGEFDIPLILGAKFYNKNGTLQSQLQERTSTWGDIIHVNGQPWPFLDVQPRKYRFRILDTGISRSYALYFARSVGTSVQLPFQVIASDSGLLEIPVTVDTLFISVAERYEIVFDFTNFAGQQIELRNLPKVGDFGVDDDYENTDKVMRFNVAKGPVNDPSTVPANLRDVPFPPDTTGIDQHFRFHRQNGEWRINGVGFEDVANRVLAKVPRGTVEIWELENGSGGWTHPIHVHLVDFRVIQRTGGKRDVEPYEEHGLKDVVWLAVGETVLVEAHYEPWTGLYMFHCHNLIHEDHDMMAAFNVTMLQNFGYNETTDFSDPEDPRWAAEPYNLADFRASAGIFSPEAVMEKVQRLALEQPYSELPQVEAALDEFWEGKDIGDPNAALQKRAAVAGPCPQPGSGPIPRYRRFVV

SEQ ID NO: 32338 - DNA, 571 bp, Muscodor strobelii
  misc_feature: SGI EST ID NO. CUFF.76518.0
  misc_feature: Variant of the nucleotide sequence at SEQ ID NO 32336
tttagacaacaatggtccctaccttccgctctttagcggtggcagcctgcttggccgcagggggcatagctcaaactgtctacgaggaaaagatcccagccgagcaagcactcgcattgtctcagattgtagaagacgagcctgatactaccttcgctgcgctgaaaaatggcgtcaaggaccagattagcccggcattccccctaatttatcaagttgcccttcctatcccacctgtaaagcaaccgaaacagtacgtctcccatttcactctcctatttcacgaagcagtaccaagactaatgttgttaagaatcattacgaacccagtgaccggggaagacatctggtattacgagatcgagatcaagccgttccaagatcaggtctatcccaaccttcttcccgcgactcttgtcggttatgatggaatctcccctgggcctagctttgtcatccctagagggcaagagacagttgttcgttttgtgaacaatgcggagcgtatgaactctgtccatctccacggttcgccctctcgagctcccttcgatggctgggcaaacgacac

SEQ ID NO: 32339 - DNA, 1422 bp, Muscodor strobelii
  misc_feature: SGI cDNA ID NO. 571145
  misc_feature: Encodes the peptide sequence at SEQ ID NO 32340
atgcggagtccctcgtttccttctctccttgctctgagcatccagctcatcaacatgttttctcacgtttatgctcaagatgcacctctgtttgttcaaggtggtctcgacgatgcaactgtctttgatgataccttcaacactggtggtactatcagcgttggtgggttcaatataactgttcctagaaacatgttggtccagtttcccgctgcatacgttccgttcaaagatttcgttgaggatgtggactccatgattggatacgaaacaaatgttgtcggtaacttcgttaacggtgagcccatcgctgctcagatcactacattccaattctttgaaggcttgggccaaggcttcattgaatctatcaacttcacagatggaagtatgcaaatagccaacggacctcgtcttcgcatcaacgacccccgtgctgtattctcggttggatacaccgaagcccctttcttcacagccgacgatgagagtcctagcattgcatctttctcgggattcccaatgtgtattccaagaaacagctcagatcccctctgcccgtcaaccaacagacctttccaagggtcaggaacattcaccgtcagagattcactcaccatggctccctttcttgtcggagatttcatcacttggcagggcattaagagaggtgacgaggtcatcgcctttgccattaccgccatgaatgttgaaatcaccaccctcaataatcttgcctacgtacgcgcggaactcgccctcattggtgtatccaacttcaacggcaatacagagttgagagagtcgcgaatccttggctacttgtcgaacactcgagcaactgtcgccatatacgcaatggacatcgacccttgcacaggcgaagtgaccgatcgaatcgtatccgctattggtatcaagggtggtgccaacgcgcagaacaaatgggaataccgcgcggacatcactgagggctacgcacgagactaccggattgtaacagaggtcaatggtgtaccccagacccagacaacgaagaatggattgctggcgggcacctacgtccaacctgtcaacccctggattcaagctgagcaggatgtcccgggtgttccacccccagctaacgacttctcgcaattgccatggctcatcaatggtgtcggcgttgacgaaaacgggaacctctggggcggcctcgacccctttccccagaccggcattgaagctggaactcctgactgcggcgcagtctcagcgtcttcattcaagggagatgatgttgataccgactgggttccttcatcttctctcctaaacgggaccatgtctctgaatttcacatcgccaatcaatagcactgctcaaagtgttcgtagacgtcgcaatgtccacgacttccgctggactgagaaggcataa

SEQ ID NO: 32340 - protein, 473 aa, Muscodor strobelii
  misc_feature: SGI Peptide ID NO. 571145
  misc_feature (8)..(432): NCBI GI: 169611032 Blast Desc: SNOG_08625 [Phaeosphaeria nodorum SN15] gi|160702205|gb|EAT83793.2| SNOG_08625 [Phaeosphaeria nodorum SN15]
  misc_feature (1)..(415): NCBI GI: 256722658 Blast Desc: NECHADRAFT_53203 [Nectria haematococca mpVI 77-13-4]
  misc_feature (9)..(422): NCBI GI: 39945550 Blast Desc: MGG_04757 [Magnaporthe grisea 70-15] gi|145011234|gb|EDJ95890.1| MGG_04757 [Magnaporthe grisea 70-15]
  misc_feature (4)..(413): NCBI GI: 261357271 Blast Desc: conserved [Verticillium albo-atrum VaMs.102]
  misc_feature (23)..(408): NCBI GI: 39945850 Blast Desc: MGG_08045 [Magnaporthe grisea 70-15] gi|145019281|gb|EDK03509.1| MGG_08045 [Magnaporthe grisea 70-15]
  misc_feature (25)..(413): NCBI GI: 85079435 Blast Desc: NCU05043 [Neurospora crassa OR74A] gi|28917411|gb|EAA27115.1| [Neurospora crassa OR74A]
  misc_feature (77)..(408): NCBI GI: 170940402 Blast Desc: protein product [Podospora anserina]
  misc_feature (46)..(415): NCBI GI: 169614427 Blast Desc: SNOG_10354 [Phaeosphaeria nodorum SN15] gi|160707343|gb|EAT82689.2| SNOG_10354 [Phaeosphaeria nodorum SN15]
  misc_feature (8)..(400): NCBI GI: 189200134 Blast Desc: conserved [Pyrenophora tritici-repentis Pt-1C-BFP] gi|187983503|gb|EDU48991.1| conserved [Pyrenophora tritici-repentis Pt-1C-BFP]
  misc_feature (94)..(192): NCBI GI: 171678417 Blast Desc: protein product [Podospora anserina] gi|170937278|emb|CAP61935.1| protein product [Podospora anserina]
MRSPSFPSLLALSIQLINMFSHVYAQDAPLFVQGGLDDATVFDDTFNTGGTISVGGFNITVPRNMLVQFPAAYVPFKDFVEDVDSMIGYETNVVGNFVNGEPIAAQITTFQFFEGLGQGFIESINFTDGSMQIANGPRLRINDPRAVFSVGYTEAPFFTADDESPSIASFSGFPMCIPRNSSDPLCPSTNRPFQGSGTFTVRDSLTMAPFLVGDFITWQGIKRGDEVIAFAITAMNVEITTLNNLAYVRAELALIGVSNFNGNTELRESRILGYLSNTRATVAIYAMDIDPCTGEVTDRIVSAIGIKGGANAQNKWEYRADITEGYARDYRIVTEVNGVPQTQTTKNGLLAGTYVQPVNPWIQAEQDVPGVPPPANDFSQLPWLINGVGVDENGNLWGGLDPFPQTGIEAGTPDCGAVSASSFKGDDVDTDWVPSSSLLNGTMSLNFTSPINSTAQSVRRRRNVHDFRWTEKA

SEQ ID NO: 32341 - DNA, 1569 bp, Muscodor strobelii
  misc_feature: SGI cDNA ID NO. 571146
  misc_feature: Encodes the peptide sequence at SEQ ID NO 32342
atgaacagaagagtaggaataccgaggagctcgaagccatcacatcttctaaaacaggttggggggagaatagtcgacgatgctaagcccaacaagcgccaaaagaccgacgcatcgtcaaactcaaagcaagttcagcaggatgaaggaccaatagacaggctgccagaatcaagcagcgatgatgatgacgaggatgacatcttggcgcaacgtgataggactgcaaacatcactgcgacaattttcaccaaagggaagccttcccaggcagataaagctactaggacaagagcaaaagccaaggtggcagataggaactcaagcgtaacagatctcaaatcatcaaccaacgccgaccagtctgaaagagatgccgcagatttaaaggctctcaaaggatcgaagaaactggtaaacaagtatggcgaacagaagcagaaacccagccaagcgaagcccgtttttaaacaaaacgctaccgcttcctctacgagaaagaaagaggagagtccggaatttaggcaatatagtggcgatgaatttgattcagttacctcaccgcaacagaggagggttttccgggtcgagctttcaaaggcatcagaatcgcctgatcggaaagtttccctgaaaaattactcagatttcaccccatcgcctcaaacccttaggttcaagaatgttggttctctcgatggatctccaaaaaaagagcccgccgcgaacgcgcccaaaggtaaagttcgacgcccaaagaacgttcccaaaaaacgggcaacagaagaggatctgtcccaaaaacctgtcttcacaatgccagacttggatgatttcgatggcgacgacaatgcgaactctcaaggtaccccatctgtactagaagatttacaagacggcgaaacagatgacgaagaggccaaggaatccgaaagtgtggctttgacaagatgcccgatgtgtaatgatgtagtagaccccgagctattcaacaaacactaccacaagggcaagatgaatattagcaaacagacggctttctgcagactgcacaagcgacaatctgcatccaggacaaaaacagataagggctacccgaaaatcgattggaacgtcattgaagaccgatgttcagcgcaggtagaattcctcaatgatattctagaagatcgtcgcgcctcgtactaccgcgaaatattcaaggagaaggtcgaatctggcaagaacagaactttgttgacgaatcaagacaacctcacacctggttactacggaccacgtggtcttcgcgtcatgacagaattcatcatgcgaacattgagctcagtaattagaaaacaggcagtagaggaccggctcctgtctgcaagatcttacactggatacgtgcaagctgttctcgtgcctgagttgacagttcgcttgatcatggaagatctctctaccaccgaagataaggcgaggagggttttagaggagagtgctgaagttggcgagttgttacatgaagaaaagggagatgtggtcaagcacaaggaggagatagacagacaagcggagggaaattga

SEQ ID NO: 32342 - protein, 522 aa, Muscodor strobelii
  misc_feature: SGI Peptide ID NO. 571146
  misc_feature (52)..(509): NCBI GI: 116182404 Blast Desc: CHGG_01830 [Chaetomium globosum CBS 148.51] gi|88186127|gb|EAQ93595.1| CHGG_01830 [Chaetomium globosum CBS 148.51]
  misc_feature (316)..(522): NCBI GI: 261356426 Blast Desc: conserved [Verticillium albo-atrum VaMs.102]
  misc_feature (318)..(522): NCBI GI: 85117524 Blast Desc: NCU08376 [Neurospora crassa OR74A] gi|28927085|gb|EAA36043.1| [Neurospora crassa OR74A]
  misc_feature (302)..(514): NCBI GI: 145605389 Blast Desc: MGG_09896 [Magnaporthe grisea 70-15] gi|145013206|gb|EDJ97847.1| MGG_09896 [Magnaporthe grisea 70-15]
  misc_feature (216)..(509): NCBI GI: 171695154 Blast Desc: protein product [Podospora anserina] gi|170947819|emb|CAP59982.1| protein product [Podospora anserina]
  misc_feature (275)..(522): NCBI GI: 154309511 Blast Desc: BC1G_07226 [Botryotinia fuckeliana B05.10] gi|150852249|gb|EDN27441.1| BC1G_07226 [Botryotinia fuckeliana B05.10]
  misc_feature (317)..(512): NCBI GI: 156045665 Blast Desc: SS1G_10023 [Sclerotinia sclerotiorum 1980] gi|154694416|gb|EDN94154.1| SS1G_10023 [Sclerotinia sclerotiorum 1980]
  misc_feature (250)..(504): NCBI GI: 256734356 Blast Desc: NECHADRAFT_74530 [Nectria haematococca mpVI 77-13-4]
  misc_feature (246)..(504): NCBI GI: 46108764 Blast Desc: FG01264.1 [Gibberella zeae PH-1]
  misc_feature (316)..(510): NCBI GI: 226279139 Blast Desc: conserved [Paracoccidioides brasiliensis Pb01]
MNRRVGIPRSSKPSHLLKQVGGRIVDDAKPNKRQKTDASSNSKQVQQDEGPIDRLPESSSDDDDEDDILAQRDRTANITATIFTKGKPSQADKATRTRAKAKVADRNSSVTDLKSSTNADQSERDAADLKALKGSKKLVNKYGEQKQKPSQAKPVFKQNATASSTRKKEESPEFRQYSGDEFDSVTSPQQRRVFRVELSKASESPDRKVSLKNYSDFTPSPQTLRFKNVGSLDGSPKKEPAANAPKGKVRRPKNVPKKRATEEDLSQKPVFTMPDLDDFDGDDNANSQGTPSVLEDLQDGETDDEEAKESESVALTRCPMCNDVVDPELFNKHYHKGKMNISKQTAFCRLHKRQSASRTKTDKGYPKIDWNVIEDRCSAQVEFLNDILEDRRASYYREIFKEKVESGKNRTLLTNQDNLTPGYYGPRGLRVMTEFIMRTLSSVIRKQAVEDRLLSARSYTGYVQAVLVPELTVRLIMEDLSTTEDKARRVLEESAEVGELLHEEKGDVVKHKEEIDRQAEGN

SEQ ID NO: 32343 - DNA, 2190 bp, Muscodor strobelii
  misc_feature: SGI EST ID NO. CUFF.76530.0
  misc_feature: Variant of the nucleotide sequence at SEQ ID NO 32341
agaggtcactgtacgcgcgttgacctccagctggaaatgggaaggaagctgtgaaagtgcaccagctctttccacgcgtggaatgaaagaataatccgaactactagtaccttttgcctgatacccttaactcctgttttgtttgtgcctatccacttcagcctttgacatcgattgctcattgcctgtgacatgaatcgctcgtaatcctttgaatgcaactctgtctgccaacatatgatcagcatatcacaaatatctcacgcgccctctcccagcccattaccaagcccggacatctgatgatgaacagaagagtaggaataccgaggagctcgaagccatcacatcttctaaaacaggttggggggagaatagtcgacgatgctaagcccaacaagcgccaaaagaccgacgcatcgtcaaactcaaagcaagttcagcaggatgaaggaccaatagacaggctgccagaatcaagcagcgatgatgatgacgaggatgacatcttggcgcaacgtgataggactgcaaacatcactgcgacaattttcaccaaagggaagccttcccaggcagataaagctactaggacaagagcaaaagccaaggtggcagataggaactcaagcgtaacagatctcaaatcatcaaccaacgccgaccagtctgaaagagatgccgcagatttaaaggctctcaaaggatcgaagaaactggtaaacaagtatggcgaacagaagcagaaacccagccaagcgaagcccgtttttaaacaaaacgctaccgcttcctctacgagaaagaaagaggagagtccggaatttaggcaatatagtggcgatgaatttgattcagttacctcaccgcaacagaggagggttttccgggtcgagctttcaaaggcatcagaatcgcctgatcggaaagtttccctgaaaaattactcagatttcaccccatcgcctcaaacccttaggttcaagaatgttggttctctcgatggatctccaaaaaaagagcccgccgcgaacgcgcccaaaggtaaagttcgacgcccaaagaacgttcccaaaaaacgggcaacagaagaggatctgtcccaaaaacctgtcttcacaatgccagacttggatgatttcgatggcgacgacaatgcgaactctcaaggtaccccatctgtactagaagatttacaagacggcgaaacagatgacgaagaggccaaggaatccgaaagtgtggctttgacaagatgcccgatgtgtaatgatgtagtagaccccgagctattcaacaaacactaccacaagggcaagatgaatattagcaaacagacggctttctgcagactgcacaagcgacaatctgcatccaggacaaaaacagataagggctacccgaaaatcgattggaacgtcattgaagaccgatgttcagcgcaggtagaattcctcaatgatattctagaagatcgtcgcgcctcgtactaccgcgaaatattcaaggagaaggtcgaatctggcaagaacagaactttgttgacgaatcaagacaacctcacacctggttactacggaccacgtggtcttcgcgtcatgacagaattcatcatgcgaacattgagctcagtaattagaaaacaggcagtagaggaccggctcctgtctgcaagatcttacactggatacgtgcaagctgttctcgtgcctgagttgacagttcgcttgatcatggaagatctctctaccaccgaagataaggcgaggagggttttagaggagagtgctgaagttggcgagttgttacatgaagaaaagggagatgtggtcaagcacaaggaggagatagacagacaagcggagggaaattgagcctagttactcttcaagtacgcccacattgcgagctgctttgctaatattggtacacctacgactggggatgatggatgacgatagatcaaggatggagagcttctgctgcccaactccagcggagggtcacgttggttgccgatcaacaaggtcacgcgtgtggtctaatacctgaagcgataaatagcagtaatacaagcgaccgaaaaagcacgtttgaagaatccggtagcagctacccaggaatttcgattgacaatccgcgagtgttgcggttagctgcttacaaccaaatgctttcccagaccggccg

SEQ ID NO: 32344 - DNA, 1263 bp, Muscodor strobelii
  misc_feature: SGI cDNA ID NO. 571147
  misc_feature: Reduced expression when VOC is produced
  misc_feature: Encodes the peptide sequence at SEQ ID NO 32345
atggctgtcaatcgaaaatatgcagatttgcctgacttggactcggcgcccgatatctacgaaacccctgaactcaccgatgacaactcgacagtacctaccactgtcgaaaggcagtcagacaacgagtccgacgaccacgacgagtacgaaaacgccatatcccactcgcgactacggatagaccaggcgcgttcccgttttctacctgctcaagtggatgcacacgatgtcgacttctcggaccgcttgactggcaagcgcaaatcgtaccgcacttcgagtagacgacagcgggcctccaaagacggcgccgctgagattggtgatctgaccgacgacgaagagggcgagtctcttgaaaagaagattgcacggctaaggcgcgagattcaagaagccaaggaagaatatgatcatgaaaaggccgctgcccccgatgctccatcactccaggatggagagttggcgacactaagtgaagctctcgaccagttgcatacaccatcagaacaatcgttaagccttcgatcacgtccggcagtctctatggctaagccgagcgagcttcagaccggacctgcagagcttggcaaagccacatacaccgtcacgtacgcgccccattacgagcaaagccatgcggttgcaaaggtagccgactttgatcgtcgactggccctattagaaaaggctataggggtatcttctgcgtcaccagagttggagggaaacgggctgcctcgtgccattatgcccacgctagaaagcctacagaaccaaatcatgacattatccgaagcatctacatcctcgctagacagcatcagccgcagagtgcgaaccctaacacaagaagctgagcagctcgaaaaatcaagaaaggcagccaagatagcacaagaggagttatctgctggtggtgctcctgtggaaacggacgatatcgaacaggtcgcaaagatcaatgcgctttacggcacactccctactattgagagtttaacaccacttttgccaccattattggataggctccgctcgcttcgcgctattcatgccgatgccgccaccgctagcgagactctggagcggatagaaaagtcacaaagtgagatggcctcggacatcaggcaatggaaggagggtcttgaaaaggttgaaaaggctatggacgatggcgagactgctatgtctggtaatatgaaggtcgtagaaggatgggttcaggggcttgaagcgaagatggcacagctatcttaa

SEQ ID NO: 32345 - protein, 420 aa, Muscodor strobelii
  misc_feature: SGI Peptide ID NO. 571147
  misc_feature (1)..(420): NCBI GI: 171695156 Blast Desc: protein product [Podospora anserina] gi|170947820|emb|CAP59983.1| protein product [Podospora anserina]
  misc_feature (2)..(419): NCBI GI: 156045667 Blast Desc: SS1G_10024 [Sclerotinia sclerotiorum 1980] gi|154694417|gb|EDN94155.1| SS1G_10024 [Sclerotinia sclerotiorum 1980]
  misc_feature (1)..(419): NCBI GI: 46108762 Blast Desc: FG01263.1 [Gibberella zeae PH-1]
  misc_feature (2)..(419): NCBI GI: 154309509 Blast Desc: BC1G_07225 [Botryotinia fuckeliana B05.10] gi|150852248|gb|EDN27440.1| BC1G_07225 [Botryotinia fuckeliana B05.10]
  misc_feature (1)..(420): NCBI GI: 39964922 Blast Desc: MGG_09895 [Magnaporthe grisea 70-15] gi|145013207|gb|EDJ97848.1| MGG_09895 [Magnaporthe grisea 70-15]
  misc_feature (1)..(395): NCBI GI: 116182406 Blast Desc: CHGG_01831 [Chaetomium globosum CBS 148.51] gi|88186128|gb|EAQ93596.1| CHGG_01831 [Chaetomium globosum CBS 148.51]
  misc_feature (1)..(419): NCBI GI: 145229917 Blast Desc: An01g08450 [Aspergillus niger] gi|134055380|emb|CAK43934.1| protein product [Aspergillus niger]
  misc_feature (1)..(416): NCBI GI: 119192478 Blast Desc: CIMG_00616 [Coccidioides immitis RS]
  misc_feature (1)..(419): NCBI GI: 238504090 Blast Desc: dynactin subunit, [Aspergillus flavus NRRL3357] gi|220690748|gb|EED47097.1| dynactin subunit, [Aspergillus flavus NRRL3357]
  misc_feature (1)..(417): NCBI GI: 212541953 Blast Desc: conserved [Penicillium marneffei ATCC 18224] gi|210066038|gb|EEA20131.1| conserved [Penicillium marneffei ATCC 18224]
  misc_feature: Useful for introducing or modulating the production of volatile compounds
MAVNRKYADLPDLDSAPDIYETPELTDDNSTVPTTVERQSDNESDDHDEYENAISHSRLRIDQARSRFLPAQVDAHDVDFSDRLTGKRKSYRTSSRRQRASKDGAAEIGDLTDDEEGESLEKKIARLRREIQEAKEEYDHEKAAAPDAPSLQDGELATLSEALDQLHTPSEQSLSLRSRPAVSMAKPSELQTGPAELGKATYTVTYAPHYEQSHAVAKVADFDRRLALLEKAIGVSSASPELEGNGLPRAIMPTLESLQNQIMTLSEASTSSLDSISRRVRTLTQEAEQLEKSRKAAKIAQEELSAGGAPVETDDIEQVAKINALYGTLPTIESLTPLLPPLLDRLRSLRAIHADAATASETLERIEKSQSEMASDIRQWKEGLEKVEKAMDDGETAMSGNMKVVEGWVQGLEAKMAQLS

SEQ ID NO: 32346 - DNA, 1759 bp, Muscodor strobelii
  misc_feature: SGI EST ID NO. CUFF.76535.0
  misc_feature: Variant of the nucleotide sequence at SEQ ID NO 32344
ctgcatcatttcaggtcccaagctccaacgttcatgctcgcacccgttccaacaaacgaccggtgctcctgtttttctctgttagaggctctatcacaatcagaataacacagacttccttgcttccttcgcaccccatctttcaagtttcaatcatggctgtcaatcgaaaatatgcagatttgcctgacttggtaccattatacgccctatagctatccattctccagcatcgtgttgactgttcacctgcaggactcggcgcccgatatctacgaaacccctgaactcaccgatgacaactcgacagtacctaccactgtcgaaaggcagtcagacaacgagtccgacgaccacgacgagtacgaaaacgccatatcccactcgcgactacggatagaccaggcgcgttcccgttttctacctgctcaagtggatgcacacgatgtcgacttctcggaccgcttgactggcaagcgcaaatcgtaccgcacttcgagtagacgacagcgggcctccaaagacggcgccgctgagattggtgatctgaccgacgacgaagagggcgagtctcttgaaaagaagattgcacggctaaggcgcgagattcaagaagccaaggaagaatatgatcatgaaaaggccgctgcccccgatgctccatcactccaggatggagagttggcgacactaagtgaagctctcgaccagttgcatacaccatcagaacaatcgttaagccttcgatcacgtccggcagtctctatggctaagccgagcgagcttcagaccggacctgcagagcttggcaaagccacatacaccgtcacgtacgcgccccattacgagcaaagccatgcggttgcaaaggtagccgactttgatcgtcgactggccctattagaaaaggctataggggtatcttctgcgtcaccagagttggagggaaacgggctgcctcgtgccattatgcccacgctagaaagcctacagaaccaaatcatgacattatccgaagcatctacatcctcgctagacagcatcagccgcagagtgcgaaccctaacacaagaagctgagcagctcgaaaaatcaagaaaggcagccaagatagcacaagaggagttatctgctggtggtgctcctgtggaaacggacgatatcgaacaggtcgcaaagatcaatgcgctttacggcacactccctactattgagagtttaacaccacttttgccaccattattggataggctccgctcgcttcgcgctattcatgccgatgccgccaccgctagcgagactctggagcggatagaaaagtcacaaagtgagatggcctcggacatcaggcaatggaaggagggtcttgaaaaggttgaaaaggctatggacgatggcgagactgctatgtctggtaatatgaaggtcgtagaaggatgggttcaggggcttgaagcgaagatggcacagctatcttaaaacggacgactattgtggtaaatagcatgtttaggcgatttgctttcactttccttactgatacccccttactaagattatgacctcaggtagacttggaaaatgcaaaagatgcagcggtgataatagcacaatacctgactttagagcgactgatctcgacgcttcccttgctcaagttgctattgagtctgctcgccacatatgcacggtttattccgtcatgtaaaatggcatgactgcaaatctggccatgaggtacggcaaagcaatgtccgag

SEQ ID NO: 32347 - DNA, 423 bp, Muscodor strobelii
  misc_feature: SGI cDNA ID NO. 571148
  misc_feature: Encodes the peptide sequence at SEQ ID NO 32348
atgtcagacggctacgcaccccataaccagtcctgcagcggtcagtcctattatacgtgggtctgggacttcatcccatccaacaacgccacagcaactggcctctcgacatactcactaccctccaatgtctcctacaacgcgtacaatacgacagaggcctgggacgccatggagacatgctgcaataaaacagtgcaaaagctggaaggcgactgcgtgatctggtgcgaacttgacttcgaagaagacacttacccttcgtcgtttctgaggtgtctctcgagagaaccaattaacgccggcgttcgcgctgttcacaatgccacggatgcgagtgccggaaatatgatcgccagacgaccgaacttattgggtattgggatggccatgatcgtgagctcgctgctcttcacgttatag

SEQ ID NO: 32348 - protein, 140 aa, Muscodor strobelii
  misc_feature: SGI Peptide ID NO. 571148
MSDGYAPHNQSCSGQSYYTWVWDFIPSNNATATGLSTYSLPSNVSYNAYNTTEAWDAMETCCNKTVQKLEGDCVIWCELDFEEDTYPSSFLRCLSREPINAGVRAVHNATDASAGNMIARRPNLLGIGMAMIVSSLLFTL

SEQ ID NO: 32349 - DNA, 1394 bp, Muscodor strobelii
  misc_feature: SGI EST ID NO. CUFF.76538.0
  misc_feature: Variant of the nucleotide sequence at SEQ ID NO 32347
aaaaactgcagcttgtaaccatatacatcttagataatgtggcccatttcatattgaacatccagatctcactcttgcgttgcatatacttcattaacatcaatatacttactcttcgagtctcgaaacccacaactgccttgccaagagccaagactcaaccattgcctaactaaagccgtgatcttctacaatgacataaggataattccctccatacatcatacctcatccttcgcacgttacggccgctagagtcttcaattgttttatttttaacacggcaagtccgccttgatgacgatcattgctttgccataatgtatatagaactaagtagcgtacatacaaacctatctcatctcacacacttcgttcacgacctgtagaaacctaatccacagcttcatcgcacgaatagccactggcatcagcaacccttgatcgagctcttaacctccaacctagactatcaacatgtcagacggctacgcaccccataaccagtcctgcagcggtcagtcctattatacgtgggtctgggacttcatcccatccaacaacgccacagcaactggcctctcgacatactcactaccctccaatgtctcctacaacgcgtacaatacgacagaggcctgggacgccatggagacatgctgcaataaaacagtgcaaaagctggaaggcgactgcgtgatctggtgcgaacttgacttcgaagaagacacttacccttcgtcgtttctgaggtgtctctcgagagaaccaattaacgccggcgttcgcgctgttcacaatgccacggatgcgagtgccggaaatatgatcgccagacgaccgaacttattgggtattgggatggccatgatcgtgagctcgctgctcttcacgttatagttaattcctagcgcatgggacctaatacgcgtatccattgcggcaccgggctatctttcatggttggtgaacttgtggcaccaagtctgaatcttggccgtatatatcatatcagatgtacattcattagccttcgataccccaatcatcacacgattcataatttattccttaaaaccaaggttaatcatttcgccgcgaattcggccctgcacgacggtgtacaaccaaagttgtttctgagtcgggtatgacgttgctgtaaggtacggtgccggcagcatcccctgctcttaaaagttgaagaaggttaagcacttgcattgatccaagaaattttggaaatttcaaataatgtactgcgctgggtaacattcttccacgcgtccaatctaacatcgatatatcttccgcagaattatcattccgtcacaacgctaacgaggacacgacccaaccacaaactacaaaactgtagccaagctctataacac

SEQ ID NO: 32350 - DNA, 6405 bp, Muscodor strobelii
  misc_feature: SGI cDNA ID NO. 571149
  misc_feature: Encodes the peptide sequence at SEQ ID NO 32351
atgacgcgggacgatggtcgcatcagctccatcgcgagctccagcagcctccagtccaacatcaccgtcaaacctcccaccccgagccgctccgcctccacctcggcctcgtcgacgaccagacccgtccccaggcccatcaagacgggcgagaacggacgctccagaaggcagcacaaagaagatccccagatctcgcccacgtcgcccgtcggccaccgcctggctttgtctccctcgggcggctcccaatacgaccaccgccgcatgagcgatctcgccaactaccgtcgcgatctgtccgtcctcgagccctccggcggccgcctgccccagatccatcgcgatcctccagccaacagccccaatgtgccgcacaacatagcgccctggatgtccggcctcggtggccccgcggcgaaccagtcgcccaccgccttcagcaccagcttctacaacgactcgagcgacaacctgtccaccccttcgcaactgtcgcctcccttccgactcgggcctggtcgcccgggccagacccccaccaacgaattctccgacacgaccctcttcgacgacacgcggcgcccttccattgcgagcatcaccaccgcgagcagccagggctccaagaacagcagcagtagaggcggcatcaagaagctccaaggcttctttggcgaggagtttccgggccgcgatagctctgagacgagcttgcctgccaaggacgggcagcgctcatactcgtttggccgtactcgacgcgcccgcaacgattccactgctaccgccaacacaactcgagagccttcgcccacgtctgaccggcctcggacgcctgttccatcgagcgatgtcgtcccctttctgtaccaagaggccgatgacatcgccaagtatggcgaggcgcctgtgcgtagtatgctgtcgggtcccgacaaggagcggtttgctcaagcgcaaaatgaagccaaccaaaatgcatcctctcagatgtctacctcagtccggtcgaaccattcgctggtccacttgcccggtcatcaccaccgtcataacaagagcatcgaggacccgacccccttgcggcccgtgggaagtcgagatgattcgaccctaagcatcaacactatgcgagatcgaggcgggtcgacggcgacggctatgcgatcccgcgcacacagcccggctccaagcagcaacggaagtggcggcagcaggctgcactcagtggatggccaaatctcacctggtggtcacggtaaacgaggaattctggatcgattcagacggaaagggaaggatgaaggcacgaatgcacgtcagcgcaatgcgccaacctcgcgctctatagcgcattcgtcgtcgcggcaagatctaactcgggggatgccatcgtacgacaagcctctccctagtttagaaaacgagagagatcgacctagcacctcccggcaagcgactttcaacaacaaattcccatttgctgtccccaagcggtctcgtccacataagacgtacgacgacaccgatgagttcattggtccgactgacaggaacgacaaagacgccgtgtttcatcttgacaccaaccttgaaaacatggacgggattctttcccaccccattccgctctcgaccatcgatcacaccgtgttccaattttcagatcacgagtttttgccggagcccatgtcagctacgaaaccaggaggagcttggaacgctccggacagctgggccgtccggaaactcgccgaagagcgagacgcccacgctcccgaggtagaagaaatcacttctccgcaacccgaggagaagtcaccgcctcattgcattcgcatcttccgctccgatggctcttttgctacggtgctgatgccccttaattctaccgtgtccgaggtgatgcagcaagtcgttaagaagaccctggtcaccgaggggcttgaaaactaccacatcgttctcaggaagcatgatctttctcgagtactgtctagctctgagcgtccactgcagatccagaagaagctattccaacaagtgggatatgaagagaaagaccggcttgaggagatcggccgtgaggacaatgcctacctgtgccgctttctctttctgtctgcaagagacagcgagtttgcagccgctcccaatgacatgggactgggcggcaggagtgcaaagttccagcacgtcgatttatcaggccggaatctcatcacaatacctatcacgctgtattcaaagaccgctgatattatatcactgaatttgtcgcggaacctatctctggaccttccccgagatttcatccaggcctgccctcagcttcgcgacatcaagtatgctaacaacgaagctcgaaaactccctatcagcattagcagagcaaccaaactgacactacttgatgtatctaataaccgtctggaagagattgagcatgccgatcttacgcgcctgaccgggctcctcagattgacgttggccaataatggtctcatgcgtctacctcaagactttggggcattcaaatctcttcgcgtcttgaatctatcctcgaactacctcgacaaattcccgcttactctgtgcaagctggaaagtcttgttgacctcgacattagtttcaattcgattgattctgtgcctgaggagattggaaatttgaaatgtctagaaaagtttgtcatcacgaacaaccggctggctggtgtttttccagcatccacgagtcaactcgcaaaccttcgggagcttgacatcaaattcaatgcccttacctcgattgatgtgatctctacactacctaagttggaagtgttgactgccgaccacaactcaatatcgcagtttatcggaagttttgagcgcattcgcagcctgaaactgaacgccaacccgatcacgaaatttgagatcaatgctccggtcccgactctgaagactgtcaatttatctagttgtcagctcgccagtatcgacgggtcattcaacaacatggtgaatctggagcgccttgagttagatcggaactactttgtttccttacctaacacacttggcaatttaaggagactggagcatttcactatttctcataattcagtcggtgagcttcccgctgagatcggttgtctcatggagctgagaatcctggatgtgcgaggaaacaatctcaagaaacttcctatggatatatggtgggctaataagctggagacgcttaatgcctcttccaacgttcttgaaaatttccctaagccggcctcgcgtcaacctcagccgcccggggaagcgccgacggcagcttccaataccaagctatcgagtgggccactgtcccaaacttctagtacggaagatttactccctgacggatctcgtcggccgagccaggcgagtagtacgctcctcagtgtgggtccaaacccagttaacaatggcgcggatcggaaaagctctgttgtctccgtctacggcaaaggcgggcgtaagacgtctgtcgtttcgaggagcacaacggcgagcagtgtcaatggtaatgctatgcctgtgcccgcatcaaggaaagactcggggcttgcgagtcggctaactaacacatttgcgggctccttacgaaacttgattctcgcagataatcagattgatgacgatgtttttgagcaaataacactcctcggcgaattacgcactctgaatttgtcctacaatgacctcaatgacatgccccagcgatgcatcaaaagctggcctcaacttgttgaattgtacctgtctggcaacgacctcacaagcttgcctgtcgatgatctggaggaattcagcctactccaagtgcttcacatcaacaataacaagttcacaaacctccccgccgacatttctcgggcaaagaaattagctgtgctcgattgcggaaacaactcgctgaaatacaacatttcaaatgtgccgtatgactggaactggaacctcaatccaaacctgcgttatcttaacttgtcaggcaacaaacgattggagatcaaacaacacaatcatggacccgctgctcataaccgtgagcaatatacggacttcaatcgcctgcaaaacctacgtattcttggattgatggatgtaactctcacgcagcccaataccccggagcaaactgaagaccgccgcgtgaggacttcgggctcacttgcaggccacatcccatatggtatggcagatacgatgggcaggaacgagcacctgtcgaccattgatctcgtcgttccacgattcaacgcatctgacacagagatgctactcggtttgttcgatggccaagcgctttcaagcggtggctctaagatcgccaaatacctccaggagaactttgggcacattttcacaatggagctcaaagcactcaagacgcggcagaatgagggacccgcggacgccttgcggcgtgctttcctttccttgaacaaagacttggttacgctagcctttgagcatacggaaaagcgaccacacggtctacataggggatctggagcacctttggtgctgagtaaggaagacctcaattcaggaggagtagcaactattgcttacctccaggctcaagagctttatgtcgccaacataggcgatgcccaagctttgctcatccagactgacgggtcacacaagattctgacgcagaagcataacccggcagagccactggagcggcaacgcatccgtgatgcaggaggctgggtttctcgccagggcaaactgaatgacctgctgccggtctctcgtgccttcggctacgtcgatctaatgcccgccgtgacagcggctcctgatatttgtcgagtttcaattacaccacaagatgatatctttttgatcgcaactcgtgaattgtgggaagttcttcagccagcgctcgtggtggacgtcatccgatccgagcggggtgatctcatgcgcgcatcacagaggctccgagatctcgcaatgtcttacggatgtacgggtaagatcatggttatgatgatcagtgtcgctgatctcaagcggcgacaagaacgatcggcccgtttacacagagggcagagcatgtctctgtacccatcaggcgttccagatgatttccaatatccagcgaagagaggcaagaaagtgagaggtgaggtacaggactcaaatctgcaccgccttgaagctgaggttcccgcgccggttgacaagccgtcgatctgcttcactgacatcaagaattctacaaatctatgggagatgtatcctgacgccatgagggcatcaatcaaactccacaatgaagtcatgcgacggcagctccgacgaatcggtggctatgaagtcaaaacggaaggcgatgctttcatggtgtcgttccctaccgcgacatctgcactattgtggtgcttctcagtacaattggctctgctcgaggtgaattggccgtctgacgtgctgaaatcggtcacatgtcaagagatacttgacaaggacaacaatgtgatctttaagggtctatcggtacgaatgggtattcactacggtgaaccagtcgccgaggtggatcccgtgactcgccgtatggattacttcgggcccatggttaacaaggcatcgcggattaatgccgttgccgatggtgggcaaattgccgtatctgcagatttcatttctgaaattcagcgatgcttggagacatatcaggacaatgagcgcaatggctctgccggtctcgacgacacgttcgatgatgatgtgaccgcactggccattcggaaggaactgaagtcgctcacgtcccaaggattcgaggtgaaggaaatgggcgaaaggaaactcaaagggctcgagaacccggagtatgtctactcgctgtacccacacgccctcgctagtagaatcgactaccatatgcctcccgcggcagcgacgaatgaagtgtctgtcgatcagccagcacgactcgtgcctggcagctcaattggtatcgagccggagatgatttggtctctgtggaaagttagtctacgcctggagatgctctgtagctctttggaggaaatgtccggaagaggcttgcagcctcctgaaaccgaactgcttgagcgcattaagcagcgtggtggtgaagttacagatagcttcctgttcaacttcatggaacatcaagtgagccgcattgaaacttgcgtgtcaactctctctctgcggcatctcgccttgggtggcggtccaatcaaacaacttgaagacttgcgcacgccgatggcggtcatacttggtcacgtagctaaacagatggccgagcttgaaagatacaaagccagatatggccctcttgaagaaatctccgacgacgaggggagcgatacagagcaggaatga

SEQ ID NO: 32351 - protein, 2134 aa, Muscodor strobelii
  misc_feature: SGI Peptide ID NO. 571149
  misc_feature (511)..(562): Pfam Id: PF08509 Pfam Desc: Adenylate cyclase G-alpha binding domain
  misc_feature (1736)..(1933): Pfam Id: PF00211 Pfam Desc: Adenylate and Guanylate cyclase catalytic domain
  misc_feature (1421)..(1674): Pfam Id: PF00481 Pfam Desc: Protein phosphatase 2C
  misc_feature (609)..(687): Pfam Id: PF00788 Pfam Desc: Ras association (RalGDS/AF-6) domain
  misc_feature (1736)..(1894): Pfam Id: PF00211 Pfam Desc: Adenylate and Guanylate cyclase catalytic domain
  misc_feature (67)..(2134): NCBI GI: 38707444 Blast Desc: adenylate cyclase [Colletotrichum lagenarium]
  misc_feature (18)..(2127): NCBI GI: 2267008 Blast Desc: adenylate cyclase [Magnaporthe grisea]
  misc_feature (18)..(2127): NCBI GI: 39964959 Blast Desc: MGG_09898 [Magnaporthe grisea 70-15] gi|145013204|gb|EDJ97845.1| MGG_09898 [Magnaporthe grisea 70-15]
  misc_feature (18)..(2127): NCBI GI: 2318108 Blast Desc: adenylate cyclase [Magnaporthe grisea]
  misc_feature (7)..(2134): NCBI GI: 145666444 Blast Desc: adenylate cyclase [Hypocrea virens]
  misc_feature (1)..(2120): NCBI GI: 171695152 Blast Desc: protein product [Podospora anserina] gi|170947818|emb|CAP59981.1| protein product [Podospora anserina]
  misc_feature (1)..(2120): NCBI GI: 2492894 Blast Desc: CYAA_PODAN RecName: Full=Adenylate cyclase; AltName: Full=ATP pyrophosphate-lyase; AltName: Full=Adenylyl cyclase gi|1480208|gb|AAB05642.1| adenyl cyclase [Podospora anserina]
  misc_feature (289)..(2120): NCBI GI: 116182400 Blast Desc: CHGG_01828 [Chaetomium globosum CBS 148.51] gi|88186125|gb|EAQ93593.1| CHGG_01828 [Chaetomium globosum CBS 148.51]
  misc_feature (1)..(2118): NCBI GI: 103488936 Blast Desc: adenylate cyclase [Sclerotinia sclerotiorum]
  misc_feature (482)..(2120): NCBI GI: 46108704 Blast Desc: FG01234.1 [Gibberella zeae PH-1]
  misc_feature (47)..(2120): SWISSPROT Homolog: EC 4.6.1.1 Adenylate cyclase
MTRDDGRISSIASSSSLQSNITVKPPTPSRSASTSASSTTRPVPRPIKTGENGRSRRQHKEDPQISPTSPVGHRLALSPSGGSQYDHRRMSDLANYRRDLSVLEPSGGRLPQIHRDPPANSPNVPHNIAPWMSGLGGPAANQSPTAFSTSFYNDSSDNLSTPSQLSPPFRLGPGRPGQTPTNEFSDTTLFDDTRRPSIASITTASSQGSKNSSSRGGIKKLQGFFGEEFPGRDSSETSLPAKDGQRSYSFGRTRRARNDSTATANTTREPSPTSDRPRTPVPSSDVVPFLYQEADDIAKYGEAPVRSMLSGPDKERFAQAQNEANQNASSQMSTSVRSNHSLVHLPGHHHRHNKSIEDPTPLRPVGSRDDSTLSINTMRDRGGSTATAMRSRAHSPAPSSNGSGGSRLHSVDGQISPGGHGKRGILDRFRRKGKDEGTNARQRNAPTSRSIAHSSSRQDLTRGMPSYDKPLPSLENERDRPSTSRQATFNNKFPFAVPKRSRPHKTYDDTDEFIGPTDRNDKDAVFHLDTNLENMDGILSHPIPLSTIDHTVFQFSDHEFLPEPMSATKPGGAWNAPDSWAVRKLAEERDAHAPEVEEITSPQPEEKSPPHCIRIFRSDGSFATVLMPLNSTVSEVMQQVVKKTLVTEGLENYHIVLRKHDLSRVLSSSERPLQIQKKLFQQVGYEEKDRLEEIGREDNAYLCRFLFLSARDSEFAAAPNDMGLGGRSAKFQHVDLSGRNLITIPITLYSKTADIISLNLSRNLSLDLPRDFIQACPQLRDIKYANNEARKLPISISRATKLTLLDVSNNRLEEIEHADLTRLTGLLRLTLANNGLMRLPQDFGAFKSLRVLNLSSNYLDKFPLTLCKLESLVDLDISFNSIDSVPEEIGNLKCLEKFVITNNRLAGVFPASTSQLANLRELDIKFNALTSIDVISTLPKLEVLTADHNSISQFIGSFERIRSLKLNANPITKFEINAPVPTLKTVNLSSCQLASIDGSFNNMVNLERLELDRNYFVSLPNTLGNLRRLEHFTISHNSVGELPAEIGCLMELRILDVRGNNLKKLPMDIWWANKLETLNASSNVLENFPKPASRQPQPPGEAPTAASNTKLSSGPLSQTSSTEDLLPDGSRRPSQASSTLLSVGPNPVNNGADRKSSVVSVYGKGGRKTSVVSRSTTASSVNGNAMPVPASRKDSGLASRLTNTFAGSLRNLILADNQIDDDVFEQITLLGELRTLNLSYNDLNDMPQRCIKSWPQLVELYLSGNDLTSLPVDDLEEFSLLQVLHINNNKFTNLPADISRAKKLAVLDCGNNSLKYNISNVPYDWNWNLNPNLRYLNLSGNKRLEIKQHNHGPAAHNREQYTDFNRLQNLRILGLMDVTLTQPNTPEQTEDRRVRTSGSLAGHIPYGMADTMGRNEHLSTIDLVVPRFNASDTEMLLGLFDGQALSSGGSKIAKYLQENFGHIFTMELKALKTRQNEGPADALRRAFLSLNKDLVTLAFEHTEKRPHGLHRGSGAPLVLSKEDLNSGGVATIAYLQAQELYVANIGDAQALLIQTDGSHKILTQKHNPAEPLERQRIRDAGGWVSRQGKLNDLLPVSRAFGYVDLMPAVTAAPDICRVSITPQDDIFLIATRELWEVLQPALVVDVIRSERGDLMRASQRLRDLAMSYGCTGKIMVMMISVADLKRRQERSARLHRGQSMSLYPSGVPDDFQYPAKRGKKVRGEVQDSNLHRLEAEVPAPVDKPSICFTDIKNSTNLWEMYPDAMRASIKLHNEVMRRQLRRIGGYEVKTEGDAFMVSFPTATSALLWCFSVQLALLEVNWPSDVLKSVTCQEILDKDNNVIFKGLSVRMGIHYGEPVAEVDPVTRRMDYFGPMVNKASRINAVADGGQIAVSADFISEIQRCLETYQDNERNGSAGLDDTFDDDVTALAIRKELKSLTSQGFEVKEMGERKLKGLENPEYVYSLYPHALASRIDYHMPPAAATNEVSVDQPARLVPGSSIGIEPEMIWSLWKVSLRLEMLCSSLEEMSGRGLQPPETELLERIKQRGGEVTDSFLFNFMEHQVSRIETCVSTLSLRHLALGGGPIKQLEDLRTPMAVILGHVAKQMAELERYKARYGPLEEISDDEGSDTEQE

SEQ ID NO: 32352 - DNA, 7663 bp, Muscodor strobelii
  misc_feature: SGI EST ID NO. CUFF.76638.0
  misc_feature: Variant of the nucleotide sequence at SEQ ID NO 32350
gcagaggagtgctcctttggcatcttatcaccttggcatccgagtgcatccaatattgctaccgcaccgcctctcagccctcccgcatctctctacggacatcgctgtgcacctcacgtctcgctacgtctcatcatcccatattgcttcgcttcgctctgtcctcggtgccgacccatcgcccgccatctccctcgacgcgcgcccctcagctgtctctgtctcacccgctctcccgtctctgctctgtctctgtcgctgtctctgcttctgtcaatccgcagagtctcggcgtctcagcgtcttgcaccaccgacgtgtgggagaccaatgcgccgcatctcagcctctccttgctagctcgtcgcccaccacgccgcccaccacgcacctcgctgccatccccacggctctctgctgcccccgtcgttccgcctgcgaccgtctagcaatcatcagccatgactgctgctcccttgatggcgccaccccaatagactagctccgtggacggctgtgcgagtcaccatgacgcgggacgatggtcgcatcagctccatcgcgagctccagcagcctccagtccaacatcaccgtcaaacctcccaccccgagccgctccgcctccacctcggcctcgtcgacgaccagacccgtccccaggcccatcaagacgggcgagaacggacgctccaggcagcacaaagaagatccccagatctcgcccacgtcgcccgtcggccaccgcctggctttgtctccctcgggcggctcccaatacgaccaccgccgcatgagcgatctcgccaactaccgtcgcgatctgtccgtcctcgagccctccggcggccgcctgccccagatccatcgcgatcctccagccaacagccccaatgtgccgcacaacatagcgccctggatgtccggcctcggtggccccgcggcgaaccagtcgcccaccgccttcagcaccagcttctacaacgactcgagcgacaacctgtccaccccttcgcaactgtcgcctcccttccgactcgggcctggtcgcccgggccagacccccaccaacgaattctccgacacgaccctcttcgacgacacgcggcgcccttccattgcgagcatcaccaccgcgagcagccagggctccaagaacagcagcagtagaggcggcatcaagaagctccaaggcttctttggcgaggagtttccgggccgcgatagctctgagacgagcttgcctgccaaggacgggcagcgctcatactcgtttggccgtactcgacgcgcccgcaacgattccactgctaccgccaacacaactcgagagccttcgcccacgtctgaccggcctcggacgcctgttccatcgagcgatgtcgtcccctttctgtaccaagaggccgatgacatcgccaagtatggcgaggcgcctgtgcgtagtatgctgtcgggtcccgacaaggagcggtttgctcaagcgcaaaatgaagccaaccaaaatgcatcctctcagatgtctacctcagtccggtcgaaccattcgctggtccacttgcccggtcatcaccaccgtcataacaagagcatcgaggacccgacccccttgcggcccgtgggaagtcgagatgattcgaccctaagcatcaacactatgcgagatcgaggcgggtcgacggcgacggctatgcgatcccgcgcacacagcccggctccaagcagcaacggaagtggcggcagcaggctgcactcagtggatggccaaatctcacctggtggtcacggtaaacgaggaattctggatcgattcagacggaaagggaaggatgaaggcacgaatgcacgtcagcgcaatgcgccaacctcgcgctctatagcgcattcgtcgtcgcggcaagatctaactcgggggatgccatcgtacgacaagcctctccctagtttagaaaacgagagagatcgacctagcacctcccggcaagcgactttcaacaacaaattcccatttgctgtccccaagcggtctcgtccacataagacgtacgacgacaccgatgagttcattggtccgactgacaggaacgacaaagacgccgtgtttcatcttgacaccaaccttgaaaacatggacgggattctttcccaccccattccgctctcgaccatcgatcacaccgtgttccaattttcagatcacgagtttttgccggagcccatgtcagctacgaaaccaggaggagcttggaacgctccggacagctgggccgtccggaaactcgccgaagagcgagacgcccacgctcccgaggtagaagaaatcacttctccgcaacccgaggagaagtcaccgcctcattgcattcgcatcttccgctccgatggctcttttgctacggtgctgatgccccttaattctaccgtgtccgaggtgatgcagcaagtcgttaagaagaccctggtcaccgaggggcttgaaaactaccacatcgttctcaggaagcatgatctttctcgagtactgtctagctctgagcgtccactgcagatccagaagaagctattccaacaagtgggatatgaagagaaagaccggcttgaggagatcggccgtgaggacaatgcctacctgtgccgctttctctttctgtctgcaagagacagcgagtttgcagccgctcccaatgacatgggactgggcggcaggagtgcaaagttccagcacgtcgatttatcaggccggaatctcatcacaatacctatcacgctgtattcaaagaccgctgatattatatcactgaatttgtcgcggaacctatctctggaccttccccgagatttcatccaggcctgccctcagcttcgcgacatcaagtatgctaacaacgaagctcgaaaactccctatcagcattagcagagcaaccaaactgacactacttgatgtatctaataaccgtctggaagagattgagcatgccgatcttacgcgcctgaccgggctcctcagattgacgttggccaataatggtctcatgcgtctacctcaagactttggggcattcaaatctcttcgcgtcttgaatctatcctcgaactacctcgacaaattcccgcttactctgtgcaagctggaaagtcttgttgacctcgacattagtttcaattcgattgattctgtgcctgaggagattggaaatttgaaatgtctagaaaagtttgtcatcacgaacaaccggctggctggtgtttttccagcatccacgagtcaactcgcaaaccttcgggagcttgacatcaaattcaatgcccttacctcgattgatgtgatctctacactacctaagttggaagtgttgactgccgaccacaactcaatatcgcagtttatcggaagttttgagcgcattcgcagcctgaaactgaacgccaacccgatcacgaaatttgagatcaatgctccggtcccgactctgaagactgtcaatttatctagttgtcagctcgccagtatcgacgggtcattcaacaacatggtgaatctggagcgccttgagttagatcggaactactttgtttccttacctaacacacttggcaatttaaggagactggagcatttcactatttctcataattcagtcggtgagcttcccgctgagatcggttgtctcatggagctgagaatcctggatgtgcgaggaaacaatctcaagaaacttcctatggatatatggtgggctaataagctggagacgcttaatgcctcttccaacgttcttgaaaatttccctaagccggcctcgcgtcaacctcagccgcccggggaagcgccgacggcagcttccaataccaagctatcgagtgggccactgtcccaaacttctagtacggaagatttactccctgacggatctcgtcggccgagccaggcgagtagtacgctcctcagtgtgggtccaaacccagttaacaatggcgcggatcggaaaagctctgttgtctccgtctacggcaaaggcgggcgtaagacgtctgtcgtttcgaggagcacaacggcgagcagtgtcaatggtaatgctatgcctgtgcccgcatcaaggaaagactcggggcttgcgagtcggctaactaacacatttgcgggctccttacgaaacttgattctcgcagataatcagattgatgacgatgtttttgagcaaataacactcctcggcgaattacgcactctgaatttgtcctacaatgacctcaatgacatgccccagcgatgcatcaaaagctggcctcaacttgttgaattgtacctgtctggcaacgacctcacaagcttgcctgtcgatgatctggaggaattcagcctactccaagtgcttcacatcaacaataacaagttcacaaacctccccgccgacatttctcgggcaaagaaattagctgtgctcgattgcggaaacaactcgctgaaatacaacatttcaaatgtgccgtatgactggaactggaacctcaatccaaacctgcgttatcttaacttgtcaggcaacaaacgattggagatcaaacaacacaatcatggacccgctgctcataaccgtgagcaatatacggacttcaatcgcctgcaaaacctacgtattcttggattgatggatgtaactctcacgcagcccaataccccggagcaaactgaagaccgccgcgtgaggacttcgggctcacttgcaggccacatcccatatggtatggcagatacgatgggcaggaacgagcacctgtcgaccattgatctcgtcgttccacgattcaacgcatctgacacagagatgctactcggtttgttcgatggccaagcgctttcaagcggtggctctaagatcgccaaatacctccaggagaactttgggcacattttcacaatggagctcaaagcactcaagacgcggcagaatgagggacccgcggacgccttgcggcgtgctttcctttccttgaacaaagacttggttacgctagcctttgagcatacggaaaagcgaccacacggtctacataggggatctggagcacctttggtgctgagtaaggaagacctcaattcaggaggagtagcaactattgcttacctccaggctcaagagctttatgtcgccaacataggcgatgcccaagctttgctcatccagactgacgggtcacacaagattctgacgcagaagcataacccggcagagccactggagcggcaacgcatccgtgatgcaggaggctgggtttctcgccagggcaaactgaatgacctgctgccggtctctcgtgccttcggctacgtcgatctaatgcccgccgtgacagcggctcctgatatttgtcgagtttcaattacaccacaagatgatatctttttgatcgcaactcgtgaattgtgggaagttcttcagccagcgctcgtggtggacgtcatccgatccgagcggggtgatctcatgcgcgcatcacagaggctccgagatctcgcaatgtcttacggatgtacgggtaagatcatggttatgatgatcagtgtcgctgatctcaagcggcgacaagaacgatcggcccgtttacacagagggcagagcatgtctctgtacccatcaggcgttccagatgatttccaatatccagcgaagagaggcaagaaagtgagaggtgaggtacaggactcaaatctgcaccgccttgaagctgaggttcccgcgccggttgacaagccgtcgatctgcttcactgacatcaagaattctacaaatctatgggagatgtatcctgacgccatgagggcatcaatcaaactccacaatgaagtcatgcgacggcagctccgacgaatcggtggctatgaagtcaaaacggaaggcgatgctttcatggtgtcgttccctaccgcgacatctgcactattgtggtgcttctcagtacaattggctctgctcgaggtgaattggccgtctgacgtgctgaaatcggtcacatgtcaagagatacttgacaaggacaacaatgtgatctttaagggtctatcggtacgaatgggtattcactacggtgaaccagtcgccgaggtggatcccgtgactcgccgtatggattacttcgggcccatggttaacaaggcatcgcggattaatgccgttgccgatggtgggcaaattgccgtatctgcagatttcatttctgaaattcagcgatgcttggagacatatcaggacaatgagcgcaatggctctgccggtctcgacgacacgttcgatgatgatgtgaccgcactggccattcggaaggaactgaagtcgctcacgtcccaaggattcgaggtgaaggaaatgggcgaaaggaaactcaaagggctcgagaacccggagtatgtctactcgctgtacccacacgccctcgctagtagaatcgactaccatatgcctcccgcggcagcgacgaatgaagtgtctgtcgatcagccagcacgactcgtgcctggcagctcaattggtatcgagccggagatgatttggtctctgtggaaagttagtctacgcctggagatgctctgtagctctttggaggaaatgtccggaagaggcttgcagcctcctgaaaccgaactgcttgagcgcattaagcagcgtggtggtgaagttacagatagcttcctgttcaacttcatggaacatcaagtgagccgcattgaaacttgcgtgtcaactctctctctgcggcatctcgccttgggtggcggtccaatcaaacaacttgaagacttgcgcacgccgatggcggtcatacttggtcacgtagctaaacagatggccgagcttgaaagatacaaagccagatatggccctcttgaagaaatctccgacgacgaggggagcgatacagagcaggaatgagacggagcattcttaccctctgctggttcttcaactacaaccttgggtctcatacaagttcgacaccgccttcaacctttataatccacctccttcgcccctataaacaatagcctaaaaagggcttatagttatagtataactctatcacagtaatgtgtcacgaccatatcaattaacgactacgaggggcgttgtgttttctcttgctttttggaatggtgtggaaaatgggatgtctggaaataagttcccaggacttaaaaaaaacctttgttcttgtataggttggtttttctctctggcggttccaacaactagtcttggatacctctgaatgctggacatggagttcgaggtgctttgctcttacgcgtatcgatgtattccaacgccgcaaacggagttgggggtgctacagcgacccctctgggtttcttctttatcacctgtacctacctactcatgtgtctaacgtgaccagtcaatatcgttataatgagacaggctcgaattatgaccttacattaggtagctggtcaagtttatcagcatcgataacgctggatgaaattttgatacttgagtgttcaatagagttgatgatcttctcacgtgcatgtaacgtgttatcggagaagaggtatactcgctagaaagattcatagcggcaatgattttgggagagtcacaatatctcaatgctccttagacataccacaccacaaacgca

SEQ ID NO: 32353 - DNA, 6402 bp, Muscodor strobelii
  misc_feature: SGI cDNA ID NO. 571150
  misc_feature: Reduced expression when VOC is produced
  misc_feature: Encodes the peptide sequence at SEQ ID NO 32354
atgacgcgggacgatggtcgcatcagctccatcgcgagctccagcagcctccagtccaacatcaccgtcaaacctcccaccccgagccgctccgcctccacctcggcctcgtcgacgaccagacccgtccccaggcccatcaagacgggcgagaacggacgctccaggcagcacaaagaagatccccagatctcgcccacgtcgcccgtcggccaccgcctggctttgtctccctcgggcggctcccaatacgaccaccgccgcatgagcgatctcgccaactaccgtcgcgatctgtccgtcctcgagccctccggcggccgcctgccccagatccatcgcgatcctccagccaacagccccaatgtgccgcacaacatagcgccctggatgtccggcctcggtggccccgcggcgaaccagtcgcccaccgccttcagcaccagcttctacaacgactcgagcgacaacctgtccaccccttcgcaactgtcgcctcccttccgactcgggcctggtcgcccgggccagacccccaccaacgaattctccgacacgaccctcttcgacgacacgcggcgcccttccattgcgagcatcaccaccgcgagcagccagggctccaagaacagcagcagtagaggcggcatcaagaagctccaaggcttctttggcgaggagtttccgggccgcgatagctctgagacgagcttgcctgccaaggacgggcagcgctcatactcgtttggccgtactcgacgcgcccgcaacgattccactgctaccgccaacacaactcgagagccttcgcccacgtctgaccggcctcggacgcctgttccatcgagcgatgtcgtcccctttctgtaccaagaggccgatgacatcgccaagtatggcgaggcgcctgtgcgtagtatgctgtcgggtcccgacaaggagcggtttgctcaagcgcaaaatgaagccaaccaaaatgcatcctctcagatgtctacctcagtccggtcgaaccattcgctggtccacttgcccggtcatcaccaccgtcataacaagagcatcgaggacccgacccccttgcggcccgtgggaagtcgagatgattcgaccctaagcatcaacactatgcgagatcgaggcgggtcgacggcgacggctatgcgatcccgcgcacacagcccggctccaagcagcaacggaagtggcggcagcaggctgcactcagtggatggccaaatctcacctggtggtcacggtaaacgaggaattctggatcgattcagacggaaagggaaggatgaaggcacgaatgcacgtcagcgcaatgcgccaacctcgcgctctatagcgcattcgtcgtcgcggcaagatctaactcgggggatgccatcgtacgacaagcctctccctagtttagaaaacgagagagatcgacctagcacctcccggcaagcgactttcaacaacaaattcccatttgctgtccccaagcggtctcgtccacataagacgtacgacgacaccgatgagttcattggtccgactgacaggaacgacaaagacgccgtgtttcatcttgacaccaaccttgaaaacatggacgggattctttcccaccccattccgctctcgaccatcgatcacaccgtgttccaattttcagatcacgagtttttgccggagcccatgtcagctacgaaaccaggaggagcttggaacgctccggacagctgggccgtccggaaactcgccgaagagcgagacgcccacgctcccgaggtagaagaaatcacttctccgcaacccgaggagaagtcaccgcctcattgcattcgcatcttccgctccgatggctcttttgctacggtgctgatgccccttaattctaccgtgtccgaggtgatgcagcaagtcgttaagaagaccctggtcaccgaggggcttgaaaactaccacatcgttctcaggaagcatgatctttctcgagtactgtctagctctgagcgtccactgcagatccagaagaagctattccaacaagtgggatatgaagagaaagaccggcttgaggagatcggccgtgaggacaatgcctacctgtgccgctttctctttctgtctgcaagagacagcgagtttgcagccgctcccaatgacatgggactgggcggcaggagtgcaaagttccagcacgtcgatttatcaggccggaatctcatcacaatacctatcacgctgtattcaaagaccgctgatattatatcactgaatttgtcgcggaacctatctctggaccttccccgagatttcatccaggcctgccctcagcttcgcgacatcaagtatgctaacaacgaagctcgaaaactccctatcagcattagcagagcaaccaaactgacactacttgatgtatctaataaccgtctggaagagattgagcatgccgatcttacgcgcctgaccgggctcctcagattgacgttggccaataatggtctcatgcgtctacctcaagactttggggcattcaaatctcttcgcgtcttgaatctatcctcgaactacctcgacaaattcccgcttactctgtgcaagctggaaagtcttgttgacctcgacattagtttcaattcgattgattctgtgcctgaggagattggaaatttgaaatgtctagaaaagtttgtcatcacgaacaaccggctggctggtgtttttccagcatccacgagtcaactcgcaaaccttcgggagcttgacatcaaattcaatgcccttacctcgattgatgtgatctctacactacctaagttggaagtgttgactgccgaccacaactcaatatcgcagtttatcggaagttttgagcgcattcgcagcctgaaactgaacgccaacccgatcacgaaatttgagatcaatgctccggtcccgactctgaagactgtcaatttatctagttgtcagctcgccagtatcgacgggtcattcaacaacatggtgaatctggagcgccttgagttagatcggaactactttgtttccttacctaacacacttggcaatttaaggagactggagcatttcactatttctcataattcagtcggtgagcttcccgctgagatcggttgtctcatggagctgagaatcctggatgtgcgaggaaacaatctcaagaaacttcctatggatatatggtgggctaataagctggagacgcttaatgcctcttccaacgttcttgaaaatttccctaagccggcctcgcgtcaacctcagccgcccggggaagcgccgacggcagcttccaataccaagctatcgagtgggccactgtcccaaacttctagtacggaagatttactccctgacggatctcgtcggccgagccaggcgagtagtacgctcctcagtgtgggtccaaacccagttaacaatggcgcggatcggaaaagctctgttgtctccgtctacggcaaaggcgggcgtaagacgtctgtcgtttcgaggagcacaacggcgagcagtgtcaatggtaatgctatgcctgtgcccgcatcaaggaaagactcggggcttgcgagtcggctaactaacacatttgcgggctccttacgaaacttgattctcgcagataatcagattgatgacgatgtttttgagcaaataacactcctcggcgaattacgcactctgaatttgtcctacaatgacctcaatgacatgccccagcgatgcatcaaaagctggcctcaacttgttgaattgtacctgtctggcaacgacctcacaagcttgcctgtcgatgatctggaggaattcagcctactccaagtgcttcacatcaacaataacaagttcacaaacctccccgccgacatttctcgggcaaagaaattagctgtgctcgattgcggaaacaactcgctgaaatacaacatttcaaatgtgccgtatgactggaactggaacctcaatccaaacctgcgttatcttaacttgtcaggcaacaaacgattggagatcaaacaacacaatcatggacccgctgctcataaccgtgagcaatatacggacttcaatcgcctgcaaaacctacgtattcttggattgatggatgtaactctcacgcagcccaataccccggagcaaactgaagaccgccgcgtgaggacttcgggctcacttgcaggccacatcccatatggtatggcagatacgatgggcaggaacgagcacctgtcgaccattgatctcgtcgttccacgattcaacgcatctgacacagagatgctactcggtttgttcgatggccaagcgctttcaagcggtggctctaagatcgccaaatacctccaggagaactttgggcacattttcacaatggagctcaaagcactcaagacgcggcagaatgagggacccgcggacgccttgcggcgtgctttcctttccttgaacaaagacttggttacgctagcctttgagcatacggaaaagcgaccacacggtctacataggggatctggagcacctttggtgctgagtaaggaagacctcaattcaggaggagtagcaactattgcttacctccaggctcaagagctttatgtcgccaacataggcgatgcccaagctttgctcatccagactgacgggtcacacaagattctgacgcagaagcataacccggcagagccactggagcggcaacgcatccgtgatgcaggaggctgggtttctcgccagggcaaactgaatgacctgctgccggtctctcgtgccttcggctacgtcgatctaatgcccgccgtgacagcggctcctgatatttgtcgagtttcaattacaccacaagatgatatctttttgatcgcaactcgtgaattgtgggaagttcttcagccagcgctcgtggtggacgtcatccgatccgagcggggtgatctcatgcgcgcatcacagaggctccgagatctcgcaatgtcttacggatgtacgggtaagatcatggttatgatgatcagtgtcgctgatctcaagcggcgacaagaacgatcggcccgtttacacagagggcagagcatgtctctgtacccatcaggcgttccagatgatttccaatatccagcgaagagaggcaagaaagtgagaggtgaggtacaggactcaaatctgcaccgccttgaagctgaggttcccgcgccggttgacaagccgtcgatctgcttcactgacatcaagaattctacaaatctatgggagatgtatcctgacgccatgagggcatcaatcaaactccacaatgaagtcatgcgacggcagctccgacgaatcggtggctatgaagtcaaaacggaaggcgatgctttcatggtgtcgttccctaccgcgacatctgcactattgtggtgcttctcagtacaattggctctgctcgaggtgaattggccgtctgacgtgctgaaatcggtcacatgtcaagagatacttgacaaggacaacaatgtgatctttaagggtctatcggtacgaatgggtattcactacggtgaaccagtcgccgaggtggatcccgtgactcgccgtatggattacttcgggcccatggttaacaaggcatcgcggattaatgccgttgccgatggtgggcaaattgccgtatctgcagatttcatttctgaaattcagcgatgcttggagacatatcaggacaatgagcgcaatggctctgccggtctcgacgacacgttcgatgatgatgtgaccgcactggccattcggaaggaactgaagtcgctcacgtcccaaggattcgaggtgaaggaaatgggcgaaaggaaactcaaagggctcgagaacccggagtatgtctactcgctgtacccacacgccctcgctagtagaatcgactaccatatgcctcccgcggcagcgacgaatgaagtgtctgtcgatcagccagcacgactcgtgcctggcagctcaattggtatcgagccggagatgatttggtctctgtggaaagttagtctacgcctggagatgctctgtagctctttggaggaaatgtccggaagaggcttgcagcctcctgaaaccgaactgcttgagcgcattaagcagcgtggtggtgaagttacagatagcttcctgttcaacttcatggaacatcaagtgagccgcattgaaacttgcgtgtcaactctctctctgcggcatctcgccttgggtggcggtccaatcaaacaacttgaagacttgcgcacgccgatggcggtcatacttggtcacgtagctaaacagatggccgagcttgaaagatacaaagccagatatggccctcttgaagaaatctccgacgacgaggggagcgatacagagcaggaatga

SEQ ID NO: 32354 - protein, 2133 aa, Muscodor strobelii
  misc_feature: SGI Peptide ID NO. 571150
  misc_feature (510)..(561): Pfam Id: PF08509 Pfam Desc: Adenylate cyclase G-alpha binding domain
  misc_feature (1735)..(1932): Pfam Id: PF00211 Pfam Desc: Adenylate and Guanylate cyclase catalytic domain
  misc_feature (1420)..(1673): Pfam Id: PF00481 Pfam Desc: Protein phosphatase 2C
  misc_feature (608)..(686): Pfam Id: PF00788 Pfam Desc: Ras association (RalGDS/AF-6) domain
  misc_feature (1735)..(1893): Pfam Id: PF00211 Pfam Desc: Adenylate and Guanylate cyclase catalytic domain
  misc_feature (66)..(2133): NCBI GI: 38707444 Blast Desc: adenylate cyclase [Colletotrichum lagenarium]
  misc_feature (18)..(2126): NCBI GI: 2267008 Blast Desc: adenylate cyclase [Magnaporthe grisea]
  misc_feature (18)..(2126): NCBI GI: 39964959 Blast Desc: MGG_09898 [Magnaporthe grisea 70-15] gi|145013204|gb|EDJ97845.1| MGG_09898 [Magnaporthe grisea 70-15]
  misc_feature (18)..(2126): NCBI GI: 2318108 Blast Desc: adenylate cyclase [Magnaporthe grisea]
  misc_feature (7)..(2133): NCBI GI: 145666444 Blast Desc: adenylate cyclase [Hypocrea virens]
  misc_feature (1)..(2119): NCBI GI: 171695152 Blast Desc: protein product [Podospora anserina] gi|170947818|emb|CAP59981.1| protein product [Podospora anserina]
  misc_feature (1)..(2119): NCBI GI: 2492894 Blast Desc: CYAA_PODAN RecName: Full=Adenylate cyclase; AltName: Full=ATP pyrophosphate-lyase; AltName: Full=Adenylyl cyclase gi|1480208|gb|AAB05642.1| adenyl cyclase [Podospora anserina]
  misc_feature (288)..(2119): NCBI GI: 116182400 Blast Desc: CHGG_01828 [Chaetomium globosum CBS 148.51] gi|88186125|gb|EAQ93593.1| CHGG_01828 [Chaetomium globosum CBS 148.51]
  misc_feature (1)..(2117): NCBI GI: 103488936 Blast Desc: adenylate cyclase [Sclerotinia sclerotiorum]
  misc_feature (481)..(2119): NCBI GI: 46108704 Blast Desc: FG01234.1 [Gibberella zeae PH-1]
  misc_feature (47)..(2119): SWISSPROT Homolog: EC 4.6.1.1 Adenylate cyclase
  misc_feature: Useful for introducing or modulating the production of volatile compounds
MTRDDGRISSIASSSSLQSNITVKPPTPSRSASTSASSTTRPVPRPIKTGENGRSRQHKEDPQISPTSPVGHRLALSPSGGSQYDHRRMSDLANYRRDLSVLEPSGGRLPQIHRDPPANSPNVPHNIAPWMSGLGGPAANQSPTAFSTSFYNDSSDNLSTPSQLSPPFRLGPGRPGQTPTNEFSDTTLFDDTRRPSIASITTASSQGSKNSSSRGGIKKLQGFFGEEFPGRDSSETSLPAKDGQRSYSFGRTRRARNDSTATANTTREPSPTSDRPRTPVPSSDVVPFLYQEADDIAKYGEAPVRSMLSGPDKERFAQAQNEANQNASSQMSTSVRSNHSLVHLPGHHHRHNKSIEDPTPLRPVGSRDDSTLSINTMRDRGGSTATAMRSRAHSPAPSSNGSGGSRLHSVDGQISPGGHGKRGILDRFRRKGKDEGTNARQRNAPTSRSIAHSSSRQDLTRGMPSYDKPLPSLENERDRPSTSRQATFNNKFPFAVPKRSRPHKTYDDTDEFIGPTDRNDKDAVFHLDTNLENMDGILSHPIPLSTIDHTVFQFSDHEFLPEPMSATKPGGAWNAPDSWAVRKLAEERDAHAPEVEEITSPQPEEKSPPHCIRIFRSDGSFATVLMPLNSTVSEVMQQVVKKTLVTEGLENYHIVLRKHDLSRVLSSSERPLQIQKKLFQQVGYEEKDRLEEIGREDNAYLCRFLFLSARDSEFAAAPNDMGLGGRSAKFQHVDLSGRNLITIPITLYSKTADIISLNLSRNLSLDLPRDFIQACPQLRDIKYANNEARKLPISISRATKLTLLDVSNNRLEEIEHADLTRLTGLLRLTLANNGLMRLPQDFGAFKSLRVLNLSSNYLDKFPLTLCKLESLVDLDISFNSIDSVPEEIGNLKCLEKFVITNNRLAGVFPASTSQLANLRELDIKFNALTSIDVISTLPKLEVLTADHNSISQFIGSFERIRSLKLNANPITKFEINAPVPTLKTVNLSSCQLASIDGSFNNMVNLERLELDRNYFVSLPNTLGNLRRLEHFTISHNSVGELPAEIGCLMELRILDVRGNNLKKLPMDIWWANKLETLNASSNVLENFPKPASRQPQPPGEAPTAASNTKLSSGPLSQTSSTEDLLPDGSRRPSQASSTLLSVGPNPVNNGADRKSSVVSVYGKGGRKTSVVSRSTTASSVNGNAMPVPASRKDSGLASRLTNTFAGSLRNLILADNQIDDDVFEQITLLGELRTLNLSYNDLNDMPQRCIKSWPQLVELYLSGNDLTSLPVDDLEEFSLLQVLHINNNKFTNLPADISRAKKLAVLDCGNNSLKYNISNVPYDWNWNLNPNLRYLNLSGNKRLEIKQHNHGPAAHNREQYTDFNRLQNLRILGLMDVTLTQPNTPEQTEDRRVRTSGSLAGHIPYGMADTMGRNEHLSTIDLVVPRFNASDTEMLLGLFDGQALSSGGSKIAKYLQENFGHIFTMELKALKTRQNEGPADALRRAFLSLNKDLVTLAFEHTEKRPHGLHRGSGAPLVLSKEDLNSGGVATIAYLQAQELYVANIGDAQALLIQTDGSHKILTQKHNPAEPLERQRIRDAGGWVSRQGKLNDLLPVSRAFGYVDLMPAVTAAPDICRVSITPQDDIFLIATRELWEVLQPALVVDVIRSERGDLMRASQRLRDLAMSYGCTGKIMVMMISVADLKRRQERSARLHRGQSMSLYPSGVPDDFQYPAKRGKKVRGEVQDSNLHRLEAEVPAPVDKPSICFTDIKNSTNLWEMYPDAMRASIKLHNEVMRRQLRRIGGYEVKTEGDAFMVSFPTATSALLWCFSVQLALLEVNWPSDVLKSVTCQEILDKDNNVIFKGLSVRMGIHYGEPVAEVDPVTRRMDYFGPMVNKASRINAVADGGQIAVSADFISEIQRCLETYQDNERNGSAGLDDTFDDDVTALAIRKELKSLTSQGFEVKEMGERKLKGLENPEYVYSLYPHALASRIDYHMPPAAATNEVSVDQPARLVPGSSIGIEPEMIWSLWKVSLRLEMLCSSLEEMSGRGLQPPETELLERIKQRGGEVTDSFLFNFMEHQVSRIETCVSTLSLRHLALGGGPIKQLEDLRTPMAVILGHVAKQMAELERYKARYGPLEEISDDEGSDTEQE

SEQ ID NO: 32355 - DNA, 7663 bp, Muscodor strobelii; identical to SEQ ID NO: 32352
  misc_feature: SGI EST ID NO. CUFF.76638.0
  misc_feature: Variant of the nucleotide sequence at SEQ ID NO 32353

SEQ ID NO: 32356 - DNA, 1083 bp, Muscodor strobelii
  misc_feature: SGI cDNA ID NO. 571151
  misc_feature: Reduced expression when VOC is produced
  misc_feature: Encodes the peptide sequence at SEQ ID NO 32357
atggtcgaagaggacgctccgattgacatgacacccccgaggcgctccaaatcaggttccaagaaaggcatatcgggtctctttggtggcctgatgtcttcaaacccccgacctgacgtccgtcccgaaccccgccgccgaagcacttaccatacaactgatgatgaaatcagaccggacaaaagggcaagacacgctcgagaaagtggtaatatagaggccgaaacagagacggatcgtgaagcccgccgtgccgcgcgacgagcaaggaaggagcaggaacgtgacgatgattcgcgacgtaccaaagacgaagcccgtcgtgagaggcgcaaacgccaagaagaggacgatgaagcccggcgccaagaagcacgggaggccagaagggcagaacgccgagccgcccgtgagcttgaagctcaacgcatcgcgaccgaagaggtagacgccaaggaagcagagagagcggaacgtcgtcgtcttcgtaggcttgagaaggaagcagctggtgctgatgccgatgcagaagcgcgtcgggctgctcgcgcagagcgacgagcctcccgacaggtagacgcccctgaaaatgacgaggaccgtaggcgcaggcgagaagccagacgagccgagaaagaaagcaatagacggtccatgccgatgccgatggatgattacttctctccgcgcgaaagatcatcaagacatacagatgatgaacgtagtaaaaagaagaaacggccagcttggcctcattccggtactagctcgtgggtgaaggaaacctccgatgcgggtcctcctcctgatgatgagcatgtcactggtgccccgccagccacagatgacgacgaggcgcgccgcgctgctcgaagggcagctcgtcgtcgggagaagtacggcgagatggacgaagagatggaaaacgaccagcgacggaggcgtgctcgccgtgaagagcgcgaacgtcgcgaacgtcggcacggtggctcggacggcagcggagacaaagcccagcgagaatctgtttttatggatacaacacctcggagcagctggtggaagaagctcacaggagcgtag

SEQ ID NO: 32357 - protein, 360 aa, Muscodor strobelii
  misc_feature: SGI Peptide ID NO. 571151
  misc_feature: Useful for introducing or modulating the production of volatile compounds
MVEEDAPIDMTPPRRSKSGSKKGISGLFGGLMSSNPRPDVRPEPRRRSTYHTTDDEIRPDKRARHARESGNIEAETETDREARRAARRARKEQERDDDSRRTKDEARRERRKRQEEDDEARRQEAREARRAERRAARELEAQRIATEEVDAKEAERAERRRLRRLEKEAAGADADAEARRAARAERRASRQVDAPENDEDRRRRREARRAEKESNRRSMPMPMDDYFSPRERSSRHTDDERSKKKKRPAWPHSGTSSWVKETSDAGPPPDDEHVTGAPPATDDDEARRAARRAARRREKYGEMDEEMENDQRRRRARREERERRERRHGGSDGSGDKAQRESVFMDTTPRSSWWKKLTGA

SEQ ID NO: 32358 - DNA, 8782 bp, Muscodor strobelii
  misc_feature: SGI EST ID NO. CUFF.76768.0
  misc_feature: Variant of the nucleotide sequence at SEQ ID NO 32356
attggcgcgagaccaaccagaaaacaaagctgcgcacaaggagaacgagagcaatcgaaaggacacggagaagacacggagaacagcagcattgcctgttggtttattcgcttgcataggcgatcgaagtcattatcgagattgagcacggttctgcgagatagattggcgatacgacacttcattcgtgccctggatatcgaccgtcgccatacacaggccgcccctccgaccgtgtactgtacctgctgcaccacgctgcaaagagtttgcattggctaccacttgggccaatcccctttctccttgtccgtaatgttgtagcaggcgacagatttttgattctttctattacattgttttgactacttgcgatatctccccattcttacgcatgtgcgggacacgcaggctggagagggagctgtggatcgcatatgccgacaaacctttcaaacgagcagaatccattacagcacccgaatactcattcgattcctctcaattcgacccgacccgcatcgagactttgccatcacttctacatagccgattcgacacccgacatccacagcttcattgaacgatactactgcgtccatggttttcactgccgctgacgttccgtcgagctcccatctgctagaatggctgccgccgccgttacgggcttcaccggcctaagcggcataggtagcgtagccgccaagtcaacgagcttccaattcgtagtttggaccccgcggtggtgcgaacttgacctcgactcccaactgcaacacattgcacgcctgtggtgcgtgcagaggtggcaggtgagtcgcttcatttgccttcgatcatcggccatgatgggctgcgtagtccgatagctactactggtgggctggagcaattatctccacatgtggtctttcctacgagaaaaggctatcatggatgatatagattatggggaaatcgtgcttgtagaatatgccaatgtgctctacgctaagtactaacatgctaatttacgcttgtgttaaaattttagaatcgcagtcaagtctcccgatcccacgaccgcttcgtacgaaaacccctaatcttacccaactccaatcccaaaaattcgaggtcacccccgaactgtcatgaacaggaccccggtgattttcaagatccgattgactacactcgtgtgggtgggaacgcccagcggagagtcgaaaccccattcggaacacacgactgcccttcgttgccgtcaggcacgcaagggaggcgtcgtaaagaacaagacaccctgttcagcgactttataccagaatcttcatgtgacctgtcttcacaggagggatttattcatcacgcgaagaagaaaaagaaacccgctgcagctgcaccctccaacaacaacgaaccggaaaagaaagacgacggcggtgccggcgatggagggggtggtaatggaagcccggacggcgacgccggccaaaccggaggtgacggcgcaggaaacggcgacggtgacgataagaagggcggcggcgatgatccgagtttcggcgatgattggggcacctttgctgacgttggcaagaaaaagaagaaagggaaggacgagaaagccgaggatgctcccaaattcgacgcctttcaagaaatcaaattggatgatacaggcccttctctggatctcaattttggtactagtgcagcagacaccaagccgagttcgtttggtacgtggggatccagctggaatactggctcaacgtgggactggtctggaaataaagcagctgacaaacccgaagacaaggaggaaaagaaagacgaagttgccgacaatccctggagtattaaccggccgaaacctaagaagaagaccaataccaccttcagtttcggtggcttcgacggcgaggaagacaaacccgaggaaaagaaagacgacgattttggctttggatttgcctcggccaagaaggacaaacaggacaagaagagtatttggggagatataggcaccgaagcaacgaaaaccgattcgcaggtggatgacacatggggaacctggggggctgcatctaagaagaaaggcaaaacatcagagccacccaaacaagaaaacacttggggcgacgatggttggggcctttcgagtaagaccaagaagaaacctgttgaagaagtcaaatcacccgaaccagaatccgctgcagcagatgatggcggctggggctggggaacatcgaccaagaaagacaaaaaaggtaagttggacgaaccgaagccagaaccggacggcaacaaaaaggaggaagacgatttctgggggaccatttcgtcttccaagagtaaaaagaaagcagaacccgaacccgagccaaaggccgaggaggattcatggggtgttttcggaagcaagaagaagaaaacacccgacaagaaatcagacgatgactgggcaaattggggctcgggaacgaaaaaggaacctgaacctgaaacaaaggaggaggttgacttcatgacctttggtgcttccaaaccggacaagaagaaaaagaagaaggctggagtggtagacgaccctccgaaggaaccggatccaccactagtggaagagaataaggtggaagatgacttctggtcctcactcggcatttcaaagactgacaagaagaaaaaggaaccagaattcatcccggaccccgaacctgaacctgaacccgtcgcggaagagcgcagcggggcttggagcttttggggggccactaagaaacctaccaagaaggtaccacctccggagccagcccctgtggtcgagaacactggtgacgactggatgaactggggcaagaagaaaaagggtaagactccttcagcattgagagggaatgatcaagtcttccctcgcacctaaaacagacggggacttcaaattttcagacctgatcacactggcggtggtcaaggggtttttcgtggtatcctgagcggaaagcgagattctgggaattgaagtgctaacctctcggtgtgatactagattcaatcatcgaagtgccaaagaacaacgatgatggttggggttggggtagctcgaaaaacgcattgaaatctccgcctcccgccccgacaccaccttctctggatatagaagaaccgatccaagaggacaatatctgggatgatccatcaccgactggccaagatgatgaagcagcagcagctctagccgcagctatagcagccgaagaagaggaactggctgttttgagtgtcaagaacaagaagaagaaacttaagggcaaggacaagactcgtttcgatgaactaacagtcaacgccgctaatcgagccgccgaggctaaagcgaaagcagcagccgaagcggaggccgaagcacaacgagaagcagaggagaaagctgccgccgaagctcttgccgctcttgaggctgaacagaaagctgcagctgatgccgacgctgctgcccagattgcagccgaagaggtagaactcgagaccttaaaagccaaactcgaaaagaaaggaaaaagttcacgaaaaatgatcggtccaggctcgatgaactaacggcaaaagccgaagtccgtgccgcgaatgctgctattgctgccgctgtgacggtcgagaatactgatcccgatgacgacgacgctttgattgcggccctggaagcagaggtagcagcagatgaaaagcaagtagcggaagccgctgaagcagaagcagcagcagccgccgaagccgaaatcgctgccgaagagtcggagatcgcggcgctcgaggcgaagtggcagaaaaagaagaagctatccacgaaggatcaaggaaggcttgacgaactcaaggcaaaggccgaggcacgtgctgctgcaatggttgcggaacctattactgaggacctcatggatgatttaggagtacatgatactgccgccgccgaagctatcgaggccaccgaagccgctgaggctttggctgccgaagaaaaggctgctgtcgatgccgaaattgaggccgaagaatttgagatcgctgcgctcgaggcgaagtaccagaaaaagaagaagctgtcggggaatgatcgggcaagactcgatgaactcaaggctaaagctgaggctcgtaaagccgccgcggtaatggagtccgttagtgaagatctcattgatggcttaggatctgaagatcctgccgctgcggatgccgctgctgctgatgctgccgaggccgaagagagagctgccgcagacgccgccgcaattgaagctgagattgctgccgaagaggcagagatcgaccaactgaaggctaagttggcgaaaaggaagaaattgactaaaaatgatcaagctcgactcgacgagctcctagctaaagccgaagctcgcgcaacagcaacggccgccgtcgccgccgcaccgggtggcgaatatctgattgatggactagacactcctgacactgccgaagcagacgctgccgtcgcgagtgccgaagcagaggacaaagcagcagcggaggcagcggaggcaacagccgcccttgaggccgagattgctgcagaagcgttcgagatcgactctttgaaggctaagttcgccaagaaaaagagttaaccaagaacgatcaggcaaggctcgacgaactcttagccaaggctgacgcccgtgcagcagcagcagcagcagcggagcacaacggagaagatctcatcgacgaattagagacccaaaatgcaccagcagccgaattcgtggaggctgaagaaactgccgtcacaccagtcgagacggaggaccaagctcccgaagacgcagcggcactcgaggctgaaatcgccgctgaaaacgccgagatagaggctttgaagacaaagttcgaaaagaagaagaaaaaatggaataaaatggaccaggcgaggctggatgagttaacggcaaaagcagacgctcgtgctgctagcgcagaggccgagattgctgcggctcgtgctgcagcagaggccgaagaacaagctgctcgcgaagcagaagaggctgctgctgccgccgcggcgttagaagcagaggaaaaggccgctgccgaggccgccgcattggaagaagagattgccgccgaaagcttggagatcgaacagttgaaaactaagttcgaaaagaagaagaaaaagtggacgaagaacgaccaagggaggttagacgagctcgtagcaagagccgaagcccgtgccgcggctacagggccgggcgacagcgatggagatgccgcggccgaggcagaagcactagcagcccgcgaagctgaggaggcggcaatgcgtgaggccgacgaacaagctgcacgggaggctgaggaacaggctgagcgtgatcgaaaagaagccgaagaggctgccgcagcggctgcaactgtcaagaagaagtcaaagaagagttccaaggccgcacgtgaagcggaagaagcagcagcgcgcgaggcggaagaagctgcggcacaagcagctgcagaagcagtccgcgaggccgaagagaaggccgaacgtgaacgcaaggaggcggaagaagctgaagccgaggctgctttggcggcagcgtctaagaaaaaatcaaaaaagagttccagagctgctcgtgaggctgaagaacaagcggcacgagaggccgaagaagcagcagcagcgcaagcagcgcgcgaagctgaggagcaggccgagcgagaccgtcaagatgcagaggcggcagcagcagcagaagccgaggcagaagccgcggcagcttctaagaagaagtccaagaagagctccaaaagcgaagagaagaagtccaaatccagcagcaaagacaagagagaggtcgttgtgcctgtccctatcgttcccgacggcgacgatctagatctcgagcatgttgacttgacagctgagcaggcggacgagatcctttcgggcctagcacctcccaagaagcccaaagcgaacgacgctttctcattctggggtgccaagcccagctccaaagagtcgttccccgaagcggtaagcacctctaaccccagctcaagccccaaaccccagctgtgctcggtagcagcaaccgaaattagtggtgctgactcaggccaggttctggaagatgccatcgtcgccgaggatgcgccacctgcttccagggccattacggacgatgtgatgccgaagaagaagtccaagagcagtaagctcgctgagagactcaagaaatttgaggcgccagtccaggacgatctcgatggcgatttgatcgatgtgctgcctgctgcacctgcgcccccgccaccgcccgaagttctgtccgataactccaggtcgaagcgggataagggacttcttccaggcagctttcccatggatgacgactttctcgaagacaacctcgacgacttcgatgatccagacgagataattgaaatcgtcgacatggcaccaccaccacccgtcgagaaaaaatcaaagaagagcaagaagagcaagtccaaagaagaggatctgcctcccgttccaccaccggttcctccgccgccacctgcggtgcctgacgctcctccgatggtacctgatgccccaccaactcctccgccagatgtcaagtcttcctcgcgaaaagagcgtgccaaaatcagtcgcgacggtggtgcctcctggggtaaatggtcaacttcggcttcgccacagaaggaggagaaaaagccgtccaagtctagatcagaagagaagagatccagaagggagagagaagaaaaaatctcctctaagggctctgcttcggacaaagcagagcaacatgagatgaaggctacgccgcttcctaagtcgcgcatgaacagtctatttcaaagcacgccgcctatctcgcgctccatgtcaacacgagacaaacgcggttctagcaagcctagctcgcgccgacagtcagttgatttgagtatgagtggtggtctcgtgtcgcctccgcccgaggaaatgccagagatgtcttcgaaagcggctcggctgcttggggttgatagaggccggagtaggcggagttcaaaaattcaacctgtcgccgatgatgaagacatcgtcatggtgggagctggggacttgccaccagggcccagcaggtcggcccggaaaagatcgaaacagcccaagacagatgaggacatcgtcatggtcgaagaggacgctccgattgacatgacacccccgaggcgctccaaatcaggttccaagaaaggcatatcgggtctctttggtggcctgatgtcttcaaacccccgacctgacgtccgtcccgaaccccgccgccgaagcacttaccatacaactgatgatgaaatcagaccggacaaaagggcaagacacgctcgagaaagtggtaatatagaggccgaaacagagacggatcgtgaagcccgccgtgccgcgcgacgagcaaggaaggagcaggaacgtgacgatgattcgcgacgtaccaaagacgaagcccgtcgtgagaggcgcaaacgccaagaagaggacgatgaagcccggcgccaagaagcacgggaggccagaagggcagaacgccgagccgcccgtgagcttgaagctcaacgcatcgcgaccgaagaggtagacgccaaggaagcagagagagcggaacgtcgtcgtcttcgtaggcttgagaaggaagcagctggtgctgatgccgatgcagaagcgcgtcgggctgctcgcgcagagcgacgagcctcccgacaggtagacgcccctgaaaatgacgaggaccgtaggcgcaggcgagaagccagacgagccgagaaagaaagcaatagacggtccatgccgatgccgatggatgattacttctctccgcgcgaaagatcatcaagacatacagatgatgaacgtagtaaaaagaagaaacggccagcttggcctcattccggtactagctcgtgggtgaaggaaacctccgatgcgggtcctcctcctgatgatgagcatgtcactggtgccccgccagccacagatgacgacgaggcgcgccgcgctgctcgaagggcagctcgtcgtcgggagaagtacggcgagatggacgaagagatggaaaacgaccagcgacggaggcgtgctcgccgtgaagagcgcgaacgtcgcgaacgtcggcacggtggctcggacggcagcggagacaaagcccagcgagaatctgtttttatggatacaacacctcggagcagctggtggaagaagctcacaggagcgtagactttatttgcgccatgatcatgtaaagtttccttctgtacagtctcgtgtcattctaggaaagtgaaagatcgctggtttgaacgtgttgctatttgggggctcgcgactgcatcatatatacccttggaaatgctttttggcgtaacgtcgaggtgtggcacattattattttttacctcgatctgggcgtggatttccttggttgtctgtaacggaagcgtgcttgtgcgtttatgtcataataaatggctgtatgatttacgcgttgtgacgtggcaaggacacagaagaaccattttcacggcaatgggtgtgctggatctacccaccaccagtcaggtataggtccccgggtggaggagtgttgtcatattgtgaatggtgctaccgtaggatgcgaaatatacccccattgctttacacaagccaattaaatgaaactgttcgaacctatgaatatttatagatcggttaaaccacgtg

SEQ ID NO: 32359 - DNA, 438 bp, Muscodor strobelii
  misc_feature: SGI cDNA ID NO. 571152
  misc_feature: Encodes the peptide sequence at SEQ ID NO 32360
atgaaccaattcacacgatctctggcgtctagaggtgtgcttgcaccctcaagaatatcgcaacaattcgccaaacgctatacctcccagcagacacctcgccctcccctctcacatggcggaaacaacaggccaataatcattggcctcgtcgctgcagtcccagttctagcctactacatcatggcaccctcaagcacacaagccaatgccgagcccatagcctttcgaggagacccggactccgacccagccgcgcgcaagcgggagagagtcgcacaggaagctgatggtcctaagtatatccatcccgagacggagcatcccgaggactataagccagcgtttggtcaactgcataagaagaagagggttgatggacccccagatgatcgcaatcatcagtctatgcaggataggcagaggcggcatgattga

SEQ ID NO: 32360 - protein, 145 aa, Muscodor strobelii
  misc_feature: SGI Peptide ID NO. 571152
MNQFTRSLASRGVLAPSRISQQFAKRYTSQQTPRPPLSHGGNNRPIIIGLVAAVPVLAYYIMAPSSTQANAEPIAFRGDPDSDPAARKRERVAQEADGPKYIHPETEHPEDYKPAFGQLHKKKRVDGPPDDRNHQSMQDRQRRHD

SEQ ID NO: 32361 - DNA, 171 bp, Muscodor strobelii
  misc_feature: SGI EST ID NO. CUFF.76569.0
  misc_feature: Variant of the nucleotide sequence at SEQ ID NO 32359
caatgaaccaattcacacgatctctggcgtctagaggtgtgcttgcaccctcaagaatatcgcaacaattcgccaaacgctatacctcccagcagacacctcgccctcccctctcacatggcggaaacaacaggccaataatcattggcctcgtcgctgcagtcccagttc

SEQ ID NO: 32362 - DNA, 1083 bp, Muscodor strobelii
  misc_feature: SGI cDNA ID NO. 571153
  misc_feature: Reduced expression when VOC is produced
  misc_feature: Encodes the peptide sequence at SEQ ID NO 32363
atggcgaccggtaaagctattgtcatcgaggacaagggcgttggtgttatcaaggatcttcctctgcccaaattggacgatgacaagctactagtcaaggtcaaggccgtcggcttgaaccccactgactggaagagccttcactcgatcggcacgtatgccggctctgcggagcgggtcggctcccgtcttggctgtgactatgccggcgaggttatcgaagtaggaaaggatgtcaagggcaactggaagaagggtgataggatctctggatgggtgtttggcgcattcgccaaccgccctgacaatggagcatacggggattatctagttgcaacagagcacgttgcgctcaaaaccccagctaatgttaccgacgaggaggccgcaacttttggcgtctcggtcacgacagtcggacagggcatgtataagagcctaaaactcccgtcacctaccaatccctccaaaaccgctttccccatcttgatctacggcggaagcacagcaacaggaatctacggcatcaagtacgcgaaagcgtcaggcctttcggttatcgctacatcttcgcctcacaatttcgaactcttgaagtctattggcgcagatcatgtcttcgactacaagtcacctacagtgggggccgacattcgggctctgacagagaacaagctgaagtacgcatgggactgcacgggactcggtggcgcaatctgctccgcggctctcagcgataacgaggaaggaggcaaacctcagcttggcacgatcatgggcatcgagcgggagaccatcgataaagtcaaccctattgttgaaggtcctctattcacgcttggatacgacgctttcggtgttagttataaccgctttggcactccgtatgaagcgaacaaggaggaggtcgagttcgcgagggacttctggggactatcacagaaattgttcgaggagggaaagcttacgccgctcaaacccgaggttaataggggaggaaagggacttgaaggtgtgttggttggtcttgacgagctgagacaagacaaagttagcggagggaagttggtatatactatctaa

SEQ ID NO: 32363 - protein, 360 aa, Muscodor strobelii
  misc_feature: SGI Peptide ID NO. 571153
  misc_feature (27)..(120): Pfam Id: PF08240 Pfam Desc: Alcohol dehydrogenase GroES-like domain
  misc_feature (155)..(307): Pfam Id: PF00107 Pfam Desc: Zinc-binding dehydrogenase
  misc_feature (162)..(234): Pfam Id: PF00107 Pfam Desc: Zinc-binding dehydrogenase
  misc_feature (1)..(360): NCBI GI: 242812056 Blast Desc: alcohol dehydrogenase, [Talaromyces stipitatus ATCC 10500] gi|218714219|gb|EED13642.1| alcohol dehydrogenase, [Talaromyces stipitatus ATCC 10500]
  misc_feature (1)..(360): NCBI GI: 261357510 Blast Desc: TOXD [Verticillium albo-atrum VaMs.102]
  misc_feature (6)..(360): NCBI GI: 238034194 Blast Desc: Alcohol dehydrogenase [Pichia pastoris]
  misc_feature (2)..(360): NCBI GI: 39940216 Blast Desc: MGG_05132 [Magnaporthe grisea 70-15] gi|145010612|gb|EDJ95268.1| MGG_05132 [Magnaporthe grisea 70-15]
  misc_feature (6)..(360): NCBI GI: 116196872 Blast Desc: CHGG_05034 [Chaetomium globosum CBS 148.51] gi|88180947|gb|EAQ88415.1| CHGG_05034 [Chaetomium globosum CBS 148.51]
  misc_feature (1)..(360): NCBI GI: 154323390 Blast Desc: BC1G_00094 [Botryotinia fuckeliana B05.10] gi|150842323|gb|EDN17516.1| BC1G_00094 [Botryotinia fuckeliana B05.10]
  misc_feature (1)..(360): NCBI GI: 119471203 Blast Desc: zinc-binding oxidoreductase ToxD, [Neosartorya fischeri NRRL 181] gi|119406290|gb|EAW16241.1| zinc-binding oxidoreductase ToxD, [Neosartorya fischeri NRRL 181]
  misc_feature (1)..(360): NCBI GI: 156057887 Blast Desc: SS1G_04675 [Sclerotinia sclerotiorum 1980] gi|154702460|gb|EDO02199.1| SS1G_04675 [Sclerotinia sclerotiorum 1980]
  misc_feature (16)..(360): NCBI GI: 145246886 Blast Desc: An12g06300 [Aspergillus niger] gi|134080415|emb|CAK41165.1| protein product [Aspergillus niger]
  misc_feature (1)..(360): NCBI GI: 159124470 Blast Desc: zinc-binding oxidoreductase ToxD, [Aspergillus fumigatus A1163]
  misc_feature: Useful for introducing or modulating the production of volatile compounds
MATGKAIVIEDKGVGVIKDLPLPKLDDDKLLVKVKAVGLNPTDWKSLHSIGTYAGSAERVGSRLGCDYAGEVIEVGKDVKGNWKKGDRISGWVFGAFANRPDNGAYGDYLVATEHVALKTPANVTDEEAATFGVSVTTVGQGMYKSLKLPSPTNPSKTAFPILIYGGSTATGIYGIKYAKASGLSVIATSSPHNFELLKSIGADHVFDYKSPTVGADIRALTENKLKYAWDCTGLGGAICSAALSDNEEGGKPQLGTIMGIERETIDKVNPIVEGPLFTLGYDAFGVSYNRFGTPYEANKEEVEFARDFWGLSQKLFEEGKLTPLKPEVNRGGKGLEGVLVGLDELRQDKVSGGKLVYTI

SEQ ID NO: 32364 - DNA, 5187 bp, Muscodor strobelii
  misc_feature: SGI EST ID NO. CUFF.76843.0
  misc_feature: Variant of the nucleotide sequence at SEQ ID NO 32362
gctaattcgaaggtgcgaggtatcaaatggtgaagccccacggcccctcattgcttgtccgtaccttcttctcgcagtcgcactctatcacacttaaggtaatcatagcttgaccaagtgcgcaattgccaacattccgtgtaatttctgtgacttgtccgcctgtctgtcagtgtgccctgtcagtgccttccattgtcaccgctggtgcttttcgtcggctgcagtacattgcgacgaccactgtactgctcagacgacatactgccgctatcttcccaaatcccctaatttacatagtcccctctctgcccccctccctcgcccccatcgtcgtccctcttgcgccagacaacatacctaacgtccctcacctcgcagctgctcaacgctcctcatctcgcgcgcgctgccaattccagcgcgctccctggccatagcttcgtgcatcgcaaccggcgtctcgtcgtgtgctgctggacctgtctcatctcggaagatcccagttgcgctggcgcttgtcggttggtcgggtgcgacacttcagtcgtcagactctcagcacagccccctctgatctcgacaccgccaccctgccaggcagacggcgctcactgtcgaacgacactacttgtgcactcactcgcacacgctgcgacgcactcgcgcacacacgcaccctcgagcaagggctcaagtcaacctcgcgcgacatagccggcatttctaaagacagcatcatcatcctcccgccgccagccccgccagtcgcacccaagtcgcacccctccaagggcccagcatggatcagtcccagtccacgccggcgcgcggccgatcctcttccgcccatcgccagtctgatataagaaatgcgcactcgccttcgcctcatccctaccattccccagacgccaacatcggtctcggcctcggtctcgatccgtcaactgccgcaacccagtacaccaccacctccttcgacggctacgggcctaacaccgccaacgactacttgaactcgtcacagccccaggtctactcccagcagcagcagcctgtcgccgacaccattcccttcgatccgagcaacgactttacccagtcccagcccgcctactcccagggcctgatcactcccgacttcgccaaccccggcgccgactttgccctcttccccccgactacacaggccgatcagttcaaccccgcgcctctgttcggcgacatagcccagaacaacagcgccgtgctcaacccgaacgacctcgccaacatgaactcttcacagccacatcactcgcccaccccaccgcacatgctgaagccggagcccggctcgacatcgcagtcgccttccttcagccagcaccagttctcttctccaccaaggaaccattccaggcatgtctcgttgactcctgaggccgctctgctccccggccaaggagattggacacagcaacagttccaagggcatcgcagaacgccctcggattactcagatgtgtcgtccaacgccgcctcgccaaacttaataggacaagacggattcgaccattctgaacatggccactcgcccatgcagcggccccaggacaatttctacgaaggtgtaatgggcttaaacaactttagcatttccgaccccaaccacaacagccggagcccatcgcacagtccacacatatctccgcgcatcgtgccccagcaactttcagatgggagtcagtccatgctgctcaacacgacgtatccaaacccgccgaccgtgaactacatgcagtcggaagtgttccccacgttatcacaggagagctccatggagcagcccatgcctcagggaatggcaccgccctcgatcaacatcgactttgccccccctaatatcaaacaaaatgctttcgagcccccacgcccgccgatggacgacagctccttaacaccgccggaaagaggacggcctgcctctaggcggagagctgcgactgattcagtctatagcaacggcgccggttcgcgctcctccacacctggcggtctctcaccgcatctgggcgcggatctagcaaaccgtagtcgctctggatctgagtcctctggaagatcgctgtctcctatgtctccaggtaacagatcaggtagtgcaaatgccgcttctcggagacgagtttctatgggctcggtccccaacaacgtaatggctctccgactagccgatcctgagtatcaagcggcacaggacaatgggaatacaaaacgagtacagaagcatccggcaactttccaatgtaccctgtgcccaaagaggttcacccgcgcctacaatcttcgttctcatctgcggactcacactgatgagagaccctttgtttgtaccgtttgcggcaaagcattcgctcgacagcatgaccggaaacgccatgaaggtcttcattcgggcgagaagaagtttgtttgcaagggcgacctgaaggccggcggctcatggggttgtgggcgacggtttgctcgagccgatgccctgggtcgccatttccgatctgaagcagggaggatatgtattaagccactcctggatgaggaaatgattgaaagacaacgcatttggcaagagcaacatatgcaaatggccgcgcagaacatggcgcagcaccaggctatgatggaccctggtgtgtaccctgggatggaacctgcgggtgcctttggcctgcctgctgcgctactggcgcaatatcctgctctcgcacagatgaattggggcccgaatgacatgggccctgtcgaggatgatatcagtggccgatcgagtttcgatgcgtctgattatgacgaaggagacgagaccggctacgtatcagggccagggacgggttttggagagggcgggggtcaacagaattttggtgaaatgggctatgccagtgactatggcggccgttgagccaagctggctgttttccgttatactataacttgatgactactagtggcgttcctttggatgaggctttgggatgagtgaaacgaggcgttcatgattggacttatacaaagagattaagtatttgtttcttgcttacggaagttaaggcttagagggccatttagataccattcaaacttatgtagaatcacgatttactgaatatccaacatacttgcgcgtttgagacttatgcatagtatgtgatgtcttattttgatacgggctattgagactcattagcattattttttccgatgttatgaacagccgttagttgtcaagatagttatcaattcgtgtaattgttgatagcacaaatcggaatatatttcctccttagtcaaagtcatagctatgagttgaaaccttctatagtccaccatgtcgtgtgcagaatgctgaataagcccgctttaaaatccgatagagtccaatctaacaaccgctgagctgcgcatattgtaaccatttctaatcagattttgcctaatgggatcgcgtatgtgctttcacaacgaggcatcgcaggacgagggcaatacagcgacatttagcgcaccaaatctccgcagctttataatggatgtttacctggtcacgccatagcctccactttggcggccgccgccatgtaatatatagattgaccttcataacgcatgatttcgtcatagaaattctaaaccagcacgttcctcacgttattctagacgctaatttcgaagtcctttaaaatcatatcccttccggaacaaacatggcgaccggtaaagctattgtcatcgaggacaagggcgttggtgttatcaaggatcttcctctgcccaaattggacgatgacaagctactagtcaaggtcaaggccgtcggcttgaaccccactgactggaagagccttcactcgatcggcacgtatgccggctctgcggagcgggtcggctcccgtcttggctgtgactatgccggcgaggttatcgaagtaggaaaggatgtcaagggcaactggaagaagggtgataggatctctggatgggtgtttggcgcgtaagttttttactcggaaatgaaagttgtttcgagtcctcctttcatagcatgacatcggattctacagcattaagtagccttgcccgaagccattgttgctaaccaatctcatagattcgccaaccgccctgacaatggagcatacggggattatctagttgcaacagagcacgttgcgctcaaaaccccagctaatgttaccgacgaggaggccgcaacttttggcgtctcggtcacgacagtcggacagggcatgtataagagcctaaaactcccgtcacctaccaatccctccaaaaccgctttccccatcttgatctacggcggaagcacagcaacaggaatctacggcatcaagtacgcgaaagcgtcaggcctttcggttatcgctacatcttcgcctcacaatttcgaactcttgaagtctattggcgcagatcatgtcttcgactacaagtcacctacagtgggggccgacattcgggctctgacagagaacaagctgaagtacgcatgggactgcacgggactcggtggcgcaatctgctccgcggctctcagcgataacgaggaaggaggcaaacctcagcttggcacgatcatgggcatcgagcgggagaccatcgataaagtcaaccctattgttgaaggtcctctattcacgcttggatacgacgctttcggtgttagttataaccgctttggcactccgtatgaagcgaacaaggaggaggtcgagttcgcgagggacttctggggactatcacagaaattgttcgaggagggaaagcttacgccgctcaaacccgaggttaataggggaggaaagggacttgaaggtgtgttggttggtcttgacgagctgagacaagacaaagttagcggagggaagttggtatatactatctaatactactgacaagatgggatgagacgagagacggggagaagatagatacattatcgtatccttgtactagttcctgtgctctgatcatgggaaccatttgatggccgcaagtccaaatcagtttgagatgcaaaaagttgaactacacatgagaaactattctctatatacaggacaatacgttcgtctgttacctaacaaaagagaaagagcataaacgtataatttatcactgtat

SEQ ID NO: 32365 - DNA, 2145 bp, Muscodor strobelii
  misc_feature: SGI cDNA ID NO. 571154
  misc_feature: Encodes the peptide sequence at SEQ ID NO 32366
atggatcagtcccagtccacgccggcgcgcggccgatcctcttccgcccatcgccagtctgatataagaaatgcgcactcgccttcgcctcatccctaccattccccagacgccaacatcggtctcggcctcggtctcgatccgtcaactgccgcaacccagtacaccaccacctccttcgacggctacgggcctaacaccgccaacgactacttgaactcgtcacagccccaggtctactcccagcagcagcagcctgtcgccgacaccattcccttcgatccgagcaacgactttacccagtcccagcccgcctactcccagggcctgatcactcccgacttcgccaaccccggcgccgactttgccctcttccccccgactacacaggccgatcagttcaaccccgcgcctctgttcggcgacatagcccagaacaacagcgccgtgctcaacccgaacgacctcgccaacatgaactcttcacagccacatcactcgcccaccccaccgcacatgctgaagccggagcccggctcgacatcgcagtcgccttccttcagccagcaccagttctcttctccaccaaggaaccattccaggcatgtctcgttgactcctgaggccgctctgctccccggccaaggagattggacacagcaacagttccaagggcatcgcagaacgccctcggattactcagatgtgtcgtccaacgccgcctcgccaaacttaataggacaagacggattcgaccattctgaacatggccactcgcccatgcagcggccccaggacaatttctacgaaggtgtaatgggcttaaacaactttagcatttccgaccccaaccacaacagccggagcccatcgcacagtccacacatatctccgcgcatcgtgccccagcaactttcagatgggagtcagtccatgctgctcaacacgacgtatccaaacccgccgaccgtgaactacatgcagtcggaagtgttccccacgttatcacaggagagctccatggagcagcccatgcctcagggaatggcaccgccctcgatcaacatcgactttgccccccctaatatcaaacaaaatgctttcgagcccccacgcccgccgatggacgacagctccttaacaccgccggaaagaggacggcctgcctctaggcggagagctgcgactgattcagtctatagcaacggcgccggttcgcgctcctccacacctggcggtctctcaccgcatctgggcgcggatctagcaaaccgtagtcgctctggatctgagtcctctggaagatcgctgtctcctatgtctccaggtaacagatcaggtagtgcaaatgccgcttctcggagacgagtttctatgggctcggtccccaacaacgtaatggctctccgactagccgatcctgagtatcaagcggcacaggacaatgggaatacaaaacgagtacagaagcatccggcaactttccaatgtaccctgtgcccaaagaggttcacccgcgcctacaatcttcgttctcatctgcggactcacactgatgagagaccctttgtttgtaccgtttgcggcaaagcattcgctcgacagcatgaccggaaacgccatgaaggtcttcattcgggcgagaagaagtttgtttgcaagggcgacctgaaggccggcggctcatggggttgtgggcgacggtttgctcgagccgatgccctgggtcgccatttccgatctgaagcagggaggatatgtattaagccactcctggatgaggaaatgattgaaagacaacgcatttggcaagagcaacatatgcaaatggccgcgcagaacatggcgcagcaccaggctatgatggaccctggtgtgtaccctgggatggaacctgcgggtgcctttggcctgcctgctgcgctactggcgcaatatcctgctctcgcacagatgaattggggcccgaatgacatgggccctgtcgaggatgatatcagtggccgatcgagtttcgatgcgtctgattatgacgaaggagacgagaccggctacgtatcagggccagggacgggttttggagagggcgggggtcaacagaattttggtgaaatgggctatgccagtgactatggcggccgttga

SEQ ID NO: 32366 - protein, 714 aa, Muscodor strobelii
  misc_feature: SGI Peptide ID NO. 571154
  misc_feature (495)..(517): Pfam Id: PF00096 Pfam Desc: Zinc finger, C2H2 type
  misc_feature (523)..(545): Pfam Id: PF00096 Pfam Desc: Zinc finger, C2H2 type
  misc_feature (10)..(714): NCBI GI: 256734306 Blast Desc: NECHADRAFT_65383 [Nectria haematococca mpVI 77-13-4]
  misc_feature (1)..(685): NCBI GI: 46108918 Blast Desc: FG01341.1 [Gibberella zeae PH-1]
  misc_feature (1)..(714): NCBI GI: 116196870 Blast Desc: CHGG_05033 [Chaetomium globosum CBS 148.51] gi|88180946|gb|EAQ88414.1| CHGG_05033 [Chaetomium globosum CBS 148.51]
  misc_feature (1)..(714): NCBI GI: 171676980 Blast Desc: protein product [Podospora anserina] gi|170936557|emb|CAP61217.1| protein product [Podospora anserina]
  misc_feature (25)..(714): NCBI GI: 39940214 Blast Desc: MGG_05133 [Magnaporthe grisea 70-15] gi|145010611|gb|EDJ95267.1| MGG_05133 [Magnaporthe grisea 70-15]
  misc_feature (10)..(714): NCBI GI: 154323388 Blast Desc: BC1G_00093 [Botryotinia fuckeliana B05.10] gi|150842322|gb|EDN17515.1| BC1G_00093 [Botryotinia fuckeliana B05.10]
  misc_feature (1)..(714): NCBI GI: 85106049 Blast Desc: NCU07952 [Neurospora crassa OR74A] gi|28923680|gb|EAA32849.1| conserved [Neurospora crassa OR74A]
  misc_feature (41)..(714): NCBI GI: 156057889 Blast Desc: SS1G_04676 [Sclerotinia sclerotiorum 1980] gi|154702461|gb|EDO02200.1| SS1G_04676 [Sclerotinia sclerotiorum 1980]
  misc_feature (352)..(714): NCBI GI: 261357511 Blast Desc: oocyte zinc finger protein XlCOF20 [Verticillium albo-atrum VaMs.102]
  misc_feature (151)..(696): NCBI GI: 239610871 Blast Desc: C2H2 type zinc finger domain-containing protein [Ajellomyces dermatitidis ER-3]
MDQSQSTPARGRSSSAHRQSDIRNAHSPSPHPYHSPDANIGLGLGLDPSTAATQYTTTSFDGYGPNTANDYLNSSQPQVYSQQQQPVADTIPFDPSNDFTQSQPAYSQGLITPDFANPGADFALFPPTTQADQFNPAPLFGDIAQNNSAVLNPNDLANMNSSQPHHSPTPPHMLKPEPGSTSQSPSFSQHQFSSPPRNHSRHVSLTPEAALLPGQGDWTQQQFQGHRRTPSDYSDVSSNAASPNLIGQDGFDHSEHGHSPMQRPQDNFYEGVMGLNNFSISDPNHNSRSPSHSPHISPRIVPQQLSDGSQSMLLNTTYPNPPTVNYMQSEVFPTLSQESSMEQPMPQGMAPPSINIDFAPPNIKQNAFEPPRPPMDDSSLTPPERGRPASRRRAATDSVYSNGAGSRSSTPGGLSPHLGADLANRSRSGSESSGRSLSPMSPGNRSGSANAASRRRVSMGSVPNNVMALRLADPEYQAAQDNGNTKRVQKHPATFQCTLCPKRFTRAYNLRSHLRTHTDERPFVCTVCGKAFARQHDRKRHEGLHSGEKKFVCKGDLKAGGSWGCGRRFARADALGRHFRSEAGRICIKPLLDEEMIERQRIWQEQHMQMAAQNMAQHQAMMDPGVYPGMEPAGAFGLPAALLAQYPALAQMNWGPNDMGPVEDDISGRSSFDASDYDEGDETGYVSGPGTGFGEGGGQQNFGEMGYASDYGGR

SEQ ID NO: 32367 - DNA, 5187 bp, Muscodor strobelii; identical to SEQ ID NO: 32364
  misc_feature: SGI EST ID NO. CUFF.76843.0
  misc_feature: Variant of the nucleotide sequence at SEQ ID NO 32365

SEQ ID NO: 32368 - DNA, 390 bp, Muscodor strobelii
  misc_feature: SGI cDNA ID NO. 571155
  misc_feature: Encodes the peptide sequence at SEQ ID NO 32369
atgatgttctcaattcaagccggtgcgtggctcaccctgatgggcagctatctagtccatggttggggttggaacgcaacgatttacagtgagcccaattgcaagggtagctattactccgtctatccacaggtcgaacacaccaaatacttcgagatggatacctcctccggcgacgacatgacgtgccaatatcatggcgtcaataattccaccgggaattgcaccagacagttcaagatagcaaaatcggtcaagggccatggtggcctatgcagcagtttcccagagttttggtcacagggtacgccagagaggcaagagcacgacgaccagtgcatcacgccggacttcgacatcctatctgtcacctgttataacccacagtag

SEQ ID NO: 32369 - protein, 129 aa, Muscodor strobelii
  misc_feature: SGI Peptide ID NO. 571155
MMFSIQAGAWLTLMGSYLVHGWGWNATIYSEPNCKGSYYSVYPQVEHTKYFEMDTSSGDDMTCQYHGVNNSTGNCTRQFKIAKSVKGHGGLCSSFPEFWSQGTPERQEHDDQCITPDFDILSVTCYNPQ

SEQ ID NO: 32370 - DNA, 1968 bp, Muscodor strobelii
  misc_feature: SGI EST ID NO. CUFF.76579.0
  misc_feature: Variant of the nucleotide sequence at SEQ ID NO 32368
tgtagatcaagatcatcaggggaattaaacatataagcatcagcggaagtgcgtcacttgaagctagatctagcctctgcaactcattttcacgattgacgacggacgctcgaaatgatgttctcaattcaagccggtgcgtggctcaccctgatgggcagctatctagtccatggttggggttggaacgcaacgatttacagtgagcccaattgcaagggtagctattactccgtctatccacaggtcgaacacaccaaatacttcgagatggatacctcctccggcgacgacatgacgtgccaatatcatggcgtcaataattccaccgggaattgcaccagacagttcaagatagcaaaatcggtcaagggccatggtggcctatgcagcagtttcccagagttttggtcacagggtacgccagagaggcaagagcacgacgaccagtgcatcacgccggacttcgacatcctatctgtcacctgttataacccacagtagaggatagctagactgtctgagcaatgaatctatttgagtggttagtaataaacgccaatttcaagttagctgaaatcttcagccatgagaatagacgtttgcgagtatcctatggatatttacaagtgaggataacgcgaatgaatcaaagcactgttcgaactgtataaaccactactgtaaggtatgagaggaggtcgaatgggcacagatttcgaataacgaataacacactatgaatatatatgtataaatgcactgtctcgggccttgtatttatgaggacatctggcttcattggatatatctcctagagtcaggctgctccagaataaacatagtaaacatcgcaataaactgcaaggtgtgtatgtttcgttgctttgagcacctattggtgaagtcgatatggccaagtcgtgagaaccacgggctccgaggcagatagctctatgtcccattcctggctaccatattgggtatgttgtattatctcttttcgacgtcaaattatataattaatcgatgtcccgtcctatgtaaagcaccattcaccgcttttcctcctgtcagggtttcggagtgatttgaatgctaatttatgactcagtatcacgctgatcgaaggctctgcgccttgaaacaacgaggcatttgcttgatttccattgaatcatgctttttggtatatgcaacacgatgcacaatggggatgaggctgaatttgacatgtagtatgccaaatatgcaacatttataaggcggttaattcaacaagggtagttttgcgatggaactcgcagtgtgatcattactggttggtaggtaacaggtagctttgcatgtgtggcagtgaggccgtcgttgacgcgtcgtacacgaattatatcgtacaggctaattcgagtcgaacatctatctgcacagactatcgaagtcccgtcgcatatgaagtggcgccgaacccgcgatcactgagcggtgaacgaggactgttttaagtggacgcctgcgttagctgcatctgactttgcataccaaatttcgcgtggcagagtctaagtattactgaggctgccgggcttcgagaagaaacctagaagatgatgttcgatatgcatatgtatgatcgacaatgccgttgatctgtgacgttatctcgtgattccatatgcttgccgagttgcttctgtcttttaccaatttgtatggtactcgctcgtacagcacagccccgtccgaatcgtcgcagagatgcaagggtcggtaggcgcttggtaatttggctgccagacaacacatgtaaatgcacataatggctttcgaacgaccgtgtaataataagttgcttgaagaggacataatcactccgaagcgaagacgacttgataatgatcataacgtgtgtaggtatatcattttttactgattgggaatcatagagacatagatggaagatgggtg

SEQ ID NO: 32371 - DNA, 972 bp, Muscodor strobelii
  misc_feature: SGI cDNA ID NO. 571156
  misc_feature: Encodes the peptide sequence at SEQ ID NO 32372
atgcctactctcaaggttgatccacaatggacagcgcttctcccggcgctggccgcaaggcctcgtcccgactacgagaccgttcatggacttcgtacggcaaacgaaggcgggataagtggcttgaactcgacgatcccaacgcctgatggtattactgagaccaagcataccattcagtctattgacggagacagcattgacgtctaccaaatttcaccagcggtagagaagcccgagcctggtcctcagcgtgccgtggtctacgcctttggtggcggcatggtatccggaagcgtcaagttgtggagcaatgttatcaagaatgcagcgaaagcgatggaaacgcagttttttgctgttgactatcgcttggctccagaacaccctggctttgctgcaatcgaggattgctactcaactgtaaaatggctgcaatccaaagccgcagatttcaacgttgaccctaagcggattgtattgtatggtcattctgcgggcggcctcgtctgtgctggaacaagtctgatggcgcgggacaagggattgcagtatcctctagctgcagttgcgctgatctatccgatgttggacgaccggacttttatcaccgacgaccaccccatgaatcagtacttggtttgggcgatgaaagccaataaatttgcatgggaagcattattggggaaccctagagaaaaacgtacagatgagaatgtgcccatatatgccgctccagcgagagctaaagttgcagatctcagcggacttccagaccactatattgatgtgggtggtctcgatcttttcgcgaaggaagacatcgcatacgcttcaaaattggcggaggcggaagtgaatgtcgaattccacttatatcctggtgttcctcatggcttcgatgggtttcccacgttagaagtcgcaggcctcgccgttgcaaaccaagttaggttcatcaagagttattaa

SEQ ID NO: 32372 - protein, 323 aa, Muscodor strobelii
  misc_feature: SGI Peptide ID NO. 571156
  misc_feature (87)..(302): Pfam Id: PF07859 Pfam Desc: alpha/beta hydrolase fold
  misc_feature (4)..(323): NCBI GI: 256723044 Blast Desc: NECHADRAFT_42631 [Nectria haematococca mpVI 77-13-4]
  misc_feature (1)..(306): NCBI GI: 256724238 Blast Desc: NECHADRAFT_87517 [Nectria haematococca mpVI 77-13-4]
  misc_feature (1)..(321): NCBI GI: 46115000 Blast Desc: FG03342.1 [Gibberella zeae PH-1]
  misc_feature (5)..(322): NCBI GI: 85091131 Blast Desc: NCU09409 [Neurospora crassa OR74A] gi|28920135|gb|EAA29516.1| conserved [Neurospora crassa OR74A]
  misc_feature (3)..(321): NCBI GI: 261354448 Blast Desc: alpha/beta hydrolase fold-3 domain-containing protein [Verticillium albo-atrum VaMs.102]
  misc_feature (1)..(323): NCBI GI: 256720381 Blast Desc: NECHADRAFT_56005 [Nectria haematococca mpVI 77-13-4]
  misc_feature (49)..(323): NCBI GI: 145601891 Blast Desc: MGG_10755 [Magnaporthe grisea 70-15] gi|145010357|gb|EDJ95013.1| MGG_10755 [Magnaporthe grisea 70-15]
  misc_feature (49)..(323): NCBI GI: 110628925 Blast Desc: hormone-sensitive lipase [Magnaporthe grisea]
  misc_feature (1)..(322): NCBI GI: 71001912 Blast Desc: arylesterase/monoxygenase [Aspergillus fumigatus Af293] gi|66853275|gb|EAL93599.1| arylesterase/monoxygenase [Aspergillus fumigatus Af293] gi|159129694|gb|EDP54808.1| A1163]
  misc_feature (21)..(322): NCBI GI: 115384184 Blast Desc: [Aspergillus terreus NIH2624] gi|114196331|gb|EAU38031.1| [Aspergillus terreus NIH2624]
  misc_feature (48)..(320): SWISSPROT Homolog: EC 3.1.1.3 Triacylglycerol lipase
MPTLKVDPQWTALLPALAARPRPDYETVHGLRTANEGGISGLNSTIPTPDGITETKHTIQSIDGDSIDVYQISPAVEKPEPGPQRAVVYAFGGGMVSGSVKLWSNVIKNAAKAMETQFFAVDYRLAPEHPGFAAIEDCYSTVKWLQSKAADFNVDPKRIVLYGHSAGGLVCAGTSLMARDKGLQYPLAAVALIYPMLDDRTFITDDHPMNQYLVWAMKANKFAWEALLGNPREKRTDENVPIYAAPARAKVADLSGLPDHYIDVGGLDLFAKEDIAYASKLAEAEVNVEFHLYPGVPHGFDGFPTLEVAGLAVANQVRFIKSY

SEQ ID NO: 32373 - DNA, 1516 bp, Muscodor strobelii
  misc_feature: SGI EST ID NO. CUFF.76582.0
  misc_feature: Variant of the nucleotide sequence at SEQ ID NO 32371
ccgcgaactaaatatcatctgacgatgaacttgggcacagttggtcagcccacatcgcgtgtgggatgcggaatgcgagggagagctaaatacaacggcccagcatacatacctacctagatagcgtagtacagtataaaagggcactatctctctccaccacccctccccggcgaccctggatatactcacccgacttgttattttaagaaacgcattcccgatcgccagtttaccagctgggcagcgcgctcctcctctttgtggctttgcagattcacaatttggattaaaatgcctactctcaaggttgatccacaatggacagcgcttctcccggcgctggccgcaaggcctcgtcccgactacgagaccgttcatggacttcgtacggcaaacgaaggcgggataagtggcttgaactcgacgatcccaacgcctgatggtattactgagaccaagcataccattcagtctattgacggagacagcattgacgtctaccaaatttcaccagcggtagagaagcccgagcctggtcctcagcgtgccgtggtctacgcctttggtggcggcatggtatccggaagcgtcaagttgtggagcaatgttatcaagaatgcagcgaaagcgatggaaacgcagttttttgctgttgactatcgcttggctccagaacaccctggctttgctgcaatcgaggattgctactcaactgtaaaatggctgcaatccaaagccgcagatttcaacgttgaccctaagcggattgtattgtatggtcattctgcgggcggcctcgtctgtgctggaacaagtctgatggcgcgggacaagggattgcagtatcctctagctgcagttgcgctgatctatccgatgttggacgaccggacttttatcaccgacgaccaccccatgaatcagtacttggtttgggcgatgaaagccaataaatttgcatgggaagcattattggggaaccctagagaaaaacgtacagatgagaatgtgcccatatatgccgctccagcgagagctaaagttgcagatctcagcggacttccagaccactatattgatgtgggtggtctcgatcttttcgcgaaggaagacatcgcatacgcttcaaaattggcggaggcggaagtgaatgtcgaattccacttatatcctggtgttcctcatggcttcgatgggtttcccacgttagaagtcgcaggcctcgccgttgcaaaccaagttaggttcatcaagagttattaaggatgagatagcttagcgcatatggtgatggtcacaacgattgcaaaggaggtatgaccgtgatacccaaataaattccatttaacaatccacaatttggacaactattgatattggaatgtattgacgatatgtgagattgatggatgaacctggttcggtcagattcgtcatgtaaggtctgacgtaacaaacaaacgagtcaataattgcgatactcaaattttacctgtcagtacgtttgtttcaa

SEQ ID NO: 32374 - DNA, 969 bp, Muscodor strobelii
  misc_feature: SGI cDNA ID NO. 571157
  misc_feature: Encodes the peptide sequence at SEQ ID NO 32375
atgcaactccaattcaccactctagacgtttttacgtctataaggcttgaaggcaatccactcgcggtagtccagattccagagtcactgcgtgaccgcctcacgcaatccatcaagcaaaagattgcaaaagaattcaacctctccgagactgtcttcctctacgatgtcaaagagcatgggttagaaacacgggagatcgatatattcacagtggagagggagattccattcgcagggcatccaaccatcggtactgcttgtctcgtgcgctatcatatgagcgggaccgacaaggtgcggtcgctcatcacaaaagctgggccgattgctatcgagacgtctccgtcttcgaaaggaattcgtgccaaaatcccgcacaacgtgcgtctacaccagaaaacactgcgagatattctgtcgcccacagatacaacgggcctacatcccaacacagctatccgcgaagctgagttggcagctccgattcttagcgtggtgaatgggatgacattcattctcgtggctttaccttcgctcgaactactggctcaagttaaagtcttaagcttggactttgatgctctgaatacctcccttctagacgacggatggaccgatagccttgtctgtagatactactacgtagacgtcgacggcgatgagaagggcggagaaaatgaccagaacatacggtatgtcagaacgcgaatggtcgaacttggctttgaggatccagcaacaggcagtgctgcaactgcccttgcttcattcctcacattaaaagaagagaaatctggcagaaaattccagatgacacagggtgtagaaatcggcaggaagagtgttatcagcgtcgagacaactacgaagggagctagtggcggatatgagtgtcagcttgatgagttgtggcttggaggtacagccgtcatgactatgcgagggactatagaaattgatgtttga

SEQ ID NO: 32375 - protein, 322 aa, Muscodor strobelii
  misc_feature: SGI Peptide ID NO. 571157
  misc_feature (2)..(316): Pfam Id: PF02567 Pfam Desc: Phenazine biosynthesis-like protein
  misc_feature (2)..(87): Pfam Id: PF02567 Pfam Desc: Phenazine biosynthesis-like protein
  misc_feature (244)..(316): Pfam Id: PF02567 Pfam Desc: Phenazine biosynthesis-like protein
  misc_feature (1)..(320): NCBI GI: 164424113 Blast Desc: NCU11356 [Neurospora crassa OR74A] gi|157070379|gb|EDO65041.1| [Neurospora crassa OR74A]
  misc_feature (1)..(320): NCBI GI: 171681082 Blast Desc: protein product [Podospora anserina] gi|170940499|emb|CAP65727.1| protein product [Podospora anserina]
  misc_feature (1)..(318): NCBI GI: 116191333 Blast Desc: CHGG_05384 [Chaetomium globosum CBS 148.51] gi|88181297|gb|EAQ88765.1| CHGG_05384 [Chaetomium globosum CBS 148.51]
  misc_feature (1)..(320): NCBI GI: 256733955 Blast Desc: NECHADRAFT_77601 [Nectria haematococca mpVI 77-13-4]
  misc_feature (1)..(318): NCBI GI: 261351860 Blast Desc: phenazine biosynthesis protein phzF [Verticillium albo-atrum VaMs.102]
  misc_feature (1)..(320): NCBI GI: 46128191 Blast Desc: FG08473.1 [Gibberella zeae PH-1]
  misc_feature (2)..(318): NCBI GI: 238495112 Blast Desc: phenazine biosynthesis protein, [Aspergillus flavus NRRL3357] gi|220695442|gb|EED51785.1| phenazine biosynthesis protein, [Aspergillus flavus NRRL3357]
  misc_feature (2)..(318): NCBI GI: 169777877 Blast Desc: [Aspergillus oryzae RIB40] gi|83772141|dbj|BAE62271.1| protein product [Aspergillus oryzae]
  misc_feature (1)..(320): NCBI GI: 46138223 Blast Desc: FG10626.1 [Gibberella zeae PH-1]
  misc_feature (2)..(318): NCBI GI: 119486889 Blast Desc: phenazine biosynthesis-like protein, [Neosartorya fischeri NRRL 181] gi|119410521|gb|EAW20467.1| phenazine biosynthesis-like protein, [Neosartorya fischeri NRRL 181]
MQLQFTTLDVFTSIRLEGNPLAVVQIPESLRDRLTQSIKQKIAKEFNLSETVFLYDVKEHGLETREIDIFTVEREIPFAGHPTIGTACLVRYHMSGTDKVRSLITKAGPIAIETSPSSKGIRAKIPHNVRLHQKTLRDILSPTDTTGLHPNTAIREAELAAPILSVVNGMTFILVALPSLELLAQVKVLSLDFDALNTSLLDDGWTDSLVCRYYYVDVDGDEKGGENDQNIRYVRTRMVELGFEDPATGSAATALASFLTLKEEKSGRKFQMTQGVEIGRKSVISVETTTKGASGGYECQLDELWLGGTAVMTMRGTIEIDV

SEQ ID NO: 32376 - DNA, 5228 bp, Muscodor strobelii
  misc_feature: SGI EST ID NO. CUFF.76606.0
  misc_feature: Variant of the nucleotide sequence at SEQ ID NO 32374
gccgtacacacgtagcgtcgattacctacatggccctggaatagatcagagttgaggctgaacgatccgacaggaccctctaaaacatgaatagcaccataaaaattgtattgcaagcagtatccctgtctctcatatatcttcaattgttgtgcagtctttgtcttcaacgaatactacggaattgctacagagcctcaggcgattttcgtatttcagctatcaagaatacatccgcaggtgtatgtaccgtatctttgacacgaatggagggaatctggacttggcctggggaagccgccgtacacagaatagccggggacctgtgggacttctggggcaatgctagtttagcctgcgcagataatcagacttcgacggtgcaacgaggagtccacgagtgtttgatggcgatgcatgaaaaaccctaatgcttcgttcggatgttttgctagaaactaggtagaacatgccgaatatggcaggttgtataacccgtggcagttcgaaaagatttcttcgctacggtttgatcattccaatcccccatacgtagaaagcctttttggagatgtgaatcggatttgaaacccggagggatcttgcgaggtattcccacggccactgcttacttgcaagttaagctgctgatcaaaggcaaaggcaaaggcaaagagggaactattcgatcctgaattgggctgttcatctttggggtaggatatctctcggaatcatattttctcaggcaacccggcaggtgatagtccagtacctacctacgcgacctagtgagtgtgtatatggaaacatggtatctcaaacgccacatcgtatagcacagccacattcgcagttgatagatcacctcaactgcaataggttgttaggtacggatcaatacaatgagcgagcatgcgaagtgtggcgcgtggcaatattgatgaatacccgacctaacctaacctgccgagcctgccttgaactgccctccctcccatctgttaattgagggtctaaacgccttcaagaggggtgaccaaaggtgggggtttcgaggaggcttaccacgcccagcgttttctcacggctatcttaggctgcatcccctgactagtcgtcagtttgactaaacgagtcatctgtcagcctctgaatagtcgtgcttctgtgcgatgtagacctcgactcagttacacagaaaactttggagtgattatttcaacacagcaggatatatggtgcagttttgcttcaccaggaagttagctggaggttgatgcatggagacctagccatttacggcttggtaagggtctcagttagcggcaagtggtccctgcttgtatgcgataactcgcgatcgacggagcttgaagtcggagattttgtcattgtacagccataggcttctgatctccgcaattgaccaagatatttctcgtgtttgatctcttaatcttctggcatcgttctgtgaacgtgcttcctccgataacctgctcttctcgaaggtgagttgaccaggacaattgccgtgaaaatgcccattcgcgtcaagtctaaagcgatgccacccgagagggcattatcacccgcctcagagcgccccgaggttgatctaccaaatattgggcacaatgacccctttcgagatgtagttaagaagatctcatcttatatcagtgaggttatatatatgcctgccactttcgagcagcttcgaacaacgtcagcgggagacgatttgcgcactctcgtcgaatatctcagcttagaggtgacgaatcctgccattgtcaatgcactattagctctccgatggcactacggtgctatccacgatggcagaggattaagcgatgctcgggcgagtgcgtgtgagattgttgcgtggaggtttctaacgcgcctttctgaacgtgaaattgtcgagttttgtctttatgagataccagatccttgtgatcgggacgatatatctgtcgacgaggaatcagcgctagaggcctcaaacaacgagcacacagcacttttgggaactcatgcttgccaaactgagcatgatagaccgtatggtcatcgccgtggttctgtgaagcgcactcaactgtttgagtcggtctcaaaactcacaatgagccgtcataatacaaacgatgctgaagagccagaaaatgacccgactgctccctttatacatctcaatgcgttggagatagctgccattgctgatgccaaacgctttctcagtcaacatgtggttcaaaaaatcattaccggcatttggaatggcaacatcattttctgggatcgacttgcagtcaactccgtcaagaagcctcgcttctacaatcctagaacgcaagatccgttctcccgtctccgcgtgcccaaatatcttaaaacatatgaagttgcttttttcgccggcttccttatcctatactactctgtactcatagaaagtaatcgatacgccatcaccccactggagattctactatacatctggtttgccgctttcttctacgatgaagtcagtgagtacatcgacgcaggatcgatattttacgccgcagatatttggaacctgtttgacatgatcatgattgccatagggattgtctattttatcctaagatgcgtagggctatataaccatgattacgacctcgtcgatattggattcgacgtcctagccctagaggcgcttttcatggtacctcgggtcttctctgttcttagtctatcaccgtactggggtaccttgatcccctgtttgaaagcaatgggcacagatttcatcaaattcatggttcttgttgtcattgtctatcttgggttcttgacaaccttctcacttgtagggagggaaacattcacttttccgcacatggcaatgatagtcaccaagatcttctttggctcttcctatgtcggattcgatgttatggaggatattgacccgatatttggccctccactcatgttcatcttcgtcacattatcaagcattcttttgatgggttcccttacgggtatgctctcgaatagctttagccgtgtcattacccatgctcgtgaagaatacctctatgtatattcggtttatgtgctcgaggcttcgactagtaaccggctaacgcacttttacccaccatttaatttgatagctcttctcatattccgtccactgcgcctctttctaccatcagacaccaaattccgccagggacgcattcttctcctacgggccacccacgcccctattgtgggattgattcaggcctatgaatggtttgccaacaagctcaaccttaatagcttcgacaattttggttctccacaacaagagtcaattaagcgacaggtcattcctcctcccaataggccagatagtaggccacgatctggctatcggcatcaactgtctgctcgaccaaagagtgcagagatcaatcatagcccaagaagacgagtggctcctgaagacgatggcgatgcacccacggatgtggaagtccaaatatctgagctgacagccaaaattgatcgcttgacagctttagtggtcgcacttcaaccttccgagtcactcgaatccgtacggacatgagcatcaggcggtccagttctcaatacgatcatcaagggatgtcgaccggatgatcgagaaccgcccatatcaaatcttgcgatgcatatagacaaatgtataacatatcatattaagaatagcactacgtgtgatatatgtgtcacaatttcttcctattagggagatgtacgacagattatagaatcatcaggttcgcgctttatcgaggggcctggtccatggctaccaaggacgcaaaaggagcgtatattacatagcaggaggatataagagtgtcattattagattacctacctaggtagctcaaagtcgaaatgcggagatgtgactctagccgcccgttagtacccgactacctgtggatcattcggtcctgatcactgcgccctccacaaaacaccttgtgattcctaaataggtacctaaggaacaattagagagcgcgaccctattgatatatcttaggtagagaacgtgtagttttctctagcttcccgcgatcaggtttagtcaggcgtacctcttaatgctgttagcttgatgagaagtcgatccaacttcgagcatgcaactccaattcaccactctagacgtttttacgtctataaggcttgaaggcaatccactcgcggtagtccagattccagagtcactgcgtgaccgcctcacgcaatccatcaagcaaaagattgcaaaagaattcaacctctccgagactgtcttcctctacgatgtcaaagagcatgggttagaaacacgggagatcgatatattcacagtggagagggagattccattcgcagggcatccaaccatcggtactgcttgtctcgtgcgctatcatatgagcgggaccgacaaggtgcggtcgctcatcacaaaagctgggccgattgctatcgagacgtctccgtcttcgaaaggaattcgtgccaaaatcccgcacaacgtgcgtctacaccagaaaacactgcgagatattctgtcgcccacagatacaacgggcctacatcccaacacagctatccgcgaagctgagttggcagctccgattcttagcgtggtgaatgggatgacattcattctcgtggctttaccttcgctcgaactactggctcaagttaaagtcttaagcttggactttgatgctctgaatacctcccttctagacgacggatggaccgatagccttgtctgtagatactactacgtagacgtcgacggcgatgagaagggcggagaaaatgaccagaacatacggtatgtcagaacgcgaatggtcgaacttggctttgaggatccagcaacaggcagtgctgcaactgcccttgcttcattcctcacattaaaagaagagaaatctggcagaaaattccagatgacacagggtgtagaaatcggcaggaagagtgttatcagcgtcgagacaactacgaagggagctagtggcggatatgagtgtcagcttgatgagttgtggcttggaggtacagccgtcatgactatgcgagggactatagaaattgatgtttgataccattcgtagtttgttagtcaggaatcggattaaataggtccatcaaatacactccatgatgagcctcgt

SEQ ID NO: 32377 - DNA, 2076 bp, Muscodor strobelii
  misc_feature: SGI cDNA ID NO. 571158
  misc_feature: Encodes the peptide sequence at SEQ ID NO 32378
atgcccattcgcgtcaagtctaaagcgatgccacccgagagggcattatcacccgcctcagagcgccccgaggttgatctaccaaatattgggcacaatgacccctttcgagatgtagttaagaagatctcatcttatatcagtgaggttatatatatgcctgccactttcgagcagcttcgaacaacgtcagcgggagacgatttgcgcactctcgtcgaatatctcagcttagaggtgacgaatcctgccattgtcaatgcactattagctctccgatggcactacggtgctatccacgatggcagaggattaagcgatgctcgggcgagtgcgtgtgagattgttgcgtggaggtttctaacgcgcctttctgaacgtgaaattgtcgagttttgtctttatgagataccagatccttgtgatcgggacgatatatctgtcgacgaggaatcagcgctagaggcctcaaacaacgagcacacagcacttttgggaactcatgcttgccaaactgagcatgatagaccgtatggtcatcgccgtggttctgtgaagcgcactcaactgtttgagtcggtctcaaaactcacaatgagccgtcataatacaaacgatgctgaagagccagaaaatgacccgactgctccctttatacatctcaatgcgttggagatagctgccattgctgatgccaaacgctttctcagtcaacatgtggttcaaaaaatcattaccggcatttggaatggcaacatcattttctgggatcgacttgcagtcaactccgtcaagaagcctcgcttctacaatcctagaacgcaagatccgttctcccgtctccgcgtgcccaaatatcttaaaacatatgaagttgcttttttcgccggcttccttatcctatactactctgtactcatagaaagtaatcgatacgccatcaccccactggagattctactatacatctggtttgccgctttcttctacgatgaagtcagtgagtacatcgacgcaggatcgatattttacgccgcagatatttggaacctgtttgacatgatcatgattgccatagggattgtctattttatcctaagatgcgtagggctatataaccatgattacgacctcgtcgatattggattcgacgtcctagccctagaggcgcttttcatggtacctcgggtcttctctgttcttagtctatcaccgtactggggtaccttgatcccctgtttgaaagcaatgggcacagatttcatcaaattcatggttcttgttgtcattgtctatcttgggttcttgacaaccttctcacttgtagggagggaaacattcacttttccgcacatggcaatgatagtcaccaagatcttctttggctcttcctatgtcggattcgatgttatggaggatattgacccgatatttggccctccactcatgttcatcttcgtcacattatcaagcattcttttgatgggttcccttacgggtatgctctcgaatagctttagccgtgtcattacccatgctcgtgaagaatacctctatgtatattcggtttatgtgctcgaggcttcgactagtaaccggctaacgcacttttacccaccatttaatttgatagctcttctcatattccgtccactgcgcctctttctaccatcagacaccaaattccgccagggacgcattcttctcctacgggccacccacgcccctattgtgggattgattcaggcctatgaatggtttgccaacaagctcaaccttaatagcttcgacaattttggttctccacaacaagagtcaattaagcgacaggtcattcctcctcccaataggccagatagtaggccacgatctggctatcggcatcaactgtctgctcgaccaaagagtgcagagatcaatcatagcccaagaagacgagtggctcctgaagacgatggcgatgcacccacggatgtggaagtccaaatatctgagctgacagccaaaattgatcgcttgacagctttagtggtcgcacttcaaccttccgagtcactcgaatccgtacggacatga

SEQ ID NO: 32378 - protein, 691 aa, Muscodor strobelii
  misc_feature: SGI Peptide ID NO. 571158
  misc_feature (1)..(685): NCBI GI: 46121761 Blast Desc: FG05259.1 [Gibberella zeae PH-1]
  misc_feature (1)..(685): NCBI GI: 256727400 Blast Desc: [Nectria haematococca mpVI 77-13-4]
  misc_feature (1)..(685): NCBI GI: 171691094 Blast Desc: protein product [Podospora anserina] gi|170945495|emb|CAP71607.1| protein product [Podospora anserina]
  misc_feature (1)..(680): NCBI GI: 39975911 Blast Desc: MGG_06118 [Magnaporthe grisea 70-15] gi|145011585|gb|EDJ96241.1| MGG_06118 [Magnaporthe grisea 70-15]
  misc_feature (46)..(685): NCBI GI: 164425010 Blast Desc: NCU06601 [Neurospora crassa OR74A] gi|157070752|gb|EAA33107.2| conserved [Neurospora crassa OR74A]
  misc_feature (90)..(625): NCBI GI: 261354961 Blast Desc: conserved [Verticillium albo-atrum VaMs.102]
  misc_feature (1)..(607): NCBI GI: 116195220 Blast Desc: CHGG_04208 [Chaetomium globosum CBS 148.51] gi|88180121|gb|EAQ87589.1| CHGG_04208 [Chaetomium globosum CBS 148.51]
  misc_feature (17)..(681): NCBI GI: 189205825 Blast Desc: conserved [Pyrenophora tritici-repentis Pt-1C-BFP] gi|187975340|gb|EDU41966.1| conserved [Pyrenophora tritici-repentis Pt-1C-BFP]
  misc_feature (25)..(675): NCBI GI: 67516591 Blast Desc: AN0577.2 [Aspergillus nidulans FGSC A4] gi|40747520|gb|EAA66676.1| AN0577.2 [Aspergillus nidulans FGSC A4] gi|259489158|tpe|CBF89199.1| TPA: conserved [Aspergillus FGSC
  misc_feature (20)..(524): NCBI GI: 115397273 Blast Desc: conserved [Aspergillus terreus NIH2624] gi|114192419|gb|EAU34119.1| conserved [Aspergillus terreus NIH2624]
MPIRVKSKAMPPERALSPASERPEVDLPNIGHNDPFRDVVKKISSYISEVIYMPATFEQLRTTSAGDDLRTLVEYLSLEVTNPAIVNALLALRWHYGAIHDGRGLSDARASACEIVAWRFLTRLSEREIVEFCLYEIPDPCDRDDISVDEESALEASNNEHTALLGTHACQTEHDRPYGHRRGSVKRTQLFESVSKLTMSRHNTNDAEEPENDPTAPFIHLNALEIAAIADAKRFLSQHVVQKIITGIWNGNIIFWDRLAVNSVKKPRFYNPRTQDPFSRLRVPKYLKTYEVAFFAGFLILYYSVLIESNRYAITPLEILLYIWFAAFFYDEVSEYIDAGSIFYAADIWNLFDMIMIAIGIVYFILRCVGLYNHDYDLVDIGFDVLALEALFMVPRVFSVLSLSPYWGTLIPCLKAMGTDFIKFMVLVVIVYLGFLTTFSLVGRETFTFPHMAMIVTKIFFGSSYVGFDVMEDIDPIFGPPLMFIFVTLSSILLMGSLTGMLSNSFSRVITHAREEYLYVYSVYVLEASTSNRLTHFYPPFNLIALLIFRPLRLFLPSDTKFRQGRILLLRATHAPIVGLIQAYEWFANKLNLNSFDNFGSPQQESIKRQVIPPPNRPDSRPRSGYRHQLSARPKSAEINHSPRRRVAPEDDGDAPTDVEVQISELTAKIDRLTALVVALQPSESLESVRT

SEQ ID NO: 32379 - DNA, 5228 bp, Muscodor strobelii; identical to SEQ ID NO: 32376
  misc_feature: SGI EST ID NO. CUFF.76606.0
  misc_feature: Variant of the nucleotide sequence at SEQ ID NO 32377

SEQ ID NO: 32380 - DNA, 1428 bp, Muscodor strobelii
  misc_feature: SGI cDNA ID NO. 571159
  misc_feature: Reduced expression when VOC is produced
  misc_feature: Encodes the peptide sequence at SEQ ID NO 32381
atggctccactagcctttcacaacatcttcttccgcctgccgcctgccaccgcggctctcctcctcagcgccgccttcaacctcacatctgcccatgcgctcccgagacaaaccaaggttgtcgaataccatgtgctcgacgtagtaccttttcctcttcctacggccggaccactctcttcgtttgatgttcggcggcgacaggacaacacggtttgtggttacataggaggtgatccagacttacccgcgacttgctcggcgggatcccattgtgtgttagatgcgtcaaactcggtagtgggatgttgtccgaacggcggagtgtgcactgcgggcgtattcacgggttgtgtcgacaagaatagcgagccgcagaccgaaatcaatccgtacgtcttcacgtgtggaggatccgacgtgtgtttccaaaatcaattcgcgggagggtactctcagtttggctgtggaaccgcatcgagcttgggcaccaccgtgcacgcatccgcaagtggcgcgaccacaaccttgagcatttcatccgtcgacgtcagcctcacacagacgccgagtagtcttgcgacaccaacaacaattggatcgacacgatcgacgtcgaaacacagctcgagtaaatccacctcgcactcctctacgaaatctacatattcacagacatccacaacgacatcatccacctcgagcgaccccgcgagtcagacgacttcaacaacatcatcaccttctcaatcccctaccgaggcaccagacaacagcggtcacctcagtcaaaaacagactggtgccattgtcggtggtacgatcggcggtgctgcagctctgctgattctcgtagctgcttttcttttctggtggcgccgaagaagcggaaattctcggaagggaccaggaccggcaccggcagctgcgccaacgactcagtacattagtccaatgcaatctcacggcgctgcatttgcgcctctcccttcgtggaatgaagacgaaggtcaatatgggaacgcgccccgtccttacggacctctagagtcctcgttacatgcgccgcagagcacacatccgcacagcttttcgcagcccctgcggcataacccgggatacatgagcgccgcgctagcagcacacaacggccgtggattgaccccagtagcggaagaggaacatccgttcgagactccggagccacaagggcgcgagatcgatgatttctcgcgtgcgtactcgaatgcgcagataggacagctgacggacgaatatggcgatggggatagaacgccactgcgagaagatgcgcaagaaacaggcatctcttccgaacccgaagactcgccgccccgaccccgcggagggcatcgaccgctttggcagcagaatcggcaacagagccggaatttaatgtggttgtaa

SEQ ID NO: 32381 - protein, 475 aa, Muscodor strobelii
  misc_feature: SGI Peptide ID NO. 571159
  misc_feature (8)..(425): NCBI GI: 46121757 Blast Desc: FG05257.1 [Gibberella zeae PH-1]
  misc_feature (7)..(319): NCBI GI: 39975915 Blast Desc: MGG_06116 [Magnaporthe grisea 70-15] gi|145011587|gb|EDJ96243.1| MGG_06116 [Magnaporthe grisea 70-15]
  misc_feature (8)..(475): NCBI GI: 85107289 Blast Desc: NCU06602 [Neurospora crassa OR74A] gi|28923948|gb|EAA33108.1| [Neurospora crassa OR74A]
  misc_feature (43)..(475): NCBI GI: 171691170 Blast Desc: protein product [Podospora anserina] gi|170945533|emb|CAP71645.1| protein product [Podospora anserina]
  misc_feature (8)..(203): NCBI GI: 256726830 Blast Desc: NECHADRAFT_99150 [Nectria haematococca mpVI 77-13-4]
  misc_feature (35)..(342): NCBI GI: 116195216 Blast Desc: CHGG_04206 [Chaetomium globosum CBS 148.51] gi|88180119|gb|EAQ87587.1| CHGG_04206 [Chaetomium globosum CBS 148.51]
  misc_feature (65)..(295): NCBI GI: 156049761 Blast Desc: SS1G_08587 [Sclerotinia sclerotiorum 1980] gi|154692986|gb|EDN92724.1| SS1G_08587 [Sclerotinia sclerotiorum 1980]
  misc_feature (15)..(328): NCBI GI: 256734580 Blast Desc: NECHADRAFT_98851 [Nectria haematococca mpVI 77-13-4]
  misc_feature (16)..(292): NCBI GI: 240107294 Blast Desc: CPC735_065790 [Coccidioides posadasii C735 delta SOWgp]
  misc_feature (34)..(292): NCBI GI: 119190745 Blast Desc: [Coccidioides immitis RS]
  misc_feature: Useful for introducing or modulating the production of volatile compounds
MAPLAFHNIFFRLPPATAALLLSAAFNLTSAHALPRQTKVVEYHVLDVVPFPLPTAGPLSSFDVRRRQDNTVCGYIGGDPDLPATCSAGSHCVLDASNSVVGCCPNGGVCTAGVFTGCVDKNSEPQTEINPYVFTCGGSDVCFQNQFAGGYSQFGCGTASSLGTTVHASASGATTTLSISSVDVSLTQTPSSLATPTTIGSTRSTSKHSSSKSTSHSSTKSTYSQTSTTTSSTSSDPASQTTSTTSSPSQSPTEAPDNSGHLSQKQTGAIVGGTIGGAAALLILVAAFLFWWRRRSGNSRKGPGPAPAAAPTTQYISPMQSHGAAFAPLPSWNEDEGQYGNAPRPYGPLESSLHAPQSTHPHSFSQPLRHNPGYMSAALAAHNGRGLTPVAEEEHPFETPEPQGREIDDFSRAYSNAQIGQLTDEYGDGDRTPLREDAQETGISSEPEDSPPRPRGGHRPLWQQNRQQSRNLMWL

SEQ ID NO: 32382 - DNA, 2953 bp, Muscodor strobelii
  misc_feature: SGI EST ID NO. CUFF.76608.0
  misc_feature: Variant of the nucleotide sequence at SEQ ID NO 32380
agagctgataggaactggcgctcgtcattttctcgtagcgtcccttgtgtctttcgcaggtggcaaggccatgctttcccgccacgctgccagttgtccatcacggaagcacatcgtgaggtaacgaaataggctcaacaggcttccgtcaagtcagcccgaccaaacacgtccatagtttgaagcccgataaattgcaattatcataattgcttgtctactacctaaggagacacactacctcatgatagtacctacgtacctactgtagtctagccactcatcaacctactcgcctacctacctaaataccggaaacctaatacggcatttgaccgagcgtgacggagcccatccatgccgacacgctagttgaggctggtgaagtggttatgggactagtcaacggcaacggtcaagtcgcaaagtcaaatctcaacctcagccctgcaaccctggcatattacccccggctcgtgcagcgccagctgctcatcatagcgatgcgacctcatacttcgcctctttctgcttaagtacttgtttcatgtttcccttcgcacaccgagccctcatttctgctttttcgatctttttcgacgttttcgagcctccttctgtctcaatcgcatgctgccatcgcctactgcactcaccatcgaggcatcgttttgttgcggccacgcgctcagtttcggactgggccatggctccactagcctttcacaacatcttcttccgcctgccgcctgccaccgcggctctcctcctcagcgccgccttcaacctcacatctgcccatgcgctcccgagacaaaccaaggttgtcgaataccatgtgctcgacgtagtaccttttcctcttcctacggccggaccactctcttcgtttgatgttcggcggcgacaggacaacacggtttgtggttacataggaggtgatccagacttacccgcgacttgctcggcgggatcccattgtgtgttagatgcgtcaaactcggtagtgggatgttgtccgaacggcggagtgtgcactgcgggcgtattcacgggttgtgtcgacaagaatagcgagccgcagaccgaaatcaatccgtacgtcttcacgtgtggaggatccgacgtgtgtttccaaaatcaattcgcgggagggtactctcagtttggctgtggaaccgcatcgagcttgggcaccaccgtgcacgcatccgcaagtggcgcgaccacaaccttgagcatttcatccgtcgacgtcagcctcacacagacgccgagtagtcttgcgacaccaacaacaattggatcgacacgatcgacgtcgaaacacagctcgagtaaatccacctcgcactcctctacgaaatctacatattcacagacatccacaacgacatcatccacctcgagcgaccccgcgagtcagacgacttcaacaacatcatcaccttctcaatcccctaccgaggcaccagacaacagcggtcacctcagtcaaaaacagactggtgccattgtcggtggtacgatcggcggtgctgcagctctgctgattctcgtagctgcttttcttttctggtggcgccgaagaagcggaaattctcggaagggaccaggaccggcaccggcagctgcgccaacgactcagtacattagtccaatgcaatctcacggcgctgcatttgcgcctctcccttcgtggaatgaagacgaaggtcaatatgggaacgcgccccgtccttacggacctctagagtcctcgttacatgcgccgcagagcacacatccgcacagcttttcgcagcccctgcggcataacccgggatacatgagcgccgcgctagcagcacacaacggccgtggattgaccccagtagcggaagaggaacatccgttcgagactccggagccacaagggcgcgagatcgatgatttctcgcgtgcgtactcgaatgcgcagataggacagctgacggacgaatatggcgatggggatagaacgccactgcgagaagatgcgcaagaaacaggcatctcttccgaacccgaagactcgccgccccgaccccgcggagggcatcgaccgctttggcagcagaatcggcaacagagccggaatttaatgtggttgtaatgagaccaaattgcgtcataggagttaatcaccgtgtcttcacgtcaaaaagcggcgacgaggacggggtaaaattggcgtcataatcatcaacgggcgtttgtacttctgtgtacatatatattttttgagacgggtcttgggtcaatcttgcatcaatgggcaacatggatacagcggcgtttttgggaagcacaggccggaaacgacatgatacgaacgcctcgcataacgcattggttctcagcgtggcattttacgacgattcttgggttatcaccccacacatcttcctgctgggaaaccgagcatattgtttatagctacaaaaatttgggacatggagatcacccaggcattgggttggttagagcatgattcgtgtcaatagcttaattacaaccgaaatacttcgaacaaaactttacgagaattgatatttgatagtaactgtgatggctgtagaatcaatatgcactcttcaatacggttcaagtactacaggatttcggtggaatgacgaaaaaaggagaaattgattccgagctgttcaatgtcagaagtgatgaatggtaggatggcaacgattcgtaagaagtagtctatctaatctcctagctatatacgagaggagggtcaggtgcgcaggcatttcgaataaggaccaacacactataagtagactatctaatccgatgtccatccataaaagtgatttctattcaacccgatagtgacgtctacttatactagtagcagtacaatccacgacatcaaaatgtgacaatggttttcctagttgttcctcaaagatcttac

SEQ ID NO: 32383 - DNA, 1005 bp, Muscodor strobelii
  misc_feature: SGI cDNA ID NO. 571161
  misc_feature: Encodes the peptide sequence at SEQ ID NO 32384
atgagtgctgaatcttcaaatgcaacaggagcacccgtctcggcccaattagtagagacaaatggtgcttcatgttcgcaaaagaggcatgaagaacttcaatatcttgacctggtcaaggagatcttagaaaatggcgagcaccgaccagacagaaccggtacgggaacctattcgatattcgcaccaacgccactcaaattctccctcaacgaaaacgggcaatccatcctaccactcttaacaacgaagcgcgtgtttctcaaagcagtagtcgccgagctcctctggttcatcgagggcaacacatcctcgctctccctctccgaagctggcgtaaaaatctgggacggcaacggatctcgcgaattcctcgacaacgtcggactaagccaccgcgaggtcggggatctcggaccagtctatgggtttcagtggcgacatttcggcgcggagtacgtcgacgcaaagacagattacacgggaaagggcgtcgatcaactcgctgaggttatacataaattacggaataacccctatgaccgacggataatactgagtgcttggaaccccgcggatctgaagaagatggcgctcccgccttgccacatgtttgcgcagttctacgtttcctacccgaggaacggcgtgaaagatggagagggcaagatcaggggacatctgcattgtcagttataccagaggtcttgtgatatgggactcggtgttccgtttaatatcgcgagttatgcgttgcttacgcatatgattgcgcatgtcgctgagcttgtgcccggtagcttgacccatgtcttgggggatgcgcatgtgtattgtgatcatgttgaggcgttgaaggtgcagcttgagcgggaaccgagacctttcccgacgttgaggattgagagggaggaagggggtagtattgatgggtggaaggttgaggagctggttgttgaggggtataatcctcataagactattgctatgaagatgtcggtttga

SEQ ID NO: 32384 - protein, 334 aa, Muscodor strobelii
  misc_feature: SGI Peptide ID NO. 571161
  misc_feature (30)..(334): Pfam Id: PF00303 Pfam Desc: Thymidylate synthase
  misc_feature (30)..(334): NCBI GI: 46108362 Blast Desc: FG01063.1 [Gibberella zeae PH-1]
  misc_feature (24)..(334): NCBI GI: 261354954 Blast Desc: bifunctional dihydrofolate reductase-thymidylate synthase [Verticillium albo-atrum VaMs.102]
  misc_feature (30)..(334): NCBI GI: 212531339 Blast Desc: thymidylate synthase [Penicillium marneffei ATCC 18224] gi|210071190|gb|EEA25279.1| thymidylate synthase [Penicillium marneffei ATCC 18224]
  misc_feature (30)..(334): NCBI GI: 242772690 Blast Desc: thymidylate synthase [Talaromyces stipitatus ATCC 10500] gi|218721707|gb|EED21125.1| thymidylate synthase [Talaromyces stipitatus ATCC 10500]
  misc_feature (23)..(334): NCBI GI: 39944952 Blast Desc: MGG_04458 [Magnaporthe grisea 70-15] gi|145021519|gb|EDK05648.1| MGG_04458 [Magnaporthe grisea 70-15]
  misc_feature (29)..(334): NCBI GI: 116204425 Blast Desc: CHGG_10096 [Chaetomium globosum CBS 148.51] gi|88176224|gb|EAQ83692.1| CHGG_10096 [Chaetomium globosum CBS 148.51]
  misc_feature (14)..(334): NCBI GI: 154317591 Blast Desc: BC1G_03147 [Botryotinia fuckeliana B05.10] gi|150844321|gb|EDN19514.1| BC1G_03147 [Botryotinia fuckeliana B05.10]
  misc_feature (30)..(334): NCBI GI: 259483658 Blast Desc: TPA: similar to thymidylate synthase (Broad) [Aspergillus nidulans FGSC A4]
  misc_feature (30)..(334): NCBI GI: 67541729 Blast Desc: AN7028.2 [Aspergillus nidulans FGSC A4] gi|40742484|gb|EAA61674.1| AN7028.2 [Aspergillus nidulans FGSC A4]
  misc_feature (11)..(334): NCBI GI: 85089414 Blast Desc: thymidylate synthase [Neurospora crassa OR74A] gi|28919227|gb|EAA28705.1| thymidylate synthase [Neurospora crassa OR74A]
  misc_feature (28)..(334): SWISSPROT Homolog: EC 2.1.1.45 Thymidylate synthase
MSAESSNATGAPVSAQLVETNGASCSQKRHEELQYLDLVKEILENGEHRPDRTGTGTYSIFAPTPLKFSLNENGQSILPLLTTKRVFLKAVVAELLWFIEGNTSSLSLSEAGVKIWDGNGSREFLDNVGLSHREVGDLGPVYGFQWRHFGAEYVDAKTDYTGKGVDQLAEVIHKLRNNPYDRRIILSAWNPADLKKMALPPCHMFAQFYVSYPRNGVKDGEGKIRGHLHCQLYQRSCDMGLGVPFNIASYALLTHMIAHVAELVPGSLTHVLGDAHVYCDHVEALKVQLEREPRPFPTLRIEREEGGSIDGWKVEELVVEGYNPHKTIAMKMSV

SEQ ID NO: 32385 - DNA, 1266 bp, Muscodor strobelii
  misc_feature: SGI EST ID NO. CUFF.76621.0
  misc_feature: Variant of the nucleotide sequence at SEQ ID NO 32383
cgaagttatccaactttccacaactagagtaaagaagtcaattgccacatgcctgtctacatcttgactcaaaatgagtgctgaatcttcaaatgcaacaggagcacccgtctcggcccaattagtagagacaaatggtgcttcatgttcgcaaaagaggcatgaagaacttcaatatcttgacctggtcaaggagatcttagaaaatggcgagcaccgaccagacagaaccggtacgggaacctattcgatattcgcaccaacgccactcaaattctccctcaacgaaaacgggcaatccatcctaccactcttaacaacgaagcgcgtgtttctcaaagcagtagtcgccgagctcctctggttcatcgagggcaacacatcctcgctctccctctccgaagctggcgtaaaaatctgggacggcaacggatctcgcgaattcctcgacaacgtcggactaagccaccgcgaggtcggggatctcggaccagtctatgggtttcagtggcgacatttcggcgcggagtacgtcgacgcaaagacagattacacgggaaagggcgtcgatcaactcgctgaggttatacataaattacggaataacccctatgaccgacggataatactgagtgcttggaaccccgcggatctgaagaagatggcgctcccgccttgccacatgtttgcgcagttctacgtttcctacccgaggaacggcgtgaaagatggagagggcaagatcaggggacatctgcattgtcagttataccagaggtcttgtgatatgggactcggtgttccgtttaatatcgcgagttatgcgttgcttacgcatatgattgcgcatgtcgctgagcttgtgcccggtagcttgacccatgtcttgggggatgcgcatgtgtattgtgatcatgttgaggcgttgaaggtgcagcttgagcgggaaccgagacctttcccgacgttgaggattgagagggaggaagggggtagtattgatgggtggaaggttgaggagctggttgttgaggggtataatcctcataagactattgctatgaagatgtcggtttgagactggccatgaattatgatgagatgtggaagggtgtgggtctagatttgtattgatagctgagtatgatgagcttaaagatactgactgatacaaatgggcgatggtgttagttgtcacgagtatagatcggttgttataagaatatttagagaaataaacttgtttagatcggctcaacttgaaat

SEQ ID NO: 32386 - DNA, 1854 bp, Muscodor strobelii
  misc_feature: SGI cDNA ID NO. 571162
  misc_feature: Reduced expression when VOC is produced
  misc_feature: Encodes the peptide sequence at SEQ ID NO 32387
atgcttaccaccatgtcgcgtgccggcccgagtcgaggctcggtcgcttccggcactcgcactgtttctgtcactaacgttagacttgctatccaggcactcaggagatccatcaagggcgaaaaggacaagagcgcgcagatcgccattgcgccaaagtctgccgtcgccatagtacctccgaagaaggttattcgagcactttacgactatgaggcatcatccgagcaagagttgagcttctcgcggggtgatttcttccatgttatcggtcgggaaaatgacagcgagtggtacgaagcatgcaatccagccctaccggatgcgcggggacttgtcccggtctcgttcttccaggccctgggccgcaccgagagagacagcggccaatcagacgttggcccacggtccgctaccaaaaaggaggatcacgactcgggcttctcagaaaccaacacagttccttcgacgccggctctcagccagcgcagctccaagtcgctgggtaagaccggtgccatggtctacggtattgtcatgtacgacttccaggccgaaagggcagacgagctggaagccaaggccggggaggccatcattgtcattgcgcaatctaaccctgaatggttcgttgcgaagcccattggccgcctgggcggtccaggcctgatacccgtgtctttcgtcgagatcagagacatggccaccgattctgcagtacccaatgctcaagatgcggtcaagcgtgctggtgttccacgcgttgaagaatggaagaaaatggcggctgagtacaagaatagcagtataacgttgggcaaattcgagggcggtggtgcacccggacagcaaccgtccatggaacaaggtatggaacgcttgagcctacagcaacaacaaaatcgccaaagtcaacaagcctattcacaatcccaaggataccaaccgaaccagcaacagcgcaacaccctgcaacagaatgctactatacctaagcccgcatcccatttgttcgcccctatctctgcgcaaatacctagatattgctttgcagaagataagtactggttcgtcattgaggcagtgcttgaggataaccgccactgggaactctcccgttactacgaagacttctatgatttccagatcgctctcttgaccgaattcccagccgaggccggaaacacaggtacgcaaaagcgcacgctaccatatatgccaggaccggtcaattatgtgacggatcaaatcaccgagggacgactgcacaatctggaccagtacgtcaagaatttgctgggccagccggcgtacatttccaggtgcaacttggtcaaacaattctttgcacccagagaaggtgattatgaggtcgatcctagtaatgcgggagaggaatatcgcctctcaggtggatcacggtcctcgacggactcgcctagggaagatggctcccggcagtcgtcacgaaacaacttgaacgggcccggatactcgggcctgtccgctgcccccagacagcaaaatgggcaatcgcaagtcacacgacaaacatcatccctttcacagccatcgcagtcttcattatcaccggccgtcaatcaagctccagccttcaaagtcaaattacatttcaacagcgacaccttccttatccgagtgcccggcgacacaaacttccagcaactccacgagaagatcagagagcgaactaagataccgagtggagaccagatgcatctcttctaccgagacgaggcgagcggcgacaaactgaacctcatgagcaacaacgaccttaattatgcacttgaccataatgagaaactggtcatatttgttgaacaagtataa

SEQ ID NO: 32387 - protein, 617 aa, Muscodor strobelii
  misc_feature: SGI Peptide ID NO. 571162
  misc_feature (538)..(617): Pfam Id: PF00564 Pfam Desc: PB1 domain
  misc_feature (339)..(452): Pfam Id: PF00787 Pfam Desc: PX domain
  misc_feature (63)..(121): Pfam Id: PF00018 Pfam Desc: SH3 domain
  misc_feature (175)..(232): Pfam Id: PF00018 Pfam Desc: SH3 domain
  misc_feature (64)..(121): Pfam Id: PF07653 Pfam Desc: Variant SH3 domain
  misc_feature (352)..(452): Pfam Id: PF00787 Pfam Desc: PX domain
  misc_feature (64)..(101): Pfam Id: PF07653 Pfam Desc: Variant SH3 domain
  misc_feature (31)..(617): NCBI GI: 261354956 Blast Desc: scd2/ral3 [Verticillium albo-atrum VaMs.102]
  misc_feature (31)..(615): NCBI GI: 256726828 Blast Desc: [Nectria haematococca mpVI 77-13-4]
  misc_feature (31)..(613): NCBI GI: 145613369 Blast Desc: MGG_01702 [Magnaporthe grisea 70-15] gi|145020454|gb|EDK04583.1| MGG_01702 [Magnaporthe grisea 70-15]
  misc_feature (31)..(617): NCBI GI: 46121765 Blast Desc: FG05261.1 [Gibberella zeae PH-1]
  misc_feature (31)..(615): NCBI GI: 156049495 Blast Desc: SS1G_08454 [Sclerotinia sclerotiorum 1980] gi|154692853|gb|EDN92591.1| SS1G_08454 [Sclerotinia sclerotiorum 1980]
  misc_feature (31)..(615): NCBI GI: 171691066 Blast Desc: protein product [Podospora anserina] gi|170945481|emb|CAP71593.1| protein product [Podospora anserina]
  misc_feature (29)..(615): NCBI GI: 154317587 Blast Desc: BC1G_03145 [Botryotinia fuckeliana B05.10] gi|150844319|gb|EDN19512.1| BC1G_03145 [Botryotinia fuckeliana B05.10]
  misc_feature (30)..(615): NCBI GI: 116195162 Blast Desc: CHGG_04179 [Chaetomium globosum CBS 148.51] gi|88180092|gb|EAQ87560.1| CHGG_04179 [Chaetomium globosum CBS 148.51]
  misc_feature (31)..(617): NCBI GI: 270045963 Blast Desc: polarity protein BemA [Epichloe festucae]
  misc_feature (30)..(615): NCBI GI: 85107254 Blast Desc: NCU06593 [Neurospora crassa OR74A] gi|28923939|gb|EAA33099.1| NCU06593 [Neurospora crassa OR74A]
  misc_feature: Useful for introducing or modulating the production of volatile compounds
MLTTMSRAGPSRGSVASGTRTVSVTNVRLAIQALRRSIKGEKDKSAQIAIAPKSAVAIVPPKKVIRALYDYEASSEQELSFSRGDFFHVIGRENDSEWYEACNPALPDARGLVPVSFFQALGRTERDSGQSDVGPRSATKKEDHDSGFSETNTVPSTPALSQRSSKSLGKTGAMVYGIVMYDFQAERADELEAKAGEAIIVIAQSNPEWFVAKPIGRLGGPGLIPVSFVEIRDMATDSAVPNAQDAVKRAGVPRVEEWKKMAAEYKNSSITLGKFEGGGAPGQQPSMEQGMERLSLQQQQNRQSQQAYSQSQGYQPNQQQRNTLQQNATIPKPASHLFAPISAQIPRYCFAEDKYWFVIEAVLEDNRHWELSRYYEDFYDFQIALLTEFPAEAGNTGTQKRTLPYMPGPVNYVTDQITEGRLHNLDQYVKNLLGQPAYISRCNLVKQFFAPREGDYEVDPSNAGEEYRLSGGSRSSTDSPREDGSRQSSRNNLNGPGYSGLSAAPRQQNGQSQVTRQTSSLSQPSQSSLSPAVNQAPAFKVKLHFNSDTFLIRVPGDTNFQQLHEKIRERTKIPSGDQMHLFYRDEASGDKLNLMSNNDLNYALDHNEKLVIFVEQV

SEQ ID NO: 32388 - DNA, 3926 bp, Muscodor strobelii
  misc_feature: SGI EST ID NO. CUFF.76624.0
  misc_feature: Variant of the nucleotide sequence at SEQ ID NO 32386
gacaggctcgacaggcaagcgcaagcagcacacgcagaccccaggcgcacagtctcgccatccccgtccgttcgctgctcagtccctttcgctcagccgtctgggcagaatgaccctcccgtcagtcaggacaagtgcctccctaccaaacaccaggtccaaacccccgacttccacgttcccatttctactgtacataccacagaatccaccatcgccaacctcagccgtcggccatcgtgggttactatctcgacgtcgacgctagagcgcaagtgccaatcgccaatcgccaatcgccacccggctgcccagcggccccgacaggagttcccagctatcacatcacaccactggcgaatgtgaccctgactgtgttggttgagtggccctcgcaacaacagcacaaaggcgcagagaaagaagcatttccgcctcgatcaattccaaaaagacgcctcccgctccaaatcctctgtttgagccacgcattcaacctccacaatctccacgcctccaaacctcggagaagagaaactcacatcttcaacattccacgcacgactagtcactcgcgccctcactcccccgtgttctgccgaccggcttgctgcatcgaggccgcagcgccaaacggtttgagcgatccaggaatcccaagatccggctgcagcaggtctcacctcgagcgttccgtcctgcgcgccgcccgctgctccctgtcgccgccgcttcctcatccatcattcatcattcgacttgcgcacgccacctcgaccccgttacactgatccagacgtcttgtgtcgagccgagccgcgattctgatcgctcctcccctctgctgcccgcctacccaccttggcgtaacctcgtctgaatcacacgagcgacgactggccggacctcgtcactcactgcctcctccactggtgccgcatcctccacgcctggccctggtccgacctctctgcaccgaccactacatatacattcattaacgcccgtggagcacctgtgagacgatgaaggcactcaggagatccatcaagggcgaaaaggacaagagcgcgcagatcgccattgcgccaaagtctgccgtcgccatagtacctccgaagaaggttattcgagcactttacgactatgaggcatcatccgagcaagagttgagcttctcgcggggtgatttcttccatgttatcggtcgggaaaatgacagcgagtggtacgaagcatgcaatccagccctaccggatgcgcggggacttgtcccggtctcgttcttccaggccctgggccgcaccgagagagacagcggccaatcagacgttggcccacggtccgctaccaaaaaggaggatcacgactcgggcttctcagaaaccaacacagttccttcgacgccggctctcagccagcgcagctccaagtcgctgggtaagaccggtgccatggtctacggtattgtcatgtacgacttccaggccgaaagggcagacgagctggaagccaaggccggggaggccatcattgtcattgcgcaatctaaccctgaatggttcgttgcgaagcccattggccgcctgggcggtccaggcctgatacccgtgtctttcgtcgagatcagagacatggccaccgattctgcagtacccaatgctcaagatgcggtcaagcgtgctggtgttccacgcgttgaagaatggaagaaaatggcggctgagtacaagaatagcagtataacgttgggcaaattcgagggcggtggtgcacccggacagcaaccgtccatggaacaaggtatggaacgcttgagcctacagcaacaacaaaatcgccaaagtcaacaagcctattcacaatcccaaggataccaaccgaaccagcaacagcgcaacaccctgcaacagaatgctactatacctaagcccgcatcccatttgttcgcccctatctctgcgcaaatacctagatattgctttgcagaagataagtactggttcgtcattgaggcagtgcttgaggataaccgccactgggaactctcccgttactacgaagacttctatgatttccagatcgctctcttgaccgaattcccagccgaggccggaaacacaggtacgcaaaagcgcacgctaccatatatgccaggaccggtcaattatgtgacggatcaaatcaccgagggacgactgcacaatctggaccagtacgtcaagaatttgctgggccagccggcgtacatttccaggtgcaacttggtcaaacaattctttgcacccagagaaggtgattatgaggtcgatcctagtaatgcgggagaggaatatcgcctctcaggtggatcacggtcctcgacggactcgcctagggaagatggctcccggcagtcgtcacgaaacaacttgaacgggcccggatactcgggcctgtccgctgcccccagacagcaaaatgggcaatcgcaagtcacacgacaaacatcatccctttcacagccatcgcagtcttcattatcaccggccgtcaatcaagctccagccttcaaagtcaaattacatttcaacagcgacaccttccttatccgagtgcccggcgacacaaacttccagcaactccacgagaagatcagagagcgaactaagataccgagtggagaccagatgcatctcttctaccgagacgaggcgagcggcgacaaactgaacctcatgagcaacaacgaccttaattatgcacttgaccataatgagaaactggtcatatttgttgaacaagtataagactcgattgaacgtcgtcgcattccaatttcttcatgatatacccttgactttgcatttacgacataggtacttggttaggtagtgccgggcttcaaaatacatcataccatacacacaaactcatctttactacttttgactgcatagcatggccaacctaaataattgcgacaagcattaaattagcaggagcatttgcatcataccgagtacacacctaggcgcaccggttcctcttatgcttgatcaaaacttaggcaaactgccattgctaagctactgagtctgaactacacgggtcaccgacagaaggcagctggagaatcaaccatcatcacactatatcgcacggtcgactgcattgacttcttgatcacgcctccctctctgggggtcaattgcactaggatcaaagtgcattgatcgcatgttctgatcgaggcatcgccatttcacctggggcacgttgggaaagattctcccgtggcctattcgtttctactagctctgtttttggggggaggaagatggagggcttccagccggcttcgcagcctatgggtatcaccatttcttttgttcaatgtttctggaggcggggccggaatgcttgccataatacctatcatggagctagtgcaaggctgggctcggaaccatcctcaacctataggcggagatttggtgcttaaacgcatgaatgtatgcgtaaggagaggtatgacgtgatacggtaatggtatttgagagagtgatgaggaaggcatgggaagtgaatggctctcttgaagcggaccgtcttgaagcttgcggaccaagcgtgcttcttttggatcgggcgagagggatgagagaagacaaatggatgaagcacgagcaaaaacttcgtgctggtttctatgttgatattagttgagagctctgtgaaaggcacagcaaaggagcgagaaacaagaagtggttcatgttcaatttggttcctcgagtatgcctcctgcagtgaaaatgcgatatttaccaacttgaaagtcaattccgctcgccctacctaacttatctacaatgtagatacctataaccataagtgaagcataaagacgtggtgaccccttttccatgagcactacctgttcc

SEQ ID NO: 32389 - DNA, 1518 bp, Muscodor strobelii
  misc_feature: SGI cDNA ID NO. 571163
  misc_feature: Encodes the peptide sequence at SEQ ID NO 32390
atgtcttgggctgcacctccgcccggcctccagccttcaccgccgtattattctcagaatatgaatgccgcctacactcctgtctccatccgtcagggtttcagccagccgtaccaatctcagcaacaatatccctataccgctcctgctaatactataacacaacctcctcctcctaccactatgcctcctgcagagccccagcagcagcagcaaccgaaaattgactggcctcaatctgtccgcaactacgtccagcgaacgttccaatcctctaatgatatccttggtgttgaacgtgctgaaaaggaagctcgcctcagggagatcatctccgctgagcagttgagaggcaccatgtataccacagactgggacaataagccgcttccacaacatatgatcctcaatgaacgccagcaggctctgatggcctctgcaggtgccctgtccatgaatccaaagaagagaaaatcttcggattttagcgagcccgaccaaactactaattcttcagtgccatggcgaaataataagatgtcttccctcgaggaccgtgtcagcaaacccggaagtgacaagcgctccttgatggatggccccctgtcggccaaaagtaagttccaaaaagccgccgaaaagaggctccgccgcttcgatggtggctatcagtcttcctaccgatctcccagtccgcctcctcccaccggtcctattgtgggtagaaatgaaaacttggagaagagatatcttcgcttgactgccgcaccgaaggccgatgatgtccgacccgaacgtgtcctccaccagactttggatctcctaaagaagaagtggcgtaaggaaaataactacaactacatttgcgatcagttcaagtcccttcgccaggatctgaccgtacaacacatcaggaacgagttcactgtttctgtctacgaaatccacgctcgcattgccttagaaaagggggaccttggtgagtataatcagtgccagacgcaactacgtgccctttatagggctggcattcaaggcaatcctatcgagtttaaggcgtatcgtattttgtatttcattcatactgcgaatcggactgcgttgaacgacgcgattgcggatctaaccatagcagaaaaagaagagacagctgtcaagcatgctctggatgtgcgctcggctttagccttaggcaactaccacaagtttttccagctttaccttgatgtacctaatatgggagcctacctgatggacatgttcatcaagcgcgaacgactagccgccatgagtaatctgtgcaaagctttcaagcccgaactgaaactacgctacatcactgaagaactcgcatttgagtcagatgctgaggctgcccaattcattatcgaccatgatcaagaactacttcaagaacgtgatgagcatattatcttcctcacaggaaaagccgggcagactttcgagcaggcaagggcacaagccttccgccgtgtcgatctcaaaggccagatatga

SEQ ID NO: 32390 - protein, 505 aa, Muscodor strobelii
  misc_feature: SGI Peptide ID NO. 571163
  misc_feature (255)..(452): Pfam Id: PF03399 Pfam Desc: SAC3/GANP/Nin1/mts3/eIF-3 p25 family
  misc_feature (2)..(505): NCBI GI: 46121767 Blast Desc: FG05262.1 [Gibberella zeae PH-1]
  misc_feature (2)..(505): NCBI GI: 256726827 Blast Desc: [Nectria haematococca mpVI 77-13-4]
  misc_feature (68)..(505): NCBI GI: 85107258 Blast Desc: NCU06594 [Neurospora crassa OR74A] gi|28923940|gb|EAA33100.1| NCU06594 [Neurospora crassa OR74A]
  misc_feature (4)..(505): NCBI GI: 225680363 Blast Desc: conserved [Paracoccidioides brasiliensis Pb03]
  misc_feature (1)..(505): NCBI GI: 212535794 Blast Desc: SAC3/GANP domain protein [Penicillium marneffei ATCC 18224] gi|210070452|gb|EEA24542.1| SAC3/GANP domain protein [Penicillium marneffei ATCC 18224]
  misc_feature (5)..(505): NCBI GI: 226283095 Blast Desc: SAC3/GANP domain-containing protein [Paracoccidioides brasiliensis Pb01]
  misc_feature (2)..(505): NCBI GI: 116195160 Blast Desc: CHGG_04178 [Chaetomium globosum CBS 148.51] gi|88180091|gb|EAQ87559.1| CHGG_04178 [Chaetomium globosum CBS 148.51]
  misc_feature (5)..(505): NCBI GI: 225556260 Blast Desc: SAC3/GANP domain-containing protein [Ajellomyces capsulatus G186AR]
  misc_feature (2)..(505): NCBI GI: 171691064 Blast Desc: protein product [Podospora anserina] gi|170945480|emb|CAP71592.1| protein product [Podospora anserina]
  misc_feature (1)..(505): NCBI GI: 242794024 Blast Desc: SAC3/GANP domain protein [Talaromyces stipitatus ATCC 10500] gi|218718874|gb|EED18294.1| SAC3/GANP domain protein [Talaromyces stipitatus ATCC 10500]
MSWAAPPPGLQPSPPYYSQNMNAAYTPVSIRQGFSQPYQSQQQYPYTAPANTITQPPPPTTMPPAEPQQQQQPKIDWPQSVRNYVQRTFQSSNDILGVERAEKEARLREIISAEQLRGTMYTTDWDNKPLPQHMILNERQQALMASAGALSMNPKKRKSSDFSEPDQTTNSSVPWRNNKMSSLEDRVSKPGSDKRSLMDGPLSAKSKFQKAAEKRLRRFDGGYQSSYRSPSPPPPTGPIVGRNENLEKRYLRLTAAPKADDVRPERVLHQTLDLLKKKWRKENNYNYICDQFKSLRQDLTVQHIRNEFTVSVYEIHARIALEKGDLGEYNQCQTQLRALYRAGIQGNPIEFKAYRILYFIHTANRTALNDAIADLTIAEKEETAVKHALDVRSALALGNYHKFFQLYLDVPNMGAYLMDMFIKRERLAAMSNLCKAFKPELKLRYITEELAFESDAEAAQFIIDHDQELLQERDEHIIFLTGKAGQTFEQARAQAFRRVDLKGQI

SEQ ID NO: 32391 - DNA, 2387 bp, Muscodor strobelii
  misc_feature: SGI EST ID NO. CUFF.76661.0
  misc_feature: Variant of the nucleotide sequence at SEQ ID NO 32389
tcggcggcattccattcaggtgcctcccattgctgccgcttccataaggttcacacacgcacatttgcaattgttctctcctctcgccgctcctgcttgccgactaacctttgtcaccaacgtcctttcgccgtgccctcatcgacattcaccacaacccctattgaatcttgtgaacttgcatcctgcattcattggatcccctatagcacctttgttgatcagtctcagacggccatctgctaactaattcatccatcgccgtctcctcgcgccctaaatcccgaccgaccgtctcagtagcatgtcttgggctgcacctccgcccggcctccagccttcaccgccgtattattctcagaatatgaatgccgcctacactcctgtctccatccgtcagggtttcagccagccgtaccaatctcagcaacaatatccctataccgctcctgctaatactataacacaacctcctcctcctaccactatgcctcctgcagagccccagcagcagcagcaaccgaaaattgactggcctcaatctgtccgcaactacgtccagcgaacgttccaatcctctaatgatatccttggtgttgaacgtgctgaaaaggaagctcgcctcagggagatcatctccgctgagcagttgagaggcaccatgtataccacagactgggacaataagccgcttccacaacatatgatcctcaatgaacgccagcaggctctgatggcctctgcaggtgccctgtccatgaatccaaagaagagaaaatcttcggattttagcgagcccgaccaaactactaattcttcagtgccatggcgaaataataagatgtcttccctcgaggaccgtgtcagcaaacccggaagtgacaagcgctccttgatggatggccccctgtcggccaaaagtaagttccaaaaagccgccgaaaagaggctccgccgcttcgatggtggctatcagtcttcctaccgatctcccagtccgcctcctcccaccggtcctattgtgggtagaaatgaaaacttggagaagagatatcttcgcttgactgccgcaccgaaggccgatgatgtccgacccgaacgtgtcctccaccagactttggatctcctaaagaagaagtggcgtaaggaaaataactacaactacatttgcgatcagttcaagtcccttcgccaggatctgaccgtacaacacatcaggaacgagttcactgtttctgtctacgaaatccacgctcgcattgccttagaaaagggggaccttggtgagtataatcagtgccagacgcaactacgtgccctttatagggctggcattcaaggcaatcctatcgagtttaaggcgtatcgtattttgtatttcattcatactgcgaatcggactgcgttgaacgacgcgattgcggatctaaccatagcagaaaaagaagagacagctgtcaagcatgctctggatgtgcgctcggctttagccttaggcaactaccacaagtttttccagctttaccttgatgtacctaatatgggagcctacctgatggacatgttcatcaagcgcgaacgactagccgccatgagtaatctgtgcaaagctttcaagcccgaactgaaactacgctacatcactgaagaactcgcatttgagtcagatgctgaggctgcccaattcattatcgaccatgatcaagaactacttcaagaacgtgatgagcatattatcttcctcacaggaaaagccgggcagactttcgagcaggcaagggcacaagccttccgccgtgtcgatctcaaaggccagatatgatacctcccttccaactagtttcttgtcgaattctttcttcgttccccttattacatcgtatatcatgagcagggttcctcgcaccattatcaccctgtagaaccccgatgcaatcgtcttgagatgcttttcgactatactagcctttgacgaagcctgctaaaccgtgacggcgtcaacccgccccttcttgtgatggacccacctcaccaaacagattcgacagtgttaaggacgatgatggtggacatgtggatgtgctatggagtgcttagctctaagagggacttgcttttgagggtcgtatctgcgccaaaatgttgatgatacacgattctttttcctaggcgtttaggaaatcctggaccaagtggtgccagttacacgtgttgttacgataccccgggcaagtcaggatacatgacatgcctcaaaattttgctggttagcaagaaaaatgtttaagtataatcctattaggtctatagacaggtgggcgacgacaaccgctaaaatacgtaacacctttgttgttccaacttccgtgtaaaacttgtggacactg

SEQ ID NO: 32392 - DNA, 1860 bp, Muscodor strobelii
  misc_feature: SGI cDNA ID NO. 571164
  misc_feature: Encodes the peptide sequence at SEQ ID NO 32393
atgttcctgaagcagatcgacctgacgacggcccttcgaccttcgtatctccccgacgaggtgcttctgtttgtccaggacaatgtagggctctacgagggcaagttcaaactcccgaaccaacagctcggtcaggtctacttgacctcccaccgagtctgctatgtcgacaccgccgagcctaggaagtactcggtcgcccttgacctaaaagatgtcgagcgctacgagttctacgccggctttctcaagtcgtctgcaaaagtcaccctcgtgccgaagcctccaaagcgcgcctcgttgcagtcgagggcggccgctgcgtcgtcatcaccgttacctacctcagaccgttcctacacgcctccatcctccaagccaccccaggcaagctcggccacatgggtctgcacgatatgcagctttccaaaccctgttccgtccaacttcgatcccaccgtcgccaactccaacgcgccgctgcctccatgcctgtcatgcggaattaagccctccttgacccaggtcctgaaagcgtccatatcgcatgttgccagccgaccatcgggcggcacctctggcgacggtggcgggccagactcgccgcgcgccaataccgctgtagccaaaggtgtagctgagactgatggattccagtgcccgcgttgcacattctctaatcacccttcgttgctttcctgcgagatatgcggggctccgttgatttctaaggatgtgccagcgaatgtgtcgcaacagccaacccgcactgattcgccaggccccacgcttaaccaggcaagtcccgtaggtgttgagaatcctgagagtgtcaaaatatcatttcggagtggaggagaaaagatcttctatgaacggcttaagggctcaatgatccagagaaaatggctcttacacgaagccccatttgtcccctccaacagtagggctggcgggactggtgaaggggactcgatatcgcgctcgggctccgggcgaaaaaaggctgcaggtattgcaggattagaacagatgggacttgaccgcagaaagaataatgagcgtatgatcggcagctctttcgaggatctggaggccttgatggcttctgccaaagagatcgttgccctcgcggagtcttttgctcgtcaagtcggtaacggaactgacagtgctaccacggcggccaatgctttgctggctgaatctgcaagccagctgggactagtcactactaaggacatagtgggtggtggaaatagttcaggtgcagaatctttatacctgtcggagctttcgaggaacttggctgagtttctaacggatgatgcacgtggtgtgctgcggaaagctggcggtatcatgagtctggtcgacttatgggccatgttcaatagagcccgtggaggtgttgaactcgttagtcccaacgactttgaaaaggctgcccgcctctgggagaaattaaagctccctgtgcggctgcgaacatttaagagtggcgtgatggtcgtgcaaagtcgagatcgaaccgatgaaacgactatcaaggcccttctgacctggcttcgggatctgcacgatataccacccgagcgagaagtaccctgggactggcaggagtttggccgcggggtcacggctcacgacgcggcagagcgctttggatggagcattggcgttgctgaggaagaattagaaatggccgaagaaagaggcgtgctctgtcgcgaagaagggctggaaggcttgaagttctgggaaaactacatcgatactggcgagcatcgtcaacgaccacgccaggccacagaagctgatcaaatcattgaggcattgactgctaatggaatgttatga

SEQ ID NO: 32393 - protein, 619 aa, Muscodor strobelii
  misc_feature: SGI Peptide ID NO. 571164
  misc_feature (337)..(578): Pfam Id: PF04157 Pfam Desc: EAP30/Vps36 family
  misc_feature (1)..(619): NCBI GI: 46121769 Blast Desc: FG05263.1 [Gibberella zeae PH-1]
  misc_feature (1)..(619): NCBI GI: 256727398 Blast Desc: NECHADRAFT_33889 [Nectria haematococca mpVI 77-13-4]
  misc_feature (1)..(619): NCBI GI: 171691062 Blast Desc: protein product [Podospora anserina] gi|170945479|emb|CAP71591.1| protein product [Podospora anserina]
  misc_feature (1)..(595): NCBI GI: 154317579 Blast Desc: BC1G_03141 [Botryotinia fuckeliana B05.10] gi|150844315|gb|EDN19508.1| BC1G_03141 [Botryotinia fuckeliana B05.10]
  misc_feature (1)..(619): NCBI GI: 164425008 Blast Desc: NCU06595 [Neurospora crassa OR74A] gi|157070751|gb|EAA33101.2| NCU06595 [Neurospora crassa OR74A]
  misc_feature (1)..(593): NCBI GI: 119486947 Blast Desc: vacuolar protein sorting protein (Vps36), [Neosartorya fischeri NRRL 181] gi|119410550|gb|EAW20496.1| vacuolar protein sorting protein (Vps36), [Neosartorya fischeri NRRL 181]
  misc_feature (1)..(591): NCBI GI: 115387801 Blast Desc: conserved [Aspergillus terreus NIH2624] gi|114195490|gb|EAU37190.1| conserved [Aspergillus terreus NIH2624]
  misc_feature (1)..(598): NCBI GI: 145248730 Blast Desc: An14g00750 [Aspergillus niger] gi|134081372|emb|CAK41874.1| protein product [Aspergillus niger]
  misc_feature (1)..(593): NCBI GI: 255936063 Blast Desc: Pc13g06240 [Penicillium chrysogenum Wisconsin 54-1255] gi|211583678|emb|CAP91693.1| Pc13g06240 [Penicillium chrysogenum Wisconsin 54-1255]
  misc_feature (1)..(595): NCBI GI: 242794021 Blast Desc: vacuolar protein sorting protein (Vps36), [Talaromyces stipitatus ATCC 10500] gi|218718873|gb|EED18293.1| vacuolar protein sorting protein (Vps36), [Talaromyces stipitatus ATCC
MFLKQIDLTTALRPSYLPDEVLLFVQDNVGLYEGKFKLPNQQLGQVYLTSHRVCYVDTAEPRKYSVALDLKDVERYEFYAGFLKSSAKVTLVPKPPKRASLQSRAAAASSSPLPTSDRSYTPPSSKPPQASSATWVCTICSFPNPVPSNFDPTVANSNAPLPPCLSCGIKPSLTQVLKASISHVASRPSGGTSGDGGGPDSPRANTAVAKGVAETDGFQCPRCTFSNHPSLLSCEICGAPLISKDVPANVSQQPTRTDSPGPTLNQASPVGVENPESVKISFRSGGEKIFYERLKGSMIQRKWLLHEAPFVPSNSRAGGTGEGDSISRSGSGRKKAAGIAGLEQMGLDRRKNNERMIGSSFEDLEALMASAKEIVALAESFARQVGNGTDSATTAANALLAESASQLGLVTTKDIVGGGNSSGAESLYLSELSRNLAEFLTDDARGVLRKAGGIMSLVDLWAMFNRARGGVELVSPNDFEKAARLWEKLKLPVRLRTFKSGVMVVQSRDRTDETTIKALLTWLRDLHDIPPEREVPWDWQEFGRGVTAHDAAERFGWSIGVAEEELEMAEERGVLCREEGLEGLKFWENYIDTGEHRQRPRQATEADQIIEALTANGML

SEQ ID NO: 32394 - DNA, 3965 bp, Muscodor strobelii
  misc_feature: SGI EST ID NO. CUFF.76704.0
  misc_feature: Variant of the nucleotide sequence at SEQ ID NO 32392
caacattgtagttcaaataggatagacatgcaacaatacttgcaaattactactaagcaacaaatgggattcgtcttgaaacgaatgcctcaaatcgcctatactactgtttttgaattaacgattgtctacatcgcaggtccgttaataggtggatcgctgcattgtttgatgccacatcacagtatcgcttattttgtcctttgcctggcacgctcgccctaagctactttgaaggggaagcaagtatactatatctgtttgatacggagggagctatagcagagatgtatagccttagagttgtctcgttagcctttgaaaaccttaaaccacaaaatgaaacgataatttatgggtatacatgtatgcgtctggatttagaccactgaagaagatggcatctgatgccgtttccaccggtgcgcgctgcacgtcacctgtaggacccctcccccaccatcgactaacggttgaatcttcccactccaaaccatgttcctgaagcagatcgacctgacgacggcccttcgaccttcgtatctccccgacgaggtgcttctgtttgtccaggacaatgtagggctctacgagggcaagttcaaactcccgaaccaacagctcggtcaggtctacttgacctcccaccgagtctgctatgtcgacaccgccgagcctaggaagtactcggtcgcccttgacctaaaagatgtcgagcgctacgagttctacgccggctttctcaagtcgtctgcaaaagtcaccctcgtgccgaagcctccaaagcgcgcctcgttgcagtcgagggcggccgctgcgtcgtcatcaccgttacctacctcagaccgttcctacacgcctccatcctccaagccaccccaggcaagctcggccacatgggtctgcacgatatgcagctttccaaaccctgttccgtccaacttcgatcccaccgtcgccaactccaacgcgccgctgcctccatgcctgtcatgcggaattaagccctccttgacccaggtcctgaaagcgtccatatcgcatgttgccagccgaccatcgggcggcacctctggcgacggtggcgggccagactcgccgcgcgccaataccgctgtagccaaaggtgtagctgagactgatggattccagtgcccgcgttgcacattctctaatcacccttcgttgctttcctgcgagatatgcggggctccgttgatttctaaggatgtgccagcgaatgtgtcgcaacagccaacccgcactgattcgccaggccccacgcttaaccaggcaagtcccgtaggtgttgagaatcctgagagtgtcaaaatatcatttcggagtggaggagaaaagatcttctatgaacggcttaagggctcaatgatccagagaaaatggctcttacacgaagccccatttgtcccctccaacagtagggctggcgggactggtgaaggggactcgatatcgcgctcgggctccgggcgaaaaaaggctgcaggtattgcaggattagaacagatgggacttgaccgcagaaagaataatgagcgtatgatcggcagctctttcgaggatctggaggccttgatggcttctgccaaagagatcgttgccctcgcggagtcttttgctcgtcaagtcggtaacggaactgacagtgctaccacggcggccaatgctttgctggctgaatctgcaagccagctgggactagtcactactaaggacatagtgggtggtggaaatagttcaggtgcagaatctttatacctgtcggagctttcgaggaacttggctgagtttctaacggatgatgcacgtggtgtgctgcggaaagctggcggtatcatgagtctggtcgacttatgggccatgttcaatagagcccgtggaggtgttgaactcgttagtcccaacgactttgaaaaggctgcccgcctctgggagaaattaaagctccctgtgcggctgcgaacatttaagagtggcgtgatggtcgtgcaaagtcgagatcgaaccgatgaaacgactatcaaggcccttctgacctggcttcgggatctgcacgatataccacccgagcgagaagtaccctgggactggcaggagtttggccgcggggtcacggctcacgacgcggcagagcgctttggatggagcattggcgttgctgaggaagaattagaaatggccgaagaaagaggcgtgctctgtcgcgaagaagggctggaaggcttgaagttctgggaaaactacatcgatactggcgagcatcgtcaacgaccacgccaggccacagaagctgatcaaatcattgaggcattgactgctaatggaatgttatgatgcgtgtcaatagaccaatatcggacacccgaatgaacaattctccaatcctatctaccgtgtttttccgtgtatgtatagccgatgtgcaccaccttaccaatatgccaccctaagaggagacttgccttcccaatccctattgcccatctaaagtctatagtcctatatgacaaaactctgatatctaacatctaacgcccgctcgctgaacgccaaatcccatgacaaccgtgtacttatatgatatgtatatacagactcaccagttaggggcttaaacgagcctttccatcaaattctttcgtactttcatattcaccgttccaccaagaccaaacgccggcacgatgcgacctattcttgccgcacaggaagtcagccatttggatctgacgagctcccaacgcgctccccatgagacaggaccggctgccgagggtcgattataaagatccagacccaacaggtgtatgggcgttgagaaaatctgcacagtcgcaggcgctaagaattgggcaatcgtttcgcccctgaccgttttctgcatttcgtcgctcaaggattgggagatccgaggaccgagtagtggcgggatattgaacgacgcaaatatcgtcaaacagtctctggccgcaaacagtgcatagctcggtagcggcaccgggcggggcgggccaccgggaccgaacattttgacatagacctggtctttgaagatgcaaagcccgatattagccgtcgatgacgcagcgaatttagtcgtccctgatgtgacgtgcgttgcgggctttgattgcactgtcgatgttgcggtgtcgagcatgttcgccgtgagatacgtccctccgtataccatgaatatgagtgccacgggtttagagaatagcatggtttgcggtcgagcgagtagatttcgaaacgaactcttgagggattctccgagtgtgactcgaccggttgcggattccatgatacccctagatacaagcagttcagtgtggatcccgcacgagcttctaagaacagagtttaacggtcgcttacctgtcaatgatggagatgaacggcgcgatcattgacgcagcgctcgcagcaccagcaagatctgcgccgaggcgcaatggaagattcttagtgttccatttctcactcagcttaggcgacatttcgacgtcttgctgtttcccgggcaagttcgctgctggtacgggctctggcaacgcgcccttcatgatttattcttggagcagcaactcaacagatagcaacagacttccacagtctttaacgactgatgtcacaattgctaatattaagacagagggcgcaactgccactgctaaagacgcgatgacgcgaaccggaaagaagacgggcacacctcgcgatgcattggggtcagacgtggttgttcgggttgcttttgctaatggtcattaaacttgtccaactgtgctttcgtgctgtctagacataaattcagaaacgattcgccagaatgaatccaagatcaacgacgctgctcagacaatgaaaggtcgatatatgctatgacaaatgcatcgtcatgactgggtgattaagcattaagtactagcggctctgag

SEQ ID NO: 32395 - DNA, 891 bp, Muscodor strobelii
  misc_feature: SGI cDNA ID NO. 571165
  misc_feature: Reduced expression when VOC is produced
  misc_feature: Encodes the peptide sequence at SEQ ID NO 32396
atgaagggcgcgttgccagagcccgtaccagcagcgaacttgcccgggaaacagcaagacgtcgaaatgtcgcctaagctgagtgagaaatggaacactaagaatcttccattgcgcctcggcgcagatcttgctggtgctgcgagcgctgcgtcaatgatcgcgccgttcatctccatcattgacaggggtatcatggaatccgcaaccggtcgagtcacactcggagaatccctcaagagttcgtttcgaaatctactcgctcgaccgcaaaccatgctattctctaaacccgtggcactcatattcatggtatacggagggacgtatctcacggcgaacatgctcgacaccgcaacatcgacagtgcaatcaaagcccgcaacgcacgtcacatcagggacgactaaattcgctgcgtcatcgacggctaatatcgggctttgcatcttcaaagaccaggtctatgtcaaaatgttcggtcccggtggcccgccccgcccggtgccgctaccgagctatgcactgtttgcggccagagactgtttgacgatatttgcgtcgttcaatatcccgccactactcggtcctcggatctcccaatccttgagcgacgaaatgcagaaaacggtcaggggcgaaacgattgcccaattcttagcgcctgcgactgtgcagattttctcaacgcccatacacctgttgggtctggatctttataatcgaccctcggcagccggtcctgtctcatggggagcgcgttgggagctcgtcagatccaaatggctgacttcctgtgcggcaagaataggtcgcatcgtgccggcgtttggtcttggtggaacggtgaatatgaaagtacgaaagaatttgatggaaaggctcgtttaa

SEQ ID NO: 32396 - protein, 296 aa, Muscodor strobelii
  misc_feature: SGI Peptide ID NO. 571165
  misc_feature (19)..(295): NCBI GI: 154309139 Blast Desc: BC1G_07464 [Botryotinia fuckeliana B05.10] gi|150852507|gb|EDN27699.1| BC1G_07464 [Botryotinia fuckeliana B05.10]
  misc_feature (19)..(295): NCBI GI: 156049555 Blast Desc: SS1G_08484 [Sclerotinia sclerotiorum 1980] gi|154692883|gb|EDN92621.1| SS1G_08484 [Sclerotinia sclerotiorum 1980]
  misc_feature (24)..(295): NCBI GI: 39952125 Blast Desc: MGG_01705 [Magnaporthe grisea 70-15] gi|145020451|gb|EDK04580.1| MGG_01705 [Magnaporthe grisea 70-15]
  misc_feature (17)..(295): NCBI GI: 256727399 Blast Desc: [Nectria haematococca mpVI 77-13-4]
  misc_feature (10)..(295): NCBI GI: 46121763 Blast Desc: FG05260.1 [Gibberella zeae PH-1]
  misc_feature (28)..(295): NCBI GI: 85107265 Blast Desc: NCU06596 [Neurospora crassa OR74A] gi|28923942|gb|EAA33102.1| conserved [Neurospora crassa OR74A]
  misc_feature (15)..(275): NCBI GI: 261354959 Blast Desc: VDBG_03496 [Verticillium albo-atrum VaMs.102]
  misc_feature (28)..(280): NCBI GI: 116195156 Blast Desc: CHGG_04176 [Chaetomium globosum CBS 148.51] gi|88180089|gb|EAQ87557.1| CHGG_04176 [Chaetomium globosum CBS 148.51]
  misc_feature (8)..(295): NCBI GI: 189210221 Blast Desc: PTRG_11111 [Pyrenophora tritici-repentis Pt-1C-BFP] gi|187977535|gb|EDU44161.1| PTRG_11111 [Pyrenophora tritici-repentis Pt-1C-BFP]
  misc_feature (28)..(243): NCBI GI: 171691060 Blast Desc: protein product [Podospora anserina] gi|170945478|emb|CAP71590.1| protein product [Podospora anserina]
  misc_feature: Useful for introducing or modulating the production of volatile compounds
MKGALPEPVPAANLPGKQQDVEMSPKLSEKWNTKNLPLRLGADLAGAASAASMIAPFISIIDRGIMESATGRVTLGESLKSSFRNLLARPQTMLFSKPVALIFMVYGGTYLTANMLDTATSTVQSKPATHVTSGTTKFAASSTANIGLCIFKDQVYVKMFGPGGPPRPVPLPSYALFAARDCLTIFASFNIPPLLGPRISQSLSDEMQKTVRGETIAQFLAPATVQIFSTPIHLLGLDLYNRPSAAGPVSWGARWELVRSKWLTSCAARIGRIVPAFGLGGTVNMKVRKNLMERLV

SEQ ID NO: 32397 - DNA, 3879 bp, Muscodor strobelii
  misc_feature: SGI EST ID NO. CUFF.76705.1
  misc_feature: Variant of the nucleotide sequence at SEQ ID NO 32395
gattctcagagccgctagtacttaatgcttaatcacccagtcatgacgatgcatttgtcatagcatatatcgacctttcattgtctgagcagcgtcgttgatcttggattcattctggcgaatcgtttctgaatttatgtctagacagcacgaaagcacagttggacaagtttaatgaccattagcaaaagcaacccgaacaaccacgtctgaccccaatgcatcgcgaggtgtgcccgtcttctttccggttcgcgtcatcgcgtctttagcagtggcagttgcgccctctgtcttaatattagcaattgtgacatcagtcgttaaagactgtggaagtctgttgctatctgttgagttgctgctccaagaataaatcatgaagggcgcgttgccagagcccgtaccagcagcgaacttgcccgggaaacagcaagacgtcgaaatgtcgcctaagctgagtgagaaatggaacactaagaatcttccattgcgcctcggcgcagatcttgctggtgctgcgagcgctgcgtcaatgatcgcgccgttcatctccatcattgacaggggtatcatggaatccgcaaccggtcgagtcacactcggagaatccctcaagagttcgtttcgaaatctactcgctcgaccgcaaaccatgctattctctaaacccgtggcactcatattcatggtatacggagggacgtatctcacggcgaacatgctcgacaccgcaacatcgacagtgcaatcaaagcccgcaacgcacgtcacatcagggacgactaaattcgctgcgtcatcgacggctaatatcgggctttgcatcttcaaagaccaggtctatgtcaaaatgttcggtcccggtggcccgccccgcccggtgccgctaccgagctatgcactgtttgcggccagagactgtttgacgatatttgcgtcgttcaatatcccgccactactcggtcctcggatctcccaatccttgagcgacgaaatgcagaaaacggtcaggggcgaaacgattgcccaattcttagcgcctgcgactgtgcagattttctcaacgcccatacacctgttgggtctggatctttataatcgaccctcggcagccggtcctgtctcatggggagcgcgttgggagctcgtcagatccaaatggctgacttcctgtgcggcaagaataggtcgcatcgtgccggcgtttggtcttggtggaacggtgaatatgaaagtacgaaagaatttgatggaaaggctcgtttaagcccctaactggtgagtctgtatatacatatcatataagtacacggttgtcatgggatttggcgttcagcgagcgggcgttagatgttagatatcagagttttgtcatataggactatagactttagatgggcaatagggattgggaaggcaagtctcctcttagggtggcatattggtaaggtggtgcacatcggctatacatacacggaaaaacacggtagataggattggagaattgttcattcgggtgtccgatattggtctattgacacgcatcataacattccattagcagtcaatgcctcaatgatttgatcagcttctgtggcctggcgtggtcgttgacgatgctcgccagtatcgatgtagttttcccagaacttcaagccttccagcccttcttcgcgacagagcacgcctctttcttcggccatttctaattcttcctcagcaacgccaatgctccatccaaagcgctctgccgcgtcgtgagccgtgaccccgcggccaaactcctgccagtcccagggtacttctcgctcgggtggtatatcgtgcagatcccgaagccaggtcagaagggccttgatagtcgtttcatcggttcgatctcgactttgcacgaccatcacgccactcttaaatgttcgcagccgcacagggagctttaatttctcccagaggcgggcagccttttcaaagtcgttgggactaacgagttcaacacctccacgggctctattgaacatggcccataagtcgaccagactcatgataccgccagctttccgcagcacaccacgtgcatcatccgttagaaactcagccaagttcctcgaaagctccgacaggtataaagattctgcacctgaactatttccaccacccactatgtccttagtagtgactagtcccagctggcttgcagattcagccagcaaagcattggccgccgtggtagcactgtcagttccgttaccgacttgacgagcaaaagactccgcgagggcaacgatctctttggcagaagccatcaaggcctccagatcctcgaaagagctgccgatcatacgctcattattctttctgcggtcaagtcccatctgttctaatcctgcaatacctgcagccttttttcgcccggagcccgagcgcgatatcgagtccccttcaccagtcccgccagccctactgttggaggggacaaatggggcttcgtgtaagagccattttctctggatcattgagcccttaagccgttcatagaagatcttttctcctccactccgaaatgatattttgacactctcaggattctcaacacctacgggacttgcctggttaagcgtggggcctggcgaatcagtgcgggttggctgttgcgacacattcgctggcacatccttagaaatcaacggagccccgcatatctcgcaggaaagcaacgaagggtgattagagaatgtgcaacgcgggcactggaatccatcagtctcagctacacctttggctacagcggtattggcgcgcggcgagtctggcccgccaccgtcgccagaggtgccgcccgatggtcggctggcaacatgcgatatggacgctttcaggacctgggtcaaggagggcttaattccgcatgacaggcatggaggcagcggcgcgttggagttggcgacggtgggatcgaagttggacggaacagggtttggaaagctgcatatcgtgcagacccatgtggccgagcttgcctggggtggcttggaggatggaggcgtgtaggaacggtctgaggtaggtaacggtgatgacgacgcagcggccgccctcgactgcaacgaggcgcgctttggaggcttcggcacgagggtgacttttgcagacgacttgagaaagccggcgtagaactcgtagcgctcgacatcttttaggtcaagggcgaccgagtacttcctaggctcggcggtgtcgacatagcagactcggtgggaggtcaagtagacctgaccgagctgttggttcgggagtttgaacttgctacgcggcagagggttgtcttgtcagtcaacgtcgcaaggcacgggtccgagatgcagaccactcttacccctcgtagagccctacattgtcctggacaaacagaagcacctcgtcggggagatacgaaggtcgaagggccgtcgtcaggtcgatctgcttcaggaacatggtttggagtgggaagattcaaccgttagtcgatggtgggggaggggtcctacaggtgacgtgcagcgcgcaccggtggaaacggcatcagatgccatcttcttcagtggtctaaatccagacgcatacatgtatacccataaattatcgtttcattttgtggtttaaggttttcaaaggctaacgagacaactctaaggctatacatctctgctatagctccctccgtatcaaacagatatagtatacttgcttccccttcaaagtagcttagggcgagcgtgccaggcaaaggacaaaataagcgatactgtgatgtggcatcaaacaatgcagcgatccacctattaacggacctgcgatgtagacaatcgttaattcaaaaacagtagtataggcgat

SEQ ID NO: 32398 - DNA, 2109 bp, Muscodor strobelii
  misc_feature: SGI cDNA ID NO. 571166
  misc_feature: Reduced expression when VOC is produced
  misc_feature: Encodes the peptide sequence at SEQ ID NO 32399
atgattattcaaaaattgacccctgagctgctgatttcagctcctcgacgtggaccagcagtgccgaatcacgatggaactcttgccttgtatacagagtcgactcaccaaatcggagtcgagactgcgagacgaatctacgttctgaatatctcaactggagagtctcagtgtattctcgatgacagcagtgcttttgatgccacctggcttggagatgactccaatacgatagtctttctggaggcaggcacttcgggattaacattcgttgtaacgatcgataccagtcatcatcctgccgaagtttccatcgcaggtcatattcctgcccctgttcgaggacttaaggttgctgccttgcgcgatggctctatctcgttcactgttatgggatacgttgacgcggatggcaatttactgaattatgaggacaaggcactacatacaggacgagtttatgagtcctctccaataccgtcgtggaagcttcacaccaactctcgagaccaatctatttggtactctaccctcgtcaaagaagagaacacatggagaatcggggagctcctgcgtaacgccttaaagagaactaacatatgtctgtctctaaatgtagatggagagggtgagataaaagatcaatacgacttatctgaaaggggcattttgttcgtaaccagtacaacgagacagaacggtgatgttatgagtaccaccagcgagatatatatccaacagattgacaacttccatgccgacacaaccgagcctccaacgaagattgacgtccccgatgatggataccaaagtatttgttcgtcgccacgttttggcccagatgggcgcatggttgcgtttctcttccgctcggcgccttggtcacggagaagggatatttacatacaccaccccgaatcgcggctcgccgtcaatatcttcgacatggtaacgggacacccgtggtcacttactccgcatggtatacgattttctgcagatggtcactcgctttacatatctgcacataaacaaggaaatatgacattatttcgcctggacctgcaacccaatgcttatcctcgacctctcgcccacatcggctcagtcacagctttctatccgctaggacaaacagagaacgaccgagtcctagtgactagctccagctttgtcgaaagttgcctctaccagattgttgcggcaaaagcccaggtcgatgccgtgaccctgtcctccgcgaccaaccacggtcaccatttgggactgtcgccaaatcaagtttccgacttttacttcgagggtggtggcgactatgtgatccatgcatggatggtgaagcctcgtcacatggagcaaggcaagaaatacccgattgctatgcttctccacgacggtccagctggttcttggttgaatatctgggactttcagttcaacgccgcattatgggccgcgcaaggtttcgtcgctgtgcttcctaatatcacgggcagcacgggttacgggcgagatcacgtactcgacatgcctgaaaactgggttgatcgcccatacgatgatttagttgcttgcgttcattctcttcgaggtgtcagcggagttgacattgataatgctatcattgcgggagcaggctatggtggttatctgataaactggatacaatcgcatccacttgcaagacgtttcaaagcgatgatatgctatgctggcataatgaatcccataatgattgacaacactcaatctggcctatccctggagctgagaatcaatgatgatgcacgtgctcggtacaatccagcacgaaccattttattgcaaaattggaagacccctatgctcgtcatacacaatgagagacactacgatattcctatatcccaagccctgatcgctttcaacaatctgcgcgcccaaggtatcccgtcaaaattcctgacattctctgatgaaggtcatgagattaagaaacctgagaatttacttgaatggtatcgacaggttttttccttcgttgaccagttttgcggcacaagtcatgggaatgtgcatattgttgcagaagtagagtcaaaggctgcaaatcgcaaccgttccatctaa

SEQ ID NO: 32399 - protein, 702 aa, Muscodor strobelii
  misc_feature: SGI Peptide ID NO. 571166
  misc_feature (475)..(681): Pfam Id: PF00326 Pfam Desc: Prolyl oligopeptidase family
  misc_feature (475)..(578): Pfam Id: PF00326 Pfam Desc: Prolyl oligopeptidase family
  misc_feature (595)..(681): Pfam Id: PF00326 Pfam Desc: Prolyl oligopeptidase family
  misc_feature (1)..(676): NCBI GI: 212275971 Blast Desc: LOC100191863 [Zea mays] gi|194690042|gb|ACF79105.1| [Zea mays]
  misc_feature (5)..(679): NCBI GI: 238483253 Blast Desc: oligopeptidase family protein [Aspergillus flavus NRRL3357] gi|220700915|gb|EED57253.1| oligopeptidase family protein [Aspergillus flavus NRRL3357]
  misc_feature (5)..(702): NCBI GI: 145253200 Blast Desc: An16g08150 [Aspergillus niger] gi|134083673|emb|CAK47064.1| protein product [Aspergillus niger]
  misc_feature (5)..(679): NCBI GI: 223974671 Blast Desc: [Zea mays]
  misc_feature (6)..(679): NCBI GI: 156045441 Blast Desc: SS1G_09909 [Sclerotinia sclerotiorum 1980] gi|154694304|gb|EDN94042.1| SS1G_09909 [Sclerotinia sclerotiorum 1980]
  misc_feature (5)..(679): NCBI GI: 119484234 Blast Desc: oligopeptidase family protein [Neosartorya fischeri NRRL 181] gi|119410176|gb|EAW20123.1| oligopeptidase family protein [Neosartorya fischeri NRRL 181]
  misc_feature (5)..(679): NCBI GI: 146324747 Blast Desc: oligopeptidase family protein [Aspergillus fumigatus Af293] gi|129556134|gb|EAL85241.2| oligopeptidase family protein [Aspergillus fumigatus Af293]
  misc_feature (5)..(679): NCBI GI: 159123716 Blast Desc: oligopeptidase family protein [Aspergillus fumigatus A1163]
  misc_feature (5)..(690): NCBI GI: 46108426 Blast Desc: FG01095.1 [Gibberella zeae PH-1]
  misc_feature (5)..(679): NCBI GI: 121719765 Blast Desc: oligopeptidase family protein [Aspergillus clavatus NRRL 1] gi|119404793|gb|EAW15155.1| oligopeptidase family protein [Aspergillus clavatus NRRL 1]
  misc_feature (261)..(661): SWISSPROT Homolog: EC 3.4.19.1 Acylaminoacyl-peptidase
  misc_feature: Useful for introducing or modulating the production of volatile compounds
MIIQKLTPELLISAPRRGPAVPNHDGTLALYTESTHQIGVETARRIYVLNISTGESQCILDDSSAFDATWLGDDSNTIVFLEAGTSGLTFVVTIDTSHHPAEVSIAGHIPAPVRGLKVAALRDGSISFTVMGYVDADGNLLNYEDKALHTGRVYESSPIPSWKLHTNSRDQSIWYSTLVKEENTWRIGELLRNALKRTNICLSLNVDGEGEIKDQYDLSERGILFVTSTTRQNGDVMSTTSEIYIQQIDNFHADTTEPPTKIDVPDDGYQSICSSPRFGPDGRMVAFLFRSAPWSRRRDIYIHHPESRLAVNIFDMVTGHPWSLTPHGIRFSADGHSLYISAHKQGNMTLFRLDLQPNAYPRPLAHIGSVTAFYPLGQTENDRVLVTSSSFVESCLYQIVAAKAQVDAVTLSSATNHGHHLGLSPNQVSDFYFEGGGDYVIHAWMVKPRHMEQGKKYPIAMLLHDGPAGSWLNIWDFQFNAALWAAQGFVAVLPNITGSTGYGRDHVLDMPENWVDRPYDDLVACVHSLRGVSGVDIDNAIIAGAGYGGYLINWIQSHPLARRFKAMICYAGIMNPIMIDNTQSGLSLELRINDDARARYNPARTILLQNWKTPMLVIHNERHYDIPISQALIAFNNLRAQGIPSKFLTFSDEGHEIKKPENLLEWYRQVFSFVDQFCGTSHGNVHIVAEVESKAANRNRSI

SEQ ID NO: 32400 - DNA, 3136 bp, Muscodor strobelii
  misc_feature: SGI EST ID NO. CUFF.76641.0
  misc_feature: Variant of the nucleotide sequence at SEQ ID NO 32398
ctcctacgaacgtgaatatttccgagtgcgtgctgataagccatccatcatcataagacttcgacaatgttctggctttacatttcaaagtcatattatatcgaactttctctagcgtcggtggatctattttctccattcctcaatgaagcgtgggatctgaatatgcttctcggaattatacctgatggggaagaaaaaaggatggaattgaccattgaaagtgattacacattcttgaacccagactttgatcgggccacagtactgatacttctcattatgacttctcaattcgtaaagtactgctatcttggtgtttctagtggagtttcgggtgtctaaattgtgtagagaaaaagatacaaaacagttgtggcgtactgggtacattctaggctcccaaattaatcccacgtcgaagcacgcgttagaactgattgctcggacttcgtgaatataattcagtggtttagaataattcgttggagacccatgcggtgaatcttattgtcttgtatccctcctctcaacgtacttcgcccataatgattattcaaaaattgacccctgagctgctgatttcagctcctcgacgtggaccagcagtgccgaatcacgatggaactcttgccttgtatacagagtcgactcaccaaatcggagtcgagactgcgagacgaatctacgttctgaatatctcaactggagagtctcagtgtattctcgatgacagcagtgcttttgatgccacctggcttggagatgactccaatacgatagtctttctggaggcaggcacttcgggattaacattcgttgtaacgatcgataccagtcatcatcctgccgaagtttccatcgcaggtcatattcctgcccctgttcgaggacttaaggttgctgccttgcgcgatggctctatctcgttcactgttatgggatacgttgacgcggatggcaatttactgaattatgaggacaaggcactacatacaggacgagtttatgagtcctctccaataccgtcgtggaagcttcacaccaactctcgagaccaatctatttggtactctaccctcgtcaaagaagagaacacatggagaatcggggagctcctgcgtaacgccttaaagagaactaacatatgtctgtctctaaatgtagatggagagggtgagataaaagatcaatacgacttatctgaaaggggcattttgttcgtaaccagtacaacgagacagaacggtgatgttatgagtaccaccagcgagatatatatccaacagattgacaacttccatgccgacacaaccgagcctccaacgaagattgacgtccccgatgatggataccaaagtatttgttcgtcgccacgttttggcccagatgggcgcatggttgcgtttctcttccgctcggcgccttggtcacggagaagggatatttacatacaccaccccgaatcgcggctcgccgtcaatatcttcgacatggtaacgggacacccgtggtcacttactccgcatggtatacgattttctgcagatggtcactcgctttacatatctgcacataaacaaggaaatatgacattatttcgcctggacctgcaacccaatgcttatcctcgacctctcgcccacatcggctcagtcacagctttctatccgctaggacaaacagagaacgaccgagtcctagtgactagctccagctttgtcgaaagttgcctctaccagattgttgcggcaaaagcccaggtcgatgccgtgaccctgtcctccgcgaccaaccacggtcaccatttgggactgtcgccaaatcaagtttccgacttttacttcgagggtggtggcgactatgtgatccatgcatggatggtgaagcctcgtcacatggagcaaggcaagaaatacccgattgctatgcttctccacgacggtccagctggttcttggttgaatatctgggactttcagttcaacgccgcattatgggccgcgcaaggtttcgtcgctgtgcttcctaatatcacgggcagcacgggttacgggcgagatcacgtactcgacatgcctgaaaactgggttgatcgcccatacgatgatttagttgcttgcgttcattctcttcgaggtgtcagcggagttgacattgataatgctatcattgcgggagcaggctatggtggttatctgataaactggatacaatcgcatccacttgcaagacgtttcaaagcgatgatatgctatgctggcataatgaatcccataatgattgacaacactcaatctggcctatccctggagctgagaatcaatgatgatgcacgtgctcggtacaatccagcacgaaccattttattgcaaaattggaagacccctatgctcgtcatacacaatgagagacactacgatattcctatatcccaagccctgatcgctttcaacaatctgcgcgcccaaggtatcccgtcaaaattcctgacattctctgatgaaggtcatgagattaagaaacctgagaatttacttgaatggtatcgacaggttttttccttcgttgaccagttttgcggcacaagtcatgggaatgtgcatattgttgcagaagtagagtcaaaggctgcaaatcgcaaccgttccatctaaatatcttgatatttagaccatataagaagaattgatgttatcagtttttgagtcatctggcacatcgtctattgaaaatgtggaactatcactatcacacataatgcacgaaatggaaaacccataacgggacacgagagaagggtcgaacaagtaggcatttcgaataaggagcaagacactaaaagaatcaatatttcagtcgcaatatcaatgcttggctatgtctctataattgaagcttactaaagcagcgacgataacttattggaagaatactagataggatcgtcttcctcctttcgctcgtccctccgtctctcaccccaggtagttgaaacggcagaaacagcagaaaaaaccatatcctcacggttagtcatttgttgttagttgcctgcaacctacttcaaagaaaagaaaagaaaagaaggaaagaaagaaagaagtaaaaatgaccattcaacttcatacgtcca

SEQ ID NO: 32401 - DNA, 567 bp, Muscodor strobelii
  misc_feature: SGI cDNA ID NO. 571167
  misc_feature: Encodes the peptide sequence at SEQ ID NO 32402
atggagaagccagagaaacctaagatcactgctcgtgataggaaaatcatcgccttcttcaactcagtaattttcgttgctagcgttgtgtcgctcgtgaacgcaattctttccaaggtcaaatctaagcctagtgacgatccacctccaagcccagtcatcaaattcaagcgtgatggcgatacggcttcagggccaattagcgtcaataccgccaatgacgttggtctcgccgaaagcgcatacggtttggcactggcattccctggatttgtctttgcgttgctagaaatagatctgggttggatatggaccgctctggaagttattggacttttccttttccttgcttccagcataatcaactggataccgggttttggtacagatctacagggtgaaaccaagacctatatcctaatcgttggcttcgctagtattgttggattcctggcaacaatgatactcttatttggcgaatcttatttcgcgtacaagaagcgtaaataccgtaaagatctcgataaatggcaaaaggaacagaacaagggaagagtggacgtatga

SEQ ID NO: 32402 - protein, 188 aa, Muscodor strobelii
  misc_feature: SGI Peptide ID NO. 571167
MEKPEKPKITARDRKIIAFFNSVIFVASVVSLVNAILSKVKSKPSDDPPPSPVIKFKRDGDTASGPISVNTANDVGLAESAYGLALAFPGFVFALLEIDLGWIWTALEVIGLFLFLASSIINWIPGFGTDLQGETKTYILIVGFASIVGFLATMILLFGESYFAYKKRKYRKDLDKWQKEQNKGRVDV

SEQ ID NO: 32403 - DNA, 1484 bp, Muscodor strobelii
  misc_feature: SGI EST ID NO. CUFF.76642.2
  misc_feature: Variant of the nucleotide sequence at SEQ ID NO 32401
gttattggacttttccttttccttgcttccagcataatcaactggataccgggttttggtacagatctacagggtgaaaccaagacctatatcctaatcgttggcttcgctagtattgttggattcctggcaacaatgatactcttatttggcgaatcttatttcgcgtacaagaagcgtaaataccgtaaagatctcgataaatggcaaaaggaacagaacaagggaagagtggacgtatgaagttgaatggtcatttttacttctttctttctttccttcttttcttttcttttctttgaagtaggttgcaggcaactaacaacaaatgactaaccgtgaggatatggttttttctgctgtttctgccgtttcaactacctggggtgagagacggagggacgagcgaaaggaggaagacgatcctatctagtattcttccaataagttatcgtcgctgctttagtaagcttcaattatagagacatagccaagcattgatattgcgactgaaatattgattcttttagtgtcttgctccttattcgaaatgcctacttgttcgacccttctctcgtgtcccgttatgggttttccatttcgtgcattatgtgtgatagtgatagttccacattttcaatagacgatgtgccagatgactcaaaaactgataacatcaattcttcttatatggtctaaatatcaagatatttagatggaacggttgcgatttgcagcctttgactctacttctgcaacaatatgcacattcccatgacttgtgccgcaaaactggtcaacgaaggaaaaaacctgtcgataccattcaagtaaattctcaggtttcttaatctcatgaccttcatcagagaatgtcaggaattttgacgggataccttgggcgcgcagattgttgaaagcgatcagggcttgggatataggaatatcgtagtgtctctcattgtgtatgacgagcataggggtcttccaattttgcaataaaatggttcgtgctggattgtaccgagcacgtgcatcatcattgattctcagctccagggataggccagattgagtgttgtcaatcattatgggattcattatgccagcatagcatatcatcgctttgaactgcggttgaatgtcagttgcattcgccttaagcgaggaaggtaagggcggaaaacgaatcttacacgtcttgcaagtggatgcgattgtatccagtttatcagataaccaccatagcctgctcccgcaatgatagcattatcaatgtcaactccgctgacacctcgaagagaatgaacgcaagcaactaaatcatcgtatgggcgatcaacccagttttcaggcatgtctagatcttctcattagcccctcatccgatacttgtagtgtacacgtaccgagtacgtgatctcgcccgtaacccgtgctgcccgtgatattaggaagcacagcgacgaaaccttgcgcggccc

SEQ ID NO: 32404 - DNA, 1311 bp, Muscodor strobelii
  misc_feature: SGI cDNA ID NO. 571168
  misc_feature: Encodes the peptide sequence at SEQ ID NO 32405
atgacggcgtcctacatcatcgtcggagccggtgtgttcggcgtatccactgcctatcatctcattaagaagtacccagacgcgtctgtcactctcgtcgatcgagatgccttcgactcagatgatcgtgtagctgcgtcatgggactggaacaaagtagtgcgtgcagactatgatgatcttgcatactgcaagctcgcattggaagcgctggatatcttcaagtccgatcccttgtggattccacattaccatgagaccgggattttctggacatgtcgtgataactacgctcaggaagttattaaaaactaccagcgcctcggtcgagaatgcgatctcaaagctgtgtccgtcgaagaagcccgaaagctttacggtgggcttttcgaagatgccgactacgatggtgtcaccgaggtgctcataaatccgacaggtgggtggggtgctgccggagattctttgcgagcggtaacacgcgaagcaataagacttggtgtcaagtatgaagtggccgaagtcgcgacgctacaactaaaccagaatggccgatgctctggtgtcagaaccgtgaacggaaaagtcttgactgcctctcatacgattctctgtgccggggcctacacaggcactctactcgagtacagtgccgtgtatagcggtcgacccaatatctctgccgggtttagaattgtcgctggtggtgtcacaactggcatggtcacgcttgacgacgaatctttccccagattcgccaatatgcccacagcttttcaaggatatgctccagttgacggacctttcatcggctgtatccctccgactccagatcgtgaaatgaaatggtgggggcagactattttcaagaatacccgtgagattttgccaggtcactttgtttcatcgccccctccaaaacggaactacgaccaatgggccgtgtcgaggaggctcaaagaggatatcaaacatgccaataaagtattctatggtagtaaaaccgcgaattggaaattggagaaacatcgcatatgctgggacgcgttcaccactagctcagatttcatcatctcacctcactccgcttccgagggcttgtatattgcgacctgcggctctttccacggttacaagttctttccagttctcggcaagtacattatacaaatgatcgaaggcgaactatctcctgatctgaaagagaaatgggcttgggacagacaccgtccagacccaaaattcttccctgactggccaagatcagagatgaaagatttgattgacccagtgaggatctcaaaactgtga

SEQ ID NO: 32405 - protein, 436 aa, Muscodor strobelii
  misc_feature: SGI Peptide ID NO. 571168
  misc_feature (4)..(391): Pfam Id: PF01266 Pfam Desc: FAD dependent oxidoreductase
  misc_feature (3)..(430): NCBI GI: 256723264 Blast Desc: NECHADRAFT_86565 [Nectria haematococca mpVI 77-13-4]
  misc_feature (4)..(436): NCBI GI: 189200272 Blast Desc: sarcosine oxidase [Pyrenophora tritici-repentis Pt-1C-BFP] gi|187983572|gb|EDU49060.1| sarcosine oxidase [Pyrenophora tritici-repentis Pt-1C-BFP]
  misc_feature (2)..(430): NCBI GI: 46115148 Blast Desc: FG03416.1 [Gibberella zeae PH-1]
  misc_feature (2)..(430): NCBI GI: 7959289 Blast Desc: sarcosine oxidase [Cylindrocarpon didymum]
  misc_feature (4)..(436): NCBI GI: 169776257 Blast Desc: [Aspergillus oryzae RIB40] gi|238502957|ref|XP_002382712.1| sarcosine oxidase, [Aspergillus flavus NRRL3357] gi|83771330|dbj|BAE61462.1| protein product
  misc_feature (2)..(431): NCBI GI: 261357976 Blast Desc: sarcosine oxidase [Verticillium albo-atrum VaMs.102]
  misc_feature (4)..(430): NCBI GI: 255946578 Blast Desc: Pc22g00060 [Penicillium chrysogenum Wisconsin 54-1255] gi|211591073|emb|CAP97294.1| Pc22g00060 [Penicillium chrysogenum Wisconsin 54-1255]
  misc_feature (4)..(430): NCBI GI: 145248820 Blast Desc: An14g01210 [Aspergillus niger] gi|134081419|emb|CAK46460.1| protein product [Aspergillus niger]
  misc_feature (4)..(436): NCBI GI: 115387911 Blast Desc: ATEG_02283 [Aspergillus terreus NIH2624] gi|114195545|gb|EAU37245.1| ATEG_02283 [Aspergillus terreus NIH2624]
  misc_feature (4)..(431): NCBI GI: 39941902 Blast Desc: MGG_10800 [Magnaporthe grisea 70-15] gi|145019894|gb|EDK04122.1| MGG_10800 [Magnaporthe grisea 70-15]
  misc_feature (2)..(409): SWISSPROT Homolog: EC 1.5.3.7 L-pipecolate oxidase
MTASYIIVGAGVFGVSTAYHLIKKYPDASVTLVDRDAFDSDDRVAASWDWNKVVRADYDDLAYCKLALEALDIFKSDPLWIPHYHETGIFWTCRDNYAQEVIKNYQRLGRECDLKAVSVEEARKLYGGLFEDADYDGVTEVLINPTGGWGAAGDSLRAVTREAIRLGVKYEVAEVATLQLNQNGRCSGVRTVNGKVLTASHTILCAGAYTGTLLEYSAVYSGRPNISAGFRIVAGGVTTGMVTLDDESFPRFANMPTAFQGYAPVDGPFIGCIPPTPDREMKWWGQTIFKNTREILPGHFVSSPPPKRNYDQWAVSRRLKEDIKHANKVFYGSKTANWKLEKHRICWDAFTTSSDFIISPHSASEGLYIATCGSFHGYKFFPVLGKYIIQMIEGELSPDLKEKWAWDRHRPDPKFFPDWPRSEMKDLIDPVRISKL

SEQ ID NO: 32406 - DNA, 1948 bp, Muscodor strobelii
  misc_feature: SGI EST ID NO. CUFF.76651.0
  misc_feature: Variant of the nucleotide sequence at SEQ ID NO 32404
gccgaccggagaaattagaaccacctactggggtgtctgtacttatcaaagtaccgtgcactcaagatcagacatgatctaattgaacgccatgaaagatcccagatcttcatcggcacatccatgaattggcgggccagataacaacagcatccgggtacgagcagaggtagttactcagcccacgtgagcggtttctcggttatttacgccgccccgtctcgtgccttggtactccacctgcgaatgtccacgacatgtctataggcgacacgttgaggaaaacccaaactagatgttgtagcttatcaagtcgagagtacttctaacgtaccgataccggaataggcagtatagttggtccacgatgatcgatctgtaacagaatataagccaccaggcatgattgattgcagtgcgttgaaacgagcattagagacttgagtgccttgatcaccatttcagattcaacatgacggcgtcctacatcatcgtcggagccggtgtgttcggcgtatccactgcctatcatctcattaagaagtacccagacgcgtctgtcactctcgtcgatcgagatgccttcgactcagatgatcgtgtagctgcgtcatgggactggaacaaagtagtgcgtgcagactatgatgatcttgcatactgcaagctcgcattggaagcgctggatatcttcaagtccgatcccttgtggattccacattaccatgagaccgggattttctggacatgtcgtgataactacgctcaggaagttattaaaaactaccagcgcctcggtcgagaatgcgatctcaaagctgtgtccgtcgaagaagcccgaaagctttacggtgggcttttcgaagatgccgactacgatggtgtcaccgaggtgctcataaatccgacaggtgggtggggtgctgccggagattctttgcgagcggtaacacgcgaagcaataagacttggtgtcaagtatgaagtggccgaagtcgcgacgctacaactaaaccagaatggccgatgctctggtgtcagaaccgtgaacggaaaagtcttgactgcctctcatacgattctctgtgccggggcctacacaggcactctactcgagtacagtgccgtgtatagcggtcgacccaatatctctgccgggtttagaattgtcgctggtggtgtcacaactggcatggtcacgcttgacgacgaatctttccccagattcgccaatatgcccacagcttttcaaggatatgctccagttgacggacctttcatcggctgtatccctccgactccagatcgtgaaatgaaatggtgggggcagactattttcaagaatacccgtgagattttgccaggtcactttgtttcatcgccccctccaaaacggaactacgaccaatgggccgtgtcgaggaggctcaaagaggatatcaaacatgccaataaagtattctatggtagtaaaaccgcgaattggaaattggagaaacatcgcatatgctgggacgcgttcaccactagctcagatttcatcatctcacctcactccgcttccgagggcttgtatattgcgacctgcggctctttccacggttacaagttctttccagttctcggcaagtacattatacaaatgatcgaaggcgaactatctcctgatctgaaagagaaatgggcttgggacagacaccgtccagacccaaaattcttccctgactggccaagatcagagatgaaagatttgattgacccagtgaggatctcaaaactgtgaaggaattatgtgacaatcggacaggcgcaaaggatttaaggtttgataaagacctgctacttaaataacgtaatatttctgaattgtgatctagattttttgtatgagagcatgtcagtacgtgatacaatgtcgataatctaaatccaatgatcaagatttcca

SEQ ID NO: 32407 - DNA, 1323 bp, Muscodor strobelii
  misc_feature: SGI cDNA ID NO. 571169
  misc_feature: Encodes the peptide sequence at SEQ ID NO 32408
atgtctgagttcacgatctattactcgcccaaagtccttgcgttgaccctttccgcatctgtttttgccttcgcactttcatacttgtcaagtctccgtggcttgagatggttctctcaaagcaaagtcaagtctgatggcaagaaagccgtgagagcactgccagcttcgtggtacctctctcaagagatgtatgaacttgagcgacgagctatcttctccaagaagtggctccttaccactcaccaactgagacttcccaatgctggagactggctccgatacgaggttgctggttattcgtttgtcatcgccaaagaccgcactggtgccatcaatgcattccataatgtctgcagacaccgggctttccctgtcgtaacaaaggactctggtaacaacaacattctcgcctgcaagtaccacaactggtcatacgctctcaatggaaagcttaccaaagcacctggctaccaagagctggaggggttcgataagtctcagaacggcctattccccattcatgtacacatcgacaccaatggattcatctgggtgaatctcgaagccaaggagaagccaaccgttgcatggtcggacgactataagaacattgatcaacaagcaagattcaaggcttacaatttcgacaactacaaatttgaccacgcctgggagatggaaggagagtacaactggaaacttctaggtgataactacaacgagtgttaccattgcccaactacgcatcccgatatccctaccgtcgcggatctgagcgcctatggagtggtaacagacgctggatatatccagcacctaggcaatccaacacccgagcagatcgccagaggcttcaatgtagcagctacattctacttcccaaatgcctcgatgaatgtttcaccgcacttcttcttcacgcagcgatttgtgcctaaaggtcccaacacctcggtcatggcttacgaagtttaccggaacaaagactccagcgacgaggatttccaggttatcaacgatatctacaaacgcatcatgtcggaggacaagtacctctgtctcaatgcccacgcaaatatcaaggcaggcgtgtttgtcaacggagagatgcacccaaggctggaacaaggaccgttgttcttccagaacttggtgcgggaactagtcacagaacaccgtgaacaagaagaaaaggcaaaccaagaaatatggccagcccgacaagtactccctaagagcgctaaggagacagagaacgacaatgccttatgctcatctatagattgttccgcactgaggaaggaaggactcgcttggtga

SEQ ID NO: 32408 - protein, 440 aa, Muscodor strobelii
  misc_feature: SGI Peptide ID NO. 571169
  misc_feature (76)..(179): Pfam Id: PF00355 Pfam Desc: Rieske [2Fe-2S] domain
  misc_feature (29)..(430): NCBI GI: 261357975 Blast Desc: naphthalene 1,2-dioxygenase subunit alpha [Verticillium albo-atrum VaMs.102]
  misc_feature (24)..(439): NCBI GI: 256723356 Blast Desc: NECHADRAFT_72708 [Nectria haematococca mpVI 77-13-4]
  misc_feature (45)..(430): NCBI GI: 70983840 Blast Desc: Rieske 2Fe-2S family protein [Aspergillus fumigatus Af293] gi|66845072|gb|EAL85408.1| Rieske 2Fe-2S family protein, [Aspergillus fumigatus Af293] gi|159123575|gb|EDP48694.1| Rieske
  misc_feature (48)..(432): NCBI GI: 119485278 Blast Desc: Rieske [2Fe-2S] domain protein [Neosartorya fischeri NRRL 181] gi|119410327|gb|EAW20274.1| Rieske [2Fe-2S] domain protein [Neosartorya fischeri NRRL 181]
  misc_feature (50)..(437): NCBI GI: 67903338 Blast Desc: AN8656.2 [Aspergillus nidulans FGSC A4] gi|40741500|gb|EAA60690.1| AN8656.2 [Aspergillus nidulans FGSC A4] gi|259483125|tpe|CBF78242.1| TPA: Rieske 2Fe-2S family FGSC
  misc_feature (39)..(437): NCBI GI: 145612765 Blast Desc: MGG_12423 [Magnaporthe grisea 70-15] gi|145019893|gb|EDK04121.1| MGG_12423 [Magnaporthe grisea 70-15]
  misc_feature (49)..(432): NCBI GI: 145259338 Blast Desc: An04g09810 [Aspergillus niger] gi|134074960|emb|CAK39040.1| protein product [Aspergillus niger]
  misc_feature (46)..(440): NCBI GI: 115491209 Blast Desc: conserved [Aspergillus terreus NIH2624] gi|114197092|gb|EAU38792.1| conserved [Aspergillus terreus NIH2624]
  misc_feature (51)..(440): NCBI GI: 169766248 Blast Desc: [Aspergillus oryzae RIB40] gi|83765450|dbj|BAE55593.1| protein product [Aspergillus oryzae]
  misc_feature (51)..(440): NCBI GI: 238482951 Blast Desc: Rieske 2Fe-2S family protein, [Aspergillus flavus NRRL3357] gi|220700764|gb|EED57102.1| Rieske 2Fe-2S family protein, [Aspergillus flavus NRRL3357]
  misc_feature (55)..(390): SWISSPROT Homolog: EC 1.14.15.7 Choline monooxygenase
MSEFTIYYSPKVLALTLSASVFAFALSYLSSLRGLRWFSQSKVKSDGKKAVRALPASWYLSQEMYELERRAIFSKKWLLTTHQLRLPNAGDWLRYEVAGYSFVIAKDRTGAINAFHNVCRHRAFPVVTKDSGNNNILACKYHNWSYALNGKLTKAPGYQELEGFDKSQNGLFPIHVHIDTNGFIWVNLEAKEKPTVAWSDDYKNIDQQARFKAYNFDNYKFDHAWEMEGEYNWKLLGDNYNECYHCPTTHPDIPTVADLSAYGVVTDAGYIQHLGNPTPEQIARGFNVAATFYFPNASMNVSPHFFFTQRFVPKGPNTSVMAYEVYRNKDSSDEDFQVINDIYKRIMSEDKYLCLNAHANIKAGVFVNGEMHPRLEQGPLFFQNLVRELVTEHREQEEKANQEIWPARQVLPKSAKETENDNALCSSIDCSALRKEGLAW

SEQ ID NO: 32409 - DNA, 1386 bp, Muscodor strobelii
  misc_feature: SGI EST ID NO. CUFF.76657.0
  misc_feature: Variant of the nucleotide sequence at SEQ ID NO 32407
caagaagtggctccttaccactcaccaactgagacttcccaatgctggagactggctccgatacgaggttgctggttattcgtttgtcatcgccaaagaccgcactggtgccatcaatgcattccataatgtctgcagacaccgggctttccctgtcgtaacaaaggactctggtaacaacaacattctcgcctgcaagtaccacaactggtcatacgctctcaatggaaagcttaccaaagcacctggctaccaagagctggaggggttcgataagtctcagaacggcctattccccattcatgtacacatcgacaccaatggattcatctgggtgaatctcgaagccaaggagaagccaaccgttgcatggtcggacgactataagaacattgatcaacaagcaagattcaaggcttacaatttcgacaactacaaatttgaccacgcctgggagatggaaggagagtacaactggaaacttctaggtgataactacaacgagtgttaccattgcccaactacgcatcccgatatccctaccgtcgcggatctgagcgcctatggagtggtaacagacgctggatatatccagcacctaggcaatccaacacccgagcagatcgccagaggcttcaatgtagcagctacattctacttcccaaatgcctcgatgaatgtttcaccgcacttcttcttcacgcagcgatttgtgcctaaaggtcccaacacctcggtcatggcttacgaagtttaccggaacaaagactccagcgacgaggatttccaggttatcaacgatatctacaaacgcatcatgtcggaggacaagtacctctgtctcaatgcccacgcaaatatcaaggcaggcgtgtttgtcaacggagagatgcacccaaggctggaacaaggaccgttgttcttccagaacttggtgcgggaactagtcacagaacaccgtgaacaagaagaaaaggcaaaccaagaaatatggccagcccgacaagtactccctaagagcgctaaggagacagagaacgacaatgccttatgctcatctatagattgttccgcactgaggaaggaaggactcgcttggtgatctcatgtgtttctgtttgatatgttgagaattgcttttcattgcatagttacgggttgggtctcttatacgtcggttatagatgtttcatcatgggcaaaggcaatagcgtgttttcaggccaaactgggtttggctgctgtctatgagcgatgacttcagaacaaagtggtggatggctgtaatgcctggagcgccctcgtgggtttggccagataccaatttgatacctctgtttcgataactgtatccactttcatcacacttgtgtgcccttctcccgg

SEQ ID NO: 32410 - DNA, 2274 bp, Muscodor strobelii
  misc_feature: SGI cDNA ID NO. 571170
  misc_feature: Encodes the peptide sequence at SEQ ID NO 32411
atgttatatttggcagagccattccctgccttggctgttctacgcaaattgcgcccctccggccagtcttgctcaggctttcttgttgcctcccgcaccattgtctgtgagaattcgtatgataccttaatgacgccacccgacgagagaacaaactttcgtggcagacgacgttctcatcatgcctgcattccttgcaggaggaagaagacacgctgtcccggtgagagaccagcctgctcaagctgttcccgcctcaaacagccatgttcttatgcccccgtgataaagccgccctcacgtggtggtccatcggaggagaggcttgcaactttggaggagaaacttgatctaatactgaaaggtggccttcctcatcatccaacatacactcgtcgcgaagacgcctttgataatgtcgccgatgagtcagacgcatcaaactctgcgacagcaacttcagtacctgagccacgaagccagtcaaacagccatcgttcaccagttctttctgactccgaaccgtctaacacacgcccaagcagaagagatattgccactggtattcatttgtatttcagacactgccataggcaacctatttggtgttttgagcgtgaagatgtagccaaccatagtgccctcccccatgaactagtttgcagcatcttatcattgacatcccgtttctcttcgagacgcgagcaactacagctatatggtaacaatgctagaccgctgataatgcttcgcatcgcaaatgggacggtcggactcgaaacgatagagagcctgtgcctcttatcatattcatttttcatagatggcaacatcagtctggggcagtttcatctcggtcttgccgttcaactctgtcgctctgctatgctcgacttggattcagtgtatgccatcgatgatccaacaacggagcgaaaaaagaggcttttttggagtctccagctacttgaacaattctacggtcgacagaccggttctcccagcatcccaacccagattggcagatcctcgttttattctgttggcgatgatcagcggatgctcttaggtctagatacgacaactcctgcgtttcctaccgacagccaaggtgcgggtcaatcaaacgaacccgggatctggaatacaagcatacagttgggtttgatctggagctatgtgcgtaagtttgtctccgactgttcccgcaatattttgaaggaaccatggcgacatgactcaacgtatgctgttgttcaatccgacttcatggagacagagaatcggatcccattttgccatcgctatgactctgtcaaattctacgagcgtaccatcgaagaactgagatcgaatcacgactattgggctccttggttgaaggaacagttcacataccatgcgataccaacagtattgaatcacccatttctctacattgtaggggctcagaccaatcacaatctaaggattcccaataccttctggaggagatcatccgaatttgcgttgctacatgccacgtggatcgttcgcatcattgatatgattatggataaggaggtgccacttgtcgatccatttttcggccacattgctgcaatcgctgctactgttcacttgtattactgttgcgcagccgccattgggttaagacaaaaatctcacacggattttaacaagtgccggagatttctgaaatgcttcctacccttttcaccagcttgcgcgacattggatcgcaatctcgaaaatatggcacggattgctgctggtcacgataacatggagggggatgatgaatgggagccatctaaactatatctgagcgttcctctcatgtgggacatcttacagttcaactgcatggcagactctgagggaatccccaccgctgatcttttgcacccatcgcttgctccaggtatgcctcagatagagataggtgagacgacactcgaaatcattgtagctacatcgccagaaattaaaattgatactgcggatggtgggcaagatgcaccctcaatccctcgccagcgcggtgcgtttgcagcgtctaaccaagcagaaacctcacgtcatccagtctggaacgaagcgactcttgaaccttcggagaacctgactttcaacaccacaccgtggttatatgcagatccatcccaatttcttagcctaggagacctaggctggcttgacgcccaatctgccatgagtgaaaacggcggaagggagggagcctttgtaatgcataattttagccacttctag

SEQ ID NO: 32411 - protein, 757 aa, Muscodor strobelii
  misc_feature: SGI Peptide ID NO. 571170
  misc_feature (61)..(100): Pfam Id: PF00172 Pfam Desc: Fungal Zn(2)-Cys(6) binuclear cluster domain
  misc_feature (258)..(351): Pfam Id: PF04082 Pfam Desc: Fungal specific transcription factor domain
  misc_feature (60)..(754): NCBI GI: 46115146 Blast Desc: FG03415.1 [Gibberella zeae PH-1]
  misc_feature (54)..(757): NCBI GI: 261357977 Blast Desc: conserved [Verticillium albo-atrum VaMs.102]
  misc_feature (50)..(744): NCBI GI: 255941416 Blast Desc: Pc16g11760 [Penicillium chrysogenum Wisconsin 54-1255] gi|211586100|emb|CAP93846.1| Pc16g11760 [Penicillium chrysogenum Wisconsin 54-1255]
  misc_feature (50)..(754): NCBI GI: 238500618 Blast Desc: C6 transcription factor, [Aspergillus flavus NRRL3357] gi|220691780|gb|EED48127.1| C6 transcription factor, [Aspergillus flavus NRRL3357]
  misc_feature (44)..(738): NCBI GI: 70983842 Blast Desc: C6 transcription factor [Aspergillus fumigatus Af293] gi|66845073|gb|EAL85409.1| C6 transcription factor, [Aspergillus fumigatus Af293]
  misc_feature (44)..(748): NCBI GI: 259483126 Blast Desc: TPA: Zn(II)2Cys6 transcription factor (Eurofung) [Aspergillus nidulans FGSC A4]
  misc_feature (47)..(748): NCBI GI: 67903336 Blast Desc: AN8655.2 [Aspergillus nidulans FGSC A4] gi|40741499|gb|EAA60689.1| AN8655.2 [Aspergillus nidulans FGSC A4]
  misc_feature (184)..(731): NCBI GI: 145612767 Blast Desc: MGG_12424 [Magnaporthe grisea 70-15] gi|145019895|gb|EDK04123.1| MGG_12424 [Magnaporthe grisea 70-15]
  misc_feature (106)..(748): NCBI GI: 119485280 Blast Desc: fungal specific transcription factor, [Neosartorya fischeri NRRL 181] gi|119410328|gb|EAW20275.1| fungal specific transcription factor, [Neosartorya fischeri NRRL 181]
  misc_feature (104)..(744): NCBI GI: 115401110 Blast Desc: conserved [Aspergillus terreus NIH2624] gi|114190084|gb|EAU31784.1| conserved [Aspergillus terreus NIH2624]
MLYLAEPFPALAVLRKLRPSGQSCSGFLVASRTIVCENSYDTLMTPPDERTNFRGRRRSHHACIPCRRKKTRCPGERPACSSCSRLKQPCSYAPVIKPPSRGGPSEERLATLEEKLDLILKGGLPHHPTYTRREDAFDNVADESDASNSATATSVPEPRSQSNSHRSPVLSDSEPSNTRPSRRDIATGIHLYFRHCHRQPIWCFEREDVANHSALPHELVCSILSLTSRFSSRREQLQLYGNNARPLIMLRIANGTVGLETIESLCLLSYSFFIDGNISLGQFHLGLAVQLCRSAMLDLDSVYAIDDPTTERKKRLFWSLQLLEQFYGRQTGSPSIPTQIGRSSFYSVGDDQRMLLGLDTTTPAFPTDSQGAGQSNEPGIWNTSIQLGLIWSYVRKFVSDCSRNILKEPWRHDSTYAVVQSDFMETENRIPFCHRYDSVKFYERTIEELRSNHDYWAPWLKEQFTYHAIPTVLNHPFLYIVGAQTNHNLRIPNTFWRRSSEFALLHATWIVRIIDMIMDKEVPLVDPFFGHIAAIAATVHLYYCCAAAIGLRQKSHTDFNKCRRFLKCFLPFSPACATLDRNLENMARIAAGHDNMEGDDEWEPSKLYLSVPLMWDILQFNCMADSEGIPTADLLHPSLAPGMPQIEIGETTLEIIVATSPEIKIDTADGGQDAPSIPRQRGAFAASNQAETSRHPVWNEATLEPSENLTFNTTPWLYADPSQFLSLGDLGWLDAQSAMSENGGREGAFVMHNFSHF

SEQ ID NO: 32412 - DNA, 3033 bp, Muscodor strobelii
  misc_feature: SGI EST ID NO. CUFF.76666.0
  misc_feature: Variant of the nucleotide sequence at SEQ ID NO 32410
ttttttagctcttatcaccggcttcggcgctgtgagccaatgagctccgccttgttggctaggatggcagcgggagctagtcatcattgtgtcgacgaaacaaccaatcctcgctggtcccaaatctgggatcgcttcctgttgaatcgaacatgtctaggagcgaggggatcttcgtcactagatcttggcaaacaccaatagaacacctcatttgtcagaccacccatttctgtccagaagagggaagaccagatacgagaacagagaagaagttcgggaacgcgaccgaagcaaagctgcgcaggagaccaaggcacgatatagcatccacaactacatgtagttgacccagatatctgatacaccgggacagcgacattacccgaaacagagcttagagggacatatatcaccataataataatgacggccaaatgcgtacggccaactcccgatcctccacatgatcagtgatcagccagcgtattcggtctagatctcgcgccgcgcatccactctttcaacggtcccgcaagctctgtgatactactagtctgaatctgaatctgcaatgttatatttggcagagccattccctgccttggctgttctacgcaaattgcgcccctccggccagtcttgctcaggctttcttgttgcctcccgcaccattgtctgtgagaattcgtatgataccttaatgacgccacccgacgagagaacaaactttcgtggcagacgacgttctcatcatgcctgcattccttgcaggaggaagaagacacgctgtcccggtgagagaccagcctgctcaagctgttcccgcctcaaacagccatgttcttatgcccccgtgataaagccgccctcacgtggtggtccatcggtattatatacggcatatcttccgttagcgaacgtctcttgacaatcgataggaggagaggcttgcaactttggaggagaaacttgatctaatactgaaaggtggccttcctcatcatccaacatacactcgtcgcgaagacgcctttgataatgtcgccgatgagtcagacgcatcaaactctgcgacagcaacttcagtacctgagccacgaagccagtcaaacagccatcgttcaccagttctttctgactccgaaccgtctaacacacgcccaagcagaagagatattgccactggtattcatttgtatttcagacactgccataggcaacctatttggtgttttgagcgtgaagatgtagccaaccatagtgccctcccccatgaactagtttgcagcatcttatcattgacatcccgtttctcttcgagacgcgagcaactacagctatatggtaacaatgctagaccgctgataatgcttcgcatcgcaaatgggacggtcggactcgaaacgatagagagcctgtgcctcttatcatattcatttttcatagatggcaacatcagtctggggcagtttcatctcggtcttgccgttcaactctgtcgctctgctatgctcgacttggattcagtgtatgccatcgatgatccaacaacggagcgaaaaaagaggcttttttggagtctccagctacttgaacaattctacggtcgacagaccggttctcccagcatcccaacccagattggcagatcctcgttttattctgttggcgatgatcagcggatgctcttaggtctagatacgacaactcctgcgtttcctaccgacagccaaggtgcgggtcaatcaaacgaacccgggatctggaatacaagcatacagttgggtttgatctggagctatgtgcgtaagtttgtctccgactgttcccgcaatattttgaaggaaccatggcgacatgactcaacgtatgctgttgttcaatccgacttcatggagacagagaatcggatcccattttgccatcgctatgactctgtcaaattctacgagcgtaccatcgaagaactgagatcgaatcacgactattgggctccttggttgaaggaacagttcacataccatgcgataccaacagtattgaatcacccatttctctacattgtaggggctcagaccaatcacaatctaaggattcccaataccttctggaggagatcatccgaatttgcgttgctacatgccacgtggatcgttcgcatcattgatatgattatggataaggaggtgccacttgtcgatccatttttcggccacattgctgcaatcgctgctactgttcacttgtattactgttgcgcagccgccattgggttaagacaaaaatctcacacggattttaacaagtgccggagatttctgaaatgcttcctacccttttcaccagcttgcgcgacattggatcgcaatctcgaaaatatggcacggattgctgctggtcacgataacatggagggggatgatgaatgggagccatctaaactatatctgagcgttcctctcatgtgggacatcttacagttcaactgcatggcagactctgagggaatccccaccgctgatcttttgcacccatcgcttgctccaggtatgcctcagatagagataggtgagacgacactcgaaatcattgtagctacatcgccagaaattaaaattgatactgcggatggtgggcaagatgcaccctcaatccctcgccagcgcggtgcgtttgcagcgtctaaccaagcagaaacctcacgtcatccagtctggaacgaagcgactcttgaaccttcggagaacctgactttcaacaccacaccgtggttatatgcagatccatcccaatttcttagcctaggagacctaggctggcttgacgcccaatctgccatgagtgaaaacggcggaagggagggagcctttgtaatgcataattttagccacttctagcgtcgtttgtttatctccccatgttatacagtcctcagaatcagacgacacgtgtaatatagacttaataaatcttgataatatagcacccgtcgtagctccgagtcgagccttcttggttcgattatcattt

SEQ ID NO: 32413 - DNA, 2526 bp, Muscodor strobelii
  misc_feature: SGI cDNA ID NO. 571171
  misc_feature: Encodes the peptide sequence at SEQ ID NO 32414
atggcttcttcacctcgtgttgttatcattggtgccggcattgttggcactaacgtcgcagacgagcttgtcgtccgcggctggtccaatatcaccgtcgtggaaaagggaccgttggatttgccaggcggctcgacatcacatgcccctggcttggttttccagacaaacccctccaagacaatgactcaattcgcacgctacacggttgaaaaatttctgtctctcgaaaaagatggccaaagttgcttcaaccaagtcggcggcttagaagtcgccactacgccagaaagactggccgagatcaagcggaaactcggctatgctcactcttgggggattgaggcccgtctagtcagccctgaagagtgccggacaatgtatcctgccctagtcaagaacgaactgattcttggtggtctacatatccctagcgacggcctggcgttggctgctcgtgccgtacagttacttattgaacgtacgagagaggctggtgttcaatatctcggatcaacagaggtcaccgggatcgagaaggccgacggtcgcgtcacgggcgtgatcacgccggagtcaacgattcccgctgatatcgtcatttcatgcgccggcttctggggcgttgaagttggtgcaatggtcggtgtacctgtcccattagtacctatggcgcaccaatatgttaagagtaccccaataccggatgaagactacctcaataatgccaccaacggagaaacactaacaaacggggccgtgccaccaaaccacgcaagattaccaatcttgcgataccaggatcaagatctatactatcgtgagcatggtcaacagattggtattggctattatggccaccgccctatgccagttgttgcatcctcgttaggcaagaccccagaacatacagatgacaagaatatgccgtctcggcttgagtttacgcgcgaggacttcgagccggcatggaagttatcacaagagcttcttccagttctgcaaaaatgtgaaattgaagacggattcaacggtattttctcatttacccctgatggcggaccaattgtcggactcgcccctggcgtcgacgggttctaccttgcggaggccgtttgggttacgcattcggctggcgtagcacgtgctgtagccgagttgctagtcgagggtaaatcaaagatcgacctagccgaatgcgaaattgctcgattcgagcaggtccaattaaccccggaattcgtcactgagacgtcttgccagaacttcgtagaggtttatgatattctccatccgctgcagccgcgggactctcctcgcaacatgcgtgttacacctttttatatacgccagcgggaattgggtgcttttttcttagagggcaccggatgggagaggccatattggttcgaggagaatgccaagttactcaaagacttaccccctgagtggcgacctgtggaccgcgacgcctggtcttcaagatactattctcccattgctgcagcagaggcttggaagacgcgcacagcagtagcaatgtacgacatgacaccgctgcgacgactcgagatcacaggtgctggtgccgtagacctcctgaagcgattgaccaccggcaatgttggcaggaaacctggcgcagtcacgtattgcctgctactagatgacaaaggtggcgtgcgaagcgacatcaccgtagctcgaattgccgatgaacttttccaagtcggtgtcaacggaccagtcgataccgcatacttcacccgtgaagctctcatacagtccaggaatacccccgaccggcctgcacatgttcgcgatattacaggtggaacatgctgcattgggctctggggccctcttgcccgagaggtaatcagcgctgtcagccccgacgacttttccaataagggtctcacgtactttcgatgtaaacgtgtcagtattgccggtatcccggtcacggcgatgagactctcatatgtcggtgagcgaggatgggagctttatgcaagcgccgagaacggtcttcgactctgggatgcaatctggaaagcaggtcaaccccatggtatcatagctggaggtcgtacagcattcaactcacttcgcctcgagaaaggatttcgatcctggggtgctgatatgactactgaacacgatccgttcgaggccggtctcgacttcgccgtcaagtttgacaaaccggactttgttggaaaagatgctctagccggtcgctccaaagacactatcactcggaagattcggtgccttaccgtcgatgacggcaagtccgttgttcttggaaaagagccggtgtttctcgatggcaaggccgagggctatgtcaccagcgctgcattcgggtacacaataggaaagcctatcgcatactcttatttgcctagcactatcaaagacggcgaaagtgtagagattgaatactttgggcagcggattaaggctaccgttacggccgagcctttgtacgatccgcagatggcccggttgcgcggataa

SEQ ID NO: 32414 - protein, 841 aa, Muscodor strobelii
  misc_feature: SGI Peptide ID NO. 571171
  misc_feature (6)..(387): Pfam Id: PF01266 Pfam Desc: FAD dependent oxidoreductase
  misc_feature (514)..(731): Pfam Id: PF01571 Pfam Desc: Aminomethyltransferase folate-binding domain
  misc_feature (737)..(829): Pfam Id: PF08669 Pfam Desc: Glycine cleavage T-protein C-terminal barrel domain
  misc_feature (616)..(731): Pfam Id: PF01571 Pfam Desc: Aminomethyltransferase folate-binding domain
  misc_feature (514)..(573): Pfam Id: PF01571 Pfam Desc: Aminomethyltransferase folate-binding domain
  misc_feature (154)..(205): Pfam Id: PF00070 Pfam Desc: Pyridine nucleotide-disulphide oxidoreductase
  misc_feature (1)..(840): NCBI GI: 257055902 Blast Desc: glycine cleavage system T protein (aminomethyltransferase) [Saccharomonospora viridis DSM 43017] gi|256585774|gb|ACU96907.1| glycine cleavage system T protein DSM
  misc_feature (4)..(840): NCBI GI: 111018812 Blast Desc: sarcosine dehydrogenase [Rhodococcus jostii RHA1] gi|110818342|gb|ABG93626.1| sarcosine dehydrogenase [Rhodococcus jostii RHA1]
  misc_feature (1)..(840): NCBI GI: 134101029 Blast Desc: FAD dependent oxidoreductase [Saccharopolyspora erythraea NRRL 2338] gi|133913652|emb|CAM03765.1| FAD dependent oxidoreductase [Saccharopolyspora erythraea NRRL 2338]
  misc_feature (6)..(840): NCBI GI: 256669061 Blast Desc: FAD dependent oxidoreductase [Streptomyces sp. AA4]
  misc_feature (18)..(841): NCBI GI: 67903334 Blast Desc: AN8654.2 [Aspergillus nidulans FGSC A4] gi|40741498|gb|EAA60688.1| AN8654.2 [Aspergillus nidulans FGSC A4] gi|259483127|tpe|CBF78245.1| TPA: N,N-dimethylglycine FGSC
  misc_feature (3)..(841): NCBI GI: 260904433 Blast Desc: glycine cleavage T protein (aminomethyl transferase) [Brevibacterium linens BL2]
  misc_feature (6)..(840): NCBI GI: 256774480 Blast Desc: sarcosine dehydrogenase [Streptomyces hygroscopicus ATCC 53653]
  misc_feature (3)..(841): NCBI GI: 256806348 Blast Desc: FAD dependent oxidoreductase [Streptomyces viridochromogenes DSM 40736]
  misc_feature (7)..(841): NCBI GI: 260644802 Blast Desc: dehydrogenase [Streptomyces scabiei 87.22]
  misc_feature (5)..(840): NCBI GI: 29833493 Blast Desc: sarcosine dehydrogenase [Streptomyces avermitilis MA-4680] gi|29610616|dbj|BAC74662.1| sarcosine dehydrogenase [Streptomyces avermitilis MA-4680]
  misc_feature (8)..(840): SWISSPROT Homolog: EC 1.5.99.2 Dimethylglycine dehydrogenase
MASSPRVVIIGAGIVGTNVADELVVRGWSNITVVEKGPLDLPGGSTSHAPGLVFQTNPSKTMTQFARYTVEKFLSLEKDGQSCFNQVGGLEVATTPERLAEIKRKLGYAHSWGIEARLVSPEECRTMYPALVKNELILGGLHIPSDGLALAARAVQLLIERTREAGVQYLGSTEVTGIEKADGRVTGVITPESTIPADIVISCAGFWGVEVGAMVGVPVPLVPMAHQYVKSTPIPDEDYLNNATNGETLTNGAVPPNHARLPILRYQDQDLYYREHGQQIGIGYYGHRPMPVVASSLGKTPEHTDDKNMPSRLEFTREDFEPAWKLSQELLPVLQKCEIEDGFNGIFSFTPDGGPIVGLAPGVDGFYLAEAVWVTHSAGVARAVAELLVEGKSKIDLAECEIARFEQVQLTPEFVTETSCQNFVEVYDILHPLQPRDSPRNMRVTPFYIRQRELGAFFLEGTGWERPYWFEENAKLLKDLPPEWRPVDRDAWSSRYYSPIAAAEAWKTRTAVAMYDMTPLRRLEITGAGAVDLLKRLTTGNVGRKPGAVTYCLLLDDKGGVRSDITVARIADELFQVGVNGPVDTAYFTREALIQSRNTPDRPAHVRDITGGTCCIGLWGPLAREVISAVSPDDFSNKGLTYFRCKRVSIAGIPVTAMRLSYVGERGWELYASAENGLRLWDAIWKAGQPHGIIAGGRTAFNSLRLEKGFRSWGADMTTEHDPFEAGLDFAVKFDKPDFVGKDALAGRSKDTITRKIRCLTVDDGKSVVLGKEPVFLDGKAEGYVTSAAFGYTIGKPIAYSYLPSTIKDGESVEIEYFGQRIKATVTAEPLYDPQMARLRG

SEQ ID NO: 32415 - DNA, 2893 bp, Muscodor strobelii
  misc_feature: SGI EST ID NO. CUFF.76675.0
  misc_feature: Variant of the nucleotide sequence at SEQ ID NO 32413
tatcgttctaaggggcgggccccttacccagggagacgtcgttgtcaattgaatagtatagaagaagcctgcttgctgccaccgttcctcatctttccatgctgctcttggtaacacaaccaagagcatactcatcatggcttcttcacctcgtgttgttatcattggtgccggcattgttggcactaacgtcgcagacgagcttgtcgtccgcggctggtccaatatcaccgtcgtggaaaagggaccgttggatttgccaggcggctcgacatcacatgcccctggcttggttttccagacaaacccctccaagacaatgactcaattcgcacgctacacggttgaaaaatttctgtctctcgaaaaagatggccaaagttgcttcaaccaagtcggcggcttagaagtcgccactacgccagaaagactggccgagatcaagcggaaactcggctatgctcactcttgggggattgaggcccgtctagtcagccctgaagagtgccggacaatgtatcctgccctagtcaagaacgaactgattcttggtggtctacatatccctagcgacggcctggcgttggctgctcgtgccgtacagttacttattgaacgtacgagagaggctggtgttcaatatctcggatcaacagaggtcaccgggatcgagaaggccgacggtcgcgtcacgggcgtgatcacgccggagtcaacgattcccgctgatatcgtcatttcatgcgccggcttctggggcgttgaagttggtgcaatggtcggtgtacctgtcccattagtacctatggcgcaccaatatgttaagagtaccccaataccggatgaagactacctcaataatgccaccaacggagaaacactaacaaacggggccgtgccaccaaaccacgcaagattaccaatcttgcgataccaggatcaagatctatactatcgtgagcatggtcaacagattggtattggctattatggccaccgccctatgccagttgttgcatcctcgttaggcaagaccccagaacatacagatgacaagaatatgccgtctcggcttgagtttacgcgcgaggacttcgagccggcatggaagttatcacaagagcttcttccagttctgcaaaaatgtgaaattgaagacggattcaacggtattttctcatttacccctgatggcggaccaattgtcggactcgcccctggcgtcgacgggttctaccttgcggaggccgtttgggttacgcattcggctggcgtagcacgtgctgtagccgagttgctagtcgagggtaaatcaaagatcgacctagccgaatgcgaaattgctcgattcgagcaggtccaattaaccccggaattcgtcactgagacgtcttgccagaacttcgtagaggtttatgatattctccatccgctgcagccgcgggactctcctcgcaacatgcgtgttacacctttttatatacgccagcgggaattgggtgcttttttcttagagggcaccggatgggagaggccatattggttcgaggagaatgccaagttactcaaagacttaccccctgagtggcgacctgtggaccgcgacgcctggtcttcaagatactattctcccattgctgcagcagaggcttggaagacgcgcacagcagtagcaatgtacgacatgacaccgctgcgacgactcgagatcacaggtgctggtgccgtagacctcctgaagcgattgaccaccggcaatgttggcaggaaacctggcgcagtcacgtattgcctgctactagatgacaaaggtggcgtgcgaagcgacatcaccgtagctcgaattgccgatgaacttttccaagtcggtgtcaacggaccagtcgataccgcatacttcacccgtgaagctctcatacagtccaggaatacccccgaccggcctgcacatgttcgcgatattacaggtggaacatgctgcattgggctctggggccctcttgcccgagaggtaatcagcgctgtcagccccgacgacttttccaataagggtctcacgtactttcgatgtaaacgtgtcagtattgccggtatcccggtcacggcgatgagactctcatatgtcggtgagcgaggatgggagctttatgcaagcgccgagaacggtcttcgactctgggatgcaatctggaaagcaggtcaaccccatggtatcatagctggaggtcgtacagcattcaactcacttcgcctcgagaaaggatttcgatcctggggtgctgatatgactactgaacacgatccgttcgaggccggtctcgacttcgccgtcaagtttgacaaaccggactttgttggaaaagatgctctagccggtcgctccaaagacactatcactcggaagattcggtgccttaccgtcgatgacggcaagtccgttgttcttggaaaagagccggtgtttctcgatggcaaggccgagggctatgtcaccagcgctgcattcgggtacacaataggaaagcctatcgcatactcttatttgcctagcactatcaaagacggcgaaagtgtagagattgaatactttgggcagcggattaaggctaccgttacggccgagcctttgtacgatccgcagatggcccggttgcgcggataaactattggctatctttgaattctttgaattggactagactgagtatttctgtcggcattttgcatcgggagcgtttatttagggttgtgttacactatttgttctctggatctgcagaaatttcctcgacgtatgttctggtttaagtttatgagggatgatttgcatctgcacggtgcatcatataatttacatagtctaggtagaatgtcacgattgtcttgagttcca

SEQ ID NO: 32416 - DNA, 1380 bp, Muscodor strobelii
  misc_feature: SGI cDNA ID NO. 571172
  misc_feature: Elevated expression when VOC is produced
  misc_feature: Encodes the peptide sequence at SEQ ID NO 32417
atggagagcctcagtgttacaaaagttgcctttgcgctcattgcgcttggcattgcgtacttatggcggctgaataaagtaatgagccaaactccgccaggagctgtggaggcatcaccataccgttgggcggattccgagatcaaaaccacatatgagcggatcaaaaagaaccccatagactggaccaaggccctgccaccaaaactcaaccgccgatatgtcgtaacaggtggatcgggcggtgttggtgggcaaatcgtcttacatctcctcgctcgcggcgaggcgccggagagcattcgtatcgtggatttcagacgggttgaacgaactgatatgaagtcgggatcagtcacccaggtagatttcgcacaggccgacattacatcaccggaagctacccaggccgctttcgacaagccatgggcgtccagcgtagccaagctttcgctaactgtcttccatgtcgctgccatgattgtgccgcatgagcgaacgatggcgacgtacgaccgcatcaagcgcgtcaatattgacggaacaaagaacgtaatggccgctgcgaaggctgcaggtgcagacattttcattgctactgcttctgcatccattggatatcgcccagctggttattggggcaatccctttcgacgttggccaaggaattacttccagttcgtcgacgagtcggatttcgatcagccacttgctgctcactcacaatactttgcaaactatgcccacacaaaggctatagcggaacgcatgatctgccaggctaattctgattccttccgaaccggaactataagacccgcgaatggtatttacggaagcagtgagggtgaccaagttgttggtcttgttctacgttctcaaggcacacaatcttggatgccaaatattgtgcaaaacttcgtctctagtggtcacatctctctgggtcatttactcttcgaagctgctctccttcgcaagaagatgcccaaatgtgcaggccgaccttttgtaatcaccgacgatggtgctcctccacaatttggcgatgtctaccgactatgtgaggtagccgcggaaactccgattaaagtcactttcctccctcctggagtgttttttgtaatttcgcatattgtggagtggttcgtagcagccagccgcataccagggctaaagtttttgcagcctaagggcgacatggcgctattacaacctggtgttttccatgcgtcattaaactatctggctacggatgcagccgcccaacgaagcgtggaagacggcggcatcggttttaaacatgctcacaataccatcgaaggaatgtcccaacagctcgttgaatggaatgctgagcacgggtcctccaaggcttaa

SEQ ID NO: 32417 - protein, 459 aa, Muscodor strobelii
  misc_feature: SGI Peptide ID NO. 571172
  misc_feature (75)..(370): Pfam Id: PF01073 Pfam Desc: 3-beta hydroxysteroid dehydrogenase/isomerase family
  misc_feature (72)..(212): Pfam Id: PF00106 Pfam Desc: short chain dehydrogenase
  misc_feature (74)..(340): Pfam Id: PF01370 Pfam Desc: NAD dependent epimerase/dehydratase family
  misc_feature (76)..(312): Pfam Id: PF07993 Pfam Desc: Male sterility protein
  misc_feature (75)..(204): Pfam Id: PF01073 Pfam Desc: 3-beta hydroxysteroid dehydrogenase/isomerase family
  misc_feature (1)..(451): NCBI GI: 85114248 Blast Desc: NCU02042 [Neurospora crassa OR74A] gi|28926454|gb|EAA35428.1| [Neurospora crassa OR74A] gi|38566911|emb|CAE76215.1| related to cholesterol dehydrogenase
  misc_feature (19)..(454): NCBI GI: 116180778 Blast Desc: CHGG_01017 [Chaetomium globosum CBS 148.51] gi|88185314|gb|EAQ92782.1| CHGG_01017 [Chaetomium globosum CBS 148.51]
  misc_feature (23)..(458): NCBI GI: 171684275 Blast Desc: protein product [Podospora anserina] gi|170942098|emb|CAP67750.1| protein product [Podospora anserina]
  misc_feature (5)..(453): NCBI GI: 171687429 Blast Desc: protein product [Podospora anserina] gi|170943676|emb|CAP69328.1| protein product [Podospora anserina]
  misc_feature (10)..(451): NCBI GI: 261357628 Blast Desc: conserved [Verticillium albo-atrum VaMs.102]
  misc_feature (1)..(451): NCBI GI: 70991090 Blast Desc: 3-beta hydroxysteroid dehydrogenase/isomerase family protein, [Aspergillus fumigatus Af293] gi|66848026|gb|EAL88356.1| 3-beta hydroxysteroid dehydrogenase/isomerase family protein,
  misc_feature (1)..(451): NCBI GI: 159130868 Blast Desc: 3-beta hydroxysteroid dehydrogenase/isomerase family protein, [Aspergillus fumigatus A1163]
  misc_feature (1)..(456): NCBI GI: 119496495 Blast Desc: 3-beta hydroxysteroid dehydrogenase/isomerase family protein, [Neosartorya fischeri NRRL 181] gi|119413183|gb|EAW23124.1| 3-beta hydroxysteroid family protein,
  misc_feature (24)..(454): NCBI GI: 39955521 Blast Desc: MGG_09014 [Magnaporthe grisea 70-15] gi|149209371|ref|XP_001522060.1| MGCH7_ch7g177 [Magnaporthe grisea 70-15] gi|86196132|gb|EAQ70770.1| MGCH7_ch7g177 grisea
  misc_feature (4)..(451): NCBI GI: 121702501 Blast Desc: 3-beta hydroxysteroid dehydrogenase/isomerase family protein, [Aspergillus clavatus NRRL 1] gi|119397658|gb|EAW08089.1| 3-beta hydroxysteroid family protein,
  misc_feature: Useful for introducing or modulating the production of volatile compounds
MESLSVTKVAFALIALGIAYLWRLNKVMSQTPPGAVEASPYRWADSEIKTTYERIKKNPIDWTKALPPKLNRRYVVTGGSGGVGGQIVLHLLARGEAPESIRIVDFRRVERTDMKSGSVTQVDFAQADITSPEATQAAFDKPWASSVAKLSLTVFHVAAMIVPHERTMATYDRIKRVNIDGTKNVMAAAKAAGADIFIATASASIGYRPAGYWGNPFRRWPRNYFQFVDESDFDQPLAAHSQYFANYAHTKAIAERMICQANSDSFRTGTIRPANGIYGSSEGDQVVGLVLRSQGTQSWMPNIVQNFVSSGHISLGHLLFEAALLRKKMPKCAGRPFVITDDGAPPQFGDVYRLCEVAAETPIKVTFLPPGVFFVISHIVEWFVAASRIPGLKFLQPKGDMALLQPGVFHASLNYLATDAAAQRSVEDGGIGFKHAHNTIEGMSQQLVEWNAEHGSSKA

SEQ ID NO: 32418 - DNA, 1933 bp, Muscodor strobelii
  misc_feature: SGI EST ID NO. CUFF.76681.0
  misc_feature: Variant of the nucleotide sequence at SEQ ID NO 32416
atttactgtgtctgtaaggagtagaggattgatcagcggggaatatgtgcgcccaatgcttttgacgcttctcaacaccattctcatccgttttggtattcaatggagagcctcagtgttacaaaagttgcctttgcgctcattgcgcttggcattgcgtacttatggcggctgaataaagtaatgagccaaactccgccaggagctgtggaggcatcaccataccgttgggcggattccgagatcaaaaccacatatgagcggatcaaaaagaaccccatagactggaccaaggccctgccaccaaaactcaaccgccgatatgtcgtaacaggtggatcgggcggtgttggtgggcaaatcgtcttacatctcctcgctcgcggcgaggcgccggagagcattcgtatcgtggatttcagacgggttgaacgaactgatatgaagtcgggatcagtcacccaggtagatttcgcacaggccgacattacatcaccggaagctacccaggccgctttcgacaagccatgggcgtccagcgtagccaagctttcgctaactgtcttccatgtcgctgccatgattgtgccgcatgagcgaacgatggcgacgtacgaccgcatcaagcgcgtcaatattgacggaacaaagaacgtaatggccgctgcgaaggctgcaggtgcagacattttcattgctactgcttctgcatccattggatatcgcccagctggttattggggcaatccctttcgacgttggccaaggaattacttccagttcgtcgacgagtcggatttcgatcagccacttgctgctcactcacaatactttgcaaactatgcccacacaaaggctatagcggaacgcatgatctgccaggctaattctgattccttccgaaccggaactataagacccgcgaatggtatttacggaagcagtgagggtgaccaagttgttggtcttgttctacgttctcaaggcacacaatcttggatgccaaatattgtgcaaaacttcgtctctagtggtcacatctctctgggtcatttactcttcgaagctgctctccttcgcaagaagatgcccaaatgtgcaggccgaccttttgtaatcaccgacgatggtgctcctccacaatttggcgatgtctaccgactatgtgaggtagccgcggaaactccgattaaagtcactttcctccctcctggagtgttttttgtaatttcgcatattgtggagtggttcgtagcagccagccgcataccagggctaaagtttttgcagcctaagggcgacatggcgctattacaacctggtgttttccatgcgtcattaaactatctggctacggatgcagccgcccaacgaagcgtggaagacggcggcatcggttttaaacatgctcacaataccatcgaaggaatgtcccaacagctcgttgaatggaatgctgagcacgggtcctccaaggcttaaacacacctcaaaatcaccgggcagactgtgattgtttccggaagaaaatgactcgaggacactctgaatgttgaggaggggtttgaatgatgtcgcttatcaattattccgtcaaatcccgaagcgacttatgaagactagaagcagacgacggtgaccgaataaatcgtgtatatcgtctttcattacgaagctacgcgtgtccagcgcatcccgaaacgccgatgcgtagatcgacaacattagatgcatagactcaaaagactcgtctttgacaccaagagcatgtgaattaataagtacatattgcatttccaagcctctccgcccaattagctctcatccgcctgtttaacaagatcgactgtttgttcagctcaattataagtatattaattaatacacacatgcttgattacctacaaagtcggctttattcacaatataccgt

SEQ ID NO: 32419 - DNA, 669 bp, Muscodor strobelii
  misc_feature: SGI cDNA ID NO. 571173
  misc_feature: Encodes the peptide sequence at SEQ ID NO 32420
atgggaagccttacctctccgttgccttactggcaagtgaacgtaccggaagacgaaagacaggaagagtgcccggagttcctgaaccaactcagtgccaaagatcttggcatcatcagtacaccgaatgctgaatatcatatcaacacgtggcctgaggtacagaaactagtgaaagacaaccgtcttgatctgttccagcgcattccctcagaattacggagatacttagaatacaactggaaactaaaacaggactacggcagtgttatgaactttgtgctgacacagcggctgcattggagtgtcccaatgggatctcgcggtaaaccgttcgaatacgaggaggatattaagatattgtggaatgactggccgtacgggattgatgaaaatatcgtccatttggttgtttggacgaagtttgaactggaagaagacccagtcacccttgatcttaccgaaaaagctcgtggcgatattgacaagtacattcaaaagaagtttgggccacgagtcccgagcgatcatcttatatggttcaagaattggcgttcactgaagtctgttcaggcagtagagcattttcatgtgatgctgttcgatccggaccctaagttaatcgaagagatcacaaatggcgatatcccgctttgccgcaaagtttga

SEQ ID NO: 32420 - protein, 222 aa, Muscodor strobelii
  misc_feature: SGI Peptide ID NO. 571173
  misc_feature (1)..(219): NCBI GI: 256735239 Blast Desc: NECHADRAFT_90121 [Nectria haematococca mpVI 77-13-4]
  misc_feature (1)..(217): NCBI GI: 46107284 Blast Desc: FG00525.1 [Gibberella zeae PH-1]
  misc_feature (3)..(221): NCBI GI: 70989321 Blast Desc: conserved [Aspergillus fumigatus Af293] gi|66847141|gb|EAL87472.1| conserved [Aspergillus fumigatus Af293] gi|159128921|gb|EDP54035.1| conserved [Aspergillus A1163]
  misc_feature (1)..(219): NCBI GI: 261357327 Blast Desc: conserved [Verticillium albo-atrum VaMs.102]
  misc_feature (3)..(221): NCBI GI: 119479967 Blast Desc: NFIA_080590 [Neosartorya fischeri NRRL 181] gi|119408166|gb|EAW18115.1| conserved [Neosartorya fischeri NRRL 181]
  misc_feature (7)..(222): NCBI GI: 242786933 Blast Desc: conserved [Talaromyces stipitatus ATCC 10500] gi|218721049|gb|EED20468.1| conserved [Talaromyces stipitatus ATCC 10500]
  misc_feature (5)..(222): NCBI GI: 255943143 Blast Desc: Pc18g05130 [Penicillium chrysogenum Wisconsin 54-1255] gi|211587073|emb|CAP94737.1| Pc18g05130 [Penicillium chrysogenum Wisconsin 54-1255]
  misc_feature (7)..(221): NCBI GI: 145238526 Blast Desc: An07g08350 [Aspergillus niger] gi|134076399|emb|CAK48217.1| protein product [Aspergillus niger]
  misc_feature (8)..(221): NCBI GI: 189209405 Blast Desc: conserved [Pyrenophora tritici-repentis Pt-1C-BFP] gi|187977128|gb|EDU43754.1| conserved [Pyrenophora tritici-repentis Pt-1C-BFP]
  misc_feature (2)..(222): NCBI GI: 121710382 Blast Desc: conserved [Aspergillus clavatus NRRL 1] gi|119400957|gb|EAW11381.1| conserved [Aspergillus clavatus NRRL 1]
MGSLTSPLPYWQVNVPEDERQEECPEFLNQLSAKDLGIISTPNAEYHINTWPEVQKLVKDNRLDLFQRIPSELRRYLEYNWKLKQDYGSVMNFVLTQRLHWSVPMGSRGKPFEYEEDIKILWNDWPYGIDENIVHLVVWTKFELEEDPVTLDLTEKARGDIDKYIQKKFGPRVPSDHLIWFKNWRSLKSVQAVEHFHVMLFDPDPKLIEEITNGDIPLCRKV

SEQ ID NO: 32421 - DNA, 1846 bp, Muscodor strobelii
  misc_feature: SGI EST ID NO. CUFF.76685.1
  misc_feature: Variant of the nucleotide sequence at SEQ ID NO 32419
agaagcaatacacgtgggcggagaatataagaccctttgctacaatctggatcgacgagagacaaaccaaaaagaaagaatagataacagtctgtaaagaatgtaagctaatctacgcccacgcgttcatcatttgtcggctgcgtaagttgatcagagccgagtcaatcgtgtatcagttcttggatattatgtattataagcaccagtcacgtctttcgcaaagaaacccgacaaagcctctcgctggagaggaaataaaattgccggttctgaataaggagatggagatcacggaggataacgtgttgtaaaatgctgttgtttcatataggagataggcctcgtatccctaagctgtaaggcacctgccaaacaccgacttcggctgcatggtaagtgccgattttaacttcacaaagacgaacagaaaacagcactctgagaagaaccatatgttcatcggccaacgtctcagaaggggaaccactgtcgaggttttcgcccccaatataaaacattcctatacattcgttcattccaaaacgcgcatgctcatctgtcatgttgcatccctaaagaattgaatcattttgtggctgccagacactcaattaactacaccgccaatgagcgacaatgggaagccttacctctccgttgccttactggcaagtgaacgtaccggaagacgaaagacaggaagagtgcccggagttcctgaaccaactcagtgccaaagatcttggcatcatcagtacaccgaatgctgaatatcatatcaacacgtggcctgaggtacagaaactagtgaaagacaaccgtcttgatctgttccagcgcattccctcagaattacggagatacttagaatacaactggaaactaaaacaggactacggcagtgttatgaactttgtgctgacacagcggctgcattggagtgtcccaatgggatctcgcggtaaaccgttcgaatacgaggaggatattaagatattgtggaatgactggccgtacgggattgatgaaaatatcgtccatttggttgtttggacgaagtttgaactggaagaagacccagtcacccttgatcttaccgaaaaagctcgtggcgatattgacaagtacattcaaaagaagtttgggccacgagtcccgagcgatcatcttatatggttcaagaattggcgttcactgaagtctgttcaggcagtagagcattttcatgtgatgctgttcgatccggaccctaagttaatcgaagagatcacaaatggcgatatcccgctttgccgcaaagtttgacgcctggcataattgttctcatattaattagctaatatatgaaataaaaacacacgcaaacatagctcatacccatggctctcataaattaactgtgtgcctccattacataaattgtagtctgaaagggatagcaacccatcagacaacttgtcttgttttacccgtctcaacttcgtagacccaaccagtaatgggaacatcatctgggacggtcaaagacttcttgagataggcgacgtcctcacgcacagcatcttcgagatctgggaaaggtaggaaatctagcgtggcgatctcagcggctgctcctgtccccaaattcttggccacaaggccgtgagcatcttcatttttgaatgtcaacatgccgcatcctgtgtgtttcactagcaagatctcgcgcgttccgaggagctgctctgagatgatgatcgatcgttgagcgtcccgcgcgctcgcgccagcattgcggatcacatgagcatcgcccaaagaaataccaaaggcggctgcaggatcgatgcgcgcatccatg

SEQ ID NO: 32422 - DNA, 1578 bp, Muscodor strobelii
  misc_feature: SGI cDNA ID NO. 571174
  misc_feature: Encodes the peptide sequence at SEQ ID NO 32423
atggcccaggcgatcaagagtgccttgccttcccatctcaagtctcagcttggagggaaggactcggactcggagtccgttggcaggcatcatggaaagacgcgatcgcacatggccttcgagaatgcctcgaccaatgtagctgctgcacagatgcgcaatgccctgacggagctgactggaaccatctcagaccctgacgagaagaagctcttcgagactgagatggacaacttcttttcgctcttcagacgatacctcaacgacaaggctaagggcaatgcagtcgattgggatcgcattgcccctcctgcccagaaccaggttgtcgactacgaagacctcgctaactccgaatctgttggcttcctcaacaaactggctgtcctgaagttgaacggcggtctgggtacctcgatgggctgcgttgggcccaagtcggtcatcgaagttcgtgatggcatgtctttcttggacatgtctgttcgccaagtcgagtacctcaaccgaacctataacaccaatgtcccattcatcctgatgaactcgttcaacaccaacgatgacacagccgccatcatcaagaagtacgagggccacaacgttgatatcctgaccttcaaccagtcccgatatcccagaatctacaaggactcgctcctccccgtgcccaagaagtttgattccagcattaacgagtggtatcctcctggacacggtgacgtcttcgagtcgctctacaactcgggtattctcgacaagctgatcgagcgtggaatcgagattatcttcttgtctaacgtggacaacctgggagctgttgtcgatctccgcattttgcagcacatggttgagacggaggccgagtacatcatggagttgacaaacaagaccaaggccgacgtcaaaggtggtaccatcattgactacgaaggctcggtccgcctcctggagattgcccaggtgcccaaggagcacaccaacgagttcaagtcgatcaagaagttcaagtatttcaacaccaacaacatctggatgaacgtcaacgctatcaagcgcgtcgtagagaacgacgagctggagatggagatcatccctaacggcaagtctattcctggcgacaagaagggcgagtcggacatttccattctccaacttgagaccgctgtcggtgcggctattcgccacttcaagaacgcccacggtgtcaatgtgccccgtcgccgattcttgcctgtcaagacttgctctgatctgatgcttgtgaagtctgacctgtatgccgtcaagcacggccagttgcagatgagcccaagtcgcttcggaggtgctcccctcattaagctgggcagcgacttcaagaaggtgtcggacttccagaagagaatcccctcgataccgaagattatcgagcttgaccatctgaccattacgggtaacgtcaaccttcaccgcggcgtcacgctgaagggaacggtcatcattgtcgcgacggaaggatccacgatcgacatccctcccggatctatcctagagaacgttgtcgtgcagggaagtctgcgtctattggagcactag

SEQ ID NO: 32423 - protein, 525 aa, Muscodor strobelii
  misc_feature: SGI Peptide ID NO. 571174
  misc_feature (75)..(490): Pfam Id: PF01704 Pfam Desc: UTP--glucose-1-phosphate uridylyltransferase
  misc_feature (1)..(525): NCBI GI: 171696094 Blast Desc: protein product [Podospora anserina] gi|170948289|emb|CAP60453.1| protein product [Podospora anserina]
  misc_feature (1)..(525): NCBI GI: 256734526 Blast Desc: [Nectria haematococca mpVI 77-13-4]
  misc_feature (1)..(525): NCBI GI: 156057023 Blast Desc: SS1G_04242 [Sclerotinia sclerotiorum 1980] gi|154702028|gb|EDO01767.1| SS1G_04242 [Sclerotinia sclerotiorum 1980]
  misc_feature (1)..(525): NCBI GI: 164427705 Blast Desc: UTP-glucose-1-phosphate uridylyltransferase [Neurospora crassa OR74A] gi|157071851|gb|EAA35217.2| UTP-glucose-1-phosphate uridylyltransferase [Neurospora crassa
  misc_feature (1)..(525): NCBI GI: 46107282 Blast Desc: FG00524.1 [Gibberella zeae PH-1]
  misc_feature (1)..(525): NCBI GI: 154301169 Blast Desc: BC1G_10557 [Botryotinia fuckeliana B05.10] gi|150856305|gb|EDN31497.1| BC1G_10557 [Botryotinia fuckeliana B05.10]
  misc_feature (2)..(525): NCBI GI: 116181760 Blast Desc: conserved [Chaetomium globosum CBS 148.51] gi|88185805|gb|EAQ93273.1| conserved [Chaetomium globosum CBS 148.51]
  misc_feature (1)..(525): NCBI GI: 145613451 Blast Desc: MGG_01631 [Magnaporthe grisea 70-15] gi|145020522|gb|EDK04651.1| MGG_01631 [Magnaporthe grisea 70-15]
  misc_feature (8)..(525): NCBI GI: 212526134 Blast Desc: UTP-glucose-1-phosphate uridylyltransferase Ugp1, [Penicillium marneffei ATCC 18224] gi|212526136|ref|XP_002143225.1| UTP-glucose-1-phosphate Ugp1,
  misc_feature (8)..(525): NCBI GI: 159459918 Blast Desc: UDP-glucose pyrophosphorylase [Phoma herbarum]
  misc_feature (27)..(525): SWISSPROT Homolog: EC 2.7.7.9 UTP--glucose-1-phosphate uridylyltransferase
MAQAIKSALPSHLKSQLGGKDSDSESVGRHHGKTRSHMAFENASTNVAAAQMRNALTELTGTISDPDEKKLFETEMDNFFSLFRRYLNDKAKGNAVDWDRIAPPAQNQVVDYEDLANSESVGFLNKLAVLKLNGGLGTSMGCVGPKSVIEVRDGMSFLDMSVRQVEYLNRTYNTNVPFILMNSFNTNDDTAAIIKKYEGHNVDILTFNQSRYPRIYKDSLLPVPKKFDSSINEWYPPGHGDVFESLYNSGILDKLIERGIEIIFLSNVDNLGAVVDLRILQHMVETEAEYIMELTNKTKADVKGGTIIDYEGSVRLLEIAQVPKEHTNEFKSIKKFKYFNTNNIWMNVNAIKRVVENDELEMEIIPNGKSIPGDKKGESDISILQLETAVGAAIRHFKNAHGVNVPRRRFLPVKTCSDLMLVKSDLYAVKHGQLQMSPSRFGGAPLIKLGSDFKKVSDFQKRIPSIPKIIELDHLTITGNVNLHRGVTLKGTVIIVATEGSTIDIPPGSILENVVVQGSLRLLEH

SEQ ID NO: 32424 - DNA, 4820 bp, Muscodor strobelii
  misc_feature: SGI EST ID NO. CUFF.77076.0
  misc_feature: Variant of the nucleotide sequence at SEQ ID NO 32422
gcggtatcgcccatcgcaagccgcaagcgaagttaaggttaggttagtcactagtggtacctggtcatgcctggtcatacctggctgtagcaactttgcgggcgatagcgctctcaggtgggagtagtagcatcttgacggagcttgctaggttgcaaggcaacttgcatccccggtccttttttgcccctctcctcctgcttcgcataccgcccatcgtttgttcaggtagagatggactctgcgcgacaagatttaaaacctaacctgtccactctttgcttcctctctttctccaccccgacactatagtcctccccagagcttgagatctgtcgtgactttactctcaccatctaccgctatctgtttgtttgttccattgtctgacgactccagagctagctaccaacatcccagtccaccaccactcgctcgtcaaccccatatccttcacgatggcccaggcgatcaagagtgccttgccttcccatctcaagtctcagcttggagggaaggactcggactcggagtccgttggcaggcatcatggaaagacgcgatcgcacatggccttcgagaatgcctcgaccaatgtagctgctgcacagatgcgcaatgccctgacggagctgactggaaccatctcagaccctgacgagaagaagctcttcgagactgagatggacaacttcttttcgctcttcagacgatacctcaacgacaaggctaagggcaatgcagtcgattgggatcgcattgcccctcctgcccagaaccaggttgtcgactacgaagacctcgctaactccgaatctgttggcttcctcaacaaactggctgtcctgaagttgaacggcggtctgggtacctcgatgggctgcgttgggcccaagtcggtcatcgaagttcgtgatggcatgtctttcttggacatgtctgttcgccaagtcgagtacctcaaccgaacctataacaccaatgtcccattcatcctgatgaactcgttcaacaccaacgatgacacagccgccatcatcaagaagtacgagggccacaacgttgatatcctgaccttcaaccagtcccgatatcccagaatctacaaggactcgctcctccccgtgcccaagaagtttgattccagcattaacgagtggtatcctcctggacacggtgacgtcttcgagtcgctctacaactcgggtattctcgacaagctgatcgagcgtggaatcgagattatcttcttgtctaacgtggacaacctgggagctgttgtcgatctccgcattttgcagcacatggttgagacggaggccgagtacatcatggagttgacaaacaagaccaaggccgacgtcaaaggtggtaccatcattgactacgaaggctcggtccgcctcctggagattgcccaggtgcccaaggagcacaccaacgagttcaagtcgatcaagaagttcaagtatttcaacaccaacaacatctggatgaacgtcaacgctatcaagcgcgtcgtagagaacgacgagctggagatggagatcatccctaacggcaagtctattcctggcgacaagaagggcgagtcggacatttccattctccaacttgagaccgctgtcggtgcggctattcgccacttcaagaacgcccacggtgtcaatgtgccccgtcgccgattcttgcctgtcaagacttgctctgatctgatgcttgtgaagtctgacctgtatgccgtcaagcacggccagttgcagatgagcccaagtcgcttcggaggtgctcccctcattaagctgggcagcgacttcaagaaggtgtcggacttccagaagagaatcccctcgataccgaagattatcgagcttgaccatctgaccattacgggtaacgtcaaccttcaccgcggcgtcacgctgaagggaacggtcatcattgtcgcgacggaaggatccacgatcgacatccctcccggatctatcctagagaacgttgtcgtgcagggaagtctgcgtctattggagcactagagcacttctatattttagcgggcatttgatccgccgttgcgatttgattttcgttcatagtagcatatacgcggaatggggcgtttgagctcctccgactattatagaagttggccaacacacatgtaatgccgaaggatgagtacaggtgtctaagggtcaccgataagagataataaaatgaatgactgttctcttaacgaccggaaatgtttcgtgagcattatgattgagtaaaggcaagactgatgcaagcatttggagcattatatctctgaggtgcacgttttgaataattcaagttctgctatcggtcatggattttcaacgctatctacatgcgcctggttcatcagcgtagttgatatctgcggaataagggtcaattacttgaaaatatccccgcaggcactgcagtcatcataaggacattcctcttcgcgagtaccattgccggccgtctcccccgtcctacctgaccggtcaatgttcggaatggctatgcgctggagcgacaaattcatcattgttaagggagtttgaagattctcaacaatctatgcatcaggcaaatgatcgtgctgacaacataaccatcgcagagtcagtctccctagtggcagtgacgagcagctccaacacctcattctcgtgtaggttgttgctgtcgtcgcgcctgatttccgtggagattagactcgtcgcccctgctctccaaggctcgcgaagcctgtggtaatctgcgacttggattcgtccagagtattcttcacttggtcgctggtgtgcgacaagctgcgggaagtgcaaaatgtagttgtgtgaattgtattgcacaataagattgatgagatgaagtaaaacaataccgggtgactgtcgccacggactgtagtgctgtctgcgtcttcatccgcttccccagactcaatggcgcgcagatgtccgtaactgtcgtgggctccgattcgcaagattttcccgtgagagagcattaggatgcagtcgcacgttggaatcgtggctagagtagatggttttcagatggtatctagaatgcaacggcgtgaacagttttctctgtcgggaaaaagccgtaagccctttagctagctcttgttcgcaccgtcgtttcattctagcgataccaggctcgcataaatacgcccgtctgccgttctctcacagtggttcgaaagcgctaaacctcatcccgatgtcgtttcatgtcgtactcatcatcatttcgccttcttctgcttgctctcacgctccgacacacaggtcgggcagtaccagcgaccctcgggctcggacttgagcccaacacagctccagtggaaccactcgtaggggcaagacggattgtcacaagccaccatgtcgccatacgacaccgcctggcacagacaatacctcttgccctcttcatcctcctcttcctccagccctgacgccgagccatcagacgccgaggcttcctcttcttcctctcctcgatcgggcatctcttcgtccttgtccgcttccccagttatgttcttgatgtgtacatggttgtgggtgtggactggtgttccgctgcctgcgcgtgagccgcgatgggaggaggctgccgattcagcatcggagagttcgctgtctgccgtcgaggccggagaacctttggagtgccccacgcgcttcacgcgagacagtgtggatttggaggtgggtggtttcttacgagggggcgcagcgccgggcgtccctttcctggaaccagtagatcctgtcgccttcgtaacacctttgggctgtgcgcttcctgctcggctggtggcgccgggtgtgcccgccttgggtgtgccgggcccaagcgacgactgtctggctaacccgcttgggttggctgggagattgccaatgccatgagctgtccgggggcctctcttagggacgccacttccaggtccggcagacgactcgcgttggtttcggctgaggatgatgctcgcggctggggtggccggggcggaggaagaatgatgtggcggatggaactgcgaggagcgagcctggacgggaggtactcgcacgacggtgggtgtggcattgttgtgaatcgggttcagcggcgtcgaggacttcgtgacggcgagcactcggggagggacggtgctgtggtttgcggcactgggcctcactagggatggtatctcgtcagggtcggtgaagccgggctcggccttgtctgtgagctgcttgatctggagatcgaggtggcgcagatgcttatcgaagatgtgcagcgccttctccgccagcacctccttctcgcggcacagacggtctgcgcggttgtggttgtccctgatgacctcgcgcaggccggcctcgcgggggttgtgctggtggctgccgttggcgcggatccatttctggatcttggtgtcagcctcctcgatggcgcggctgcattcgtggtaggcgcggtccttgtcggcgatctcgtcttggatgaagcgcacctcctcgggcaggttggccgtgcggtgcatgaactcctcgaggatgacggcagggtcttgggcctcggccgcgggccccatcttcttcacgaagtctatcgacaggtcgtctctgggcatggcgtgttaaccttgcctgcgacgcgaggcgaacgatctgtgctgtaggtgtatgcgcgtagaaaaaaagcagatggacggcgcagaacgcagatcaagactggaaacgaggcatccgacgtgtgaatcagggagcgtggctcgttcttttttt

SEQ ID NO: 32425 - DNA, 1503 bp, Muscodor strobelii
  misc_feature: SGI cDNA ID NO. 571175
  misc_feature: Encodes the peptide sequence at SEQ ID NO 32426
atggagcaggatccaaccaatctgtactccctacggcttcccaagccaaactatctaccgcataatgttgactacgacgagcctatcgttaagaagtttctcaagccgctagatcggccctcggatctggataacgcggtctatctcaacaagattcagcgctttgttcgtgaacatgatatcactaaaccccaagggtacaacgtctcattccattataaccccgaaatggaaagacatcacttcggcatgacccatcccatgaagccctggcgtctcaccctcaccaagagccttgtgtctgcctacggaatgaattttgccatggacaactatacagcacgtgctgccacatacgaggagctgtgttcgtttcacgccgatgattatgtcaaccacttggccacagtagcacctcagccccagcccctggatatggagaatccaaatcccgatcttaggttcaatctggggggtagtgattgtccactcttcgaagggctctacaattactgctctctttccgctggagcctcgcttgatgctgccagaaaactaagcgcaaatcagtctgatattgctatcgcgtggggtggaggacttcaccacgccaagaaatccgaggcttcggggttctgctatatcaacgatatcgtcgttgccatattagagctactacgtgtccatgcgcgagttctgtatattgacattgacgtacaccacggggacggtgtggaggaagcctttttttccaccgaccgagttatgacggtgtccttccataagtatgatccgttgaacttctttcctggcacgggcgctttagaagacaatggtcctaagagcgaacataacgctggcgcccatcatgccattaacgtgcctctcggtgatggcgtcacggatgagcagtatagctggctcttccaaaaaatcataagtggagtcattgaaaaattcagaccaggcgctattgcccttcagtgtggtgcagactcactggccggcgacaggcttggtaagttcaacctgctggtcgaagggcatgccgcatgtgtcgaatactgcaaaagtctgaagatcccactgcttatatttggcggcggtggatacacgccgaggaacgtcgctcgtgcttgggcatacgagacggctgtcgcgatcggcaaacatgagactatacccaggacgatcccgactcacacgccctggcgttcgcgcttcaagaatgaatcactcctgccaaccattcaacagatcataggcgagcctcgtgctaataagaatacacagaagaagttgaccgagatcatacagcatgtgacagagcagttgagattcgttggcgcggcgccgagtgtgcaaatgaatcgcataccaccaagtctgggtcccattagggacgaagtcgagcagcgcatcaaggaggagattgaggagagagatgaacagggtcgcaagctcaaagaagaagctcttggtagtcgcatggaactctgttga

SEQ ID NO: 32426 - protein, 500 aa, Muscodor strobelii
  misc_feature: SGI Peptide ID NO. 571175
  misc_feature (68)..(389): Pfam Id: PF00850 Pfam Desc: Histone deacetylase domain
  misc_feature (9)..(499): NCBI GI: 116181764 Blast Desc: CHGG_01510 [Chaetomium globosum CBS 148.51] gi|88185807|gb|EAQ93275.1| CHGG_01510 [Chaetomium globosum CBS 148.51]
  misc_feature (12)..(499): NCBI GI: 164427709 Blast Desc: histone deacetylase phd1 [Neurospora crassa OR74A] gi|157071853|gb|EAA35215.2| histone deacetylase phd1 [Neurospora crassa OR74A]
  misc_feature (9)..(499): NCBI GI: 256734298 Blast Desc: histone deacetylase [Nectria haematococca mpVI 77-13-4]
  misc_feature (9)..(500): NCBI GI: 171696090 Blast Desc: protein product [Podospora anserina] gi|170948287|emb|CAP60451.1| protein product [Podospora anserina]
  misc_feature (9)..(495): NCBI GI: 46108942 Blast Desc: FG01353.1 [Gibberella zeae PH-1]
  misc_feature (9)..(499): NCBI GI: 145613449 Blast Desc: MGG_01633 [Magnaporthe grisea 70-15] gi|145020520|gb|EDK04649.1| MGG_01633 [Magnaporthe grisea 70-15]
  misc_feature (27)..(494): NCBI GI: 156057015 Blast Desc: SS1G_04238 [Sclerotinia sclerotiorum 1980] gi|154702024|gb|EDO01763.1| SS1G_04238 [Sclerotinia sclerotiorum 1980]
  misc_feature (29)..(494): NCBI GI: 154301161 Blast Desc: BC1G_10553 [Botryotinia fuckeliana B05.10] gi|150856301|gb|EDN31493.1| BC1G_10553 [Botryotinia fuckeliana B05.10]
  misc_feature (29)..(483): NCBI GI: 238484831 Blast Desc: histone deacetylase HosA [Aspergillus flavus NRRL3357] gi|220701704|gb|EED58042.1| histone deacetylase HosA [Aspergillus flavus NRRL3357]
  misc_feature (43)..(499): NCBI GI: 121710376 Blast Desc: histone deacetylase HosA [Aspergillus clavatus NRRL 1] gi|119400954|gb|EAW11378.1| histone deacetylase HosA [Aspergillus clavatus NRRL 1]
  misc_feature (63)..(463): SWISSPROT Homolog: EC 3.5.1.98 Histone deacetylase
MEQDPTNLYSLRLPKPNYLPHNVDYDEPIVKKFLKPLDRPSDLDNAVYLNKIQRFVREHDITKPQGYNVSFHYNPEMERHHFGMTHPMKPWRLTLTKSLVSAYGMNFAMDNYTARAATYEELCSFHADDYVNHLATVAPQPQPLDMENPNPDLRFNLGGSDCPLFEGLYNYCSLSAGASLDAARKLSANQSDIAIAWGGGLHHAKKSEASGFCYINDIVVAILELLRVHARVLYIDIDVHHGDGVEEAFFSTDRVMTVSFHKYDPLNFFPGTGALEDNGPKSEHNAGAHHAINVPLGDGVTDEQYSWLFQKIISGVIEKFRPGAIALQCGADSLAGDRLGKFNLLVEGHAACVEYCKSLKIPLLIFGGGGYTPRNVARAWAYETAVAIGKHETIPRTIPTHTPWRSRFKNESLLPTIQQIIGEPRANKNTQKKLTEIIQHVTEQLRFVGAAPSVQMNRIPPSLGPIRDEVEQRIKEEIEERDEQGRKLKEEALGSRMELC

SEQ ID NO: 32427 - DNA, 2058 bp, Muscodor strobelii
  misc_feature: SGI EST ID NO. CUFF.77080.0
  misc_feature: Variant of the nucleotide sequence at SEQ ID NO 32425
gctagtccgagtcgggactggacttggactgtaggaactgatccatgccgagccaccaagcctagtgtatctcgaatcgcatcttcaattgagaattgtcacgtccattgctgtcggtttcacgtgcaacaccctcatcaacaacgcgtggcatccgcgcaaactctgtcttgcctatcccagactacctgttctcattgtagaaactttgaatctttcacctgttaccatttcccaccggactagagcttcactgatttcatcccacacacttttacgacgaggcctagcaagacccgtggttgcaggttgcatcatcgccaaacgaggtcaccactaggctcatcattatctaggctattttgaagttgccagtctcaatatttccggcagcggtgttggctgcgcatcctgcccatcatggagcaggatccaaccaatctgtactccctacggcttcccaagccaaactatctaccgcataatgttgactacgacgagcctatcgttaagaagtttctcaagccgctagatcggccctcggatctggataacgcggtctatctcaacaagattcagcgctttgttcgtgaacatgatatcactaaaccccaagggtacaacgtctcattccattataaccccgaaatggaaagacatcacttcggcatgacccatcccatgaagccctggcgtctcaccctcaccaagagccttgtgtctgcctacggaatgaattttgccatggacaactatacagcacgtgctgccacatacgaggagctgtgttcgtttcacgccgatgattatgtcaaccacttggccacagtagcacctcagccccagcccctggatatggagaatccaaatcccgatcttaggttcaatctggggggtagtgattgtccactcttcgaagggctctacaattactgctctctttccgctggagcctcgcttgatgctgccagaaaactaagcgcaaatcagtctgatattgctatcgcgtggggtggaggacttcaccacgccaagaaatccgaggcttcggggttctgctatatcaacgatatcgtcgttgccatattagagctactacgtgtccatgcgcgagttctgtatattgacattgacgtacaccacggggacggtgtggaggaagcctttttttccaccgaccgagttatgacggtgtccttccataagtatgatccgttgaacttctttcctggcacgggcgctttagaagacaatggtcctaagagcgaacataacgctggcgcccatcatgccattaacgtgcctctcggtgatggcgtcacggatgagcagtatagctggctcttccaaaaaatcataagtggagtcattgaaaaattcagaccaggcgctattgcccttcagtgtggtgcagactcactggccggcgacaggcttggtaagttcaacctgctggtcgaagggcatgccgcatgtgtcgaatactgcaaaagtctgaagatcccactgcttatatttggcggcggtggatacacgccgaggaacgtcgctcgtgcttgggcatacgagacggctgtcgcgatcggcaaacatgagactatacccaggacgatcccgactcacacgccctggcgttcgcgcttcaagaatgaatcactcctgccaaccattcaacagatcataggcgagcctcgtgctaataagaatacacagaagaagttgaccgagatcatacagcatgtgacagagcagttgagattcgttggcgcggcgccgagtgtgcaaatgaatcgcataccaccaagtctgggtcccattagggacgaagtcgagcagcgcatcaaggaggagattgaggagagagatgaacagggtcgcaagctcaaagaagaagctcttggtagtcgcatggaactctgttgatacaggtagcttaaaaatgtatgaatgaaaagcaacaggtatataagttgccttgtgaataccattgctgacttgactcctatttcttttgagtcgcttcccttctataaggctattatttgtggtgtttctttt

SEQ ID NO: 32428 - DNA, 705 bp, Muscodor strobelii
  misc_feature: SGI cDNA ID NO. 571176
  misc_feature: Reduced expression when VOC is produced
  misc_feature: Encodes the peptide sequence at SEQ ID NO 32429
atgagggatactcctgaacaagctggtgatcagccacctccaccgcctccaggtgctttcccaccacacccacctcatcatcatcaccaccatgggcccccaaatcccttcggaccacctccgttcggctcacaccgtcgacgaggtggacgccatggtcgtggtgggagacatcacggcccaccaccaccttacgagggcccctttgactttcgacccttgatgcatgccctatcttcccacccattcgcccaggcattccgcaactacgccgagcaggctcgcaataccaccacaggcgaccaagccgacaatgcgaacaggagccaagaggagcaaagcgatgcgttcacgccacccgtcgatattttcaataccgatggtgcatacgtcctccacgtcgcactacctggcgcctcgaaggaggacgtaggcgtgagctgggacggagagcaagtcaaaatcgccggtgtcatctaccgacccggcagcgaggatttcctccggactctcactacgagcgagaggaaagtcggcatgtttgagcgcaccattaagttgcctcctgctgaccaagccaactccgatgatgtggatggatatgcgatgtccgcaaagatggaaaatggcatcttgatcattacagtgcctaaaatcgagaaggataattcgtggactgagatccataaggtggacattgagtga

SEQ ID NO: 32429 - protein, 234 aa, Muscodor strobelii
  misc_feature: SGI Peptide ID NO. 571176
  misc_feature (122)..(234): Pfam Id: PF00011 Pfam Desc: Hsp20/alpha crystallin family
  misc_feature (69)..(234): NCBI GI: 46107342 Blast Desc: FG00554.1 [Gibberella zeae PH-1]
  misc_feature (70)..(233): NCBI GI: 154293998 Blast Desc: BC1G_14178 [Botryotinia fuckeliana B05.10] gi|150845150|gb|EDN20343.1| BC1G_14178 [Botryotinia fuckeliana B05.10]
  misc_feature (69)..(234): NCBI GI: 256734511 Blast Desc: NECHADRAFT_74848 [Nectria haematococca mpVI 77-13-4]
  misc_feature (70)..(233): NCBI GI: 156050267 Blast Desc: SS1G_07720 [Sclerotinia sclerotiorum 1980] gi|154692121|gb|EDN91859.1| SS1G_07720 [Sclerotinia sclerotiorum 1980]
  misc_feature (69)..(233): NCBI GI: 39944752 Blast Desc: MGG_04358 [Magnaporthe grisea 70-15] gi|145021606|gb|EDK05735.1| MGG_04358 [Magnaporthe grisea 70-15]
  misc_feature (74)..(233): NCBI GI: 171687935 Blast Desc: protein product [Podospora anserina] gi|170943929|emb|CAP69581.1| protein product [Podospora anserina]
  misc_feature (117)..(234): NCBI GI: 169599318 Blast Desc: SNOG_02476 [Phaeosphaeria nodorum SN15] gi|160704578|gb|EAT90688.2| SNOG_02476 [Phaeosphaeria nodorum SN15]
  misc_feature (114)..(234): NCBI GI: 255941228 Blast Desc: Pc16g10770 [Penicillium chrysogenum Wisconsin 54-1255] gi|211586006|emb|CAP93747.1| Pc16g10770 [Penicillium chrysogenum Wisconsin 54-1255]
  misc_feature (115)..(234): NCBI GI: 145234597 Blast Desc: An03g00400 [Aspergillus niger] gi|134057618|emb|CAK38018.1| protein product [Aspergillus niger]
  misc_feature (37)..(222): NCBI GI: 240274564 Blast Desc: conserved [Ajellomyces capsulatus H143]
  misc_feature: Useful for introducing or modulating the production of volatile compounds
MRDTPEQAGDQPPPPPPGAFPPHPPHHHHHHGPPNPFGPPPFGSHRRRGGRHGRGGRHHGPPPPYEGPFDFRPLMHALSSHPFAQAFRNYAEQARNTTTGDQADNANRSQEEQSDAFTPPVDIFNTDGAYVLHVALPGASKEDVGVSWDGEQVKIAGVIYRPGSEDFLRTLTTSERKVGMFERTIKLPPADQANSDDVDGYAMSAKMENGILIITVPKIEKDNSWTEIHKVDIE

SEQ ID NO: 32430 - DNA, 1339 bp, Muscodor strobelii
  misc_feature: SGI EST ID NO. CUFF.76698.0
  misc_feature: Variant of the nucleotide sequence at SEQ ID NO 32428
gttctgatggattcggatcttgaattggtctacgccatggttggttctgagtcaattgaaggcgcaaatgttgcgtacaccaatttgcctgtagttcagagaccttgtgtctgtgacaaagtcatgatagtcttccaagtataaatcgtctgagatgtccgtctagctagcctactgctcttctcatcaacaatcatcttcaaccaagtattattactgatatcaacaatatggacaataacaattacaaccacaacaatatgaacagtcccttctgggattctgttcgatcataccagcgacccggcttcggcgttgatcacaatggtcctcaatttcctcaaggctttccgtttgacgcagctgggtttggtggctggagcggcccgtgggctggtccatggggaggtcattggggacggcatgatcgccgtggccgacacggacgccatcaccaccaacacgggtctggcgatgaagactcccatggtgaggagacatcgcccgagaccgagactatgagggatactcctgaacaagctggtgatcagccacctccaccgcctccaggtgctttcccaccacacccacctcatcatcatcaccaccatgggcccccaaatcccttcggaccacctccgttcggctcacaccgtcgacgaggtggacgccatggtcgtggtgggagacatcacggcccaccaccaccttacgagggcccctttgactttcgacccttgatgcatgccctatcttcccacccattcgcccaggcattccgcaactacgccgagcaggctcgcaataccaccacaggcgaccaagccgacaatgcgaacaggagccaagaggagcaaagcgatgcgttcacgccacccgtcgatattttcaataccgatggtgcatacgtcctccacgtcgcactacctggcgcctcgaaggaggacgtaggcgtgagctgggacggagagcaagtcaaaatcgccggtgtcatctaccgacccggcagcgaggatttcctccggactctcactacgagcgagaggaaagtcggcatgtttgagcgcaccattaagttgcctcctgctgaccaagccaactccgatgatgtggatggatatgcgatgtccgcaaagatggaaaatggcatcttgatcattacagtgcctaaaatcgagaaggataattcgtggactgagatccataaggtggacattgagtgacaggaatacatggcaatttgatttgctgccaacagcggagaggaacctgccgtcttgggaatgacgaatgtattcatgttttactatcatgatatctgacctaacaggataaaaat

SEQ ID NO: 32431 - DNA, 963 bp, Muscodor strobelii
  misc_feature: SGI cDNA ID NO. 571177
  misc_feature: Reduced expression when VOC is produced
  misc_feature: Encodes the peptide sequence at SEQ ID NO 32432
atgaacagtcccttctgggattctgttcgatcataccagcgacccggcttcggcgttgatcacaatggtcctcaatttcctcaaggctttccgtttgacgcagctgggtttggtggctggagcggcccgtgggctggtccatggggaggtcattggggacggcatgatcgccgtggccgacacggacgccatcaccaccaacacgggtctggcgatgaagactcccatggtgaggagacatcgcccgagaccgagactatgagggatactcctgaacaagctggtgatcagccacctccaccgcctccaggtgctttcccaccacacccacctcatcatcatcaccaccatgggcccccaaatcccttcggaccacctccgttcggctcacaccgtcgacgaggtggacgccatggtcgtggtgggagacatcacggcccaccaccaccttacgagggcccctttgactttcgacccttgatgcatgccctatcttcccacccattcgcccaggcattccgcaactacgccgagcaggctcgcaataccaccacaggcgaccaagccgacaatgcgaacaggagccaagaggagcaaagcgatgcgttcacgccacccgtcgatattttcaataccgatggtgcatacgtcctccacgtcgcactacctggcgcctcgaaggaggacgtaggcgtgagctgggacggagagcaagtcaaaatcgccggtgtcatctaccgacccggcagcgaggatttcctccggactctcactacgagcgagaggaaagtcggcatgtttgagcgcaccattaagttgcctcctgctgaccaagccaactccgatgatgtggatggatatgcgatgtccgcaaagatggaaaatggcatcttgatcattacagtgcctaaaatcgagaaggataattcgtggactgagatccataaggtggacattgagtga

SEQ ID NO: 32432 - protein, 320 aa, Muscodor strobelii
  misc_feature: SGI Peptide ID NO. 571177
  misc_feature (208)..(320): Pfam Id: PF00011 Pfam Desc: Hsp20/alpha crystallin family
  misc_feature (155)..(320): NCBI GI: 46107342 Blast Desc: FG00554.1 [Gibberella zeae PH-1]
  misc_feature (156)..(319): NCBI GI: 154293998 Blast Desc: BC1G_14178 [Botryotinia fuckeliana B05.10] gi|150845150|gb|EDN20343.1| BC1G_14178 [Botryotinia fuckeliana B05.10]
  misc_feature (156)..(319): NCBI GI: 156050267 Blast Desc: SS1G_07720 [Sclerotinia sclerotiorum 1980] gi|154692121|gb|EDN91859.1| SS1G_07720 [Sclerotinia sclerotiorum 1980]
  misc_feature (155)..(320): NCBI GI: 256734511 Blast Desc: NECHADRAFT_74848 [Nectria haematococca mpVI 77-13-4]
  misc_feature (155)..(319): NCBI GI: 39944752 Blast Desc: MGG_04358 [Magnaporthe grisea 70-15] gi|145021606|gb|EDK05735.1| MGG_04358 [Magnaporthe grisea 70-15]
  misc_feature (203)..(320): NCBI GI: 169599318 Blast Desc: SNOG_02476 [Phaeosphaeria nodorum SN15] gi|160704578|gb|EAT90688.2| SNOG_02476 [Phaeosphaeria nodorum SN15]
  misc_feature (200)..(320): NCBI GI: 255941228 Blast Desc: Pc16g10770 [Penicillium chrysogenum Wisconsin 54-1255] gi|211586006|emb|CAP93747.1| Pc16g10770 [Penicillium chrysogenum Wisconsin 54-1255]
  misc_feature (55)..(319): NCBI GI: 171687935 Blast Desc: protein product [Podospora anserina] gi|170943929|emb|CAP69581.1| protein product [Podospora anserina]
  misc_feature (201)..(320): NCBI GI: 145234597 Blast Desc: An03g00400 [Aspergillus niger] gi|134057618|emb|CAK38018.1| protein product [Aspergillus niger]
  misc_feature (123)..(308): NCBI GI: 240274564 Blast Desc: conserved [Ajellomyces capsulatus H143]
  misc_feature: Useful for introducing or modulating the production of volatile compounds
MNSPFWDSVRSYQRPGFGVDHNGPQFPQGFPFDAAGFGGWSGPWAGPWGGHWGRHDRRGRHGRHHHQHGSGDEDSHGEETSPETETMRDTPEQAGDQPPPPPPGAFPPHPPHHHHHHGPPNPFGPPPFGSHRRRGGRHGRGGRHHGPPPPYEGPFDFRPLMHALSSHPFAQAFRNYAEQARNTTTGDQADNANRSQEEQSDAFTPPVDIFNTDGAYVLHVALPGASKEDVGVSWDGEQVKIAGVIYRPGSEDFLRTLTTSERKVGMFERTIKLPPADQANSDDVDGYAMSAKMENGILIITVPKIEKDNSWTEIHKVDIE

SEQ ID NO: 32433 - DNA, 1339 bp, Muscodor strobelii; identical to SEQ ID NO: 32430
  misc_feature: SGI EST ID NO. CUFF.76698.0
  misc_feature: Variant of the nucleotide sequence at SEQ ID NO 32431

SEQ ID NO: 32434 - DNA, 3654 bp, Muscodor strobelii
  misc_feature: SGI cDNA ID NO. 571178
  misc_feature: Encodes the peptide sequence at SEQ ID NO 32435
atggacaaacatggccgccctgaggaggagatgttcatgaataagcctgcggacgattgcgacagccctaccatagaacccttgagaatgttcaagcctcagagtcccaaacctgccaacgacagaccttcggagcgtttcaagtatcctgcgccgccatcatctaaacccagcttcccgttgccgccgggtgcttctagttcggccgctccgttgccttatcctgacgatgacgatctccgagtaggccagtcatcgcaatcaagccggcctacctactccagcgatagccgtacgagctcggcaagcaagtcgtacgccagcccgacgagcgcaagctactcgggccgtcctaacgatacaacaccacggctcgacaccagtcctatcgagaagagaggccctggccttgccgagcgccgggggacagccccgaagccgctcccgggaacactcagccctaccagtccccatgcggatgacagtggtctatttgcaaaaccgcttgcgcaccagcagaagcccgctgcggcttcggatacatcttttccagactatcatcaaaagccatattatccaccaccgcgcggcaactcagctgggtcgagttcgagctcgagcagtggcgcaaggcctcaacaagtgagccaggatagctatcttaagatgccggaagatagtggagtcaataggttcgcgtcaacggcttcaacatctaccacaagagccagccgcggttctccaccaccaccagaaacacctatcgtcgaaccgggcaacattcccgggggtggaatcgaagcgcgctatgctgccgctggtatttccggcacagcgaccctgaacagtttccaaagtgcggcggcaactcaacgactagcgcagtatgggcagcacccagcttcacaccctcctcggccgtggacgccaacagagactcccgagcagcaaccacatggaccaccgacagtgtatcaaggagccaacccggttaccagtcccacagcgtcgaccttcagccctcagtcaacacgaccacctaatactaatgcgcagtcaaactcaaacgcatcagggggcccagctttacaagtcagtgtactagagcaagactttcaacgaatgcaaatgtcaccaagccctccgccagcatattccagcatcacagcgggtggaggctccgcgtaccctaatgagaagcaacgtcctggccagcccgcttcagcgtcaacgccggcgcaaccaaacccggcagcctcgcctcctaagaaagtaaatgagattgcagctggactgacatctcctgctttacaacatccgggtcatccagcatttgctaacgatccacgcccggatagccagccaaacggccactcagctcaggccggtacatccactgccggccctgctgttgccgctagcccttcaccattccaaggcggccaagggcctgcttcaccaccgcctttgccagaaggatggattgcgcacctggaccaaaactcgggccaatactattatatccacttggctacacaagccacgcaatgggaatttcctaagggccccaaccctatccagcatgatgttgcacctctatcaccaactgcgtcaacatatggcaatcccttagcttcacctatgttcggcaagcagagtgcattggcttcgccgatgtttcccccgcacactcccggatacgcggaaagcatcatgagtgtcgcaacggcaacaccaactatggctggtttctctggtccgccccctggtgccggtgtagatatgtacaaagttcacccaaccaacaacgtgtattttggaccctatctgcgatatgtgaatatggatatagagaaaggcttgtggttaggcagcattatgattgtctccgattcgccccaaccgcctaccattcatattcatcccagcatggatctatcaccgaatcctcgtcaactcataccccactctatctacactcatcaaaggtggcagttttacaaatacgatgtcgacttaccgatggccgaagcaaccgagcggtggacctacgctattacttctcatctcggatgtactcgttatgaattcgtcgtagcagggcggaatgagaccggttggcgattcgtagcacactctggcaatgattttgctgctagcacatctcaaaatgagcgtagcaaactgggtggtcttggtttcatgtggaaggacgtcctacaaaagaacgtcgattgtggtggattccatgtccagcttggtctgggcgatcagatctatggcgaccggctatggaaggaggtgcccttgcttaaacagtggcttgcgacgcaaggcaaagaaaaccgtaagaatgcgtcgtggacggcacggcatgaggaagacgtctcgcatgcctattttcacttctacaccagtcactttgaccaacctttccttcgcgaggcttttgctcaaattccgcatatttgtcagatcgatgaccatgacatatttgacggctatggctcgtatcccgattacatgcaaaactcgcaaatattcaagaatatcggacgaatagctgtggatatgtatctcctcttccaacatcacacaacgctagaaatgctccgaaatattagtcatgacttggacctattcaccatcacaggtcagggctggcatttcgtcaaattccttggtccagctgttgtcgttgtaggtgctgatgtacggtccgagcggaccgtaagccgtgtgctcgctggccctacataccaaggactcttccccaaggttgccatgctgccaccaagcgtacagcactgtatctggatgctgtcggtgccactgatttacccgcgtcttgatactatggaaagcttagccaatacgttcgccacaggcaagaaggccgttaacgctggatacaatgtgttgggcaaagtcacgagctcggtcgcgggcatcgtcggtggcaaagacgttgttgcgcaaggcttcaatcaggtcaagaaagcagtcggcaaatctggtctcatgggtaatgtcgtcaaccaatttggtgacctcgacattggtgagatactaaaggatatgtggacacacgagagcaaagacctcgagcggacgtacttgatccggactctgcaaggtatcgcccatcagaagggtattcgtatgactttcttgtctggagacgtcaacgcagcaggagccggtctcgtgcacgacccagcccatcctagcgaccacaaaaccatgtatcaaatcataacatcaccaattgtcgcagcgcccgcagcaaactacatcctcaagatgcttcacagtaacaagacgtactacgtgccccccaacgggcaaaagtcaagtggagaaacgctcagcgacaccaaggaagacatgatggagatcttccacacagacgccagtgggtcaccacgagagctcaagaagcttatgggtcggcgcaactacgtcgccttcgtggcgtacgaccctgaggcgattcccgggacgcagtatgcggttgccgcccaaaatggcacaaataatgggcttagcaaattaagtcttgccgttgattttgtagttcaaggagatggtgcctttaccacaccgaccaaatatggtcctgttatagtgccacatctcgagtttgggaggtag

SEQ ID NO: 32435 - protein, 1217 aa, Muscodor strobelii
  misc_feature: SGI Peptide ID NO. 571178
  misc_feature (490)..(520): Pfam Id: PF00397 Pfam Desc: WW domain
  misc_feature (5)..(1217): NCBI GI: 148562478 Blast Desc: Fso1 [Fusarium oxysporum]
  misc_feature (8)..(1217): NCBI GI: 261356000 Blast Desc: Fso1 [Verticillium albo-atrum VaMs.102]
  misc_feature (5)..(1216): NCBI GI: 164427713 Blast Desc: NCU02794 [Neurospora crassa OR74A] gi|157071855|gb|EAA34840.2| NCU02794 [Neurospora crassa OR74A]
  misc_feature (5)..(1216): NCBI GI: 145613443 Blast Desc: MGG_01636 [Magnaporthe grisea 70-15] gi|145020517|gb|EDK04646.1| MGG_01636 [Magnaporthe grisea 70-15]
  misc_feature (7)..(1216): NCBI GI: 116181768 Blast Desc: CHGG_01512 [Chaetomium globosum CBS 148.51] gi|88185809|gb|EAQ93277.1| CHGG_01512 [Chaetomium globosum CBS 148.51]
  misc_feature (7)..(1216): NCBI GI: 171696086 Blast Desc: protein product [Podospora anserina] gi|170948285|emb|CAP60449.1| protein product [Podospora anserina]
  misc_feature (5)..(1216): NCBI GI: 39645991 Blast Desc: signalling cascade component [Sordaria macrospora]
  misc_feature (3)..(1217): NCBI GI: 154323998 Blast Desc: BC1G_00398 [Botryotinia fuckeliana B05.10] gi|150842627|gb|EDN17820.1| BC1G_00398 [Botryotinia fuckeliana B05.10]
  misc_feature (435)..(1217): NCBI GI: 256732632 Blast Desc: NECHADRAFT_104091 [Nectria haematococca mpVI 77-13-4]
  misc_feature (315)..(1217): NCBI GI: 156057571 Blast Desc: SS1G_04517 [Sclerotinia sclerotiorum 1980] gi|154702302|gb|EDO02041.1| SS1G_04517 [Sclerotinia sclerotiorum 1980]
MDKHGRPEEEMFMNKPADDCDSPTIEPLRMFKPQSPKPANDRPSERFKYPAPPSSKPSFPLPPGASSSAAPLPYPDDDDLRVGQSSQSSRPTYSSDSRTSSASKSYASPTSASYSGRPNDTTPRLDTSPIEKRGPGLAERRGTAPKPLPGTLSPTSPHADDSGLFAKPLAHQQKPAAASDTSFPDYHQKPYYPPPRGNSAGSSSSSSSGARPQQVSQDSYLKMPEDSGVNRFASTASTSTTRASRGSPPPPETPIVEPGNIPGGGIEARYAAAGISGTATLNSFQSAAATQRLAQYGQHPASHPPRPWTPTETPEQQPHGPPTVYQGANPVTSPTASTFSPQSTRPPNTNAQSNSNASGGPALQVSVLEQDFQRMQMSPSPPPAYSSITAGGGSAYPNEKQRPGQPASASTPAQPNPAASPPKKVNEIAAGLTSPALQHPGHPAFANDPRPDSQPNGHSAQAGTSTAGPAVAASPSPFQGGQGPASPPPLPEGWIAHLDQNSGQYYYIHLATQATQWEFPKGPNPIQHDVAPLSPTASTYGNPLASPMFGKQSALASPMFPPHTPGYAESIMSVATATPTMAGFSGPPPGAGVDMYKVHPTNNVYFGPYLRYVNMDIEKGLWLGSIMIVSDSPQPPTIHIHPSMDLSPNPRQLIPHSIYTHQRWQFYKYDVDLPMAEATERWTYAITSHLGCTRYEFVVAGRNETGWRFVAHSGNDFAASTSQNERSKLGGLGFMWKDVLQKNVDCGGFHVQLGLGDQIYGDRLWKEVPLLKQWLATQGKENRKNASWTARHEEDVSHAYFHFYTSHFDQPFLREAFAQIPHICQIDDHDIFDGYGSYPDYMQNSQIFKNIGRIAVDMYLLFQHHTTLEMLRNISHDLDLFTITGQGWHFVKFLGPAVVVVGADVRSERTVSRVLAGPTYQGLFPKVAMLPPSVQHCIWMLSVPLIYPRLDTMESLANTFATGKKAVNAGYNVLGKVTSSVAGIVGGKDVVAQGFNQVKKAVGKSGLMGNVVNQFGDLDIGEILKDMWTHESKDLERTYLIRTLQGIAHQKGIRMTFLSGDVNAAGAGLVHDPAHPSDHKTMYQIITSPIVAAPAANYILKMLHSNKTYYVPPNGQKSSGETLSDTKEDMMEIFHTDASGSPRELKKLMGRRNYVAFVAYDPEAIPGTQYAVAAQNGTNNGLSKLSLAVDFVVQGDGAFTTPTKYGPVIVPHLEFGR

SEQ ID NO: 32436 - DNA, 4944 bp, Muscodor strobelii
  misc_feature: SGI EST ID NO. CUFF.76893.1
  misc_feature: Variant of the nucleotide sequence at SEQ ID NO 32434
ggcttgtgagggtagagacgagtgggagcccaggcgggccagggtgcggcagagcacgatgcgggcagccatcaggccgcatatcaccgtcctgcagcctttctcgcgttcgccctcgagcttttgtttcatctgtttcgtgactttgttccgtatcactcatccgagcctcgagagaacagcgactgctcttgtttgtgctgcttgcgcctgtagagccattgtcgcaacgccccgcgatcaccttcacatcgtcctaccccaccaggcctcgagaaggccgcccgccccttcggcatccgttcgcacgagagaagctgtggaagctcctataaatagtgttttaggtgtctgcgtcatactgcgcataatagggagtaccttgcgctagggagttgctgtgcgtgtttcgcccgctgtgagcggctataggtgaaaccaagatggacaaacatggccgccctgaggaggagatgttcatgaataagcctgcggacgattgcgacagccctaccatagaacccttgagaatgttcaagcctcagagtcccaaacctgccaacgacagaccttcggagcgtttcaagtatcctgcgccgccatcatctaaacccagcttcccgttgccgccgggtgcttctagttcggccgctccgttgccttatcctgacgatgacgatctccgagtaggccagtcatcgcaatcaagccggcctacctactccagcgatagccgtacgagctcggcaagcaagtcgtacgccagcccgacgagcgcaagctactcgggccgtcctaacgatacaacaccacggctcgacaccagtcctatcgagaagagaggccctggccttgccgagcgccgggggacagccccgaagccgctcccgggaacactcagccctaccagtccccatgcggatgacagtggtctatttgcaaaaccgcttgcgcaccagcagaagcccgctgcggcttcggatacatcttttccagactatcatcaaaagccatattatccaccaccgcgcggcaactcagctgggtcgagttcgagctcgagcagtggcgcaaggcctcaacaagtgagccaggatagctatcttaagatgccggaagatagtggagtcaataggttcgcgtcaacggcttcaacatctaccacaagagccagccgcggttctccaccaccaccagaaacacctatcgtcgaaccgggcaacattcccgggggtggaatcgaagcgcgctatgctgccgctggtatttccggcacagcgaccctgaacagtttccaaagtgcggcggcaactcaacgactagcgcagtatgggcagcacccagcttcacaccctcctcggccgtggacgccaacagagactcccgagcagcaaccacatggaccaccgacagtgtatcaaggagccaacccggttaccagtcccacagcgtcgaccttcagccctcagtcaacacgaccacctaatactaatgcgcagtcaaactcaaacgcatcagggggcccagctttacaagtcagtgtactagagcaagactttcaacgaatgcaaatgtcaccaagccctccgccagcatattccagcatcacagcgggtggaggctccgcgtaccctaatgagaagcaacgtcctggccagcccgcttcagcgtcaacgccggcgcaaccaaacccggcagcctcgcctcctaagaaagtaaatgagattgcagctggactgacatctcctgctttacaacatccgggtcatccagcatttgctaacgatccacgcccggatagccagccaaacggccactcagctcaggccggtacatccactgccggccctgctgttgccgctagcccttcaccattccaaggcggccaagggcctgcttcaccaccgcctttgccagaaggatggattgcgcacctggaccaaaactcgggccaatactattatatccacttggctacacaagccacgcaatgggaatttcctaagggccccaaccctatccagcatgatgttgcacctctatcaccaactgcgtcaacatatggcaatcccttagcttcacctatgttcggcaagcagagtgcattggcttcgccgatgtttcccccgcacactcccggatacgcggaaagcatcatgagtgtcgcaacggcaacaccaactatggctggtttctctggtccgccccctggtgccggtgtagatatgtacaaagttcacccaaccaacaacgtgtattttggaccctatctgcgatatgtgaatatggatatagagaaaggcttgtggttaggcagcattatgattgtctccgattcgccccaaccgcctaccattcatattcatcccagcatggatctatcaccgaatcctcgtcaactcataccccactctatctacactcatcaaaggtggcagttttacaaatacgatgtcgacttaccgatggccgaagcaaccgagcggtggacctacgctattacttctcatctcggatgtactcgttatgaattcgtcgtagcagggcggaatgagaccggttggcgattcgtagcacactctggcaatgattttgctgctagcacatctcaaaatgagcgtagcaaactgggtggtcttggtttcatgtggaaggacgtcctacaaaagaacgtcgattgtggtggattccatgtccagcttggtctgggcgatcagatctatggcgaccggctatggaaggaggtgcccttgcttaaacagtggcttgcgacgcaaggcaaagaaaaccgtaagaatgcgtcgtggacggcacggcatgaggaagacgtctcgcatgcctattttcacttctacaccagtcactttgaccaacctttccttcgcgaggcttttgctcaaattccgcatatttgtcagatcgatgaccatgacatatttgacggctatggctcgtatcccgattacatgcaaaactcgcaaatattcaagaatatcggacgaatagctgtggatatgtatctcctcttccaacatcacacaacgctagaaatgctccgaaatattagtcatgacttggacctattcaccatcacaggtcagggctggcatttcgtcaaattccttggtccagctgttgtcgttgtaggtgctgatgtacggtccgagcggaccgtaagccgtgtgctcgctggccctacataccaaggactcttccccaaggttgccatgctgccaccaagcgtacagcactgtatctggatgctgtcggtgccactgatttacccgcgtcttgatactatggaaagcttagccaatacgttcgccacaggcaagaaggccgttaacgctggatacaatgtgttgggcaaagtcacgagctcggtcgcgggcatcgtcggtggcaaagacgttgttgcgcaaggcttcaatcaggtcaagaaagcagtcggcaaatctggtctcatgggtaatgtcgtcaaccaatttggtgacctcgacattggtgagatactaaaggatatgtggacacacgagagcaaagacctcgagcggacgtacttgatccggactctgcaaggtatcgcccatcagaagggtattcgtatgactttcttgtctggagacgtcaacgcagcaggagccggtctcgtgcacgacccagcccatcctagcgaccacaaaaccatgtatcaaatcataacatcaccaattgtcgcagcgcccgcagcaaactacatcctcaagatgcttcacagtaacaagacgtactacgtgccccccaacgggcaaaagtcaagtggagaaacgctcagcgacaccaaggaagacatgatggagatcttccacacagacgccagtgggtcaccacgagagctcaagaagcttatgggtcggcgcaactacgtcgccttcgtggcgtacgaccctgaggcgattcccgggacgcagtatgcggttgccgcccaaaatggcacaaataatgggcttagcaaattaagtcttgccgttgattttgtagttcaaggagatggtgcctttaccacaccgaccaaatatggtcctgttatagtgccacatctcgagtttgggaggtagagaatcaggagaatgttgcatgaagtggcgcagagagatgaggatatgcaaggagatgaagggagatgagacgacctatcgatatgatttcttcccagagtgcctcgaacgaaacatgtttacttgatctcacttcacatttagcgagggttccatgaaatcgattgctgggcatttcagatatataccttagtttttgggagccagacaggggccgacgaatgaaatttcaaatgaattcaaacgcctgatattggcttagtgacgaaaagatattcgtgatcgcactcggctcattcacacatggggcattcttttgacctggatttggaatattatttgtttcattttggggctgtcttgtctatgcacgcagtatatagcgatccacgactctacgatgccagagcgatctatattttaggaaacgctctcggttggttttctcttgccttgtggtaaaacaaagcaatgcgtacgcacatacctacacaggggtcgtaactcgtttctcattcgcggtagatctctcctctaggtcgagttgttgagattgctaactatcaagccggagctcaaagtctgggagccgatactcagacatcgaagagctccttaagaatacgcagggtatcatcggggttcttgaccgaatggccagtgacgcgcgggtcgctgtagatctcccagtcattacctccctcgaaggtcttgtcgccaaagaagtggatggtcgagtatgtgatgccgcctggcttcttagcctcgtcctcgaggtgcttgaggcagtaggtcttgtcccagccagtggggaaaacgtcgaaggatagctgcccgccgatggagt

SEQ ID NO: 32437 - DNA, 810 bp, Muscodor strobelii
  misc_feature: SGI cDNA ID NO. 571179
  misc_feature: Elevated expression when VOC is produced
  misc_feature: Encodes the peptide sequence at SEQ ID NO 32438
atggacgctgctgctcccaactatcctcctctcgaggcccgtcctctcaaaaacacgatcgtcttgttcgacgtcgacgggaccctttcgccatcccgacgctctgctcctcccgagattctcgcagctcttgccgccctccgcaagaaggctgccattggatatgtcggcggctctgatctgtccaagcagcaggagcagttgggctctgcagacaggcccgtaaccaccatgttcgacttcagcttcagcgagaacggcctcaccgccttcaagatgggagccgagctgcccagcaccagcttcatcaagtggattggcgaggagcagtacaaggagcttgtcaacttcatcctgcactatgtcgccgacctcgacatccccgtcaagcgtggcactttcgtcgagttccgcaacggcatgatcaacgtctcgcccattggccgcaacgccaacctccaggagcgcctcgacttcgagcagtacgacctcaagcacggcattcgcccggcctttatccagaagctgaaggagcgattctctcacttggatctgacctactccatcggcgggcagctatccttcgacgttttccccactggctgggacaagacctactgcctcaagcacctcgaggacgaggctaagaagccaggcggcatcacatactcgaccatccacttctttggcgacaagaccttcgagggaggtaatgactgggagatctacagcgacccgcgcgtcactggccattcggtcaagaaccccgatgataccctgcgtattcttaaggagctcttcgatgtctga

SEQ ID NO: 32438 - protein, 269 aa, Muscodor strobelii
  misc_feature: SGI Peptide ID NO. 571179
  misc_feature (40)..(269): Pfam Id: PF03332 Pfam Desc: Eukaryotic phosphomannomutase
  misc_feature (2)..(269): NCBI GI: 154324000 Blast Desc: BC1G_00399 [Botryotinia fuckeliana B05.10] gi|150842628|gb|EDN17821.1| BC1G_00399 [Botryotinia fuckeliana B05.10]
  misc_feature (7)..(269): NCBI GI: 116181770 Blast Desc: conserved [Chaetomium globosum CBS 148.51] gi|88185810|gb|EAQ93278.1| conserved [Chaetomium globosum CBS 148.51]
  misc_feature (1)..(269): NCBI GI: 46125471 Blast Desc: FG07113.1 [Gibberella zeae PH-1]
  misc_feature (7)..(269): NCBI GI: 261356055 Blast Desc: phosphomannomutase [Verticillium albo-atrum VaMs.102]
  misc_feature (1)..(269): NCBI GI: 256733082 Blast Desc: [Nectria haematococca mpVI 77-13-4]
  misc_feature (1)..(269): NCBI GI: 85111127 Blast Desc: phosphomannomutase [Neurospora crassa OR74A] gi|11278123|pir||T49495 phosphomannomutase [imported] - Neurospora crassa gi|28925518|gb|EAA34550.1| phosphomannomutase
  misc_feature (7)..(269): NCBI GI: 171696084 Blast Desc: protein product [Podospora anserina] gi|170948284|emb|CAP60448.1| protein product [Podospora anserina]
  misc_feature (7)..(269): NCBI GI: 39951989 Blast Desc: MGG_01637 [Magnaporthe grisea 70-15] gi|145020516|gb|EDK04645.1| MGG_01637 [Magnaporthe grisea 70-15]
  misc_feature (4)..(269): NCBI GI: 240106562 Blast Desc: phosphomannomutase, [Coccidioides posadasii C735 delta SOWgp]
  misc_feature (4)..(269): NCBI GI: 119185167 Blast Desc: CIMG_07290 [Coccidioides immitis RS]
  misc_feature (10)..(269): SWISSPROT Homolog: EC 5.4.2.8 Phosphomannomutase
  misc_feature: Useful for introducing or modulating the production of volatile compounds
MDAAAPNYPPLEARPLKNTIVLFDVDGTLSPSRRSAPPEILAALAALRKKAAIGYVGGSDLSKQQEQLGSADRPVTTMFDFSFSENGLTAFKMGAELPSTSFIKWIGEEQYKELVNFILHYVADLDIPVKRGTFVEFRNGMINVSPIGRNANLQERLDFEQYDLKHGIRPAFIQKLKERFSHLDLTYSIGGQLSFDVFPTGWDKTYCLKHLEDEAKKPGGITYSTIHFFGDKTFEGGNDWEIYSDPRVTGHSVKNPDDTLRILKELFDV

SEQ ID NO: 32439 - DNA, 5920 bp, Muscodor strobelii
  misc_feature: SGI EST ID NO. CUFF.76894.0
  misc_feature: Variant of the nucleotide sequence at SEQ ID NO 32437
cggggcatcaatagggtgctaggttgaggtcgagatcgaggtcctaactgcaggtgcatgttgagactcgactgcttttacagttcaaattacaagtcttaccttttgaaaccgttctttcctgacataaggcgacctcattgccataaatttcccatttgatttcaaaaccagcaatcaacatcgttgagtctaactcgattcgctccccgtcatggacgctgctgctcccaactatcctcctctcgaggcccgtcctctcaaaaacacgatcgtcttgttcgacgtcgacgggaccctttcgccatcccgacgctctgctcctcccgagattctcgcagctcttgccgccctccgcaagaaggctgccattggatatgtcggcggctctgatctgtccaagcagcaggagcagttgggctctgcagacaggcccgtaaccaccatgttcgacttcagcttcagcgagaacggcctcaccgccttcaagatgggagccgagctgcccagcaccagcttcatcaagtggattggcgaggagcagtacaaggagcttgtcaacttcatcctgcactatgtcgccgacctcgacatccccgtcaagcgtggcactttcgtcgagttccgcaacggcatgatcaacgtctcgcccattggccgcaacgccaacctccaggagcgcctcgacttcgagcagtacgacctcaagcacggcattcgcccggcctttatccagaagctgaaggagcgattctctcacttggatctgacctactccatcggcgggcagctatccttcgacgttttccccactggctgggacaagacctactgcctcaagcacctcgaggacgaggctaagaagccaggcggcatcacatactcgaccatccacttctttggcgacaagaccttcgagggaggtaatgactgggagatctacagcgacccgcgcgtcactggccattcggtcaagaaccccgatgataccctgcgtattcttaaggagctcttcgatgtctgagtatcggctcccagactttgagctccggcttgatagttagcaatctcaacaactcgacctagaggagagatctaccgcgaatgagaaacgagttacgacccctgtgtaggtatgtgcgtacgcattgctttgttttaccacaaggcaagagaaaaccaaccgagagcgtttcctaaaatatagatcgctctggcatcgtagagtcgtggatcgctatatactgcgtgcatagacaagacagccccaaaatgaaacaaataatattccaaatccaggtcaaaagaatgccccatgtgtgaatgagccgagtgcgatcacgaatatcttttcgtcactaagccaatatcaggcgtttgaattcatttgaaatttcattcgtcggcccctgtctggctcccaaaaactaaggtatatatctgaaatgcccagcaatcgatttcatggaaccctcgctaaatgtgaagtgagatcaagtaaacatgtttcgttcgaggcactctgggaagaaatcatatcgataggtcgtctcatctcccttcatctccttgcatatcctcatctctctgcgccacttcatgcaacattctcctgattctctacctcccaaactcgagatgtggcactataacaggaccatatttggtcggtgtggtaaaggcaccatctccttgaactacaaaatcaacggcaagacttaatttgctaagcccattatttgtgccattttgggcggcaaccgcatactgcgtcccgggaatcgcctcagggtcgtacgccacgaaggcgacgtagttgcgccgacccataagcttcttgagctctcgtggtgacccactggcgtctgtgtggaagatctccatcatgtcttccttggtgtcgctgagcgtttctccacttgacttttgcccgttggggggcacgtagtacgtcttgttactgtgaagcatcttgaggatgtagtttgctgcgggcgctgcgacaattggtgatgttatgatttgatacatggttttgtggtcgctaggatgggctgggtcgtgcacgagaccggctcctgctgcgttgacgtctgggattgaagttagcctagttgcaattttgaaagaaacgtatacggaatattgaaacttacctccagacaagaaagtcatacgaatacccttctgatgggcgataccttgcagagtccggatcaagtacgtccgctcgaggtctttgctctcgtgtgtccacatatcctttagtatctcaccaatgtcgaggtcaccaaattggttgacgacattacccatgagaccagatttgccgactgctttcttgacctgattgaagccttgcgcaacaacgtctttgccaccgacgatgcccgcgaccgagctcgtgactttgcccaacacattgtatccagcgttaacggccttcttgcctgtggcgaacgtattggctaagctttccatagtatcaagacgcgggtaaatcagtggcaccgacagcatccagatacagtgctgtacgcttggtggcagcatggcaaccttggggaagagtccttggtatgtagggccagcgagcacacggcttacggtccgctcggaccgtacatcagcacctacaacgacaacagctggaccaaggaatttgacgaaatgccagccctgacctgtgatggtgaataggtccaagtcatgactaatatttcggagcatttctagcgttgtgtgatgttggaagaggagatacatatccacagctattcgtccgatattcttgaatatttgcgagttttgcatgtaatcgggatacgagccatagccgtcaaatctgctcctctgttagatcatgcttttggtgtctggcttcagtatgtgttcaaacttacatgtcatggtcatcgatctgacaaatatgcggaatttgagcaaaagcctcgcgaaggaaaggttggtcaaagtgactggtgtagaagtgaaaataggcatgcgagacgtcttcctcatgccgtgccgtccacgacgcattcttacggttttctttgccttgcgtcgcaagccactgtttaagcaagggcacctccttccatagccggtcgccatagatctgatcgcccagaccaagctggacatggaatccaccacaatcgacgttcttttgtaggacgtccttccacatgaaaccaagaccacccagtttgctacgctcattttgagatgtgctagcagcaaaatcattgccagagtgtgctacgaatcgccaaccggtctcattccgccctgctacgacgaattcataacgagtacatccgagatgagaagtaatagcgtaggtccaccgctcggttgcttcggccatcggtaagtcgacatcgtatttgtaaaactgccacctttgatgagtgtagatagagtggggtatgagttgacgaggattcggtgatagatccatgctgggatgaatatgaatggtaggcggttggggcgaatcggagacaatcataatgctgcctaaccacaagcctttctctatatccatattcacatatcgcagatagggtccaaaatacacgttgttggttgggtgaactttgtacatatctacaccggcaccagggggcggaccagagaaaccagccatagttggtgttgccgttgcgacactcatgatgctttccgcgtatccgggagtgtgcgggggaaacatcggcgaagccaatgcactctgcttgccgaacataggtgaagctaagggattgccatatgttgacgcagttggtgatagaggtgcaacatcatgctggatagggttggggcccttaggaaattcccattgcgtggcttgtgtagccaagtggatataatagtattggcccgagttttggtccaggtgcgcaatccatccttctggcaaaggcggtggtgaagcaggcccttggccgccttggaatggtgaagggctagcggcaacagcagggccggcagtggatgtaccggcctgagctgagtggccgtttggctggctatccgggcgtggatcgttagcaaatgctggatgacccggatgttgtaaagcaggagatgtcagtccagctgcaatctcatttactttcttaggaggcgaggctgccgggtttggttgcgccggcgttgacgctgaagcgggctggccaggacgttgcttctcattagggtacgcggagcctccacccgctgtgatgctggaatatgctggcggagggcttggtgacatttgcattcgttgaaagtcttgctctagtacactgacttgtaaagctgggccccctgatgcgtttgagtttgactgcgcattagtattaggtggtcgtgttgactgagggctgaaggtcgacgctgtgggactggtaaccgggttggctccttgatacactgtcggtggtccatgtggttgctgctcgggagtctctgttggcgtccacggccgaggagggtgtgaagctgggtgctgcccatactgcgctagtcgttgagttgccgccgcactttggaaactgttcagggtcgctgtgccggaaataccagcggcagcatagcgcgcttcgattccacccccgggaatgttgcccggttcgacgataggtgtttctggtggtggtggagaaccgcggctggctcttgtggtagatgttgaagccgttgacgcgaacctattgactccactatcttccggcatcttaagatagctatcctggctcacttgttgaggccttgcgccactgctcgagctcgaactcgacccagctgagttgccgcgcggtggtggataatatggcttttgatgatagtctggaaaagatgtatccgaagccgcagcgggcttctgctggtgcgcaagcggttttgcaaatagaccactgtcatccgcatggggactggtagggctgagtgttcccgggagcggcttcggggctgtcccccggcgctcggcaaggccagggcctctcttctcgataggactggtgtcgagccgtggtgttgtatcgttaggacggcccgagtagcttgcgctcgtcgggctggcgtacgacttgcttgccgagctcgtacggctatcgctggagtaggtaggccggcttgattgcgatgactggcctactcggagatcgtcatcgtcaggataaggcaacggagcggccgaactagaagcacccggcggcaacgggaagctgggtttagatgatggcggcgcaggatacttgaaacgctccgaaggtctgtcgttggcaggtttgggactctgaggcttgaacattctcaagggttctatggtagggctgtcgcaatcgtccgcaggcttattcatgaacatctcctcctcagggcggccatgtttgtccatcttggtttcacctatagccgctcacagcgggcgaaacacgcacagcaactccctagcgcaaggtactccctattatgcgcagtatgacgcagacacctaaaacactatttataggagcttccacagcttctctcgtgcgaacggatgccgaaggggcgggcggccttctcgaggcctggtggggtaggacgatgtgaaggtgatcgcggggcgttgcgacaatggctctacaggcgcaagcagcacaaacaagagcagtcgctgttctctcgaggctcggatgagtgatacggaacaaagtcacgaaacagatgaaacaaaagctcgagggcgaacgcgagaaaggctgcaggacggtgatatgcggcctgatggctgcccgcatcgtgctctgccgcaccctggcccgcctgggctcccactcgtctctaccctcacaagcctctctgccctggactgacgtgggacggagggacagacttgacaggggatgtggcggggcctcgatcgcccagtggattctgc

SEQ ID NO: 32440 - DNA, 345 bp, Muscodor strobelii
  misc_feature: SGI cDNA ID NO. 571180
  misc_feature: Encodes the peptide sequence at SEQ ID NO 32441
atggacacccgcaacctgaccactcaaaagtccggcgcttacggcaagaccacgcctgctgcgactcaagcgggcggcgatgacaataatcagtcctacccgtaccaagccaacactgctatcaccaccgacgggttcaaagacggtgacgaggagaccagtcagcaacacgatgctaccgagcagtctcttactactgaccaggctggacaagacccagcgtctctcgacggcgcgaccaagaagacgcaggagagtaacagtaagctgaagaatatgttcggcattaagaagggatctgactcgaatgaagagaagaaggacgacgttgctgtgaaggagtag

SEQ ID NO: 32441 - protein, 114 aa, Muscodor strobelii
  misc_feature: SGI Peptide ID NO. 571180
MDTRNLTTQKSGAYGKTTPAATQAGGDDNNQSYPYQANTAITTDGFKDGDEETSQQHDATEQSLTTDQAGQDPASLDGATKKTQESNSKLKNMFGIKKGSDSNEEKKDDVAVKE

SEQ ID NO: 32442 - DNA, 1965 bp, Muscodor strobelii
  misc_feature: SGI EST ID NO. CUFF.76708.0
  misc_feature: Variant of the nucleotide sequence at SEQ ID NO 32440
cggatagctacctacataacatcttctcctcggtagccaatacatattttcaatctgaccattgtactcccagttgaggcaacacctcacacatagcaggagcgtcgtaatacttcttatgatacggatcaggggaacccgtcctcgtactctatgaagctctattttggctggcttggtctactcacgccagcttgcgagtgcggtgctagcgaagctcatgaggcgaaggcaggtatgtcattgcacgacggaaaggccgcgtcatctatcgacacggtaattgcagcatcccgtcgcgattctgagcattcctgacgtgttacgatgtccgggctcgtgtataaaacaaccacggccaaacgccttcgactgcctccagaaagaagccagagcatacaatatcacacatctttttcactcagctccctttcataccaactttacttagtctctaatcgacacccgccacttcgtcaatatggacacccgcaacctgaccactcaaaagtccggcgcttacggcaagaccacgcctgctgcgactcaagcgggcggcgatgacaataatcagtcctacccgtaccaagccaacactgctatcaccaccgacgggttcaaagacggtgacgaggagaccagtcagcaacacgatgctaccgagcagtctcttactactgaccaggctggacaagacccagcgtctctcgacggcgcgaccaagaagacgcaggagagtaacagtaagctgaagaatatgttcggcattaagaagggatctgactcgaatgaagagaagaaggacgacgttgctgtgaaggagtagaggcagatggtctccagggtttgggttaggatcaggcagggttggatcttctggctagatatgggatttttctattgaagatgagaatgatttaggttcaatgttcgcaagagactgtatacggcacacgctacctgattgtcagacacccagtctcgaactcgaatagacaccgcagaggagatgtttcactggtgcggttactagagttggattacactctttctcttctcacctcgtcctcctttcataaaagggggtcgacgattgctggctggccagaaaatttattagaaacacattcactttacattgagccactttgacgctcacatcgcgattcatgctgcatgtcacctgtcaatgaatcttgaagtacatagaggccacacctataccgaaaagcgaagaggttaagtacgtgaagaggaaaggaaatccgtatcagcactcgatatgtgcgaagaatcgttcgagtcatccattcgttcaagaatgagagatatatgcctagatgcgataatgaccactacaagcgcaggaatcagttgttttattgagtgccaatactgaaacaattttcgtatcaatctcaggaatcaacaaaaataggacgagaactgtccatataggtagagctgagaagaaccagtgcaatccccccttttcgcgattccagttctctggtgtctgagggtccgaaaaagaatggcaaaaagtgtttgccttttgatgaaattaagccggccgaaccttaaaatttttgccacttatttataccactctaatacagggcaatggacgacgcacttaggtacctgcagatgaagcatagcgtacaatgatttgcagggtatgcccatccagcacaggaggtctcctgtcgtcggtattagggatgaggttttgagttctgcagtgctacagatttctctactcatctcaagttgggcttgcaagtctctgactgcttggtgtggtgcaagatttctaggctagtacgtttgctcgcgtctttcaaatctgcacttgatgcgtggatgaatgaggttgaggcaagtggcctatctggaacagaaatggacggtgaagcagactgcacccatggcacatgtaggcaagtggcgggcgctattggt

SEQ ID NO: 32443 - DNA, 2670 bp, Muscodor strobelii
  misc_feature: SGI cDNA ID NO. 571181
  misc_feature: Encodes the peptide sequence at SEQ ID NO 32444
atgagacgcaactgtcacgatgacgaagccgggctcttggaatacctgactctgtactattgcaaactcggccatgcgcaacccctggccttcatcattctagttgtctggttgggattattatttaccacaattggaattgcagccagcgacttcttcagcgtgaatcttagcacgatttccaaatttttagggctgagcgagagtctggcaggcgtcacatttctagcctttggcaatggatcacccgatgttttcagcacttttgctgctatgaactcaaacagcggaagcatggctcttggcgaactaatcggtgccgctggctttattacgtctgttgttgccggctccatggccctcgtgcgcgagttcaaagtcaataggaaggctttcgtacgagatatctgcttctttatagtggcagtcggcttcgcagtaggcttcctttctgatgggcacctacatttatgggagtgtgccgtgatgatcggtttttatcttttctacgttatcgtggttgtcggatggcatgcctatagtaagagaaggagtgcccggatggtcaaggaggctatgtcgcggggacacttctatcggaccgccagtgagcgtgacaatgaagagctagagccttacagagatgacccggacgaggaagatcagtctgctggcgttcgccgtgcatctgccaccaccgaagatataggagccctggatcgtgcgcccttgatcgaagtagggcgggctggacaagaaccagatgacgactttgattcggatcaacacgttgcagccgagatgactagcagcatgcggttgaatcggccgaggggccggcgaaacactactactatcacgccgatccgaccgagtctcgttggtgctcttgagtttcgatccgtcttatcatcccttcagaaggaaggaaatgttcgcatgagaccaattcatactcgcagccattcaacctatcacctcagaatcaatactgattttgctaacggacagcactccaacgccccaactcctgctggccacgaagccactactgcaaacaggaatagagcattatcgtcgggaaacatcccaagtgctatcgatgccgatattgcaggggtatcgaccagttctcacacgataggcggcagactggccccccctccagcagacgggagaccaccaaatctatcagcacctgagattaacatcccccaagctttgccaactttgccacagctacgcattccagttcctgacccttctagcggtgatgtaacaccatcaccgctttccccattcccgcatttcactgattcgccccttatcatgaccccaaatcctcaggagccatctcaactcagtctaccacctcaggccgaggaaactgatactgttgcgatcccaagtttacccgatcaaatagaccccaaacctgtaagatggtggccatacaggtatttgcctgctcctcatattctgttagcaaccttgctacctacgtttcagaactggcgcggcaaatcgatctcaaacaagtttcttgctattatcactgcgccgagtatctttttgctggttataacacttcccgtggtcgacagtgagactgccgttgatggcgctgatgaggagagcatatttgatgagcgatctatggccgggcacatctcccatgtaggaccctcagtgtctgttgagcccagtgggtctctcgagccggaaactgagtggcagcggtacaggcgtagcacacactctggacgatccagtcgcagcccatcgccaggtgtaagcaatcacgctgcgtctcgagattcagtcggccctccggagagcttatttgtaccaccccttcctgattcgcagtcccagcaacaccggccttcttccgttgccacgtcgtcgatgtacgagcccgacgaagattggaatagatggttgttgatccttcaaatctttattgggcctttattctgcgtctttgtcttctgggctaacgtggcggaaaaccttgagcgacctatcagagatcttgtgagagctgtcctcatttccctggtctgttctttggcattgcttggacttctgcttgcaactacaacgcccaaccggcggcctaagtaccacgttgcattctgctttcttggtttcgttatcgccattgcctggatcagtacggtggcgggcgaggtcgtgggtattttgaaggcgtttggtgttattttcaacatatcagaagccattctaggtctcacgatatttgcggtcggcaactcggtcggagatttggttgctgatataaccgtcgctcgactaggcttccccgtgatggcattatcggcatgctttggcggacctttgctgaatatcctgctgggcattggccttgggggcgcttatcaaaccatcaatgcggcaaacaaacatcaaatcaaacatcccaataagccttacaagtacaagccttaccatattcaagtcacaggaacacttttggtgtcagcgattgcactccttatgacgttgcttgcgttacttgtggttgtgcctatgaacaaatggatgatgactagaaagataggctttggcctcatcgcattctggacagcaagtgttgcggtcaatctcaccatcgaaatcacaggagtatggggagacatagcctag

SEQ ID NO: 32444 - protein, 889 aa, Muscodor strobelii
  misc_feature: SGI Peptide ID NO. 571181
  misc_feature (44)..(174): Pfam Id: PF01699 Pfam Desc: Sodium/calcium exchanger protein
  misc_feature (723)..(876): Pfam Id: PF01699 Pfam Desc: Sodium/calcium exchanger protein
  misc_feature (4)..(889): NCBI GI: 171696082 Blast Desc: protein product [Podospora anserina] gi|170948283|emb|CAP60447.1| protein product [Podospora anserina]
  misc_feature (1)..(888): NCBI GI: 256733083 Blast Desc: NECHADRAFT_92694 [Nectria haematococca mpVI 77-13-4]
  misc_feature (4)..(889): NCBI GI: 39951991 Blast Desc: MGG_01638 [Magnaporthe grisea 70-15] gi|145020515|gb|EDK04644.1| MGG_01638 [Magnaporthe grisea 70-15]
  misc_feature (1)..(889): NCBI GI: 46125473 Blast Desc: FG07114.1 [Gibberella zeae PH-1]
  misc_feature (4)..(887): NCBI GI: 154314255 Blast Desc: BC1G_05221 [Botryotinia fuckeliana B05.10] gi|150848866|gb|EDN24059.1| BC1G_05221 [Botryotinia fuckeliana B05.10]
  misc_feature (1)..(780): NCBI GI: 261356054 Blast Desc: sodium/calcium exchanger protein [Verticillium albo-atrum VaMs.102]
  misc_feature (4)..(881): NCBI GI: 258564546 Blast Desc: [Uncinocarpus reesii 1704] gi|237908525|gb|EEP82926.1| [Uncinocarpus reesii 1704]
  misc_feature (1)..(881): NCBI GI: 238844870 Blast Desc: sodium/calcium exchanger protein [Microsporum canis CBS 113480]
  misc_feature (4)..(889): NCBI GI: 169601166 Blast Desc: SNOG_03440 [Phaeosphaeria nodorum SN15] gi|160705878|gb|EAT88645.2| SNOG_03440 [Phaeosphaeria nodorum SN15]
  misc_feature (1)..(881): NCBI GI: 261190674 Blast Desc: sodium/calcium exchanger protein [Ajellomyces dermatitidis SLH14081] gi|239591169|gb|EEQ73750.1| sodium/calcium exchanger protein [Ajellomyces dermatitidis SLH14081]
MRRNCHDDEAGLLEYLTLYYCKLGHAQPLAFIILVVWLGLLFTTIGIAASDFFSVNLSTISKFLGLSESLAGVTFLAFGNGSPDVFSTFAAMNSNSGSMALGELIGAAGFITSVVAGSMALVREFKVNRKAFVRDICFFIVAVGFAVGFLSDGHLHLWECAVMIGFYLFYVIVVVGWHAYSKRRSARMVKEAMSRGHFYRTASERDNEELEPYRDDPDEEDQSAGVRRASATTEDIGALDRAPLIEVGRAGQEPDDDFDSDQHVAAEMTSSMRLNRPRGRRNTTTITPIRPSLVGALEFRSVLSSLQKEGNVRMRPIHTRSHSTYHLRINTDFANGQHSNAPTPAGHEATTANRNRALSSGNIPSAIDADIAGVSTSSHTIGGRLAPPPADGRPPNLSAPEINIPQALPTLPQLRIPVPDPSSGDVTPSPLSPFPHFTDSPLIMTPNPQEPSQLSLPPQAEETDTVAIPSLPDQIDPKPVRWWPYRYLPAPHILLATLLPTFQNWRGKSISNKFLAIITAPSIFLLVITLPVVDSETAVDGADEESIFDERSMAGHISHVGPSVSVEPSGSLEPETEWQRYRRSTHSGRSSRSPSPGVSNHAASRDSVGPPESLFVPPLPDSQSQQHRPSSVATSSMYEPDEDWNRWLLILQIFIGPLFCVFVFWANVAENLERPIRDLVRAVLISLVCSLALLGLLLATTTPNRRPKYHVAFCFLGFVIAIAWISTVAGEVVGILKAFGVIFNISEAILGLTIFAVGNSVGDLVADITVARLGFPVMALSACFGGPLLNILLGIGLGGAYQTINAANKHQIKHPNKPYKYKPYHIQVTGTLLVSAIALLMTLLALLVVVPMNKWMMTRKIGFGLIAFWTASVAVNLTIEITGVWGDIA

SEQ ID NO: 32445 - DNA, 3452 bp, Muscodor strobelii
  misc_feature: SGI EST ID NO. CUFF.76712.0
  misc_feature: Variant of the nucleotide sequence at SEQ ID NO 32443
tcgacttttgcgatgccatctatctctcagcttgcctctataggtatccactgctgacgttttgggcagttcgctcatcatcagtgtgtcaacagtgtcttggcgacgcatgatgtaggtaccatggcctcaggcatgaattgaatcataattcgctttttgtccatcttatccgaacatgcctatcgctaatcatgtcgattaaaccgtgctagatcattgcgttatcttttctcattcatggttttccagactgctacttaccatcgttgcgcgtcttgttgactgcatggtcgccacagctggcggcctcacactcgctcttccagcacgtcgctaaccatcatgttgtgatgctgcttctcgaatcgccattctccaacgcaaggcagcagatgaatataacaacagtatggcgagcagcactagtatctggcgcaaacgtaggggcttaaatccccgccccttctacgcgaccattctacttttcagttcgctagctgtctattctctccttcttaggaattttccatccgcgcaatatcagcatgaactgcacggtctgcagttacgcgattcgactgtccaagaatgtcgtttggtccacaaagcctctgatcaatgtgcctttatgagacgcaactgtcacgatgacgaagccgggctcttggaatacctgactctgtactattgcaaactcggccatgcgcaacccctggccttcatcattctagttgtctggttgggattattatttaccacaattggaattgcagccagcgacttcttcagcgtgaatcttagcacgatttccaaatttttagggctgagcgagagtctggcaggcgtcacatttctagcctttggcaatggatcacccgatgttttcagcacttttgctgctatgaactcaaacagcggaagcatggctcttggcgaactaatcggtgccgctggctttattacgtctgttgttgccggctccatggccctcgtgcgcgagttcaaagtcaataggaaggctttcgtacgagatatctgcttctttatagtggcagtcggcttcgcagtaggcttcctttctgatgggcacctacatttatgggagtgtgccgtgatgatcggtttttatcttttctacgttatcgtggttgtcggatggcatgcctatagtaagagaaggagtgcccggatggtcaaggaggctatgtcgcggggacacttctatcggaccgccagtgagcgtgacaatgaagagctagagccttacagagatgacccggacgaggaagatcagtctgctggcgttcgccgtgcatctgccaccaccgaagatataggagccctggatcgtgcgcccttgatcgaagtagggcgggctggacaagaaccagatgacgactttgattcggatcaacacgttgcagccgagatgactagcagcatgcggttgaatcggccgaggggccggcgaaacactactactatcacgccgatccgaccgagtctcgttggtgctcttgagtttcgatccgtcttatcatcccttcagaaggaaggaaatgttcgcatgagaccaattcatactcgcagccattcaacctatcacctcagaatcaatactgattttgctaacggacagcactccaacgccccaactcctgctggccacgaagccactactgcaaacaggaatagagcattatcgtcgggaaacatcccaagtgctatcgatgccgatattgcaggggtatcgaccagttctcacacgataggcggcagactggccccccctccagcagacgggagaccaccaaatctatcagcacctgagattaacatcccccaagctttgccaactttgccacagctacgcattccagttcctgacccttctagcggtgatgtaacaccatcaccgctttccccattcccgcatttcactgattcgccccttatcatgaccccaaatcctcaggagccatctcaactcagtctaccacctcaggccgaggaaactgatactgttgcgatcccaagtttacccgatcaaatagaccccaaacctgtaagatggtggccatacaggtatttgcctgctcctcatattctgttagcaaccttgctacctacgtttcagaactggcgcggcaaatcgatctcaaacaagtttcttgctattatcactgcgccgagtatctttttgctggttataacacttcccgtggtcgacagtgagactgccgttgatggcgctgatgaggagagcatatttgatgagcgatctatggccgggcacatctcccatgtaggaccctcagtgtctgttgagcccagtgggtctctcgagccggaaactgagtggcagcggtacaggcgtagcacacactctggacgatccagtcgcagcccatcgccaggtgtaagcaatcacgctgcgtctcgagattcagtcggccctccggagagcttatttgtaccaccccttcctgattcgcagtcccagcaacaccggccttcttccgttgccacgtcgtcgatgtacgagcccgacgaagattggaatagatggttgttgatccttcaaatctttattgggcctttattctgcgtctttgtcttctgggctaacgtggcggaaaaccttgagcgacctatcagagatcttgtgagagctgtcctcatttccctggtctgttctttggcattgcttggacttctgcttgcaactacaacgcccaaccggcggcctaagtaccacgttgcattctgctttcttggtttcgttatcgccattgcctggatcagtacggtggcgggcgaggtcgtgggtattttgaaggcgtttggtgttattttcaacatatcagaagccattctaggtctcacgatatttgcggtcggcaactcggtcggagatttggttgctgatataaccgtcgctcgactaggcttccccgtgatggcattatcggcatgctttggcggacctttgctgaatatcctgctgggcattggccttgggggcgcttatcaaaccatcaatgcggcaaacaaacatcaaatcaaacatcccaataagccttacaagtacaagccttaccatattcaagtcacaggaacacttttggtgtcagcgattgcactccttatgacgttgcttgcgttacttgtggttgtgcctatgaacaaatggatgatgactagaaagataggctttggcctcatcgcattctggacagcaagtgttgcggtcaatctcaccatcgaaatcacaggagtatggggagacatagcctaggcgcaagcaagcaaacatacctgtatatacgtacgtcacactcggtagcacgtcgatggaatgatgcgccgagatgacatgtgctttaccgtgtacaagttcctgattgagatacccattcaattaatcccatttccagcgatgagtgcct

SEQ ID NO: 32446 - DNA, 2499 bp, Muscodor strobelii
  misc_feature: SGI cDNA ID NO. 571182
  misc_feature: Encodes the peptide sequence at SEQ ID NO 32447
atgcctcgtgtcgcccaggtccctcgagcgagtgcaggcagtcgaactgtgtctggctcctccggctcccctctgaagatccccttgaacgacgacgcccaggagaagaagggccgtctcgtctcccgccgcgcgctgcacgagaagcagatcaacgagctacaggccgccgccgcgacgcctgcgaaaaaggccgccttcagactggctgacctcgaaaatgcgtctccccgctctggcccggccacgccgcgtcgcgctggagatgacgacgacgacgacgatgttatggtgatgggcagtggcgtcacccccatgaagcgggtgcccattctcgccaacttcgaggagtggatgaagatggccacagacaacaagatcaacgccaccaactcttggaacttcgccctcatcgactacttccacgacatgtcacttttgaaggacggcgatggtgtcaactttcagcgcgccagttgcacgctcgacggctgtgtcaagatctacacgagcagagtcgacagcgtggctacagagactggcaagctgctgagcggcttggctgacagcaactcgaaaaagaaagacaaggatggcgaaggtgagggcgaggaaagcgaagatgaggtcgacgaggacgggaatgttgtcagaaagaagactaagaaaagacaacgatcatcagaagctacattagcgccatcatttgcttctttgcagttgaagaagtttgacatggaatttgcagtcgatccgctattcaagaaagcatctgcggacttcgatgaaggtggagccaagggtctgttactcaaccatctcatgatagacggtcaagggcgcattgttttcgacagcagtgatgacgcaaacgacaaatctgcagatgggatcaagccaaggaggagagaagacgcgattggtgaggaggacgaggaagccgaagacgacggcgataccatcacagatcagccagccgaggccgaggatgaggaggaggtcgagattgatattaatgctcttggagccaagtttttcccagatcttgatcatcttgatgagcaggatatctgtccctccttgaagacatttgatcttggcgatccatccggttctttagacattccatttttgcgtgctccggagaatgaggatgaggatgaagaaggcgacggcctcggaggaattggcgacaaatcgggcatgttcattgatgaggacaatcccattggctttgacgatatgactgccatgggcggcttcgatgtcgcattcggcgaaggtggtgaggcttgggcgcgtgaagccgccttagagccgcagatgcgcccgtacagcatggatgatggtatggccggtggtgaggctggagagggtatggacgacgagaatggcgactacgtggtatccatgaaccatgcaaagaccagcgataagatgcacgaggatatactcggatatttcgaccaggctctccaaaagaactgggctggacctgagcattggcggattcggaaaataaaggatgctgacaagccagaaacagccacacgtcaacgaaaagagaaagagccattcgagattaattttgcctcaccattagacatcaaagtggccgagactatatacacccaagcatcaagcaactcagccatctcattacccaaaaaggactggaaatcgaagacccgcaacctccttcctgacgataaacacttcaattcgaagcagctattaagcctcttcctcaagccaaaagctcgcatgagcagccgccgaaaccgtatcggctcaaggataggtggatttggacatggtagccagcaagacaacgtgcatgcagcagacatggacgaagcgttctgggcgcagaaggagcctcagcgccatgaggacgatacggtcttgcctcagggtgactacgatgccaacttctttgatgacgagatgccgctccctggtggtggcttgttagacgacgatgatgatcttgaattcgctgatgccagagaccatttctctcctggtgctgatgtgccacccaccgaagctctcagtatcacagccatgctcgatgcaggaatgaccgtgggcggctttggcacgcagctcgtcacatcaacccgccgcctacggccagattacgtacaatacgctcgcgttgccaaaaaggttgatgtccgccgactgaaagaagagctctggaagggcatgggattccctgaaactcaagaggaccataacagatcgaggttgcccacgcctccaacagaggaagatacaccaaaggacaaggagcctacacttaagttcaccgaggttatgaacgacctgcagacggtctatcctaaggccgcaatggaagatatatcgacaagtttctgttttatatgtctcttgcatctggcgaacgagaagggcctcacgatagagaaaacgcccgatttattagaattggacatccgacgagactggacggcagagatcacagaagtctga

SEQ ID NO: 32447 - protein, 832 aa, Muscodor strobelii
  misc_feature: SGI Peptide ID NO. 571182
  misc_feature (4)..(824): Pfam Id: PF05786 Pfam Desc: Barren protein
  misc_feature (119)..(286): Pfam Id: PF05786 Pfam Desc: Barren protein
  misc_feature (1)..(810): NCBI GI: 145247845 Blast Desc: An13g00310 [Aspergillus niger] gi|134080915|emb|CAK46432.1| protein product [Aspergillus niger]
  misc_feature (1)..(831): NCBI GI: 255953589 Blast Desc: Pc21g05010 [Penicillium chrysogenum Wisconsin 54-1255] gi|211589258|emb|CAP95398.1| Pc21g05010 [Penicillium chrysogenum Wisconsin 54-1255]
  misc_feature (1)..(832): NCBI GI: 70987282 Blast Desc: condensin complex component cnd2 [Aspergillus fumigatus Af293] gi|66846749|gb|EAL87081.1| condensin complex component cnd2 [Aspergillus fumigatus Af293] condensin complex
  misc_feature (1)..(811): NCBI GI: 119482564 Blast Desc: condensin complex component cnd2 [Neosartorya fischeri NRRL 181] gi|119409465|gb|EAW19413.1| condensin complex component cnd2 [Neosartorya fischeri NRRL 181]
  misc_feature (26)..(811): NCBI GI: 212532471 Blast Desc: condensin complex component cnd2 [Penicillium marneffei ATCC 18224] gi|210071756|gb|EEA25845.1| condensin complex component cnd2 [Penicillium marneffei ATCC 18224]
  misc_feature (1)..(811): NCBI GI: 239614856 Blast Desc: condensin complex component cnd2 [Ajellomyces dermatitidis ER-3]
  misc_feature (1)..(811): NCBI GI: 261190676 Blast Desc: condensin complex component cnd2 [Ajellomyces dermatitidis SLH14081] gi|239591170|gb|EEQ73751.1| condensin complex component cnd2 [Ajellomyces dermatitidis SLH14081]
  misc_feature (1)..(811): NCBI GI: 225682166 Blast Desc: condensin complex component cnd2 [Paracoccidioides brasiliensis Pb03]
  misc_feature (1)..(830): NCBI GI: 169601168 Blast Desc: SNOG_03441 [Phaeosphaeria nodorum SN15] gi|111067526|gb|EAT88646.1| SNOG_03441 [Phaeosphaeria nodorum SN15]
  misc_feature (1)..(811): NCBI GI: 238844869 Blast Desc: condensin complex component cnd2 [Microsporum canis CBS 113480]
MPRVAQVPRASAGSRTVSGSSGSPLKIPLNDDAQEKKGRLVSRRALHEKQINELQAAAATPAKKAAFRLADLENASPRSGPATPRRAGDDDDDDDVMVMGSGVTPMKRVPILANFEEWMKMATDNKINATNSWNFALIDYFHDMSLLKDGDGVNFQRASCTLDGCVKIYTSRVDSVATETGKLLSGLADSNSKKKDKDGEGEGEESEDEVDEDGNVVRKKTKKRQRSSEATLAPSFASLQLKKFDMEFAVDPLFKKASADFDEGGAKGLLLNHLMIDGQGRIVFDSSDDANDKSADGIKPRRREDAIGEEDEEAEDDGDTITDQPAEAEDEEEVEIDINALGAKFFPDLDHLDEQDICPSLKTFDLGDPSGSLDIPFLRAPENEDEDEEGDGLGGIGDKSGMFIDEDNPIGFDDMTAMGGFDVAFGEGGEAWAREAALEPQMRPYSMDDGMAGGEAGEGMDDENGDYVVSMNHAKTSDKMHEDILGYFDQALQKNWAGPEHWRIRKIKDADKPETATRQRKEKEPFEINFASPLDIKVAETIYTQASSNSAISLPKKDWKSKTRNLLPDDKHFNSKQLLSLFLKPKARMSSRRNRIGSRIGGFGHGSQQDNVHAADMDEAFWAQKEPQRHEDDTVLPQGDYDANFFDDEMPLPGGGLLDDDDDLEFADARDHFSPGADVPPTEALSITAMLDAGMTVGGFGTQLVTSTRRLRPDYVQYARVAKKVDVRRLKEELWKGMGFPETQEDHNRSRLPTPPTEEDTPKDKEPTLKFTEVMNDLQTVYPKAAMEDISTSFCFICLLHLANEKGLTIEKTPDLLELDIRRDWTAEITEV

SEQ ID NO: 32448 - DNA, 2829 bp, Muscodor strobelii
  misc_feature: SGI EST ID NO. CUFF.76714.0
  misc_feature: Variant of the nucleotide sequence at SEQ ID NO 32446
ccgatgcgcccgacgcgaccatcatcaactgcatccttagagtttcaccattcaagctgaaaacgacaccacatctcaccgctcgaagatgcctcgtgtcgcccaggtccctcgagcgagtgcaggcagtcgaactgtgtctggctcctccggctcccctctgaagatccccttgaacgacgacgcccaggagaagaagggccgtctcgtctcccgccgcgcgctgcacgagaagcagatcaacgagctacaggccgccgccgcgacgcctgcgaaaaaggccgccttcagactggctgacctcgaaaatgcgtctccccgctctggcccggccacgccgcgtcgcgctggagatgacgacgacgacgacgatgttatggtgatgggcagtggcgtcacccccatgaagcgggtgcccattctcgccaacttcgaggagtggatgaagatggccacagacaacaagatcaacgccaccaactcttggaacttcgccctcatcgactacttccacgacatgtcacttttgaaggacggcgatggtgtcaactttcagcgcgccagttgcacgctcgacggctgtgtcaagatctacacgagcagagtcgacagcgtggctacagagactggcaagctgctgagcggcttggctgacagcaactcgaaaaagaaagacaaggatggcgaaggtgagggcgaggaaagcgaagatgaggtcgacgaggacgggaatgttgtcagaaagaagactaagaaaagacaacgatcatcagaagctacattagcgccatcatttgcttctttgcagttgaagaagtttgacatggaatttgcagtcgatccgctattcaagaaagcatctgcggacttcgatgaaggtggagccaagggtctgttactcaaccatctcatgatagacggtcaagggcgcattgttttcgacagcagtgatgacgcaaacgacaaatctgcagatgggatcaagccaaggaggagagaagacgcgattggtgaggaggacgaggaagccgaagacgacggcgataccatcacagatcagccagccgaggccgaggatgaggaggaggtcgagattgatattaatgctcttggagccaagtttttcccagatcttgatcatcttgatgagcaggatatctgtccctccttgaagacatttgatcttggcgatccatccggttctttagacattccatttttgcgtgctccggagaatgaggatgaggatgaagaaggcgacggcctcggaggaattggcgacaaatcgggcatgttcattgatgaggacaatcccattggctttgacgatatgactgccatgggcggcttcgatgtcgcattcggcgaaggtggtgaggcttgggcgcgtgaagccgccttagagccgcagatgcgcccgtacagcatggatgatggtatggccggtggtgaggctggagagggtatggacgacgagaatggcgactacgtggtatccatgaaccatgcaaagaccagcgataagatgcacgaggatatactcggatatttcgaccaggctctccaaaagaactgggctggacctgagcattggcggattcggaaaataaaggatgctgacaagccagaaacagccacacgtcaacgaaaagagaaagagccattcgagattaattttgcctcaccattagacatcaaagtggccgagactatatacacccaagcatcaagcaactcagccatctcattacccaaaaaggactggaaatcgaagacccgcaacctccttcctgacgataaacacttcaattcgaagcagctattaagcctcttcctcaagccaaaagctcgcatgagcagccgccgaaaccgtatcggctcaaggataggtggatttggacatggtagccagcaagacaacgtgcatgcagcagacatggacgaagcgttctgggcgcagaaggagcctcagcgccatgaggacgatacggtcttgcctcagggtgactacgatgccaacttctttgatgacgagatgccgctccctggtggtggcttgttagacgacgatgatgatcttgaattcgctgatgccagagaccatttctctcctggtgctgatgtgccacccaccgaagctctcagtatcacagccatgctcgatgcaggaatgaccgtgggcggctttggcacgcagctcgtcacatcaacccgccgcctacggccagattacgtacaatacgctcgcgttgccaaaaaggttgatgtccgccgactgaaagaagagctctggaagggcatgggattccctgaaactcaagaggaccataacagatcgaggttgcccacgcctccaacagaggaagatacaccaaaggacaaggagcctacacttaagttcaccgaggttatgaacgacctgcagacggtctatcctaaggccgcaatggaagatatatcgacaagtttctgttttatatgtctcttgcatctggcgaacgagaagggcctcacgatagagaaaacgcccgatttattagaattggacatccgacgagactggacggcagagatcacagaagtctgatatgcaagccggtgttgggtacagtcaaatacagccttgtgattttaatgatgagacatgcctacatggttgaagcaccttgatttgggatatggttgttcctgacgttgatggtgcgaacggcattccaatgattattttggtgaaaaggatatatggcatgaaaggacatggctagaaatacgaagtgatgagctatatggatgcatggaagagccgagcctccattaataaagattctc

SEQ ID NO: 32449 - DNA, 1542 bp, Muscodor strobelii
  misc_feature: SGI cDNA ID NO. 571183
  misc_feature: Reduced expression when VOC is produced
  misc_feature: Encodes the peptide sequence at SEQ ID NO 32450
atgacgtccttggaagcaatcttcggcgagctgggcatcgcgcagtacctcaacctcttcgtggatcagggcttcgacacgtgggagacgatattggacatcaccgaatctgatttggacgctttgggagtgaagcttggtcaccgtcgcaaactccagcgacgcattgccaactaccgaggtattgcgcccagcacgtctctagtctcgccgacccgaaccagtatcgaagatgtgaggaacgattcaaaccggtccgaagcaggcagaatcgatgccaaggaaggccagactgtggccaagagaaagtacaggaggcatcccaaacctgacgagaatgccccagagcggccaccctcggcctatgtgctgttctccaataaaatgcgagatgacttgaaaggtcagaacctgaccttcacagaaattgccaagttggtcggcgagaactggcagaatctgaatcgggacgagaaggagccattcgagaggcaggcgaacgaggccaaggagcgatacaaccgcgacctcagtgactacaagaaaacaccacagttcagaaaatacaacgactatctacacgatttccgcaaaagacaagcccttcatctcagagagaaagatgcttcgaagcgtctgaaaaccgaatctgatagtccgcgtgggagcagcaccagcggcaattccatgggacccagcggtacaacgagtggaacaggcagcggatccgagagccagcccggtagcgagccgcctcctactcgtcagcaaagattcagttctattccgtcgttacccaatggtactacgagtaacgggacgagtcacgcggacgagccaatgacttcgccaagtctcaacgagtcccaagagggacggcatcgagggctatcaaatccacattctcgggaatctatggtaccagcttctaagtcatctatctataattggcaggatggacagcggatggttttagaccctcccgatggcttatcattagaatcaaggccacttcctgccacaaacccacagtcccctgaaaatggcactatatcgtctatgtcgtttcgacggagccctccacgggccggttcaacatcaagctcgcgttcgcatcaaccgcctgccctcaaaaaggatgaatcatccgcagggagcatgtcatcgctatcttctgcatatcttccaagaactcctagtgatgcttctctgccaattcatgccctactctcgtcaaagccgccagaactgccaccatatatttctggtactcctggtctcatgagctcctcagtcccgcccgctctaccatcgcagcccagccgcctcgccggcagttttgatagctatcagccaaccatcaatggatatcctccagcaccccgtcatgcatcggtcattcccaatgattccatgtatggcatggactcaaaatcggccccaatacttcgaaaaccatcgagtatgggcacgagtgaacatagtcttgacggtatcagcgctctcctcagggctcgggagattgttgatcgtcgcccttga

SEQ ID NO: 32450 - protein, 513 aa, Muscodor strobelii
  misc_feature: SGI Peptide ID NO. 571183
  misc_feature (2)..(62): Pfam Id: PF07647 Pfam Desc: SAM domain (Sterile alpha motif)
  misc_feature (115)..(181): Pfam Id: PF00505 Pfam Desc: HMG (high mobility group) box
  misc_feature (4)..(60): Pfam Id: PF00536 Pfam Desc: SAM domain (Sterile alpha motif)
  misc_feature (10)..(60): Pfam Id: PF00536 Pfam Desc: SAM domain (Sterile alpha motif)
  misc_feature (8)..(62): Pfam Id: PF07647 Pfam Desc: SAM domain (Sterile alpha motif)
  misc_feature (4)..(414): NCBI GI: 171696076 Blast Desc: protein product [Podospora anserina] gi|170948280|emb|CAP60444.1| protein product [Podospora anserina]
  misc_feature (4)..(284): NCBI GI: 85110964 Blast Desc: NCU02819 [Neurospora crassa OR74A] gi|28925429|gb|EAA34476.1| NCU02819 [Neurospora crassa OR74A]
  misc_feature (3)..(289): NCBI GI: 145613439 Blast Desc: MGG_01641 [Magnaporthe grisea 70-15] gi|145020512|gb|EDK04641.1| MGG_01641 [Magnaporthe grisea 70-15]
  misc_feature (4)..(432): NCBI GI: 46125477 Blast Desc: FG07116.1 [Gibberella zeae PH-1]
  misc_feature (4)..(203): NCBI GI: 261356052 Blast Desc: conserved [Verticillium albo-atrum VaMs.102]
  misc_feature (1)..(217): NCBI GI: 156057705 Blast Desc: SS1G_04584 [Sclerotinia sclerotiorum 1980] gi|154702369|gb|EDO02108.1| SS1G_04584 [Sclerotinia sclerotiorum 1980]
  misc_feature (2)..(217): NCBI GI: 154323226 Blast Desc: BC1G_00012 [Botryotinia fuckeliana B05.10] gi|150842241|gb|EDN17434.1| BC1G_00012 [Botryotinia fuckeliana B05.10]
  misc_feature (1)..(202): NCBI GI: 189193625 Blast Desc: conserved [Pyrenophora tritici-repentis Pt-1C-BFP] gi|187978715|gb|EDU45341.1| conserved [Pyrenophora tritici-repentis Pt-1C-BFP]
  misc_feature (1)..(202): NCBI GI: 169601612 Blast Desc: SNOG_03674 [Phaeosphaeria nodorum SN15] gi|111067759|gb|EAT88879.1| SNOG_03674 [Phaeosphaeria nodorum SN15]
  misc_feature (67)..(217): NCBI GI: 154323224 Blast Desc: BC1G_00011 [Botryotinia fuckeliana B05.10] gi|150842240|gb|EDN17433.1| BC1G_00011 [Botryotinia fuckeliana B05.10]
  misc_feature: Useful for introducing or modulating the production of volatile compounds
MTSLEAIFGELGIAQYLNLFVDQGFDTWETILDITESDLDALGVKLGHRRKLQRRIANYRGIAPSTSLVSPTRTSIEDVRNDSNRSEAGRIDAKEGQTVAKRKYRRHPKPDENAPERPPSAYVLFSNKMRDDLKGQNLTFTEIAKLVGENWQNLNRDEKEPFERQANEAKERYNRDLSDYKKTPQFRKYNDYLHDFRKRQALHLREKDASKRLKTESDSPRGSSTSGNSMGPSGTTSGTGSGSESQPGSEPPPTRQQRFSSIPSLPNGTTSNGTSHADEPMTSPSLNESQEGRHRGLSNPHSRESMVPASKSSIYNWQDGQRMVLDPPDGLSLESRPLPATNPQSPENGTISSMSFRRSPPRAGSTSSSRSHQPPALKKDESSAGSMSSLSSAYLPRTPSDASLPIHALLSSKPPELPPYISGTPGLMSSSVPPALPSQPSRLAGSFDSYQPTINGYPPAPRHASVIPNDSMYGMDSKSAPILRKPSSMGTSEHSLDGISALLRAREIVDRRP

SEQ ID NO: 32451 - DNA, 2953 bp, Muscodor strobelii
  misc_feature: SGI EST ID NO. CUFF.77074.2
  misc_feature: Variant of the nucleotide sequence at SEQ ID NO 32449
taaagattgccatggtcgctggcaaggaaaaagagccaaatccgacatcattgccctgctcaatggcagctcgatgtaacaactccaatatagggatatatcaacatctcgtcgaaaacccgaattcttgccgtcgagctgacactttcgcattgtcttcctgctcatccgcaacaaagcacatctgaccgaggactgatacgatttactggtgactgaacccgcacatccttctagaccgcagagaaccacagagaaccaccgcaccccgggcgcccccgttccccccacatcagcgattttaggaggcgtcgactccctaagacaggtccaaccgcacaggctgccaattgccagccatcactacccgttaccgccagctaccaccagctgcgctacaggccacagcgccctgcaaagcagctccttcttgacgtctgcgcccgcgcatgatctccgcccgttgcctctgcacggaagtcccttcgacagcgcccagccctcaccaccatacgcccctctccaccgcagacaggttattagaccaggtcgctgtggctagaggagagccgtctggccattgaattgaaagagaaaaagaggagaggaagcaaggcgggcacgaacggtagagcgtgcgtgtcgacggacaccggtgcacctttaggaacagatccgcgccatcgtcgtaaccgtgaaacgaccgtcttaacgtagagacgtagactcatcgcgtcgccggtcgccgcgcgcactgccaccgcctcagcatatctatgcgtccttgacccgtgtaattgtatacgccgtggaaacacgacgaagctagctatatgacgtccttggaagcaatcttcggcgagctgggcatcgcgcagtacctcaacctcttcgtggatcagggcttcgacacgtgggagacgatattggacatcaccgaatctgatttggacgctttgggagtgaagcttggtcaccgtcgcaaactccagcgacgcattgccaactaccgaggtattgcgcccagcacgtctctagtctcgccgacccgaaccagtatcgaagatgtgaggaacgattcaaaccggtccgaagcaggcagaatcgatgccaaggaaggccagactgtggccaagagaaagtacaggaggcatcccaaacctgacgagaatgccccagagcggccaccctcggcctatgtgctgttctccaataaaatgcgagatgacttgaaaggtcagaacctgaccttcacagaaattgccaagttggtcggcgagaactggcagaatctgaatcgggacgagaaggagccattcgagaggcaggcgaacgaggccaaggagcgatacaaccgcgacctcagtgactacaagaaaacaccacagttcagaaaatacaacgactatctacacgatttccgcaaaagacaagcccttcatctcagagagaaagatgcttcgaagcgtctgaaaaccgaatctgatagtccgcgtgggagcagcaccagcggcaattccatgggacccagcggtacaacgagtggaacaggcagcggatccgagagccagcccggtagcgagccgcctcctactcgtcagcaaagattcagttctattccgtcgttacccaatggtactacgagtaacgggacgagtcacgcggacgagccaatgacttcgccaagtctcaacgagtcccaagagggacggcatcgagggctatcaaatccacattctcgggaatctatggtaccagcttctaagtcatctatctataattggcaggatggacagcggatggttttagaccctcccgatggcttatcattagaatcaaggccacttcctgccacaaacccacagtcccctgaaaatggcactatatcgtctatgtcgtttcgacggagccctccacgggccggttcaacatcaagctcgcgttcgcatcaaccgcctgccctcaaaaaggatgaatcatccgcagggagcatgtcatcgctatcttctgcatatcttccaagaactcctagtgatgcttctctgccaattcatgccctactctcgtcaaagccgccagaactgccaccatatatttctggtactcctggtctcatgagctcctcagtcccgcccgctctaccatcgcagcccagccgcctcgccggcagttttgatagctatcagccaaccatcaatggatatcctccagcaccccgtcatgcatcggtcattcccaatgattccatgtatggcatggactcaaaatcggccccaatacttcgaaaaccatcgagtatgggcacgagtgaacatagtcttgacggtatcagcgctctcctcagggctcgggagattgttgatcgtcgcccttgaatgtgtttacaccgagcacaatttgccttcaatatctgggaagctttcaaatgatacgatttttaatacgacacttctcgctcacacgccgacaaacacagccgtgtttacgtggccattcatcttgtatctgtcccattgtgcagttttatattcatctatcctactcttgtgatgatattcgcattcaaagacattgcttgcctgaaatatgggctcattacaaatcacgaaagttccgactaactcatccgggtctaacccacttccaacggccatgaagagacatgaacctggagtattggcgttcttgtttttggcgtcgttcggcttacattgcgcggtatcatagcatttttccattcgtggaacgggatcgaggtgggactctcggagtaacaccgcgaattaagaggtttaggtttttgaaaatactctcggtacaagcctggaggatgcaggataaagtgatagttatatcaaatatgttaagttacggcttgcttatactgtacatattaccctccattggcggaaaagcgcatggaaagaattgcaagcaaattcataatacctgt

SEQ ID NO: 32452 - DNA, 270 bp, Muscodor strobelii
  misc_feature: SGI cDNA ID NO. 571184
  misc_feature: Elevated expression when VOC is produced
  misc_feature: Encodes the peptide sequence at SEQ ID NO 32453
atgtctcagcccactaaccccaacgacaaatccggttcaagcaatgactatgcccaagcctcgtcaactcaagcggaaatggctcaggccttcaaagacctagcaaggggtgagcagcaagctgcagctatcgaggcaaatctgaccaaccttgagaacaagcttgatgctctcttggccgccttcgaggcaggcggctccgagtcaccggaagcacagaagctcgagcagaatgactcgaaagaacaaaatgacaccatacagaaatag

SEQ ID NO: 32453 - protein, 89 aa, Muscodor strobelii
  misc_feature: SGI Peptide ID NO. 571184
  misc_feature (4)..(77): NCBI GI: 46125479 Blast Desc: FG07117.1 [Gibberella zeae PH-1]
  misc_feature (5)..(72): NCBI GI: 154323238 Blast Desc: [Botryotinia fuckeliana B05.10] gi|150842247|gb|EDN17440.1| [Botryotinia fuckeliana B05.10]
  misc_feature (24)..(72): NCBI GI: 226282357 Blast Desc: PAAG_00844 [Paracoccidioides brasiliensis Pb01]
  misc_feature (17)..(64): NCBI GI: 238844805 Blast Desc: MCYG_07286 [Microsporum canis CBS 113480]
  misc_feature (21)..(62): NCBI GI: 156057699 Blast Desc: [Sclerotinia sclerotiorum 1980] gi|154702366|gb|EDO02105.1| [Sclerotinia sclerotiorum 1980]
  misc_feature (27)..(62): NCBI GI: 171696078 Blast Desc: protein product [Podospora anserina] gi|170948281|emb|CAP60445.1| protein product [Podospora anserina]
  misc_feature (24)..(63): NCBI GI: 145613441 Blast Desc: [Magnaporthe grisea 70-15] gi|145020513|gb|EDK04642.1| [Magnaporthe grisea 70-15]
  misc_feature: Useful for introducing or modulating the production of volatile compounds
MSQPTNPNDKSGSSNDYAQASSTQAEMAQAFKDLARGEQQAAAIEANLTNLENKLDALLAAFEAGGSESPEAQKLEQNDSKEQNDTIQK

SEQ ID NO: 32454 - DNA, 1028 bp, Muscodor strobelii
  misc_feature: SGI EST ID NO. CUFF.76735.1
  misc_feature: Variant of the nucleotide sequence at SEQ ID NO 32452
gcactcaagcgacaaggttttctctaccgccgtccatacctaccgtcaacaattctagatgttgattggacaaggcttagataaattgggttgattttctgccgatgcttaccagcagtactgcacacgtacatacgtacctatgtggcatccattccaagcacaagttaaggtcctcaactgacagcccgttcccacctcctgttgtctgcacggctgccctccacgagtacgagcaagcaattagcggcaggagggtcagcggcttcatattcgagccgcatctgtatcgatcatcggctggccggatttcattcactctttgccgacaggcttctcaacactccgcattgcccgcacctatttccaagcaaccagcaccatgtctcagcccactaaccccaacgacaaatccggttcaagcaatgactatgcccaagcctcgtcaactcaagcggaaatggctcaggccttcaaagacctagcaaggggtgagcagcaagctgcagctatcgaggcaaatctgaccaaccttgagaacaagcttgatgctctcttggccgccttcgaggcaggcggctccgagtcaccggaagcacagaagctcgagcagaatgactcgaaagaacaaaatgacaccatacagaaatagctcggtaccaggcgtagggcgtttaccgtatacagaagggattctcctggttcttgtaagccaggaacatgtctcaacagcatgtctctggttcttgttgtacagttctctcccaataatcgacgccttgcgctgctaggatgccttgtcttcaacacgtgactgatatgggaatcttgaccatagacttatctcgataaacatactgtagaagagtggcatgaacggttggcttcttgatttgctctttctaggatctatttccatgtcgataacgaggaatcgagcttaccacgactagcagttctatgaatagagtctcggtagctacctgttccctctttagacacaagaatatcatgtctagacatcttcc

SEQ ID NO: 32455 - DNA, 3861 bp, Muscodor strobelii
  misc_feature: SGI cDNA ID NO. 571185
  misc_feature: Reduced expression when VOC is produced
  misc_feature: Encodes the peptide sequence at SEQ ID NO 32456
atgagagtcatggaggaccaagagacgttgatggcagttgccgccatcgtcaagaacctctcctcttcgaataaagacctttcctcggtacctatcggcaccaactcgcagatcgcattgcctggccgccacagcgcagccaaagagaccctcgagcgtgaactttcaggcttgatcgtccatcttcagcagctcgaggccaaggcacatgctgccaacgctcccaatttccccgacactccaaatgagacggctatttcccctttcgacgacgatccaagaactggggcacgctcgaaattccctgggtccagtaggaatgggtctcaggacgaccgcatcaagcccgccatcccactcacagacgaagccctttcagggttacaagaacatatcaacgatcaaaccaaattgcttgacaatcagcgccaagagctcacgaatgtcaatgcacaactggtcgagcagaagaagttgcaagagaaggctcttcagataattgaacaggagcgtgttgcgaccttggaacgtgaactttggaagcatcaaaaggccaacgaagcttttcaaaaggcattgcgtgagattggagagatcgtcactgctgttgcgcgaggtgacctgagcaaaaaagtgcgcatgaacacggtagaaatggaccctgaaatcaccaccttcaaacggacaatcaacaccatgatggaccagcttcaagtcttcgccagcgaggtctctcgcgtcgcccgtgaggtcggaacagatggcatacttggtggccaggccaagattgaaggtgttgatggaacctggaaagaactcactgacaatgtcaatgtcatggcacagaatctcaccgaccaagtgcgcgaaattgcatccgtaactacggctgtcgctcatggcgatttgacaaagaagattgagagacccgctaagggcgagattcttcaacttcagcaaacgatcaacaccatggtgggacagctgcgcacattcgcgtcggaagtcacgcgtgtcgcccgtgatgtcggcacagaaggtatgctcggcggtcaagctgatgtgatgggagtccagggcatgtggaacgagctcactgtaaacgtcaatgctatggcgaacaaccttaccacccaagtgcgcgacatagccaaagtcactacagccgttgcgaaaggtgatcttacgcaaaaggtatcagccgtttgtaaaggcgagatttttgagctcaagtcgactatcaactccatggtagagcagctgcagcagttcgcgcgagaagtcagcaaaatcgcccgagaagtcggtacagagggacgtctcggtggtcaagctactgtcaacgatgttcagggtacatggcgtgacctcactgacaacgtgaacggtatggccatgaatctgacaacccaagtccgagagatctctcgagttactgccgctgtggcccgaggcgatctgaccaagaagattggcgtcgaagtccggggtgaaatcttagagctgaagcttacgatcaactccatggtggaccgccttggaacctttgccttcgaggtgagcaaggtcgcgcgagaggtcggaacagacggtactctgggcggtcaagcccgagttgatggtgtcgaaggcaaatggagagatctaaccgagaacgtgaacacgatggccctgaacttgacctcacaagttcgaggtatttcaaccgttactcaagctatcgctgatggggacatgagccagaagattgatgtccaagccaaaggcgagatacttatcctcaaggagacaatcaacaacatggttgaccgactctcggtattctgtaacgaggtgcaaagagttgcccgagacgtcggcgtggacggtaaaatgggtggccaagcagatgttggtggtctgaagggaaggtggaaagaaattacggcagacgtcaacactatggctaccaacctcaccacgcaagtgcgagctttcggcgatatcaccaatgctgctaccgacggaaacttcaacaaactagtcgatgtcgaagcatccggtgaaatggatgaactgaaacgcaagatcaaccagatggtgtacaacctgcgcgacagcatccagaggaacacgctagctcgagaagcagcagaacaggcaaataaaaccaagtccgagttcctggccaacatgtctcacgagatccgaacccccatgaacggtatcatcggaatgacccagctgacactggacaccgatttaacccagtaccaaagagagatgttgaacatcgtcaatcagttagccaacagcctattgacaattattgatgatattcttgatttgtcaaagatcgaagcacggaggatggttatcgaagagatcccatacacactacgaggaactgtcttcaacgcgctcaagactttggccgtcaaagcgaacgagaaattcctggaccttacgtatcgggtcgatagttctgttcctgattatgttgttggagactccttccgtctgcgacagattatactcaacttggttggcaatgctatcaagttcaccgagcatggcgaagtcagcctgacaatccaagagtccaagggtaccaagccgaagtatccaaacgagtacgctatcgaatttgtggtctcagacactggtataggaataccacaagacaagttagacttgatcttcgatactttccagcaggccgatggctccatgactcgtaaatttggcggtacagggcttggcttgtctatttccaagaggctggttactctgatgggtggtgatctgtgggtcaagagcgagtttggcaaaggaagtgctttctatttcacatgtgttgtcaagctggccgatggcgggcttggttccattgaaaagatgctcaagccatacaaaggacatcaagttcttttcatcgacaagggtctgtccggctatgggaaggaagtctctgtcatgctacagagattaggtcttgtgccagtcgtggtgaattccgagaggaatcctgattccactggagattccgataatccgccttacgacgtcataattgtcgagtcgatcgaaacagcccgaaagctgcgatccattgaagacttccggtatcttccaattgtgctactagctcctgttgtacacatcaccctcaaatcctgcctggatttgggtatcacgtcctacatgactacgccatgtgagccaattgaccttggaaacggcatggtaccggcactagagaatcgagccaccccgtcatttgccgacaatactcggtcatttgaaatcctacttgccgaagacaaccgcgtcaatcagcggctggcagtcaagattctcgagaagtatcaccatgttgtcactgttgtcggaaacggattagaggccgtggaggctgtgcagaggaggaagttcgacgtcatcctgatggacgtccagatgccgatcatgggtggatttgaagccactggcaagattcgagagtacgagcgtggtatcggaacacaacgaacgcctatcattgcgctcacagcacatgccatgatgggagatcgagaacgatgcatacaagctcaaatggatgagtatctgtcgaagcctttgcagcagaatcatctgatccagaccatcctaaaatgcgcaacactcggtggcgctttactcgagaagaatcgcgagagggagctttctcgccatggggataagtccagcgacgacggaaaatcccctgcacttgccagacctagcttggaggctcgttctgccaccaccagtgcccctggtgcagcaagcccttccttggtagctgcaaatcaagtggaccctttgcaaagactcttactgagagctcacagccaataa

SEQ ID NO: 32456 - protein, 1286 aa, Muscodor strobelii
  misc_feature: SGI Peptide ID NO. 571185
  misc_feature (354)..(423): Pfam Id: PF00672 Pfam Desc: HAMP domain
  misc_feature (264)..(331): Pfam Id: PF00672 Pfam Desc: HAMP domain
  misc_feature (829)..(948): Pfam Id: PF02518 Pfam Desc: Histidine kinase-, DNA gyrase B-, and HSP90-like ATPase
  misc_feature (717)..(782): Pfam Id: PF00512 Pfam Desc: His Kinase A (phosphoacceptor) domain
  misc_feature (1094)..(1211): Pfam Id: PF00072 Pfam Desc: Response regulator receiver domain
  misc_feature (279)..(331): Pfam Id: PF00672 Pfam Desc: HAMP domain
  misc_feature (464)..(515): Pfam Id: PF00672 Pfam Desc: HAMP domain
  misc_feature (365)..(423): Pfam Id: PF00672 Pfam Desc: HAMP domain
  misc_feature (556)..(607): Pfam Id: PF00672 Pfam Desc: HAMP domain
  misc_feature (4)..(1278): NCBI GI: 85113126 Blast Desc: NCU02815 [Neurospora crassa OR74A] gi|1354473|gb|AAB01979.1| Os-1p [Neurospora crassa] gi|28926254|gb|EAA35235.1| NCU02815 [Neurospora crassa OR74A]
  misc_feature (4)..(1278): NCBI GI: 1262208 Blast Desc: Nik-1 [Neurospora crassa]
  misc_feature (4)..(1275): NCBI GI: 1262210 Blast Desc: Nik-1 [Neurospora crassa]
  misc_feature (4)..(1277): NCBI GI: 171696068 Blast Desc: protein product [Podospora anserina] gi|170948276|emb|CAP60440.1| protein product [Podospora anserina]
  misc_feature (28)..(1278): NCBI GI: 260159588 Blast Desc: two-component histidine kinase [Fusarium oxysporum f. sp. lycopersici]
  misc_feature (16)..(1278): NCBI GI: 39952003 Blast Desc: MGG_11174 [Magnaporthe grisea 70-15] gi|145020511|gb|EDK04640.1| MGG_11174 [Magnaporthe grisea 70-15]
  misc_feature (16)..(1278): NCBI GI: 13591555 Blast Desc: histidine kinase [Magnaporthe grisea]
  misc_feature (28)..(1278): NCBI GI: 39726367 Blast Desc: histidine kinase NIK1p [Gibberella moniliformis]
  misc_feature (16)..(1281): NCBI GI: 256733085 Blast Desc: [Nectria haematococca mpVI 77-13-4]
  misc_feature (9)..(1285): NCBI GI: 98990176 Blast Desc: two-component histidine kinase [Monilinia fructicola]
  misc_feature (193)..(1206): SWISSPROT Homolog: EC 2.7.13.3 Histidine kinase
  misc_feature: Useful for introducing or modulating the production of volatile compounds
MRVMEDQETLMAVAAIVKNLSSSNKDLSSVPIGTNSQIALPGRHSAAKETLERELSGLIVHLQQLEAKAHAANAPNFPDTPNETAISPFDDDPRTGARSKFPGSSRNGSQDDRIKPAIPLTDEALSGLQEHINDQTKLLDNQRQELTNVNAQLVEQKKLQEKALQIIEQERVATLERELWKHQKANEAFQKALREIGEIVTAVARGDLSKKVRMNTVEMDPEITTFKRTINTMMDQLQVFASEVSRVAREVGTDGILGGQAKIEGVDGTWKELTDNVNVMAQNLTDQVREIASVTTAVAHGDLTKKIERPAKGEILQLQQTINTMVGQLRTFASEVTRVARDVGTEGMLGGQADVMGVQGMWNELTVNVNAMANNLTTQVRDIAKVTTAVAKGDLTQKVSAVCKGEIFELKSTINSMVEQLQQFAREVSKIAREVGTEGRLGGQATVNDVQGTWRDLTDNVNGMAMNLTTQVREISRVTAAVARGDLTKKIGVEVRGEILELKLTINSMVDRLGTFAFEVSKVAREVGTDGTLGGQARVDGVEGKWRDLTENVNTMALNLTSQVRGISTVTQAIADGDMSQKIDVQAKGEILILKETINNMVDRLSVFCNEVQRVARDVGVDGKMGGQADVGGLKGRWKEITADVNTMATNLTTQVRAFGDITNAATDGNFNKLVDVEASGEMDELKRKINQMVYNLRDSIQRNTLAREAAEQANKTKSEFLANMSHEIRTPMNGIIGMTQLTLDTDLTQYQREMLNIVNQLANSLLTIIDDILDLSKIEARRMVIEEIPYTLRGTVFNALKTLAVKANEKFLDLTYRVDSSVPDYVVGDSFRLRQIILNLVGNAIKFTEHGEVSLTIQESKGTKPKYPNEYAIEFVVSDTGIGIPQDKLDLIFDTFQQADGSMTRKFGGTGLGLSISKRLVTLMGGDLWVKSEFGKGSAFYFTCVVKLADGGLGSIEKMLKPYKGHQVLFIDKGLSGYGKEVSVMLQRLGLVPVVVNSERNPDSTGDSDNPPYDVIIVESIETARKLRSIEDFRYLPIVLLAPVVHITLKSCLDLGITSYMTTPCEPIDLGNGMVPALENRATPSFADNTRSFEILLAEDNRVNQRLAVKILEKYHHVVTVVGNGLEAVEAVQRRKFDVILMDVQMPIMGGFEATGKIREYERGIGTQRTPIIALTAHAMMGDRERCIQAQMDEYLSKPLQQNHLIQTILKCATLGGALLEKNRERELSRHGDKSSDDGKSPALARPSLEARSATTSAPGAASPSLVAANQVDPLQRLLLRAHSQ

SEQ ID NO: 32457 - DNA, 5689 bp, Muscodor strobelii
  misc_feature: SGI EST ID NO. CUFF.76994.0
  misc_feature: Variant of the nucleotide sequence at SEQ ID NO 32455
tccgcgacccgtctttgccagcgactccccagtgtgacagtgtctttgccgtgccctttggggcctttgctcacgatccagcacccgatccagcagtccggccagacggctacccaggctcgcctggcccttctccgccttgtctgctccttcacacgttcccccatttgctcgcctgccacctgcctcgcctgctcttgtcttgatctcctccgtcgtgcctgtgccgtgcagtcccgacctgcacaacgtactacttactgcctccgcggcatttgccttatacatcgcaacggtcgggagatcctcctacacacgaacacctacgaacgagtattgcaccatccctcactggagcgtggcatagctgctgctccaaccactgtgctcaaggcgacgtccatacagagatacagacacacaggcagatctccgctgctctctgcttgtgcgaatacacctgccgagggccttgtctgcaggctacgagttcatctttcgctcgttccgacccagcctgtcccgaaaagcgccccctcagcccgcaatttggggccactccttttataccaaatttcctttgtactcaagcaactcggtcttgctcgagtctgtcgaattgcgggcagcataaacgcagccctacacccaagtcgcgtctcctctgtcttggattttgctagccgcaatcttcgcctagtccccccttcgccatcgccagttcttcacgcatggctacgccgcgcgcctttgtcgagtagtccagtcttcactcttctggctctaaagccctaagtcggctcttctaccgacgacttacggcctattcctcagcttcatgcgattcgctagcctgagctgagtgtgttatcaagcattttcgagccggcatcaccgaccccctgcgtctcttgacgccgctcgagttttataggcggctgtctctgggcgattgttccaacattatgagagtcatggaggaccaagagacgttgatggcagttgccgccatcgtcaagaacctctcctcttcgaataaagacctttcctcggtacctatcggcaccaactcgcagatcgcattgcctggccgccacagcgcagccaaagagaccctcgagcgtgaactttcaggcttgatcgtccatcttcagcagctcgaggccaaggcacatgctgccaacgctcccaatttccccgacactccaaatgagacggctatttcccctttcgacgacgatccaagaactggggcacgctcgaaattccctgggtccagtaggaatgggtctcaggacgaccgcatcaagcccgccatcccactcacagacgaagccctttcagggttacaagaacatatcaacgatcaaaccaaattgcttgacaatcagcgccaagagctcacgaatgtcaatgcacaactggtcgagcagaagaagttgcaagagaaggctcttcagataattgaacaggagcgtgttgcgaccttggaacgtgaactttggaagcatcaaaaggccaacgaagcttttcaaaaggcattgcgtgagattggagagatcgtcactgctgttgcgcgaggtgacctgagcaaaaaagtgcgcatgaacacggtagaaatggaccctgaaatcaccaccttcaaacggacaatcaacaccatgatggaccagcttcaagtcttcgccagcgaggtctctcgcgtcgcccgtgaggtcggaacagatggcatacttggtggccaggccaagattgaaggtgttgatggaacctggaaagaactcactgacaatgtcaatgtcatggcacagaatctcaccgaccaagtgcgcgaaattgcatccgtaactacggctgtcgctcatggcgatttgacaaagaagattgagagacccgctaagggcgagattcttcaacttcagcaaacgatcaacaccatggtgggacagctgcgcacattcgcgtcggaagtcacgcgtgtcgcccgtgatgtcggcacagaaggtatgctcggcggtcaagctgatgtgatgggagtccagggcatgtggaacgagctcactgtaaacgtcaatgctatggcgaacaaccttaccacccaagtgcgcgacatagccaaagtcactacagccgttgcgaaaggtgatcttacgcaaaaggtatcagccgtttgtaaaggcgagatttttgagctcaagtcgactatcaactccatggtagagcagctgcagcagttcgcgcgagaagtcagcaaaatcgcccgagaagtcggtacagagggacgtctcggtggtcaagctactgtcaacgatgttcagggtacatggcgtgacctcactgacaacgtgaacggtatggccatgaatctgacaacccaagtccgagagatctctcgagttactgccgctgtggcccgaggcgatctgaccaagaagattggcgtcgaagtccggggtgaaatcttagagctgaagcttacgatcaactccatggtggaccgccttggaacctttgccttcgaggtgagcaaggtcgcgcgagaggtcggaacagacggtactctgggcggtcaagcccgagttgatggtgtcgaaggcaaatggagagatctaaccgagaacgtgaacacgatggccctgaacttgacctcacaagttcgaggtatttcaaccgttactcaagctatcgctgatggggacatgagccagaagattgatgtccaagccaaaggcgagatacttatcctcaaggagacaatcaacaacatggttgaccgactctcggtattctgtaacgaggtgcaaagagttgcccgagacgtcggcgtggacggtaaaatgggtggccaagcagatgttggtggtctgaagggaaggtggaaagaaattacggcagacgtcaacactatggctaccaacctcaccacgcaagtgcgagctttcggcgatatcaccaatgctgctaccgacggaaacttcaacaaactagtcgatgtcgaagcatccggtgaaatggatgaactgaaacgcaagatcaaccagatggtgtacaacctgcgcgacagcatccagaggaacacgctagctcgagaagcagcagaacaggcaaataaaaccaagtccgagttcctggccaacatgtctcacgagatccgaacccccatgaacggtatcatcggaatgacccagctgacactggacaccgatttaacccagtaccaaagagagatgttgaacatcgtcaatcagttagccaacagcctattgacaattattgatgatattcttgatttgtcaaagatcgaagcacggaggatggttatcgaagagatcccatacacactacgaggaactgtcttcaacgcgctcaagactttggccgtcaaagcgaacgagaaattcctggaccttacgtatcgggtcgatagttctgttcctgattatgttgttggagactccttccgtctgcgacagattatactcaacttggttggcaatgctatcaagttcaccgagcatggcgaagtcagcctgacaatccaagagtccaagggtaccaagccgaagtatccaaacgagtacgctatcgaatttgtggtctcagacactggtataggaataccacaagacaagttagacttgatcttcgatactttccagcaggccgatggctccatgactcgtaaatttggcggtacagggcttggcttgtctatttccaagaggctggttactctgatgggtggtgatctgtgggtcaagagcgagtttggcaaaggaagtgctttctatttcacatgtgttgtcaagctggccgatggcgggcttggttccattgaaaagatgctcaagccatacaaaggacatcaagttcttttcatcgacaagggtctgtccggctatgggaaggaagtctctgtcatgctacagagattaggtcttgtgccagtcgtggtgaattccgagaggaatcctgattccactggagattccgataatccgccttacgacgtcataattgtcgagtcgatcgaaacagcccgaaagctgcgatccattgaagacttccggtatcttccaattgtgctactagctcctgttgtacacatcaccctcaaatcctgcctggatttgggtatcacgtcctacatgactacgccatgtgagccaattgaccttggaaacggcatggtaccggcactagagaatcgagccaccccgtcatttgccgacaatactcggtcatttgaaatcctacttgccgaagacaaccgcgtcaatcagcggctggcagtcaagattctcgagaagtatcaccatgttgtcactgttgtcggaaacggattagaggccgtggaggctgtgcagaggaggaagttcgacgtcatcctgatggacgtccagatgccgatcatggtaagatcgaaagcttgaatgacaaacaattgctaactccagatacagggtggatttgaagccactggcaagattcgagagtacgagcgtggtatcggaacacaacgaacgcctatcattgcgctcacagcacatgccatgatgggagatcgagaacgatgcatacaagctcaaatggatgagtatctgtcgaagcctttgcagcagaatcatctgatccagaccatcctaaaatgcgcaacactcggtggcgctttactcgagaagaatcgcgagagggagctttctcgccatggggataagtccagcgacgacggaaaatcccctgcacttgccagacctagcttggaggctcgttctgccaccaccagtgcccctggtgcagcaagcccttccttggtagctgcaaatcaagtggaccctttgcaaagagcatgttcaaccctctcagaaccgtccaggtgaaacaactaacccgctatagctcttactgagagctcacagccaataaattagacgcaagactctctaccgtctcacctcgaacgtctttttgacgtattcactacgaatctcgataccctacagaagcgcaaccattctatgcacttctagcgcgcattgatccaacatttgttgttatcataatttccagcagcagtcatcgctataaggtttccatttggcatcatgaaggaagacattcagatcttcgccctgaggacagaaacgtcgcagtggaagagaggatttcattaggggtggggaactgggttgaaagagcctcctgtgggtgcggtttctgcccgtctgctccgggcaaaattccagatgagttggctattaatgccaagttccctgccaggggattatatgggactgtacggtgtcaggattagcattttccacgtcgttagggagttttgagttctcatcattgacctttccactgtatcttgagaatagttccgactacattgcagagcaccaccgccctgattatatccattgttaaaaaagccaacggtcgttattggcattgcaggtttcttagcagaggaggcacggttcatcacatgtgtgtaggtgacgaaaagtctacatcaatttcaagcagtcttctcatcgcgtctttactttcgatctttcgtagtcattacttgtgaccgctacgttatgatcacttgctagagattaggaagttttttgcagatattaattcaatttcatgaacttgacggatcagtttcctagctgtgaatgttccgtcattc

SEQ ID NO: 32458 - DNA, 4119 bp, Muscodor strobelii
  misc_feature: SGI cDNA ID NO. 571186
  misc_feature: Reduced expression when VOC is produced
  misc_feature: Encodes the peptide sequence at SEQ ID NO 32459
atgtcgacggcgtcgaggaagtcctacctcaaccgccgtctcaacagcgtccagagcacccactccacgcgaagggctcgctcgggctcttcggcgcgccccgcacccgtgagccacgacgatgcctacacctacgccctgcgcgtcgcctacctccactacctcctccagcccaagaccaagcgaaagcaatggcagccggcgccgaagccgcctccgcgcgtttccacctccaacatcggcgacttagtcaaggagttcgtgccggggaactcgtcctccgtcaagctcccccattccttctctgggccgctgtgcaagcgcatggagggggtcatccgtggctctgagcccctccctggctacaacgatgctgcggtcaagaagagtttcgctcaggcctacacggcctttaccgacgccggcttcaagaagagcatcgacaaggagcgcaaggtcgagccgttggtcttgatattctattccaacgccaccaaagcctgccagatgggccatgcagcaggcgacgatgcctggaaactgcttgtcgatcgccacctcgcgctcttcgtgagacttgtcggtgcgatcctgcgtgggcagggcagtgaccagagccggcccgagctcatgtccagactaaccactctcgaaaataagctccttacaaacgaccagaatctttacgccgagtcgggccaggacgctggaaagcacgtcgaggttgtggtgcccttgtcgcacgacgtcaaagacatgcccatggtccaggccgtcgccaagatcttcgggctcgctcactctgacgtgcaaaaccatatcaatgcgcaacggcccaactggaatgaggaggcggcactccgcgatctgaaggcttaccagcatcgactgaactccaatatgtcgggtgttttgcgcagtcaggactttgacttggaggagtcctaccaggactggaaaaaatccgaggcacctttcttgtcggccatgatgatggagatcctcattgcgaagccagaactcgccaagacgtcgtctggcgccagcgcggcgtcagagaagcctttgcctccaaaccccaatgctgctgaggagcaagcgtatgcagaactcggacgagccttgtctgactcgaagaggacgtccatgtacggcatagatccttccttcagcctaagttctatgacactggaggatacgagcagcatcagagctgtcgacgatgcccattatacctttatacccccagacccgcgcgaattcttgaaagtcatagcaaattacgccctcgagtttgatgccatgcatgggagcgacaacgaccagtctccgttctccaagtgttcgacggagcttctgacagaattatgtgttcgctggcgaatacctcaattcactcgtctcgtcgtgtttgttgacgtagctgctcgcagattcactgattctctgtttacttgtgaagacttagcggatgcgttcgaacttgtcaaacagccaccgacagaaaaagagttgaaaaagcctcctcacatttatctttatagcgaaagcctagccacgatagatagaggccgatggactcttgccgattttgcttcttatcagcagaccttacataccatacatgacgcactccttcgagaactttacgatattctcatgcattgttatgaagctaaacccccgggagccgggccgtctgttcacgtcttagaaaatcatatattcaacgatcccagcttttcgcggaacgaagaggatgccttagaatacactaaaatgctccagagtggcatggcagaacaagcggcgaactcgtatcgtggttttcttgatgctgaaatccccccagaccagcatgattggagattcgagcatgtgaagaagcttggcagtctagttgtcaagctttgtgagaaagtacagaagcgatacaagaagaagcctgagatcatgggcgtcaatccgttgacggtgcttgcggaaacaatatttcccagctttgaggccgatgcccatgaccttgtgaagagaattgttcaggtagctcgcgaagctggcgaagagcttccgctgcaagatggattcgacttgtacaaggatcttgtcaatatccgacgtattcaccggtcatcactccccaaccaaccttttacttttgatgtagaagaacttctagtcgagtttgtctggcgatggatacagaacgcagaggagcgagcagaagcctacgtggagcaagcgatcaaccaggaccagtttcagactcggaatcaggactctggccaagctgcgagggatctagatcgacacagtcattccattatcgatatgttccagctgttccaccaaacggcagaccaggtatttcaacttgaatgggacaacgacgtacatcatgcacgctttatgactgctctatccaagatatttgccaacagtattgcccgctactgtgagatcatagaccagcgcttcatcaaagaaatggacactccaagaccagaagagcaagccgctgctgcatccgcctctactacccaaggtagattcatgcaatacgcaaaagatgcgtggaatacgaaagagaaggtggagcctttccagttctatccagagtctttggttaaactaaacaatgttgagtgggctatgcaagagctcgataaacttgagagaactatgaacgtggatgcatgcgctgcaatactagaaaaaatggacgggcctaagaagcaggccaaacgaccagcgaaatatgtctttaccatcaagatcgtcgaggctgaagacatcaaggcttgtgaccccaacgggactagcgatccctacgtcgttcttgtggatgagtaccagaagcgcctgcacaagactcgtattattatgaggactctcaatcctcgatgggacgaatccattgacgtgacagtatccagcccgcttaatattatcgcgacgatttgggactatgacacgttcggcgatcatgactttgtaggaagaacgtctttgaaattagatcctttacacttcagcgactatcttcctagagaattctggctagatttggatacccaagggagaattcttctccgcgtgagtatggaaggggagcgagatgatatacaattctattttggcaaggcgttccggcatttgaagcgaaccgaacgagacatggttcgcaaaattacggacaagctgtcgaggcaaatcaatgctgccttgtcgatcgatgcactacgcaggcttctaggccgtggttacgcttcgcaggtcaactcgttcttcaagcgtagttctaccatgcctataactaccgatgcggacattgagaatgccttgcaagctctctttacgtacttcgatgacaactttcgtacgatgaaagagactttgaccgacgctacgatggtcgcagtgatgacacgtctgtggaaagaagttctcatggcaatcgaggcgctcgttgtaccgcctgtttccgataagccatcggacaagaaagccctgtcccaacgcgaactggacgtggtgttcaaatggctaaagttactttacgattttttcaacgctcaggacgagaatggtgacgctctgggtgtcccagccgaagtcctcaagtcgcctaagtatcacgaactcaacacactcaacttcttttactttgataataccgataatcttatacggacatcggagcgcatggccgccgctacggcgcagcggcaacagcaacagctccaagggcagatgagtaacaatcgactctcggccccgccgactttaggtccgtctttgacggccggcccggcatttgcaagcatgggcacgattcgccgtggcaagagcatcatgatgagccgcaatctcggaacgatgcgccgtgccaaggaagagaagcgcaaggaggcacaagccgatccctccgatgatatgatcctgcgcattctacgcatgcggcctgaagctgccggatatctcaaggagagacatcgtcagaaggagcgcatggctgctcaggctgctgcggcgatgatagtgaagcagagcgtcagccagggttggaacacgggcgcccgccagagctttggccgtggcggtgtgcctagacgctag

SEQ ID NO: 32459 - protein, 1372 aa, Muscodor strobelii
  misc_feature: SGI Peptide ID NO. 571186
  misc_feature (922)..(1003): Pfam Id: PF00168 Pfam Desc: C2 domain
  misc_feature (1)..(1372): NCBI GI: 46125483 Blast Desc: FG07119.1 [Gibberella zeae PH-1]
  misc_feature (4)..(1372): NCBI GI: 256733086 Blast Desc: [Nectria haematococca mpVI 77-13-4]
  misc_feature (1)..(1372): NCBI GI: 171696164 Blast Desc: protein product [Podospora anserina] gi|170948324|emb|CAP60488.1| protein product [Podospora anserina]
  misc_feature (1)..(1368): NCBI GI: 85110917 Blast Desc: NCU02833 [Neurospora crassa OR74A] gi|11359446|pir||T49500 B14D6.520 [imported] - Neurospora crassa gi|28925400|gb|EAA34457.1| NCU02833 [Neurospora crassa OR74A]
  misc_feature (1)..(1372): NCBI GI: 156036012 Blast Desc: SS1G_12692 [Sclerotinia sclerotiorum 1980] gi|154698100|gb|EDN97838.1| SS1G_12692 [Sclerotinia sclerotiorum 1980]
  misc_feature (1)..(1372): NCBI GI: 154323946 Blast Desc: BC1G_00372 [Botryotinia fuckeliana B05.10] gi|150842601|gb|EDN17794.1| BC1G_00372 [Botryotinia fuckeliana B05.10]
  misc_feature (1)..(1372): NCBI GI: 116181680 Blast Desc: CHGG_01468 [Chaetomium globosum CBS 148.51] gi|88185765|gb|EAQ93233.1| CHGG_01468 [Chaetomium globosum CBS 148.51]
  misc_feature (1)..(1372): NCBI GI: 145613488 Blast Desc: MGG_11181 [Magnaporthe grisea 70-15] gi|145020557|gb|EDK04686.1| MGG_11181 [Magnaporthe grisea 70-15]
  misc_feature (11)..(1355): NCBI GI: 189197591 Blast Desc: C2 domain containing protein [Pyrenophora tritici-repentis Pt-1C-BFP] gi|187981081|gb|EDU47707.1| C2 domain containing protein [Pyrenophora tritici-repentis Pt-1C-BFP]
  misc_feature (1)..(1372): NCBI GI: 115385370 Blast Desc: conserved [Aspergillus terreus NIH2624] gi|114196924|gb|EAU38624.1| conserved [Aspergillus terreus NIH2624]
  misc_feature: Useful for introducing or modulating the production of volatile compounds
MSTASRKSYLNRRLNSVQSTHSTRRARSGSSARPAPVSHDDAYTYALRVAYLHYLLQPKTKRKQWQPAPKPPPRVSTSNIGDLVKEFVPGNSSSVKLPHSFSGPLCKRMEGVIRGSEPLPGYNDAAVKKSFAQAYTAFTDAGFKKSIDKERKVEPLVLIFYSNATKACQMGHAAGDDAWKLLVDRHLALFVRLVGAILRGQGSDQSRPELMSRLTTLENKLLTNDQNLYAESGQDAGKHVEVVVPLSHDVKDMPMVQAVAKIFGLAHSDVQNHINAQRPNWNEEAALRDLKAYQHRLNSNMSGVLRSQDFDLEESYQDWKKSEAPFLSAMMMEILIAKPELAKTSSGASAASEKPLPPNPNAAEEQAYAELGRALSDSKRTSMYGIDPSFSLSSMTLEDTSSIRAVDDAHYTFIPPDPREFLKVIANYALEFDAMHGSDNDQSPFSKCSTELLTELCVRWRIPQFTRLVVFVDVAARRFTDSLFTCEDLADAFELVKQPPTEKELKKPPHIYLYSESLATIDRGRWTLADFASYQQTLHTIHDALLRELYDILMHCYEAKPPGAGPSVHVLENHIFNDPSFSRNEEDALEYTKMLQSGMAEQAANSYRGFLDAEIPPDQHDWRFEHVKKLGSLVVKLCEKVQKRYKKKPEIMGVNPLTVLAETIFPSFEADAHDLVKRIVQVAREAGEELPLQDGFDLYKDLVNIRRIHRSSLPNQPFTFDVEELLVEFVWRWIQNAEERAEAYVEQAINQDQFQTRNQDSGQAARDLDRHSHSIIDMFQLFHQTADQVFQLEWDNDVHHARFMTALSKIFANSIARYCEIIDQRFIKEMDTPRPEEQAAAASASTTQGRFMQYAKDAWNTKEKVEPFQFYPESLVKLNNVEWAMQELDKLERTMNVDACAAILEKMDGPKKQAKRPAKYVFTIKIVEAEDIKACDPNGTSDPYVVLVDEYQKRLHKTRIIMRTLNPRWDESIDVTVSSPLNIIATIWDYDTFGDHDFVGRTSLKLDPLHFSDYLPREFWLDLDTQGRILLRVSMEGERDDIQFYFGKAFRHLKRTERDMVRKITDKLSRQINAALSIDALRRLLGRGYASQVNSFFKRSSTMPITTDADIENALQALFTYFDDNFRTMKETLTDATMVAVMTRLWKEVLMAIEALVVPPVSDKPSDKKALSQRELDVVFKWLKLLYDFFNAQDENGDALGVPAEVLKSPKYHELNTLNFFYFDNTDNLIRTSERMAAATAQRQQQQLQGQMSNNRLSAPPTLGPSLTAGPAFASMGTIRRGKSIMMSRNLGTMRRAKEEKRKEAQADPSDDMILRILRMRPEAAGYLKERHRQKERMAAQAAAAMIVKQSVSQGWNTGARQSFGRGGVPRR

SEQ ID NO: 32460 - DNA, 4828 bp, Muscodor strobelii
  misc_feature: SGI EST ID NO. CUFF.76760.0
  misc_feature: Variant of the nucleotide sequence at SEQ ID NO 32458
gccaaactgccgtagctgccctctccttccttgttattagtgcacccgcaatacgagtttagatcacatggcgacgacaacatagacagaaacccgatgtttccacaaccacacacgatactatacacaaccacagttttgtaatacccgaggggctgcacataccacgtaagatcagccagcaaaaagaaaacccccgttctttacgacgcacagcatacgcataaacgagtgaccaaaaccccatcacattctttcgccaacccgactgcgctcgtgttgcttggatacgaacgacgacaatcgaggctggacctgtttaaagagagctgttatgctcatcctgtgcatacgagccagtccgtaagcctgtcgcctagctgctagcctcgctgccattcgcagacacaccgccgacacagcggcgccgcatcatgtcgacggcgtcgaggaagtcctacctcaaccgccgtctcaacagcgtccagagcacccactccacgcgaagggctcgctcgggctcttcggcgcgccccgcacccgtgagccacgacgatgcctacacctacgccctgcgcgtcgcctacctccactacctcctccagcccaagaccaagcgaaagcaatggcagccggcgccgaagccgcctccgcgcgtttccacctccaacatcggcgacttagtcaaggagttcgtgccggggaactcgtcctccgtcaagctcccccattccttctctgggccgctgtgcaagcgcatggagggggtcatccgtggctctgagcccctccctggctacaacgatgctgcggtcaagaagagtttcgctcaggcctacacggcctttaccgacgccggcttcaagaagagcatcgacaaggagcgcaaggtcgagccgttggtcttgatattctattccaacgccaccaaagcctgccagatgggccatgcagcaggcgacgatgcctggaaactgcttgtcgatcgccacctcgcgctcttcgtgagacttgtcggtgcgatcctgcgtgggcagggcagtgaccagagccggcccgagctcatgtccagactaaccactctcgaaaataagctccttacaaacgaccagaatctttacgccgagtcgggccaggacgctggaaagcacgtcgaggttgtggtgcccttgtcgcacgacgtcaaagacatgcccatggtccaggccgtcgccaagatcttcgggctcgctcactctgacgtgcaaaaccatatcaatgcgcaacggcccaactggaatgaggaggcggcactccgcgatctgaaggcttaccagcatcgactgaactccaatatgtcgggtgttttgcgcagtcaggactttgacttggaggagtcctaccaggactggaaaaaatccgaggcacctttcttgtcggccatgatgatggagatcctcattgcgaagccagaactcgccaagacgtcgtctggcgccagcgcggcgtcagagaagcctttgcctccaaaccccaatgctgctgaggagcaagcgtatgcagaactcggacgagccttgtctgactcgaagaggacgtccatgtacggcatagatccttccttcagcctaagttctatgacactggaggatacgagcagcatcagagctgtcgacgatgcccattatacctttatacccccagacccgcgcgaattcttgaaagtcatagcaaattacgccctcgagtttgatgccatgcatgggagcgacaacgaccagtctccgttctccaagtgttcgacggagcttctgacagaattatgtgttcgctggcgaatacctcaattcactcgtctcgtcgtgtttgttgacgtagctgctcgcagattcactgattctctgtttacttgtgaagacttagcggatgcgttcgaacttgtcaaacagccaccgacagaaaaagagttgaaaaagcctcctcacatttatctttatagcgaaagcctagccacgatagatagaggccgatggactcttgccgattttgcttcttatcagcagaccttacataccatacatgacgcactccttcgagaactttacgatattctcatgcattgttatgaagctaaacccccgggagccgggccgtctgttcacgtcttagaaaatcatatattcaacgatcccagcttttcgcggaacgaagaggatgccttagaatacactaaaatgctccagagtggcatggcagaacaagcggcgaactcgtatcgtggttttcttgatgctgaaatccccccagaccagcatgattggagattcgagcatgtgaagaagcttggcagtctagttgtcaagctttgtgagaaagtacagaagcgatacaagaagaagcctgagatcatgggcgtcaatccgttgacggtgcttgcggaaacaatatttcccagctttgaggccgatgcccatgaccttgtgaagagaattgttcaggtagctcgcgaagctggcgaagagcttccgctgcaagatggattcgacttgtacaaggatcttgtcaatatccgacgtattcaccggtcatcactccccaaccaaccttttacttttgatgtagaagaacttctagtcgagtttgtctggcgatggatacagaacgcagaggagcgagcagaagcctacgtggagcaagcgatcaaccaggaccagtttcagactcggaatcaggactctggccaagctgcgagggatctagatcgacacagtcattccattatcgatatgttccagctgttccaccaaacggcagaccaggtatttcaacttgaatgggacaacgacgtacatcatgcacgctttatgactgctctatccaagatatttgccaacagtattgcccgctactgtgagatcatagaccagcgcttcatcaaagaaatggacactccaagaccagaagagcaagccgctgctgcatccgcctctactacccaaggtagattcatgcaatacgcaaaagatgcgtggaatacgaaagagaaggtggagcctttccagttctatccagagtctttggttaaactaaacaatgttgagtgggctatgcaagagctcgataaacttgagagaactatgaacgtggatgcatgcgctgcaatactagaaaaaatggacgggcctaagaagcaggccaaacgaccagcgaaatatgtctttaccatcaagatcgtcgaggctgaagacatcaaggcttgtgaccccaacgggactagcgatccctacgtcgttcttgtggatgagtaccagaagcgcctgcacaagactcgtattattatgaggactctcaatcctcgatgggacgaatccattgacgtgacagtatccagcccgcttaatattatcgcgacgatttgggactatgacacgttcggcgatcatgactttgtaggaagaacgtctttgaaattagatcctttacacttcagcgactatcttcctagagaattctggctagatttggatacccaagggagaattcttctccgcgtgagtatggaaggggagcgagatgatatacaattctattttggcaaggcgttccggcatttgaagcgaaccgaacgagacatggttcgcaaaattacggacaagctgtcgaggcaaatcaatgctgccttgtcgatcgatgcactacgcaggcttctaggccgtggttacgcttcgcaggtcaactcgttcttcaagcgtagttctaccatgcctataactaccgatgcggacattgagaatgccttgcaagctctctttacgtacttcgatgacaactttcgtacgatgaaagagactttgaccgacgctacgatggtcgcagtgatgacacgtctgtggaaagaagttctcatggcaatcgaggcgctcgttgtaccgcctgtttccgataagccatcggacaagaaagccctgtcccaacgcgaactggacgtggtgttcaaatggctaaagttactttacgattttttcaacgctcaggacgagaatggtgacgctctgggtgtcccagccgaagtcctcaagtcgcctaagtatcacgaactcaacacactcaacttcttttactttgataataccgataatcttatacggacatcggagcgcatggccgccgctacggcgcagcggcaacagcaacagctccaagggcagatgagtaacaatcgactctcggccccgccgactttaggtccgtctttgacggccggcccggcatttgcaagcatgggcacgattcgccgtggcaagagcatcatgatgagccgcaatctcggaacgatgcgccgtgccaaggaagagaagcgcaaggaggcacaagccgatccctccgatgatatgatcctgcgcattctacgcatgcggcctgaagctgccggatatctcaaggagagacatcgtcagaaggagcgcatggctgctcaggctgctgcggcgatgatagtgaagcagagcgtcagccagggttggaacacgggcgcccgccagagctttggccgtggcggtgtgcctagacgctagattcgctggtcatgctaaggtaatcaaaggctaaaggacagagtgagtttatgagttcggtattggggacttggctgggatgatggagcgttggtgaggaattttcttttgcatgatgttttcgtgcttttatcgtcgttctctctgcgagaggctggcaggcgttgctcatcgttctgttggcttgcgatgtccccaagcatatggatctttatgattttattgttaatagctcgataccctctcgaagttaattaggcatttctacatgggac

SEQ ID NO: 32461 - DNA, 3288 bp, Muscodor strobelii
  misc_feature: SGI cDNA ID NO. 571187
  misc_feature: Reduced expression when VOC is produced
  misc_feature: Encodes the peptide sequence at SEQ ID NO 32462
atgggtgtcgtgagcagccgtcctgacgacggggctgccctctacctgagggatcagaagcgcttatccatctcctctctcgtcatcacctgcccgcgaaggcgcacaaccatcaccgtcgcccccaactcatttccagctactcgcgccacagccacgcgcatctctggcgatactagtccgcccgaattcatacaggatcccgagccttcatctgtccccaacttcctcctcaagctcaacaacgacgacgacctcgtcttcacttttacatttgtcgtccgccaggatgacagctgtgcggcaagcgacacgcagatcaatggtctgacgtacgtctatgcctcgacggggcgcgaagtcgagaacctagtcacccgcgagtttcacgcagatccgaatctccacaagaacgccaacgtcgagcttgtcggtgactacacaaccggcggcagcccctccatatccttcgagtggtcgtggaaatggagacctccgagagtcatcgaggacaggggcggcggctggaagaatgtttgcagcttcgtcgagtacgatgcgagagcccaccgactcgacactcttgccacattctcattctgggtcgcaaacacgtcaacctttggtagccagcccaactcgccttctccgtttcaacttgcagtaccccccaagatccgagttccgtctgcacagtctaccgacacgcgcatcagcgagcaagacgagccggggtcgccgctcaacctccagcacgatgtccaagtcgtggctcccgtcgtatctccaaacccgagagaatctgtgaggctggacgtggcgtcccgcctcggcgacgatatgaccgtgggcgacgatggccctgtcttcagggctaccatcaaggcactcgagcagaagacgggcaacatgcggacccatatgaagaaagtattgaagagggcggaacaggcgcacaccgcccaaaacgaggccaacgaggcctacagggccttcatggacgcgctcaaggaggcctcggtgaccaacgccaacgcggttcagcctgccattgaacactactttgacaagatcgcgcgggagatcctcggctacgagagagccaatacaactaatctgcagaagactatcatcgaaccgatcagcaaattatatacctacgatatcaaacaggcagaatccaagaagcgcgatttcgaagaggagagcaaagactattatgcctacgtctctcgctatcttggccaacggcaagactcggtcaagactaagaagctggccgaaagcgacaccaagtaccagaccaaaagaaggaacttcgagctcaaaagattcgattattcctcctttatgcaggacttgcatggtggtcgcaaggagcaggaggtcttgtctcacttgacaaagtatgcagatacacaggccaaaagcttcatgtccaccgccaagaagatcgagggcctgcttccagaacttgaggctctaacctcagaggtgcaaggcgccgacaaagagtatcagtatcaaagacgcgagagggaagaaaagagacgcgtgttggaaaagagcaatctccagtataatgagccagagaatgcagtctcatccaacaatgctctagcttcgaccaacgccaatggtgttcaatatgtatcagattccgagctaggtagggccgatagtaccggttcgcagctcaaggcaactacaacaggtaattcgacttcgatggcgtcgacagcgacggctgttgagctgtcaagatcgccgggcagccttggtcaggggtcgatgaacagcccgctgcaaagccagaagtttaagggtatccgggatcttgaggaaagagacctgtctcaacttacccttaccgatcgtgactctacacaccgcaaggaaggtcttctttgggcgcttaaccgccccggcactcacgtcgacccattgtccttgaacaagcaaggttggcacaaattctgggttgtgttggaccagggcaaattgtccgagtatagtaactggaagcagaggttggacctacatatggaacccatcgatctacgcatggcctcagtccgcgaagctcgaaatgcggagcgaagattctgcttcgaggtcattacgccacagtacaaaagagtatatcaggcgacgtcaggagaggatatgaacagttggattttgtcaatcaacaacgccctccagagcgcagtggaaggacatgggctcaaagacataccaacttcttcgggtgaatcgcatagcattaagagggatatcggttctatcctcactggcaagagcacttctttgaaccacggatcttatggaggccatcagtccgcaagttccattcctccgtcacggcgcaccacagtaggagctagacctgcaacacgaccagtcagcagtagttatgacgacagtcccgataaactactgcaacgcattcgcgatagcgaccaaggcaactgctggtgtgcggactgcggcagtggctctaaagtagaatgggtctctatcaacctcgccatcatactctgcatcgagtgtggtggtattcatcgctcacttggcacccatatcagcaaagtccggtccttaacactagacatcacgtcattcacctacgatatcatcgagctgctgctgcttgtcgggaatcgggtctctaacatggtctgggaagccaaattagatccaagtctgaagccaggagcacaagccacacgtgaacaacgtttgaaatttatcacggcgaaatacgtcgacaaggcctttgtggaacctatctcggctacattgtcgcgatacgccacggccgacgaaaccctcctcgctgcaattaaacggaatgaaatacagcaagttatatatgctctggcgctgaaggcgaatccaaatgtcctggataaagtccgaggcacccatcccatcttcttggcgttagcagcggcagatcccgcctcgccctcgcccaccgctaatcaacctggacggacggatccggattcacggacggtggcatttcctgtggcggaggtgctgatacaaaatggtgccgaagtacccactacgatgcccgcgtttccgcttggccgtaatgcccagatctacatcaacgagaagcgcggccgccttgctgccgtagaagcttcgggcatgtctctgcctaatcatctcagtcatagccccagcgagcgtctccagcgcgataaggactcgcggttacagaagcgtatcagtgcaggtgggcgcttagccaaatcgcctattcccgaacggtag

SEQ ID NO: 32462 - protein, 1095 aa, Muscodor strobelii
  misc_feature: SGI Peptide ID NO. 571187
  misc_feature (630)..(735): Pfam Id: PF00169 Pfam Desc: PH domain
  misc_feature (811)..(935): Pfam Id: PF01412 Pfam Desc: GTPase activating protein for Arf
  misc_feature (1)..(1095): NCBI GI: 227121718 Blast Desc: centaurin beta [Cadophora finlandica]
  misc_feature (1)..(1095): NCBI GI: 156056689 Blast Desc: SS1G_04075 [Sclerotinia sclerotiorum 1980] gi|154701861|gb|EDO01600.1| SS1G_04075 [Sclerotinia sclerotiorum 1980]
  misc_feature (1)..(1095): NCBI GI: 256732634 Blast Desc: [Nectria haematococca mpVI 77-13-4]
  misc_feature (1)..(1095): NCBI GI: 46125485 Blast Desc: FG07120.1 [Gibberella zeae PH-1]
  misc_feature (1)..(1095): NCBI GI: 261356048 Blast Desc: csx2 [Verticillium albo-atrum VaMs.102]
  misc_feature (67)..(1095): NCBI GI: 154323908 Blast Desc: BC1G_00353 [Botryotinia fuckeliana B05.10] gi|150842582|gb|EDN17775.1| BC1G_00353 [Botryotinia fuckeliana B05.10]
  misc_feature (1)..(1095): NCBI GI: 116181676 Blast Desc: CHGG_01466 [Chaetomium globosum CBS 148.51] gi|88185763|gb|EAQ93231.1| CHGG_01466 [Chaetomium globosum CBS 148.51]
  misc_feature (74)..(1095): NCBI GI: 145613490 Blast Desc: MGG_01597 [Magnaporthe grisea 70-15] gi|145020558|gb|EDK04687.1| MGG_01597 [Magnaporthe grisea 70-15]
  misc_feature (1)..(1095): NCBI GI: 171696166 Blast Desc: protein product [Podospora anserina] gi|170948325|emb|CAP60489.1| protein product [Podospora anserina]
  misc_feature (1)..(1088): NCBI GI: 240273237 Blast Desc: csx2 protein [Ajellomyces capsulatus H143]
  misc_feature: Useful for introducing or modulating the production of volatile compounds
MGVVSSRPDDGAALYLRDQKRLSISSLVITCPRRRTTITVAPNSFPATRATATRISGDTSPPEFIQDPEPSSVPNFLLKLNNDDDLVFTFTFVVRQDDSCAASDTQINGLTYVYASTGREVENLVTREFHADPNLHKNANVELVGDYTTGGSPSISFEWSWKWRPPRVIEDRGGGWKNVCSFVEYDARAHRLDTLATFSFWVANTSTFGSQPNSPSPFQLAVPPKIRVPSAQSTDTRISEQDEPGSPLNLQHDVQVVAPVVSPNPRESVRLDVASRLGDDMTVGDDGPVFRATIKALEQKTGNMRTHMKKVLKRAEQAHTAQNEANEAYRAFMDALKEASVTNANAVQPAIEHYFDKIAREILGYERANTTNLQKTIIEPISKLYTYDIKQAESKKRDFEEESKDYYAYVSRYLGQRQDSVKTKKLAESDTKYQTKRRNFELKRFDYSSFMQDLHGGRKEQEVLSHLTKYADTQAKSFMSTAKKIEGLLPELEALTSEVQGADKEYQYQRREREEKRRVLEKSNLQYNEPENAVSSNNALASTNANGVQYVSDSELGRADSTGSQLKATTTGNSTSMASTATAVELSRSPGSLGQGSMNSPLQSQKFKGIRDLEERDLSQLTLTDRDSTHRKEGLLWALNRPGTHVDPLSLNKQGWHKFWVVLDQGKLSEYSNWKQRLDLHMEPIDLRMASVREARNAERRFCFEVITPQYKRVYQATSGEDMNSWILSINNALQSAVEGHGLKDIPTSSGESHSIKRDIGSILTGKSTSLNHGSYGGHQSASSIPPSRRTTVGARPATRPVSSSYDDSPDKLLQRIRDSDQGNCWCADCGSGSKVEWVSINLAIILCIECGGIHRSLGTHISKVRSLTLDITSFTYDIIELLLLVGNRVSNMVWEAKLDPSLKPGAQATREQRLKFITAKYVDKAFVEPISATLSRYATADETLLAAIKRNEIQQVIYALALKANPNVLDKVRGTHPIFLALAAADPASPSPTANQPGRTDPDSRTVAFPVAEVLIQNGAEVPTTMPAFPLGRNAQIYINEKRGRLAAVEASGMSLPNHLSHSPSERLQRDKDSRLQKRISAGGRLAKSPIPER

SEQ ID NO: 32463 - DNA, 5560 bp, Muscodor strobelii
  misc_feature: SGI EST ID NO. CUFF.76996.0
  misc_feature: Variant of the nucleotide sequence at SEQ ID NO 32461
atcgagtgctccctggtaagtaggaccagcagagtcgcagcagtagtggggagtcaccgatgtatggtgttgcctctgcctcaaggctgttgcaacttgcgagctgtgtcgacatattcacattcacattcacattcacattcacatacatgcacatacatccctcaccctcgacctaccttactctcttgtaccctcttgtcgcattcatatgctgcattcacatcttcatctctacctcgcatctctgcatcgctgccgcagctttactcggcccatctcttaattcccctctttgtgtccccatctgcgcgccccgcggcctggccgtactgttgccgccatgggtgtcgtgagcagccgtcctgacgacggggctgccctctacctgagggatcagaagcgcttatccatctcctctctcgtcatcacctgcccgcgaaggcgcacaaccatcaccgtcgcccccaactcatttccagctactcgcgccacagccacgcgcatctctggcgatactagtccgcccgaattcatacaggatcccgagccttcatctgtccccaacttcctcctcaagctcaacaacgacgacgacctcgtcttcacttttacatttgtcgtccgccaggatgacagctgtgcggcaagcgacacgcagatcaatggtctgacgtacgtctatgcctcgacggggcgcgaagtcgagaacctagtcacccgcgagtttcacgcagatccgaatctccacaagaacgccaacgtcgagcttgtcggtgactacacaaccggcggcagcccctccatatccttcgagtggtcgtggaaatggagacctccgagagtcatcgaggacaggggcggcggctggaagaatgtttgcagcttcgtcgagtacgatgcgagagcccaccgactcgacactcttgccacattctcattctgggtcgcaaacacgtcaacctttggtagccagcccaactcgccttctccgtttcaacttgcagtaccccccaagatccgagttccgtctgcacagtctaccgacacgcgcatcagcgagcaagacgagccggggtcgccgctcaacctccagcacgatgtccaagtcgtggctcccgtcgtatctccaaacccgagagaatctgtgaggctggacgtggcgtcccgcctcggcgacgatatgaccgtgggcgacgatggccctgtcttcagggctaccatcaaggcactcgagcagaagacgggcaacatgcggacccatatgaagaaagtattgaagagggcggaacaggcgcacaccgcccaaaacgaggccaacgaggcctacagggccttcatggacgcgctcaaggaggcctcggtgaccaacgccaacgcggttcagcctgccattgaacactactttgacaagatcgcgcgggagatcctcggctacgagagagccaatacaactaatctgcagaagactatcatcgaaccgatcagcaaattatatacctacgatatcaaacaggcagaatccaagaagcgcgatttcgaagaggagagcaaagactattatgcctacgtctctcgctatcttggccaacggcaagactcggtcaagactaagaagctggccgaaagcgacaccaagtaccagaccaaaagaaggaacttcgagctcaaaagattcgattattcctcctttatgcaggacttgcatggtggtcgcaaggagcaggaggtcttgtctcacttgacaaagtatgcagatacacaggccaaaagcttcatgtccaccgccaagaagatcgagggcctgcttccagaacttgaggctctaacctcagaggtgcaaggcgccgacaaagagtatcagtatcaaagacgcgagagggaagaaaagagacgcgtgttggaaaagagcaatctccagtataatgagccagagaatgcagtctcatccaacaatgctctagcttcgaccaacgccaatggtgttcaatatgtatcagattccgagctaggtagggccgatagtaccggttcgcagctcaaggcaactacaacaggtaattcgacttcgatggcgtcgacagcgacggctgttgagctgtcaagatcgccgggcagccttggtcaggggtcgatgaacagcccgctgcaaagccagaagtttaagggtatccgggatcttgaggaaagagacctgtctcaacttacccttaccgatcgtgactctacacaccgcaaggaaggtcttctttgggcgcttaaccgccccggcactcacgtcgacccattgtccttgaacaagcaaggttggcacaaattctgggttgtgttggaccagggcaaattgtccgagtatagtaactggaagcagaggttggacctacatatggaacccatcgatctacgcatggcctcagtccgcgaagctcgaaatgcggagcgaagattctgcttcgaggtcattacgccacagtacaaaagagtatatcaggcgacgtcaggagaggatatgaacagttggattttgtcaatcaacaacgccctccagagcgcagtggaaggacatgggctcaaagacataccaacttcttcgggtgaatcgcatagcattaagagggatatcggttctatcctcactggcaagagcacttctttgaaccacggatcttatggaggccatcagtccgcaagttccattcctccgtcacggcgcaccacagtaggagctagacctgcaacacgaccagtcagcagtagttatgacgacagtcccgataaactactgcaacgcattcgcgatagcgaccaaggcaactgctggtgtgcggactgcggcagtggctctaaagtagaatgggtctctatcaacctcgccatcatactctgcatcgagtgtggtggtattcatcgctcacttggcacccatatcagcaaagtccggtccttaacactagacatcacgtcattcacctacgatatcatcgagctgctgctgcttgtcgggaatcgggtctctaacatggtctgggaagccaaattagatccaagtctgaagccaggagcacaagccacacgtgaacaacgtttgaaatttatcacggcgaaatacgtcgacaaggcctttgtggaacctatctcggctacattgtcgcgatacgccacggccgacgaaaccctcctcgctgcaattaaacggaatgaaatacagcaagttatatatgctctggcgctgaaggcgaatccaaatgtcctggataaagtccgaggcacccatcccatcttcttggcgttagcagcggcagatcccgcctcgccctcgcccaccgctaatcaacctggacggacggatccggattcacggacggtggcatttcctgtggcggaggtgctgatacaaaatggtgccgaagtacccactacgatgcccgcgtttccgcttggccgtaatgcccagatctacatcaacgagaagcgcggccgccttgctgccgtagaagcttcgggcatgtctctgcctaatcatctcagtcatagccccagcgagcgtctccagcgcgataaggactcgcggttacagaagcgtatcagtgcaggtgggcgcttagccaaatcgcctattcccgaacggtagagacgagggaaatcgaatacgtcttcaggctcgacgccactaacttcacctccacattctcccactgtgtgttgcacaccgcaaatatcgggtcagagtgactcaagcaattcttcatccccttccgaacgatagaaacgacgatcggatcgcatgcttctcattatacccttcaatatcacagcgccatcttgccttccgaggttgtgcactttcagatagcgtattgcatcacccttaccaagttctacagttgactcggtagcagtgttcgccatttgagtcgattggtcgcttacgtatatagacattgtcatgatgctgcggctttatttgtcgtccccctagttctcacaggtgtacggttgtcaggcatccctggattgacttgccagaggcattgtgcatcttcggtgttggttttatgtttcttaggttatgatgaatattgtcataagcccgggttgttggtttcgcacggaaggcccaagaatcctagtattggggctccttcaggttatcttatgagcagatttcgcatatatccacttcggaagtagtcttttgacgacggaagactgaacgtctccaacatcaccacctggttatgagattatgaggaacgtttttttcttccttcctcattggcggtagacactgctttgtatcaataggatcgagtaatttataatcgcgtaccacgaatataacatcgtgatactggatattgttgagtctttagatgctgtgaaaaacttattgcgacttgctgctcgacaagtacctataccaccagatcgtataggggagtggatcatatgagaaaagtactttaagtgcatgtttagtttatctgctgcgacgttgcacatactcgctatatgaacgcctgctcatcatgaagaagcccgtttctagtcctaatatccgaagatacatgtagctcacactcgcagccagacgccatatagtctgcccgttcttgagaaccattcaacgaaacgtcgtaggatcctctatccggctcaattccctcaagtctcgtcgcaagtcccctcctccttacgccgtagccgtaccctcagcatcagcagcaagcttctcaataagcttcttatgaatccccggccaattattctcacactggcccttcacaatgcccataacgagtctcgaggaattaataacaatatcctcgaccaattccagtgcgcctcctttctccttcacgctccaggtagtctccatgacgacgcccatgggcgagcggatccgaacccacatcccgctctcgtggtccacgaattcttccgtggaaactacgttggacgaccacacggggttcggcatgtggtctactacctcgtagagagagactaccggcccatcgggcttcttggacgttgtggggaggggggagacgtgggatgggatcttgaagtgtttcactgcggcggggacggattttgggtctgatgaggtttcggtcggctgagagagaactttgtgagacccgtagtgcggatcgcagtgtaggaagaactcgtggtcgtgcaggagcgttacggcggcggatttgctgacgtttgaggggatgggcgatgtgtttgttactttggaggtgctgctgaagactagatcatttgttagtttcgagacagtcaagtttattgcgtctaatggaggaaattggcctagagcgaagaccagctgtcgctttgaatctctcgagtttgagttgtcgcggaaagcttgtgaaggaggggcaaagttaaatcgacttacacgacatcttgacagagatctaagaaagtaaatccgcctctataagttccgttctatctctcaagaccaacttaaaaatcaagtttcgaatcaaatctagcgaatgtctttcaggaatactcaagcatagaacacgtcttcttc

SEQ ID NO: 32464 - DNA, 1122 bp, Muscodor strobelii
  misc_feature: SGI cDNA ID NO. 571188
  misc_feature: Encodes the peptide sequence at SEQ ID NO 32465
atgaacagttggattttgtcaatcaacaacgccctccagagcgcagtggaaggacatgggctcaaagacataccaacttcttcgggtgaatcgcatagcattaagagggatatcggttctatcctcactggcaagagcacttctttgaaccacggatcttatggaggccatcagtccgcaagttccattcctccgtcacggcgcaccacagtaggagctagacctgcaacacgaccagtcagcagtagttatgacgacagtcccgataaactactgcaacgcattcgcgatagcgaccaaggcaactgctggtgtgcggactgcggcagtggctctaaagtagaatgggtctctatcaacctcgccatcatactctgcatcgagtgtggtggtattcatcgctcacttggcacccatatcagcaaagtccggtccttaacactagacatcacgtcattcacctacgatatcatcgagctgctgctgcttgtcgggaatcgggtctctaacatggtctgggaagccaaattagatccaagtctgaagccaggagcacaagccacacgtgaacaacgtttgaaatttatcacggcgaaatacgtcgacaaggcctttgtggaacctatctcggctacattgtcgcgatacgccacggccgacgaaaccctcctcgctgcaattaaacggaatgaaatacagcaagttatatatgctctggcgctgaaggcgaatccaaatgtcctggataaagtccgaggcacccatcccatcttcttggcgttagcagcggcagatcccgcctcgccctcgcccaccgctaatcaacctggacggacggatccggattcacggacggtggcatttcctgtggcggaggtgctgatacaaaatggtgccgaagtacccactacgatgcccgcgtttccgcttggccgtaatgcccagatctacatcaacgagaagcgcggccgccttgctgccgtagaagcttcgggcatgtctctgcctaatcatctcagtcatagccccagcgagcgtctccagcgcgataaggactcgcggttacagaagcgtatcagtgcaggtgggcgcttagccaaatcgcctattcccgaacggtag

SEQ ID NO: 32465 - protein, 373 aa, Muscodor strobelii
  misc_feature: SGI Peptide ID NO. 571188
  misc_feature (89)..(213): Pfam Id: PF01412 Pfam Desc: GTPase activating protein for Arf
  misc_feature (1)..(373): NCBI GI: 154323908 Blast Desc: BC1G_00353 [Botryotinia fuckeliana B05.10] gi|150842582|gb|EDN17775.1| BC1G_00353 [Botryotinia fuckeliana B05.10]
  misc_feature (1)..(373): NCBI GI: 227121718 Blast Desc: centaurin beta [Cadophora finlandica]
  misc_feature (1)..(373): NCBI GI: 145613490 Blast Desc: MGG_01597 [Magnaporthe grisea 70-15] gi|145020558|gb|EDK04687.1| MGG_01597 [Magnaporthe grisea 70-15]
  misc_feature (1)..(373): NCBI GI: 261356048 Blast Desc: csx2 [Verticillium albo-atrum VaMs.102]
  misc_feature (1)..(373): NCBI GI: 156056689 Blast Desc: SS1G_04075 [Sclerotinia sclerotiorum 1980] gi|154701861|gb|EDO01600.1| SS1G_04075 [Sclerotinia sclerotiorum 1980]
  misc_feature (1)..(373): NCBI GI: 46125485 Blast Desc: FG07120.1 [Gibberella zeae PH-1]
  misc_feature (1)..(373): NCBI GI: 256732634 Blast Desc: [Nectria haematococca mpVI 77-13-4]
  misc_feature (1)..(373): NCBI GI: 171696166 Blast Desc: protein product [Podospora anserina] gi|170948325|emb|CAP60489.1| protein product [Podospora anserina]
  misc_feature (1)..(373): NCBI GI: 164427677 Blast Desc: NCU02830 [Neurospora crassa OR74A] gi|157071840|gb|EAA34454.2| NCU02830 [Neurospora crassa OR74A]
  misc_feature (1)..(373): NCBI GI: 11359444 Blast Desc: NCU02830 [Neurospora crassa OR74A] gi|157071840|gb|EAA34454.2| NCU02830 [Neurospora crassa OR74A]
MNSWILSINNALQSAVEGHGLKDIPTSSGESHSIKRDIGSILTGKSTSLNHGSYGGHQSASSIPPSRRTTVGARPATRPVSSSYDDSPDKLLQRIRDSDQGNCWCADCGSGSKVEWVSINLAIILCIECGGIHRSLGTHISKVRSLTLDITSFTYDIIELLLLVGNRVSNMVWEAKLDPSLKPGAQATREQRLKFITAKYVDKAFVEPISATLSRYATADETLLAAIKRNEIQQVIYALALKANPNVLDKVRGTHPIFLALAAADPASPSPTANQPGRTDPDSRTVAFPVAEVLIQNGAEVPTTMPAFPLGRNAQIYINEKRGRLAAVEASGMSLPNHLSHSPSERLQRDKDSRLQKRISAGGRLAKSPIPER

SEQ ID NO: 32466 - DNA, 5560 bp, Muscodor strobelii; identical to SEQ ID NO: 32463
  misc_feature: SGI EST ID NO. CUFF.76996.0
  misc_feature: Variant of the nucleotide sequence at SEQ ID NO 32464

SEQ ID NO: 32467 - DNA, 579 bp, Muscodor strobelii
  misc_feature: SGI cDNA ID NO. 571189
  misc_feature: Encodes the peptide sequence at SEQ ID NO 32468
atgtcgttcttcagcagcacctccaaagtaacaaacacatcgcccatcccctcaaacgtcagcaaatccgccgccgtaacgctcctgcacgaccacgagttcttcctacactgcgatccgcactacgggtctcacaaagttctctctcagccgaccgaaacctcatcagacccaaaatccgtccccgccgcagtgaaacacttcaagatcccatcccacgtctcccccctccccacaacgtccaagaagcccgatgggccggtagtctctctctacgaggtagtagaccacatgccgaaccccgtgtggtcgtccaacgtagtttccacggaagaattcgtggaccacgagagcgggatgtgggttcggatccgctcgcccatgggcgtcgtcatggagactacctggagcgtgaaggagaaaggaggcgcactggaattggtcgaggatattgttattaattcctcgagactcgttatgggcattgtgaagggccagtgtgagaataattggccggggattcataagaagcttattgagaagcttgctgctgatgctgagggtacggctacggcgtaa

SEQ ID NO: 32468 - protein, 192 aa, Muscodor strobelii
  misc_feature: SGI Peptide ID NO. 571189
  misc_feature (3)..(182): NCBI GI: 256735322 Blast Desc: NECHADRAFT_102381 [Nectria haematococca mpVI 77-13-4]
  misc_feature (2)..(183): NCBI GI: 261356162 Blast Desc: conserved [Verticillium albo-atrum VaMs.102]
  misc_feature (2)..(182): NCBI GI: 39958920 Blast Desc: [Magnaporthe grisea 70-15] gi|145013242|gb|EDJ97883.1| [Magnaporthe grisea 70-15]
  misc_feature (28)..(185): NCBI GI: 171696340 Blast Desc: protein product [Podospora anserina] gi|170948412|emb|CAP60576.1| protein product [Podospora anserina]
  misc_feature (26)..(187): NCBI GI: 116180922 Blast Desc: CHGG_01089 [Chaetomium globosum CBS 148.51] gi|88185386|gb|EAQ92854.1| CHGG_01089 [Chaetomium globosum CBS 148.51]
  misc_feature (1)..(185): NCBI GI: 169623122 Blast Desc: SNOG_14790 [Phaeosphaeria nodorum SN15] gi|160704919|gb|EAT77982.2| SNOG_14790 [Phaeosphaeria nodorum SN15]
  misc_feature (1)..(184): NCBI GI: 39976333 Blast Desc: [Magnaporthe grisea 70-15] gi|145011846|gb|EDJ96502.1| [Magnaporthe grisea 70-15]
  misc_feature (3)..(184): NCBI GI: 189188356 Blast Desc: PTRG_00184 [Pyrenophora tritici-repentis Pt-1C-BFP] gi|187972123|gb|EDU39622.1| PTRG_00184 [Pyrenophora tritici-repentis Pt-1C-BFP]
  misc_feature (18)..(188): NCBI GI: 39970845 Blast Desc: [Magnaporthe grisea 70-15] gi|149210349|ref|XP_001522549.1| MGCH7_ch7g652 [Magnaporthe grisea 70-15] gi|86196607|gb|EAQ71245.1| MGCH7_ch7g652 grisea
  misc_feature (1)..(182): NCBI GI: 154304244 Blast Desc: [Botryotinia fuckeliana B05.10] gi|150854194|gb|EDN29386.1| [Botryotinia fuckeliana B05.10]
MSFFSSTSKVTNTSPIPSNVSKSAAVTLLHDHEFFLHCDPHYGSHKVLSQPTETSSDPKSVPAAVKHFKIPSHVSPLPTTSKKPDGPVVSLYEVVDHMPNPVWSSNVVSTEEFVDHESGMWVRIRSPMGVVMETTWSVKEKGGALELVEDIVINSSRLVMGIVKGQCENNWPGIHKKLIEKLAADAEGTATA

SEQ ID NO: 32469 - DNA, 5737 bp, Muscodor strobelii
  misc_feature: SGI EST ID NO. CUFF.76997.1
  misc_feature: Variant of the nucleotide sequence at SEQ ID NO 32467
cgaagaagacgtgttctatgcttgagtattcctgaaagacattcgctagatttgattcgaaacttgatttttaagttggtcttgagagatagaacggaacttatagaggcggatttactttcttagatctctgtcaagatgtcgttcttcagcagcacctccaaagtaacaaacacatcgcccatcccctcaaacgtcagcaaatccgccgccgtaacgctcctgcacgaccacgagttcttcctacactgcgatccgcactacgggtctcacaaagttctctctcagccgaccgaaacctcatcagacccaaaatccgtccccgccgcagtgaaacacttcaagatcccatcccacgtctcccccctccccacaacgtccaagaagcccgatgggccggtagtctctctctacgaggtagtagaccacatgccgaaccccgtgtggtcgtccaacgtagtttccacggaagaattcgtggaccacgagagcgggatgtgggttcggatccgctcgcccatgggcgtcgtcatggagactacctggagcgtgaaggagaaaggaggcgcactggaattggtcgaggatattgttattaattcctcgagactcgttatgggcattgtgaagggccagtgtgagaataattggccggggattcataagaagcttattgagaagcttgctgctgatgctgagggtacggctacggcgtaaggaggaggggacttgcgacgagacttgagggaattgagccggatagaggatcctacgacgtttcgttgaatggttctcaagaacgggcagactatatggcgtctggctgcgagtgtgagctacatgtatcttcggatattaggactagaaacgggcttcttcatgatgagcaggcgttcatatagcgagtatgtgcaacgtcgcagcagataaactaaacatgcacttaaagtacttttctcatatgatccactcccctatacgatctggtggtataggtacttgtcgagcagcaagtcgcaataagtttttcacagcatctaaagactcaacaatatccagtatcacgatgttatattcgtggtacgcgattataaattactcgatcctattgatacaaagcagtgtctaccgccaatgaggaaggaagaaaaaaacgttcctcataatctcataaccaggtggtgatgttggagacgttcagtcttccgtcgtcaaaagactacttccgaagtggatatatgcgaaatctgctcataagataacctgaaggagccccaatactaggattcttgggccttccgtgcgaaaccaacaacccgggcttatgacaatattcatcataacctaagaaacataaaaccaacaccgaagatgcacaatgcctctggcaagtcaatccagggatgcctgacaaccgtacacctgtgagaactagggggacgacaaataaagccgcagcatcatgacaatgtctatatacgtaagcgaccaatcgactcaaatggcgaacactgctaccgagtcaactgtagaacttggtaagggtgatgcaatacgctatctgaaagtgcacaacctcggaaggcaagatggcgctgtgatattgaagggtataatgagaagcatgcgatccgatcgtcgtttctatcgttcggaaggggatgaagaattgcttgagtcactctgacccgatatttgcggtgtgcaacacacagtgggagaatgtggaggtgaagttagtggcgtcgagcctgaagacgtattcgatttccctcgtctctaccgttcgggaataggcgatttggctaagcgcccacctgcactgatacgcttctgtaaccgcgagtccttatcgcgctggagacgctcgctggggctatgactgagatgattaggcagagacatgcccgaagcttctacggcagcaaggcggccgcgcttctcgttgatgtagatctgggcattacggccaagcggaaacgcgggcatcgtagtgggtacttcggcaccattttgtatcagcacctccgccacaggaaatgccaccgtccgtgaatccggatccgtccgtccaggttgattagcggtgggcgagggcgaggcgggatctgccgctgctaacgccaagaagatgggatgggtgcctcggactttatccaggacatttggattcgccttcagcgccagagcatatataacttgctgtatttcattccgtttaattgcagcgaggagggtttcgtcggccgtggcgtatcgcgacaatgtagccgagataggttccacaaaggccttgtcgacgtatttcgccgtgataaatttcaaacgttgttcacgtgtggcttgtgctcctggcttcagacttggatctaatttggcttcccagaccatgttagagacccgattcccgacaagcagcagcagctcgatgatatcgtaggtgaatgacgtgatgtctagtgttaaggaccggactttgctgatatgggtgccaagtgagcgatgaataccaccacactcgatgcagagtatgatggcgaggttgatagagacccattctactttagagccactgccgcagtccgcacaccagcagttgccttggtcgctatcgcgaatgcgttgcagtagtttatcgggactgtcgtcataactactgctgactggtcgtgttgcaggtctagctcctactgtggtgcgccgtgacggaggaatggaacttgcggactgatggcctccataagatccgtggttcaaagaagtgctcttgccagtgaggatagaaccgatatccctcttaatgctatgcgattcacccgaagaagttggtatgtctttgagcccatgtccttccactgcgctctggagggcgttgttgattgacaaaatccaactgttcatatcctctcctgacgtcgcctgatatactcttttgtactgtggcgtaatgacctcgaagcagaatcttcgctccgcatttcgagcttcgcggactgaggccatgcgtagatcgatgggttccatatgtaggtccaacctctgcttccagttactatactcggacaatttgccctggtccaacacaacccagaatctagtacagttagcgcatcaggatatccattatttagtgactgatttgcttacttgtgccaaccttgcttgttcaaggacaatgggtcgacgtgagtgccggggcggttaagcgcccaaagaagaccttccttgcggtgtgtagagtcacgatcggtaagggtaagttgagacaggtctctttcctcaagatcccggatacccttaaacttctggctttgcagcgggctgttcatcgacccctgaccaaggctgcccggcgatcttgacagctcaacagccgtcgctgtcgacgccatcgaagtcgaattacctgttgtagttgccttgagctgcgaaccggtactatcggccctacctagctcggaatctgatacatattgaacaccattggcgttggtcgaagctagagcattgttggatgagactgcattctctggctcattatactggagattgctcttttccaacacgcgtctcttttcttccctctcgcgtctttgatactgatactctttgtcggcgccttgcacctctgaggttagagcctcaagttctggaagcaggccctcgatcttcttggcggtggacatgaagcttttggcctgtgtatctgcatactttgtcaagtgagacaagacctcctgctccttgcgaccaccatgcaagtcctgcataaaggaggaataatcgaatcttttgagctcgaagttccttcttttggtctggtacttggtgtcgctttcggccagcttcttagtcttgaccgagtcttgccgttggccaagatagcgagagacgtaggcataatagtctttgctctcctcttcgaaatcgcgcttcttggattctgcctgtttgatatcgtaggtatataatttgctgatcggttcgatgatagtcttctgcagattagttgtattggctctctcgtagccgaggatctcccgcgcgatcttgtcaaagtagtgttcaatggcaggctgaaccgcgttggcgttggtcaccgaggcctccttgagcgcgtccatgaaggccctgtaggcctcgttggcctcgttttgggcggtgtgcgcctgttccgccctcttcaatactttcttcatatgggtccgcatgttgcccgtcttctgctcgagtgccttgatggtagccctgaagacagggccatcgtcgcccacggtcatatcgtcgccgaggcgggacgccacgtccagcctcacagattctctcgggtttggagatacgacgggagccacgacttggacatcgtgctggaggttgagcggcgaccccggctcgtcttgctcgctgatgcgcgtgtcggtagactgtgcagacggaactcggatcttggggggtactgcaagttgaaacggagaaggcgagttgggctggctaccaaaggttgacgtgtctaccaggaatgttagtcgtgctggcagggccgatttgcgcaggtggagtcgaactcacttgcgacccagaatgagaatgtggcaagagtgtcgagtcggtgggctctcgcatcgtactcgacgaactattcagatcagtaggcgcctggcatgcacaaattcgagggtgcacgacatacgctgcaaacattcttccagccgccgcccctgtcctcgatgactctcggaggtctccatttccacgaccactcgaaggatatggaggggctgccgccggttgtgtagtcaccgacaagctcgacgttggcgttcttgtggagattcggatctgcgtgaaactcgcgggtgactaggttctcgacttcgcgccccgtcgaggcatagacgtacgtcagaccattgatctgcgtgtcgcttgccgcacagctgtcatcctggcggacgacaaatgtaaaagtgaagacgaggtcgtcgtcgttgttgagcttgaggaggaagttggggacagatgaaggctcgggatcctataggggcacagtcagaacatgccagaatggctcgcaagtgtctggctagtagtgttgaggctgacctgtatgaattcgggcggactagtatcgccagagatgcgcgtggctgtggcgcgagtagctggaaatgagttgggggcgacggtgatggttgtgcgccttcgcgggcaggtgatgacgagagaggagatggatactaattaaataagtcagtaagctgagtgtcagactgtgttggcgcgtgcaggcagaggggcaagagaagcgggcgggaggaaggactacatacagcgcttctgatccctcaggtagagggcagccccgtcgtcaggacggctgctcacgacacccatggcggcaacagtacggccaggccgcggggcgcgcagatggggacacaaagaggggaattaagagatgggccgagtaaagctgcggcagcgatgcagagatgcgaggtagagatgaagatgtgaatgcagcatatgaatgcgacaagagggtacaagagagtaaggtaggtcgagggtgagggatgtatgtgcatgtatgtgaatgtgaatgtgaatgtgaatgtgaatatgtcgacacagctcgcaagttgcaacagccttgaggcagaggcaacaccatacatcggtgactccccactactgctgcgactctgctggtcctacttaccagggagcactcgat

SEQ ID NO: 32470 - DNA, 3294 bp, Muscodor strobelii
  misc_feature: SGI cDNA ID NO. 571190
  misc_feature: Reduced expression when VOC is produced
  misc_feature: Encodes the peptide sequence at SEQ ID NO 32471
atggacaacgccaattccaccctgcagagccaactccatagtcgcgacaatggcctcctcgccaacggcgcaaccgcctcccccaatggccacccgggcaaggcacctgaggcccgtgctgccatcgacgactcgcggcccgtcctcaacggcgcccccatgtcagattctaccgccatgataccctcctccaccaggatgaacgacctacccgatgagatccagcacatcgcccagggcttcgtgcctctcggcactttgctctcgcgccttgcccagcagacgcacaaccagctgggcgaagagatcacagccctagctaagatgcctgccccccagtcgaccatgaatggaaataccacccactctgatcccgcttttgaggacgacacgccagagaatttgaacaagaaactaaggctgctaaacttcgtccaggagagacatggcgaatgggtcaaggccctggtgattgcgaattggagtaggaaagcggaacctgtcagcaagcttatcgacctcatgcatcacatcaacaagacccgagccatgtaccagggatcgctcgattatatgatcaatatcaagagggatttcacatatgccaggttaccgaacccggatctacggaccgccttgaatatcctcgcaaccggacaagcaccttggttgcctgagttgggctacatcgaaccccccgctttgaccgtcaaggaacaattacgtgccgtcgagaacctcaacactctcctctctttacgcctgaatctcgaggaacacgcaaacataccagatcaatttcaacgttacagcattgaatccggacgtgtcaccttcaaagtaccgggcgagttcgaagtcgatctcacgatagctgacgaggatcccgaaaagcagttctggttcatcgatttccgctttgccttcacgcccgcgccagctcggctctctgactttttaaggaacttcctcgagacaaaggtcaatgaagctttggagaaggacggtttgcccggctgctacaaatttcttcacgagttcgtcttgacccacaagatcacggaatacgtccggcaggcatacgagctgagtagaggtcggtgggttgacatgttgaaggttgaaaggctgaatcgtgccatgtccattcagtattggtctggtcgttcacccactgacggcccaaagagctggattatcgtgggtgtgtcgagcgggaaaaaatccagatcctcagtaacaagccaggtaaacagccgtctcacattacgctggtttagagacggcaaggaagtcaccaatgtggatatgccactagaaggctcggcaatttctgcggaagctttactgaagaaagtgattgggaagcacatagagcacacgctgaggtcgttgtacgaaggcttgaaactaaaggggcgctttgcgcacggtgatgcgaaggtcgaaatcaacattggcaccgacagccccgaggattcagcgctgacgatgcagattggtcaccagaattacaccaacgtcagagtcaccctcataaccggcgcattggtgttccagcctcaatctaatgttacctgggcctggcaaagtcgtcttaactcgcaagccagacactcggtatcagatcagattaccgtacttgagagcctaaggtgtcattacgttgtggatgagctcaatcggcgtggaaagagcatgggctggaatgtctgcacgcctccagtaaaaccagaggagaccagatcattcctgaacgcgagagagcatcaccagcttatgtggctgaagcggcgtggcctaccagatcaatggtatatcttggcgagccagagtaccagcggagatcaatggtggttgactgaagttgtcaagcgctccgacgtcccgcgagttacagcccacagccgcctaccgctcacctcgggtattcctacattctctaacaagttcttctcccacttgaccattttcagtgcctttatggtttcgcaactcacgctacttgagaggttgcacatagaaaagatcaagtactccacccgtaatcataatagtcacactcttcctaccaacatctcagctccctctatagtcctacgattatccgatatacttggccggcagagctcacccggacgaagcaacaagacgccatcatgggcattaaacttcgttcaaattgattttcgagacattgaagctggccattctaggctcacggaattgccaaatgagcaagaagcagattctaatggtgagtcaaggttatctccagagcaggatcgcttcaatgttacgatagatgcgcgaatcaaggtggccgacccggcgagatttggggccctgaaaggcaacgtcgagcgagacctggcgtttaacgagcgtctgggggttttcgccttccgaatagagctcccggtgggaacatccttattagatacgctcacctccaggctccaagccttgagtcgattagccgggagcattgatgctattagacgcaatgatcgcgacgtcgagtgcgaggagatcactctgaactcggtcaaatttagctacacagaccgtgagcgatccgtggacaatgcaccaccccaaaatgtccgtcgctggacagcctctttggaccttcgagcaaacgatatgaaattgacgctcgattctggcaaccctcaaatccgggcgtcagaacacttccacaccttaatcaattctaaggagggtttccaaaaggtgccatggttcctttccatcactttacctgtacagcgcggcctcgatgcggtggaagatgcttgggaaggcctatcgatgaacgatcaaggccgcgtcgaaatatacatggcctatatcgactgctacagtatccagtataccctgaaatcttcggcccggaatgtcaagcgacgcctgaccctacaaattaagcttcgtaattctgaagacgccctccagtggcatatatatcgccaagagcctggaactatcaagccgccggatgacgaattttcaaaagtgttccagaaagtatgcgcgtcggaaaatcagccttggcgttgtctgaacaacggagtagcagtcactctcgggaaggaagtagagcctctcattcagagcatagacgaagcaattcgttcgctggccacaaaatcaccaccgccagtaccgaaacaacctcaagtcaaggcaccacccgcgccaaggaacaatcctcaaaataagaacatggcaggcaccaacgcccgaccaaagcagcagccaggcccagtgattatttcgcttgatgattag

SEQ ID NO: 32471 - protein, 1097 aa, Muscodor strobelii
  misc_feature: SGI Peptide ID NO. 571190
  misc_feature (80)..(295): Pfam Id: PF08638 Pfam Desc: Mediator complex subunit MED14
  misc_feature (66)..(1048): NCBI GI: 39965227 Blast Desc: MGG_09925 [Magnaporthe grisea 70-15] gi|158514082|sp|A4R0J9.1|MED14_MAGGR RecName: Full=Mediator of RNA polymerase II transcription subunit 14; AltName: complex 14
  misc_feature (50)..(1049): NCBI GI: 74614752 Blast Desc: MGG_09925 [Magnaporthe grisea 70-15] gi|158514082|sp|A4R0J9.1|MED14_MAGGR RecName: Full=Mediator of RNA polymerase II transcription subunit 14; AltName: complex 14
  misc_feature (67)..(1052): NCBI GI: 46108796 Blast Desc: FG01280.1 [Gibberella zeae PH-1]
  misc_feature (67)..(1048): NCBI GI: 256735042 Blast Desc: NECHADRAFT_32076 [Nectria haematococca mpVI 77-13-4]
  misc_feature (50)..(1049): NCBI GI: 164424938 Blast Desc: NCU09112 [Neurospora crassa OR74A] gi|157070722|gb|EAA29085.2| [Neurospora crassa OR74A]
  misc_feature (47)..(711): NCBI GI: 261356409 Blast Desc: mediator of RNA polymerase II transcription subunit 14 [Verticillium albo-atrum VaMs.102]
  misc_feature (67)..(1049): NCBI GI: 116181956 Blast Desc: CHGG_01606 [Chaetomium globosum CBS 148.51] gi|121790463|sp|Q2HDU8.1|MED14_CHAGB RecName: Full=Mediator of RNA polymerase II transcription subunit 14; AltName: complex 14
  misc_feature (29)..(623): NCBI GI: 171687355 Blast Desc: protein product [Podospora anserina] gi|170943639|emb|CAP69291.1| protein product [Podospora anserina]
  misc_feature (1)..(1078): NCBI GI: 145234480 Blast Desc: An02g14820 [Aspergillus niger] gi|134057557|emb|CAK48911.1| protein product [Aspergillus niger]
  misc_feature (1)..(1078): NCBI GI: 158513213 Blast Desc: An02g14820 [Aspergillus niger] gi|134057557|emb|CAK48911.1| protein product [Aspergillus niger]
  misc_feature: Useful for introducing or modulating the production of volatile compounds
MDNANSTLQSQLHSRDNGLLANGATASPNGHPGKAPEARAAIDDSRPVLNGAPMSDSTAMIPSSTRMNDLPDEIQHIAQGFVPLGTLLSRLAQQTHNQLGEEITALAKMPAPQSTMNGNTTHSDPAFEDDTPENLNKKLRLLNFVQERHGEWVKALVIANWSRKAEPVSKLIDLMHHINKTRAMYQGSLDYMINIKRDFTYARLPNPDLRTALNILATGQAPWLPELGYIEPPALTVKEQLRAVENLNTLLSLRLNLEEHANIPDQFQRYSIESGRVTFKVPGEFEVDLTIADEDPEKQFWFIDFRFAFTPAPARLSDFLRNFLETKVNEALEKDGLPGCYKFLHEFVLTHKITEYVRQAYELSRGRWVDMLKVERLNRAMSIQYWSGRSPTDGPKSWIIVGVSSGKKSRSSVTSQVNSRLTLRWFRDGKEVTNVDMPLEGSAISAEALLKKVIGKHIEHTLRSLYEGLKLKGRFAHGDAKVEINIGTDSPEDSALTMQIGHQNYTNVRVTLITGALVFQPQSNVTWAWQSRLNSQARHSVSDQITVLESLRCHYVVDELNRRGKSMGWNVCTPPVKPEETRSFLNAREHHQLMWLKRRGLPDQWYILASQSTSGDQWWLTEVVKRSDVPRVTAHSRLPLTSGIPTFSNKFFSHLTIFSAFMVSQLTLLERLHIEKIKYSTRNHNSHTLPTNISAPSIVLRLSDILGRQSSPGRSNKTPSWALNFVQIDFRDIEAGHSRLTELPNEQEADSNGESRLSPEQDRFNVTIDARIKVADPARFGALKGNVERDLAFNERLGVFAFRIELPVGTSLLDTLTSRLQALSRLAGSIDAIRRNDRDVECEEITLNSVKFSYTDRERSVDNAPPQNVRRWTASLDLRANDMKLTLDSGNPQIRASEHFHTLINSKEGFQKVPWFLSITLPVQRGLDAVEDAWEGLSMNDQGRVEIYMAYIDCYSIQYTLKSSARNVKRRLTLQIKLRNSEDALQWHIYRQEPGTIKPPDDEFSKVFQKVCASENQPWRCLNNGVAVTLGKEVEPLIQSIDEAIRSLATKSPPPVPKQPQVKAPPAPRNNPQNKNMAGTNARPKQQPGPVIISLDD

SEQ ID NO: 32472 - DNA, 4259 bp, Muscodor strobelii
  misc_feature: SGI EST ID NO. CUFF.77064.1
  misc_feature: Variant of the nucleotide sequence at SEQ ID NO 32470
caagtctccgcgtcaaggccatccatggtcatccactcgttccaaccgtcgcctttcagccatactttcacgtcctcaacacatcgcacttccgttccgtcgacgcttttgctctttagtcttgcagcctcgttcgtgcgcgatctccgtcctcgacacgcattaccaccgtcccgcctgccgcggcgcatcgttccccgtcgcatcgccaacctctttgttcccgaccatcgagccccataccgcgcggtatcatccatcgtcgatctcgattgcctcacgtatctctcgctgtccgtccacaatcaccagggaccacccactctccgccagcgttgcgatccagcggcctgcgcgcctttatctttagctcgcgctcgtctttaaagctactcagggttgcccgaggctaggagggcccttatttgctcattgtccgcatcttgatccatctcgcgcgcagccacgctcctccgcgcgaccacacatgcctcggagcacgtgtctttctctgcctgccagacattcttgcagcgcaatcgacttgcagcctgcggtcggcccttaactctgcacacgccgccttggcggaagggggtcgtagttctaggatgcccgggcttgtcatgatggacaacgccaattccaccctgcagagccaactccatagtcgcgacaatggcctcctcgccaacggcgcaaccgcctcccccaatggccacccgggcaaggcacctgaggcccgtgctgccatcgacgactcgcggcccgtcctcaacggcgcccccatgtcagattctaccgccatgataccctcctccaccaggatgaacgacctacccgatgagatccagcacatcgcccagggcttcgtgcctctcggcactttgctctcgcgccttgcccagcagacgcacaaccagctgggcgaagagatcacagccctagctaagatgcctgccccccagtcgaccatgaatggaaataccacccactctgatcccgcttttgaggacgacacgccagagaatttgaacaagaaactaaggctgctaaacttcgtccaggagagacatggcgaatgggtcaaggccctggtgattgcgaattggagtaggaaagcggaacctgtcagcaagcttatcgacctcatgcatcacatcaacaagacccgagccatgtaccagggatcgctcgattatatgatcaatatcaagagggatttcacatatgccaggttaccgaacccggatctacggaccgccttgaatatcctcgcaaccggacaagcaccttggttgcctgagttgggctacatcgaaccccccgctttgaccgtcaaggaacaattacgtgccgtcgagaacctcaacactctcctctctttacgcctgaatctcgaggaacacgcaaacataccagatcaatttcaacgttacagcattgaatccggacgtgtcaccttcaaagtaccgggcgagttcgaagtcgatctcacgatagctgacgaggatcccgaaaagcagttctggttcatcgatttccgctttgccttcacgcccgcgccagctcggctctctgactttttaaggaacttcctcgagacaaaggtcaatgaagctttggagaaggacggtttgcccggctgctacaaatttcttcacgagttcgtcttgacccacaagatcacggaatacgtccggcaggcatacgagctgagtagaggtcggtgggttgacatgttgaaggttgaaaggctgaatcgtgccatgtccattcagtattggtctggtcgttcacccactgacggcccaaagagctggattatcgtgggtgtgtcgagcgggaaaaaatccagatcctcagtaacaagccaggtaaacagccgtctcacattacgctggtttagagacggcaaggaagtcaccaatgtggatatgccactagaaggctcggcaatttctgcggaagctttactgaagaaagtgattgggaagcacatagagcacacgctgaggtcgttgtacgaaggcttgaaactaaaggggcgctttgcgcacggtgatgcgaaggtcgaaatcaacattggcaccgacagccccgaggattcagcgctgacgatgcagattggtcaccagaattacaccaacgtcagagtcaccctcataaccggcgcattggtgttccagcctcaatctaatgttacctgggcctggcaaagtcgtcttaactcgcaagccagacactcggtatcagatcagattaccgtacttgagagcctaaggtgtcattacgttgtggatgagctcaatcggcgtggaaagagcatgggctggaatgtctgcacgcctccagtaaaaccagaggagaccagatcattcctgaacgcgagagagcatcaccagcttatgtggctgaagcggcgtggcctaccagatcaatggtatatcttggcgagccagagtaccagcggagatcaatggtggttgactgaagttgtcaagcgctccgacgtcccgcgagttacagcccacagccgcctaccgctcacctcgggtattcctacattctctaacaagttcttctcccacttgaccattttcagtgcctttatggtttcgcaactcacgctacttgagaggttgcacatagaaaagatcaagtactccacccgtaatcataatagtcacactcttcctaccaacatctcagctccctctatagtcctacgattatccgatatacttggccggcagagctcacccggacgaagcaacaagacgccatcatgggcattaaacttcgttcaaattgattttcgagacattgaagctggccattctaggctcacggaattgccaaatgagcaagaagcagattctaatggtgagtcaaggttatctccagagcaggatcgcttcaatgttacgatagatgcgcgaatcaaggtggccgacccggcgagatttggggccctgaaaggcaacgtcgagcgagacctggcgtttaacgagcgtctgggggttttcgccttccgaatagagctcccggtgggaacatccttattagatacgctcacctccaggctccaagccttgagtcgattagccgggagcattgatgctattagacgcaatgatcgcgacgtcgagtgcgaggagatcactctgaactcggtcaaatttagctacacagaccgtgagcgatccgtggacaatgcaccaccccaaaatgtccgtcgctggacagcctctttggaccttcgagcaaacgatatgaaattgacgctcgattctggcaaccctcaaatccgggcgtcagaacacttccacaccttaatcaattctaaggagggtttccaaaaggtgccatggttcctttccatcactttacctgtacagcgcggcctcgatgcggtggaagatgcttgggaaggcctatcgatgaacgatcaaggccgcgtcgaaatatacatggcctatatcgactgctacagtatccagtataccctgaaatcttcggcccggaatgtcaagcgacgcctgaccctacaaattaagcttcgtaattctgaagacgccctccagtggcatatatatcgccaagagcctggaactatcaagccgccggatgacgaattttcaaaagtgttccagaaagtatgcgcgtcggaaaatcagccttggcgttgtctgaacaacggagtagcagtcactctcgggaaggaagtagagcctctcattcagagcatagacgaagcaattcgttcgctggccacaaaatcaccaccgccagtaccgaaacaacctcaagtcaaggcaccacccgcgccaaggaacaatcctcaaaataagaacatggcaggcaccaacgcccgaccaaagcagcagccaggcccagtgattatttcgcttgatgattagcaccgcacggcatgtgaaatgaagcggacgattatggccttagatgaaggcatcatctccttgacgttatacatataaaaaggtcgaggcagacgacaatgatcaactagtatcgtcaccacaggtgatagttctagatattgattgggagcgtccggcatgcatattactagatagtgcaccggagagtggcgacagaagattccatgtcaggacttttaaagcatcccgcggtgagagtgagaaaaataaatagtggcttaaatagaaagagcgatatggctctctcatgaatgagagccgagccagatatgaataatgtatatcaaagacaga

SEQ ID NO: 32473 - DNA, 1512 bp, Muscodor strobelii
  misc_feature: SGI cDNA ID NO. 571191
  misc_feature: Encodes the peptide sequence at SEQ ID NO 32474
atgggtggcttgatagcactcctcttaccaatgccaactactggctcaacgaccgaccacgccagcatgtcagataactcacatagatcaaaccgaagatcatgtctagtccaaccttcgtccacacaagagcggcctattcatcgccggcaatattcattacctacaataaagcaggcgaggcgatcctccggcttcttttataataacgttccgtttataccagaaaccgaatcggaatggaaaaaggcaattgacgaagtgaagcaaagattcgtagctagaaagtatcgatcctgctctatgcgctgttgcgagattctagacaatctcgacgatacatcagcggtagaaccactgcatcttatctacttacatttctacgccgcgtcgtctttcgagtggtgcgcaagacccctgtcttcatcttcggcgtatcgtacgaagctgttgcgcgatgcacagaaccactacaacgaagccgaatctcaaatctttgcaacacaatgcaatatagctgaacgagccttatctccgccatctacgtgtctgacaagtcccgtgtctcctggcctttctgcatgttctagcggcgctgatacaagccccgcgtcatcacctcgaacaagtatttctctactcaaggagagcgtcttgaccaagcacggtccgcgaggaagaggtaaagctaagaagaaggtctcattctcgtgcttgcctgaatttttcgagtatcaaccggagccatatatccgcccagatagcccgacactaggttgggaagatccaatattacaactaggggagagagccgttgataacttcgatggcttgcccacactggcatgccaatctgacgatgctcccagcacacggcccgaggctcaatatgaggcttcaagatgtagcctgaagcttacaatcgacacgaacgttaaggctgtcgttgatattgataagagaagtcataatgaaaaccacggccctcaacccggaagttttgatctcggattatttctccaaacaagatccatcaacagaattggcgcgcatctgtccttattacgagagcaagtctctcgccaccgcgcatccgtgggcgaactcctcgccatagcggacgacacggcctctatcccttcagaaagtactcctattcaaacagcactgccatttacagcgagcttcgagccaggaacatcggcggcttcaagccaacccttcgaaaataatccgaaagccccagcaaggaagtcatccctgcgtgtaaaaacgagcaagagtatgaattatttatccaccatcacggataacccaatagatatgagtcttacatcacctcctcccaacatcccagcaaccccaccagcaacacccagcgaagaaaacttacaagaacgtatcgaacgtttacgcgcaagcggttggcagcgaaaacgtttcgacagtcggcgttacgaaatacttcgagagcaggcacttgcagagcttcctagagcgcttgttcgataa

SEQ ID NO: 32474 - protein, 503 aa, Muscodor strobelii
  misc_feature: SGI Peptide ID NO. 571191
  misc_feature (1)..(371): NCBI GI: 261356395 Blast Desc: conserved [Verticillium albo-atrum VaMs.102]
  misc_feature (77)..(497): NCBI GI: 116181986 Blast Desc: CHGG_01621 [Chaetomium globosum CBS 148.51] gi|88185918|gb|EAQ93386.1| CHGG_01621 [Chaetomium globosum CBS 148.51]
  misc_feature (62)..(497): NCBI GI: 46125003 Blast Desc: FG06879.1 [Gibberella zeae PH-1]
  misc_feature (1)..(370): NCBI GI: 171687325 Blast Desc: protein product [Podospora anserina] gi|170943624|emb|CAP69276.1| protein product [Podospora anserina]
  misc_feature (74)..(497): NCBI GI: 256733124 Blast Desc: NECHADRAFT_100100 [Nectria haematococca mpVI 77-13-4]
  misc_feature (74)..(370): NCBI GI: 85091427 Blast Desc: NCU09124 [Neurospora crassa OR74A] gi|28920287|gb|EAA29660.1| [Neurospora crassa OR74A]
  misc_feature (79)..(371): NCBI GI: 145605369 Blast Desc: MGG_09910 [Magnaporthe grisea 70-15] gi|145013188|gb|EDJ97829.1| MGG_09910 [Magnaporthe grisea 70-15]
  misc_feature (85)..(165): NCBI GI: 154309555 Blast Desc: [Botryotinia fuckeliana B05.10] gi|150852271|gb|EDN27463.1| [Botryotinia fuckeliana B05.10]
  misc_feature (85)..(162): NCBI GI: 156045615 Blast Desc: [Sclerotinia sclerotiorum 1980] gi|154694391|gb|EDN94129.1| [Sclerotinia sclerotiorum 1980]
  misc_feature (60)..(159): NCBI GI: 169774515 Blast Desc: [Aspergillus oryzae RIB40] gi|83769588|dbj|BAE59723.1| protein product [Aspergillus oryzae]
MGGLIALLLPMPTTGSTTDHASMSDNSHRSNRRSCLVQPSSTQERPIHRRQYSLPTIKQARRSSGFFYNNVPFIPETESEWKKAIDEVKQRFVARKYRSCSMRCCEILDNLDDTSAVEPLHLIYLHFYAASSFEWCARPLSSSSAYRTKLLRDAQNHYNEAESQIFATQCNIAERALSPPSTCLTSPVSPGLSACSSGADTSPASSPRTSISLLKESVLTKHGPRGRGKAKKKVSFSCLPEFFEYQPEPYIRPDSPTLGWEDPILQLGERAVDNFDGLPTLACQSDDAPSTRPEAQYEASRCSLKLTIDTNVKAVVDIDKRSHNENHGPQPGSFDLGLFLQTRSINRIGAHLSLLREQVSRHRASVGELLAIADDTASIPSESTPIQTALPFTASFEPGTSAASSQPFENNPKAPARKSSLRVKTSKSMNYLSTITDNPIDMSLTSPPPNIPATPPATPSEENLQERIERLRASGWQRKRFDSRRYEILREQALAELPRALVR

SEQ ID NO: 32475 - DNA, 1538 bp, Muscodor strobelii
  misc_feature: SGI EST ID NO. CUFF.76790.0
  misc_feature: Variant of the nucleotide sequence at SEQ ID NO 32473
atggaaaaaggcaattgacgaagtgaagcaaagattcgtagctagaaagtatcgatcctgctctatgcgctgttgcgagattctagacaatctcgacgatacatcagcggtagaaccactgcatcttatctacttacatttctacgccgcgtcgtctttcgagtggtgcgcaagacccctgtcttcatcttcggcgtatcgtacgaagctgttgcgcgatgcacagaaccactacaacgaagccgaatctcaaatctttgcaacacaatgcaatatagctgaacgagccttatctccgccatctacgtgtctgacaagtcccgtgtctcctggcctttctgcatgttctagcggcgctgatacaagccccgcgtcatcacctcgaacaagtatttctctactcaaggagagcgtcttgaccaagcacggtccgcgaggaagaggtaaagctaagaagaaggtctcattctcgtgcttgcctgaatttttcgagtatcaaccggagccatatatccgcccagatagcccgacactaggttgggaagatccaatattacaactaggggagagagccgttgataacttcgatggcttgcccacactggcatgccaatctgacgatgctcccagcacacggcccgaggctcaatatgaggcttcaagatgtagcctgaagcttacaatcgacacgaacgttaaggctgtcgttgatattgataagagaagtcataatgaaaaccacggccctcaacccggaagttttgatctcggattatttctccaaacaagatccatcaacagaattggcgcgcatctgtccttattacgagagcaagtctctcgccaccgcgcatccgtgggcgaactcctcgccatagcggacgacacggcctctatcccttcagaaagtactcctattcaaacagcactgccatttacagcgagcttcgagccaggaacatcggcggcttcaagccaacccttcgaaaataatccgaaagccccagcaaggaagtcatccctgcgtgtaaaaacgagcaagagtatgaattatttatccaccatcacggataacccaatagatatgagtcttacatcacctcctcccaacatcccagcaaccccaccagcaacacccagcgaagaaaacttacaagaacgtatcgaacgtttacgcgcaagcggttggcagcgaaaacgtttcgacagtcggcgttacgaaatacttcgagagcaggcacttgcagagcttcctagagcgcttgttcgataatcattcgccgacagcggttataacgaaaatgactcgaaaagtttaagatgatgcgcaatgacttatgagacgagagagatatgtatgaaaagtatatcatgatgctacgaagtgcatacggtatcacagacggggttaacatgtagaataacgagttagttcggtgttttatgtctttatgcacctgcgtttatacattgataattcagtctaccaaccgtgttcgttcttgacgttgctcaccataccgaaactttaacactag

SEQ ID NO: 32476 - DNA, 1197 bp, Muscodor strobelii
  misc_feature: SGI cDNA ID NO. 571192
  misc_feature: Elevated expression when VOC is produced
  misc_feature: Encodes the peptide sequence at SEQ ID NO 32477
atgagtttcttcagccgcctccaaggccagccggaaacgtacgaccggaagtccaagtacaggttcggccggactctgggcgcgggtacttatggcattgtgcgcgaagcagacagtccagatgggaaagtggcaatcaagatcatcctaaagaagaatgttaagggcaacgagcgcatggttctcgacgaactcgagatgcttcaacgtcttaagcattcgcacatcgtccgcttcgtcgactggttcgaatcaagagacaagtactacatcgtaactgagcttgcgaccggtggagagctattcgaccgcatttgtgagaagggaaagttcacggagaaagatgcttcgcagactatcaagcaggtccttggtgccgttgactatcttcacaacaacaatgttgtccatagagacctcaaaccggagaatctcctataccaaactaaagacccgaactcggacctagtgcttgcggattttggcattgccaagatgctagacagcaaggacgaggttctcactactatggcggggtcttttggctacgccgccccagaagtcatgctcaagaagggacatggcaagcccgttgacatgtggtccatgggcgtcattacatacaccttattgtgtggctactcgcctttccgctccgagaacctccaagacttgattgacgaatgcagtaccgccaatgtggtcttccatgagcgctattggagggatgtcagtgacgatgccaaggacttcatcctgaagcttttgaaaccagtgcccgaggacagatggtctagcacgcaagcactacggcatccgtggctgagcggagagactgccaccgaccacaacttgctgccagagatcaaggcctacatggctaaagcgcgtctccgtcgtggtatcgagcttgtgaagcttaccaaccgcatcgaggccctcaaaattcaagaggacgaccctgagcatcccgatttccccgataacaccgtgtctgcagcaaaaaacgccgttgatgctaacaaatcttcacaaacgtctggtgaaggtaaaggcaggcttagccgagccgtcaagggtgccattttccgtgaggttgtacttgcgaaggtcagagagatgaaggagcaagagaagacactgaaagttacagaagaggttgagaaagaagctcgacgtaagagtttcaacggttaa

SEQ ID NO: 32477 - protein, 398 aa, Muscodor strobelii
  misc_feature: SGI Peptide ID NO. 571192
  misc_feature (20)..(275): Pfam Id: PF00069 Pfam Desc: Protein kinase domain
  misc_feature (20)..(140): Pfam Id: PF07714 Pfam Desc: Protein tyrosine kinase
  misc_feature (1)..(398): NCBI GI: 39965096 Blast Desc: MGG_09912 [Magnaporthe grisea 70-15] gi|145013186|gb|EDJ97827.1| MGG_09912 [Magnaporthe grisea 70-15] gi|171188413|gb|ACB41779.1| calcium/calmodulin-dependent protein
  misc_feature (2)..(393): NCBI GI: 171687323 Blast Desc: protein product [Podospora anserina] gi|170943623|emb|CAP69275.1| protein product [Podospora anserina]
  misc_feature (1)..(391): NCBI GI: 116181984 Blast Desc: CHGG_01620 [Chaetomium globosum CBS 148.51] gi|88185917|gb|EAQ93385.1| CHGG_01620 [Chaetomium globosum CBS 148.51]
  misc_feature (1)..(398): NCBI GI: 164424923 Blast Desc: calcium/calmodulin-dependent protein kinase [Neurospora crassa OR74A] gi|157070716|gb|EAA29659.2| calcium/calmodulin-dependent protein kinase [Neurospora crassa
  misc_feature (1)..(398): NCBI GI: 16647988 Blast Desc: Ca/CaM-dependent kinase-1 [Neurospora crassa]
  misc_feature (2)..(391): NCBI GI: 56159173 Blast Desc: calcium/calmodulin-dependent kinase [Sporothrix schenckii] gi|56159175|gb|AAV80435.1| calcium/calmodulin-dependent kinase [Sporothrix schenckii]
  misc_feature (3)..(398): NCBI GI: 261356396 Blast Desc: calcium/calmodulin-dependent protein kinase [Verticillium albo-atrum VaMs.102]
  misc_feature (3)..(378): NCBI GI: 189203513 Blast Desc: calcium/calmodulin-dependent protein kinase [Pyrenophora tritici-repentis Pt-1C-BFP] gi|187985191|gb|EDU50679.1| calcium/calmodulin-dependent protein
  misc_feature (3)..(395): NCBI GI: 156045661 Blast Desc: SS1G_10021 [Sclerotinia sclerotiorum 1980] gi|154694414|gb|EDN94152.1| SS1G_10021 [Sclerotinia sclerotiorum 1980]
  misc_feature (3)..(378): NCBI GI: 184186910 Blast Desc: calmodulin dependent protein kinase [Setosphaeria turcica]
  misc_feature (1)..(374): SWISSPROT Homolog: EC 2.7.11.17 Calcium/calmodulin-dependent protein kinase
  misc_feature: Useful for introducing or modulating the production of volatile compounds
MSFFSRLQGQPETYDRKSKYRFGRTLGAGTYGIVREADSPDGKVAIKIILKKNVKGNERMVLDELEMLQRLKHSHIVRFVDWFESRDKYYIVTELATGGELFDRICEKGKFTEKDASQTIKQVLGAVDYLHNNNVVHRDLKPENLLYQTKDPNSDLVLADFGIAKMLDSKDEVLTTMAGSFGYAAPEVMLKKGHGKPVDMWSMGVITYTLLCGYSPFRSENLQDLIDECSTANVVFHERYWRDVSDDAKDFILKLLKPVPEDRWSSTQALRHPWLSGETATDHNLLPEIKAYMAKARLRRGIELVKLTNRIEALKIQEDDPEHPDFPDNTVSAAKNAVDANKSSQTSGEGKGRLSRAVKGAIFREVVLAKVREMKEQEKTLKVTEEVEKEARRKSFNG

SEQ ID NO: 32478 - DNA, 1916 bp, Muscodor strobelii
  misc_feature: SGI EST ID NO. CUFF.76831.0
  misc_feature: Variant of the nucleotide sequence at SEQ ID NO 32476
cgcctctaaaaataccacaccacctacagtagcccgcactatcaggtacagtcccgactcccaagtggttcccgtcccagcgagccaggcagggaacccctccccttgaccaggtattgctgttcgagttcatgaggggctgacatcggcacgccgtccctaacattaagctcctcctaaagaattatatcatcagcctgaccacctccccatcctcatcttttctgtcatctacttctcgtccctttttcgtttccggcgcatcgcatatccacttacactccttcggcaatattcgcgccagcttccagatacatctgaattgcatacatagttctgcgcccgcgactaccccacgtcgccatgagtttcttcagccgcctccaaggccagccggaaacgtacgaccggaagtccaagtacaggttcggccggactctgggcgcgggtacttatggcattgtgcgcgaagcagacagtccagatgggaaagtggcaatcaagatcatcctaaagaagaatgttaagggcaacgagcgcatggttctcgacgaactcgagatgcttcaacgtcttaagcattcgcacatcgtccgcttcgtcgactggttcgaatcaagagacaagtactacatcgtaactgagcttgcgaccggtggagagctattcgaccgcatttgtgagaagggaaagttcacggagaaagatgcttcgcagactatcaagcaggtccttggtgccgttgactatcttcacaacaacaatgttgtccatagagacctcaaaccggagaatctcctataccaaactaaagacccgaactcggacctagtgcttgcggattttggcattgccaagatgctagacagcaaggacgaggttctcactactatggcggggtcttttggctacgccgccccagaagtcatgctcaagaagggacatggcaagcccgttgacatgtggtccatgggcgtcattacatacaccttattgtgtggctactcgcctttccgctccgagaacctccaagacttgattgacgaatgcagtaccgccaatgtggtcttccatgagcgctattggagggatgtcagtgacgatgccaaggacttcatcctgaagcttttgaaaccagtgcccgaggacagatggtctagcacgcaagcactacggcatccgtggctgagcggagagactgccaccgaccacaacttgctgccagagatcaaggcctacatggctaaagcgcgtctccgtcgtggtatcgagcttgtgaagcttaccaaccgcatcgaggccctcaaaattcaagaggacgaccctgagcatcccgatttccccgataacaccgtgtctgcagcaaaaaacgccgttgatgctaacaaatcttcacaaacgtctggtgaaggtaaaggcaggcttagccgagccgtcaagggtgccattttccgtgaggttgtacttgcgaaggtcagagagatgaaggagcaagagaagacactgaaagttacagaagaggttgagaaagaagctcgacgtaagagtttcaacggttaagggacggcatcctacatagccaccgatactagactaataggtcgtcatgtctagaatgacctaaaaagcaggttaccgatcaggggttacagactggaaagacatttgaagagtcggttcagttctcattctatctcctggagagcgatatgcttccgttatcatacccgaagttcatgcttttcgtcttcaaattctacgattgtcaagaattgtcactgttgggcgttcatagggtggttactcaatgattcatcgatgtatgcctatcctaaaggtcttagaacctgtgtttagtagtgctagtaacgcatctctattctaatatccgcgccgtgcttataattgcaagattg

SEQ ID NO: 32479 - DNA, 465 bp, Muscodor strobelii
  misc_feature: SGI cDNA ID NO. 571193
  misc_feature: Encodes the peptide sequence at SEQ ID NO 32480
atggctggcctcggtcccaaaagactggcgaaggagctgaataagatcacgaccagtctcccacccggcatagcactcgtttcagcagacaacctcgaagagtggtttcttgacattcaggtcttggaccagaatccaatttaccagggagaaaagtatcgcctgaagttcaaattcagcaactcgtatcccatcgaggcgcccgaggtcactttcgttaagctcgagaacagaccgataccgatgcacccacatatctactcgaatggcatcatctgtctcgacctcctgggctcgcagggttggagcccagtccagagcgtggagagtatttgtatgagcatccagagcatgctaacaggcaacaccaagaacgagcgcccgcctggtgatgaggagttcgtgcgcggcaaccgactgcggccaaaggacatcgcattctactatcacgataacactgtttga

SEQ ID NO: 32480 - protein, 154 aa, Muscodor strobelii
  misc_feature: SGI Peptide ID NO. 571193
  misc_feature (8)..(148): Pfam Id: PF00179 Pfam Desc: Ubiquitin-conjugating enzyme
  misc_feature (8)..(120): Pfam Id: PF00179 Pfam Desc: Ubiquitin-conjugating enzyme
  misc_feature (2)..(154): NCBI GI: 145605365 Blast Desc: ubiquitin conjugating enzyme [Magnaporthe grisea 70-15] gi|145013185|gb|EDJ97826.1| ubiquitin conjugating enzyme [Magnaporthe grisea 70-15]
  misc_feature (4)..(154): NCBI GI: 164424925 Blast Desc: NCU09122 [Neurospora crassa OR74A] gi|157070717|gb|EAA29658.2| NCU09122 [Neurospora crassa OR74A]
  misc_feature (2)..(154): NCBI GI: 261356397 Blast Desc: ubiquitin-conjugating enzyme [Verticillium albo-atrum VaMs.102]
  misc_feature (3)..(154): NCBI GI: 156045659 Blast Desc: conserved [Sclerotinia sclerotiorum 1980] gi|154694413|gb|EDN94151.1| conserved [Sclerotinia sclerotiorum 1980]
  misc_feature (17)..(154): NCBI GI: 171687321 Blast Desc: protein product [Podospora anserina] gi|170943622|emb|CAP69274.1| protein product [Podospora anserina]
  misc_feature (2)..(154): NCBI GI: 154309517 Blast Desc: conserved [Botryotinia fuckeliana B05.10] gi|150852252|gb|EDN27444.1| conserved [Botryotinia fuckeliana B05.10]
  misc_feature (7)..(154): NCBI GI: 256733123 Blast Desc: [Nectria haematococca mpVI 77-13-4]
  misc_feature (10)..(154): NCBI GI: 238843332 Blast Desc: ubiquitin conjugating enzyme [Microsporum canis CBS 113480]
  misc_feature (1)..(154): NCBI GI: 46124999 Blast Desc: FG06877.1 [Gibberella zeae PH-1]
  misc_feature (4)..(154): NCBI GI: 212530116 Blast Desc: ubiquitin conjugating enzyme, [Penicillium marneffei ATCC 18224] gi|210074613|gb|EEA28700.1| ubiquitin conjugating enzyme, [Penicillium marneffei ATCC 18224]
  misc_feature (1)..(154): SWISSPROT Homolog: EC 6.3.2.19 Ubiquitin--protein ligase
MAGLGPKRLAKELNKITTSLPPGIALVSADNLEEWFLDIQVLDQNPIYQGEKYRLKFKFSNSYPIEAPEVTFVKLENRPIPMHPHIYSNGIICLDLLGSQGWSPVQSVESICMSIQSMLTGNTKNERPPGDEEFVRGNRLRPKDIAFYYHDNTV

SEQ ID NO: 32481 - DNA, 1334 bp, Muscodor strobelii
  misc_feature: SGI EST ID NO. CUFF.76821.0
  misc_feature: Variant of the nucleotide sequence at SEQ ID NO 32479
gatctaagctgcatttagttgcttgacgctgaaatgaattcttattgcaagggatacaagtgcaagccactgtgacaggaggcactaaatagtacctacatacccagtccttgggtagctgttaggctgtgtacctacctcttcccgcgttcctctatatcgtatcacttaaacatctaacaagcattgccattattcgtgctcctgcttgtccttgtcgttgtatccctctatgactctattgttttgggctgcacgacattgatctatctccgaggcgctgtcggctctttcaccagaacagaagcatccaatcccctaacccatcttccccgctgaagctcccacacttcggtgacttcgacactggtatccctccctgcgccatcatggctggcctcggtcccaaaagactggcgaaggagctgaataagatcacgaccagtctcccacccggcatagcactcgtttcagcagacaacctcgaagagtggtttcttgacattcaggtcttggaccagaatccaatttaccagggagaaaagtatcgcctgaagttcaaattcagcaactcgtatcccatcgaggcgcccgaggtcactttcgttaagctcgagaacagaccgataccgatgcacccacatatctactcgaatggcatcatctgtctcgacctcctgggctcgcagggttggagcccagtccagagcgtggagagtatttgtatgagcatccagagcatgctaacaggcaacaccaagaacgagcgcccgcctggtgatgaggagttcgtgcgcggcaaccgactgcggccaaaggacatcgcattctactatcacgataacactgtttgaggattgacccatcctagtcgcatgaattctatacaaattaggcgtttaaaggcgtgagggctcggcgttgtgcagcacggaggaaataatgcgcgacatgatcggagtcggaaaagaggcaggctgatattctcttgcaaagttgacaattctcgacacatttacaagttcgcaagctggagttggggacaaggggaattttgagcggacagacgctgttcgagtgatggcacagtctgatcttgtctctcatgttcgtttagagccaagataactggagggaaaagacccctcggcagatcatggcgttgttgcactccatgaggtcgaaactcattgacatgcatcatcacttagaaaataagaaactccaacgcttcatttccagacctaaagacttcacacgtacgacgtatgaacatgcaactgggaatctatacggaaataatttgctggccgttcgcgacgagttgttagaaa

SEQ ID NO: 32482 - DNA, 2001 bp, Muscodor strobelii
  misc_feature: SGI cDNA ID NO. 571194
  misc_feature: Encodes the peptide sequence at SEQ ID NO 32483
atggctccttacgtggggttcgacaccgaacacattagagacaaggcccgcaaagacctgctctatctccttgagggcgtccgggggaagaagaatcttatcattgagcgcagtcttgccggtccgattggcgtcatcgtcaaagtctcacaactccacgattatgggatcgataagttcttctttctcgaaacgaacaacgccgatacgagccagcgcaacgttgtcttcatagcacggggagaatgtgctcgccatgctcaagtaatcgccgatcagatcaagcggttacagcgtgaaagccagaccggtcatgagtttcacatattctggatatcccgacggaccctcgtttccgataagattctagaagaggctggtgtgcttggtgatgtcaatattgcagaactcccgatatatttcttccccttggaacgcgatgtcctatcgctcgagctcgacgattccttccgagacctataccttttcaaagacgcaacccctgccttcctcatggccaaagcattgatggggctacagtcgaagcatggtctgttccctcgaatagttggtaaaggcgacaatgcgaaaagagtagctgagctgcttgcgcgcatgcgacaggagattcttgctggcgatgcaggctctgaaacaaataagactggacttacaccgagtaactcgatcgaaagcgtgattatcatagaccgggaagtggacttcgtcacgccactacttactcaacttacttacgagggcctgatcgatgaggtctggggaattcagaacagccagacagatatagattcgaccaccgtaggagccccaccacagtcctcatcacaaaccgctccaagcaatccggctctaactcctgcttcaaggagacgtaagattcaattggattcgtcagacaagctatacgatggccttcgggacaccaactttgctattgttggaactctgttaaataaggtagcgcgaagactgcagaacgactacgaaagcaggcatgcgacgaaaactacagctgagcttaaagactttgtcaaaaaattaccgggctaccaaaccgagcatcagagcctcaagattcacacaggcctagcagaagagattatgaaacatacccgtactgaccaattcagtcgcttattggaggcgcaacaaaatcttgcagctggcgctgatccgagttctcaacatgatgcgattgaagagttgattgcaaggaacacaaccctgcctgagatacttcggctcttgtgcatctattcttgcatctctggcggcatcaaatctaaagatttcgaccagttcagacgcctggtgctagaaggctacggccatcagcatctactcacactacacaatctagagaagctccaactgtttctctcaaggagttcgccgatggctagtatgataccaatgcctggcacaggcaattctaccggaactaagactaattacacatacttacgaaaacagcttcgattgattgtggacgaggttaatgagcacgacccggacgatatcgcatacgtgtatagtgggtatgcaccactctccatccgtcttgtgcagtgtatcttagaaaagcattacctgtcatcaatcacgcggagtagtgctgtcggtggtggggtcactatgagtggtggcggcgcgcaaggttggcgaggattcgatgaagtggtgaagcacgcacgtggcccggcattcgatgaggtgcaaaaaggcgaggataaggcggttaaagcaagagcacttctatcagggggcggcgataagaagacggtatttgtcgttttcgtcggaggcatcaccttcacggagatctcggctctgagattcatcgccaagaaggaagaagcccgaaggaatattgtagtctgcgcaacgtcgatcatcagcggcaacagaatgatggaagcggctattgaaaagaagtcattcgcccaggatgacaatgtcacacccatagtctctgcttaa

SEQ ID NO: 32483 - protein, 666 aa, Muscodor strobelii
  misc_feature: SGI Peptide ID NO. 571194
  misc_feature (30)..(648): Pfam Id: PF00995 Pfam Desc: Sec1 family
  misc_feature (298)..(463): Pfam Id: PF00995 Pfam Desc: Sec1 family
  misc_feature (30)..(265): Pfam Id: PF00995 Pfam Desc: Sec1 family
  misc_feature (604)..(648): Pfam Id: PF00995 Pfam Desc: Sec1 family
  misc_feature (1)..(654): NCBI GI: 171687319 Blast Desc: protein product [Podospora anserina] gi|170943621|emb|CAP69273.1| protein product [Podospora anserina]
  misc_feature (1)..(658): NCBI GI: 256733122 Blast Desc: NECHADRAFT_68428 [Nectria haematococca mpVI 77-13-4]
  misc_feature (1)..(657): NCBI GI: 85091421 Blast Desc: NCU09121 [Neurospora crassa OR74A] gi|28920284|gb|EAA29657.1| NCU09121 [Neurospora crassa OR74A]
  misc_feature (1)..(656): NCBI GI: 154309551 Blast Desc: BC1G_07246 [Botryotinia fuckeliana B05.10] gi|150852269|gb|EDN27461.1| BC1G_07246 [Botryotinia fuckeliana B05.10]
  misc_feature (1)..(657): NCBI GI: 46124997 Blast Desc: FG06876.1 [Gibberella zeae PH-1]
  misc_feature (1)..(656): NCBI GI: 59803037 Blast Desc: vacuolar protein sorting 33A-like protein [Magnaporthe grisea]
  misc_feature (1)..(657): NCBI GI: 116181980 Blast Desc: CHGG_01618 [Chaetomium globosum CBS 148.51] gi|88185915|gb|EAQ93383.1| CHGG_01618 [Chaetomium globosum CBS 148.51]
  misc_feature (1)..(662): NCBI GI: 156045619 Blast Desc: SS1G_10000 [Sclerotinia sclerotiorum 1980] gi|154694393|gb|EDN94131.1| SS1G_10000 [Sclerotinia sclerotiorum 1980]
  misc_feature (1)..(666): NCBI GI: 261356398 Blast Desc: vacuolar protein sorting-associated protein 33A [Verticillium albo-atrum VaMs.102]
  misc_feature (1)..(656): NCBI GI: 145605363 Blast Desc: conserved [Magnaporthe grisea 70-15] gi|145013184|gb|EDJ97825.1| conserved [Magnaporthe grisea 70-15]
MAPYVGFDTEHIRDKARKDLLYLLEGVRGKKNLIIERSLAGPIGVIVKVSQLHDYGIDKFFFLETNNADTSQRNVVFIARGECARHAQVIADQIKRLQRESQTGHEFHIFWISRRTLVSDKILEEAGVLGDVNIAELPIYFFPLERDVLSLELDDSFRDLYLFKDATPAFLMAKALMGLQSKHGLFPRIVGKGDNAKRVAELLARMRQEILAGDAGSETNKTGLTPSNSIESVIIIDREVDFVTPLLTQLTYEGLIDEVWGIQNSQTDIDSTTVGAPPQSSSQTAPSNPALTPASRRRKIQLDSSDKLYDGLRDTNFAIVGTLLNKVARRLQNDYESRHATKTTAELKDFVKKLPGYQTEHQSLKIHTGLAEEIMKHTRTDQFSRLLEAQQNLAAGADPSSQHDAIEELIARNTTLPEILRLLCIYSCISGGIKSKDFDQFRRLVLEGYGHQHLLTLHNLEKLQLFLSRSSPMASMIPMPGTGNSTGTKTNYTYLRKQLRLIVDEVNEHDPDDIAYVYSGYAPLSIRLVQCILEKHYLSSITRSSAVGGGVTMSGGGAQGWRGFDEVVKHARGPAFDEVQKGEDKAVKARALLSGGGDKKTVFVVFVGGITFTEISALRFIAKKEEARRNIVVCATSIISGNRMMEAAIEKKSFAQDDNVTPIVSA

SEQ ID NO: 32484 - DNA, 2790 bp, Muscodor strobelii
  misc_feature: SGI EST ID NO. CUFF.76824.0
  misc_feature: Variant of the nucleotide sequence at SEQ ID NO 32482
cgaatgcattgtcttgcatagtaactttgtccaaacatcgttgtcatttatcgtacccaggtagtgttgcactatcatagatctactactagcaccgtgacgtcggcgccagcttactccgtgacgccgagaaggacagggcctaacggtcaacagtgatcattctgtccccactcaagctagtatgcaccctcgcggacctgtgacggggagagctcttttcgcatagcttcaaccaaatacgcaggttatcaacctttgaagtcacatcgttcacggtctaaaaaagaaaccactggctcaacatccctcatgaataactcatatagagctcatcatggctccttacgtggggttcgacaccgaacacattagagacaaggcccgcaaagacctgctctatctccttgagggcgtccgggggaagaagaatcttatcattgagcgcagtcttgccggtccgattggcgtcatcgtcaaagtctcacaactccacgattatgggatcgataagttcttctttctcgaaacgaacaacgccgatacgagccagcgcaacgttgtcttcatagcacggggagaatgtgctcgccatgctcaagtaatcgccgatcagatcaagcggttacagcgtgaaagccagaccggtcatgagtttcacatattctggatatcccgacggaccctcgtttccgataagattctagaagaggctggtgtgcttggtgatgtcaatattgcagaactcccgatatatttcttccccttggaacgcgatgtcctatcgctcgagctcgacgattccttccgagacctataccttttcaaagacgcaacccctgccttcctcatggccaaagcattgatggggctacagtcgaagcatggtctgttccctcgaatagttggtaaaggcgacaatgcgaaaagagtagctgagctgcttgcgcgcatgcgacaggagattcttgctggcgatgcaggctctgaaacaaataagactggacttacaccgagtaactcgatcgaaagcgtgattatcatagaccgggaagtggacttcgtcacgccactacttactcaacttacttacgagggcctgatcgatgaggtctggggaattcagaacagccagacagatatagattcgaccaccgtaggagccccaccacagtcctcatcacaaaccgctccaagcaatccggctctaactcctgcttcaaggagacgtaagattcaattggattcgtcagacaagctatacgatggccttcgggacaccaactttgctattgttggaactctgttaaataaggtagcgcgaagactgcagaacgactacgaaagcaggcatgcgacgaaaactacagctgagcttaaagactttgtcaaaaaattaccgggctaccaaaccgagcatcagagcctcaagattcacacaggcctagcagaagagattatgaaacatacccgtactgaccaattcagtcgcttattggaggcgcaacaaaatcttgcagctggcgctgatccgagttctcaacatgatgcgattgaagagttgattgcaaggaacacaaccctgcctgagatacttcggctcttgtgcatctattcttgcatctctggcggcatcaaatctaaagatttcgaccagttcagacgcctggtgctagaaggctacggccatcagcatctactcacactacacaatctagagaagctccaactgtttctctcaaggagttcgccgatggctagtatgataccaatgcctggcacaggcaattctaccggaactaagactaattacacatacttacgaaaacagcttcgattgattgtggacgaggttaatgagcacgacccggacgatatcgcatacgtgtatagtgggtatgcaccactctccatccgtcttgtgcagtgtatcttagaaaagcattacctgtcatcaatcacgcggagtagtgctgtcggtggtggggtcactatgagtggtggcggcgcgcaaggttggcgaggattcgatgaagtggtgaagcacgcacgtggcccggcattcgatgaggtgcaaaaaggcgaggataaggcggttaaagcaagagcacttctatcagggggcggcgataagaagacggtatttgtcgttttcgtcggaggcatcaccttcacggagatctcggctctgagattcatcgccaagaaggaagaagcccgaaggaatattgtagtctgcgcaacgtcgatcatcagcggcaacagaatgatggaagcggctattgaaaagaagtcattcgcccaggatgacaatgtcacacccatagtctctgcttaaaggctgtaaagctaggtactcattcaatagaggtgatcatgaataatagaaccatccacgttcacgcgcagtgttcactagtgacgagtgctgatgatgaggcccttgcctatcttcaagaagcatttgtatatgctgcaattgaactcttatcgaaggtctcgctgaccgttgctcggcttcttttcgctctcaggtaaagggaaacaaatgaggttctatgatgttggttagggttgcacaaagcatgcataaatctcccgacgtgtagcaaccggcagcgattaacaagccaggtcgtgtttccggttgacgagccggtaaatgaaaagattggtttgtcgcacagaacaaacatagctcaggtccgtgaggtggtaatcgtgtctagtgaggctagtaatctgggtgctcctcatttcagcgtgtctggcaagtttgatcatgactcg

SEQ ID NO: 32485 - DNA, 2919 bp, Muscodor strobelii
  misc_feature: SGI cDNA ID NO. 571195
  misc_feature: Encodes the peptide sequence at SEQ ID NO 32486
atgaagactcctcttgaatcatcaacctcaatgttgtgggatcaatcagagccagcttcgacgtcaacgccctcgtcaatgccaccgtctagtaaagccactactccagttgatttcgagttatcacatgaatcaaaacccataccatcaatcctcagcacttcacccgttaaacggaagacattcgaaatacgaccgcgcgtatcgatcccgaccgatatagctcagcaagactacgcccatcagtgtattgctgctgcagaggcatcacgattgaacccgtatgctctgcatatggaagaatatgctatccttagagagcatatcagtcatgctcaagtaaccacatatctcaatatccgcaacggcgtattacgcctgtggatgaataatccgcgcataggcgttgcgcgggaagaagctatcgggtgtgccaaagatccgagatggtatgatgttgcaagtgtttgttatgattggcttgttcgttctggtcacatcaactttgggtcagcagaagtcccaatgagcaagaagcatcataagaaggcgaaacaattgaagaatgggaagacgatcgttgtaattggtgcgggcatgagcggtcttggttgtgctagacaacttgatagcctattcaagcagtatgctggccagtttcacgatctcgaccaagaatcccctcgcgtcattgtcctcgaaggccggtcccgtctcggcgggcgtgtgtattcacgagctctcgacagcagcaaaagcccgcgtctcatagggttcaaaggaagacgccatagtgtcgagtgtggcggaatgatcatcacaggatttgagcgtgggaatcccatcaatgtcttagtacgagggcaattgggccttccctatcatacactgcgacccgaggctattctctacgacactaatggtaagcctgttgatgagcaacgagacagattagttgaaaagctttacaacgactgcctcgaaagggtttctgactacaagtttaagagtctgccgtcaaaactcatcgaggggaacaaagatctaatcgatgaaggccgcgacagctccgctgaaggtcagaagaccatcgccagtgtggaagaaacgaaggcggctcttcctcaggcacttcccgtatcagaacagagcttagggcctcaagtcaatctggtgccggtctctactgatcgagctactggtaggacacatgttgagccaggcactccggctactttcaaggcagcgtacaaagcacgcatgatgggatgggcacttcgcgaaggcatcaatgaggaccatgatttggagcttcatcacgcagccaataccccaaatgccacccttggttccgttgttgacgaagcgattgatcaatacaaagacatagtggatcttacggcccaagattttcgcctgatgaactggcatgtggccaacctagaatatagtaacgccacaaactatcatcagttgagcattaaaggctgggacattgatgcaggaaatgaatgggaaggcaagcataccatggtagttggcggttatcaaaatgttcctcttggtctcgctatgtcgccatctcgtcttgatattcggaaagatatggtggccaccaaagttcgctatgaccccaacggtatgggtggtgcttgcgtggaatgtgaagatgggtttaagatcgacgctgactatgtcgtctcgactataccacttggtgttctcaaacatgggagtgtggagttcaatccaccgcttccagcgaacaagaccggtgccatcggccgtcttggcttcggtatcttgaacaagatcattcttgtctacgaccatattttctgggacgcgagcacagatatcttcggctgcttacgtttgccactatctcgtcacagtctaaagcagaatgagtatgcctcgcaacggggtcgctgctttcaatggttcaatgtttccaagaccagtggtattcctgttcttttagccttgatggctggcgatgccggcttcgacacagaacactctaaaaatgatgagctcgttgcggaagccacgcaagtactgcgtagcgtctttggtgccaaggtccctcagcctgtacactctattgtcacgcgctgggggtctgaccggtttgctcgaggttcttattcttctgccggtcctgaaatgggcatagatgattatcaaatcatggctcaacccactggtaacctgtttttcgctggggaacataccactgagacacacccagcaactgtgcatggggcatatctttccggtctacgtgctgcatctcaagttcttgacaccatgcttgggcctatccatgtcccaactccacttgtccgacccagagaatctgcacttttattatctcaagccctcaaacgcaaaggtctggacgacatgtcgtctcccaaagcgagtaaacaagctcgagtagatgcctacgagcaagctctttggcagcatgcaatttttcaaatcggtgagccaccatggcggccaccaaaggccgccggtaatgcctatattctttacaacaaagcaaattatcacgcggctcgccagagatgcgaagagggccgacgtgcagggaaaggcaaaccaaatgcgaatgaagtccgcataatgacaagtaagatgtggaaggaagcaacagcagaagatcgcaagcctttcgaagacctagctgcggagcaaaaggccaaatataatgcggccatcaaacagtgggaggagcagaccaaggagtggaatggtcgttttctcgccatcagagctgagtaccagcagcagcacaagttagatctcgaagacgacgaggagagtggagaagctagccgagaacgaaggcgtgccaacgtagccagctatgccgagagcgatgatagtgacatagagatgggcggctga

SEQ ID NO: 32486 - protein, 972 aa, Muscodor strobelii
  misc_feature: SGI Peptide ID NO. 571195
  misc_feature (200)..(769): Pfam Id: PF01593 Pfam Desc: Flavin containing amine oxidoreductase
  misc_feature (838)..(914): Pfam Id: PF00505 Pfam Desc: HMG (high mobility group) box
  misc_feature (470)..(769): Pfam Id: PF01593 Pfam Desc: Flavin containing amine oxidoreductase
  misc_feature (200)..(257): Pfam Id: PF01593 Pfam Desc: Flavin containing amine oxidoreductase
  misc_feature (879)..(914): Pfam Id: PF00505 Pfam Desc: HMG (high mobility group) box
  misc_feature (59)..(971): NCBI GI: 85091419 Blast Desc: NCU09120 [Neurospora crassa OR74A] gi|28920283|gb|EAA29656.1| conserved [Neurospora crassa OR74A]
  misc_feature (30)..(961): NCBI GI: 171687317 Blast Desc: protein product [Podospora anserina] gi|170943620|emb|CAP69272.1| protein product [Podospora anserina]
  misc_feature (32)..(903): NCBI GI: 116181978 Blast Desc: CHGG_01617 [Chaetomium globosum CBS 148.51] gi|88185914|gb|EAQ93382.1| CHGG_01617 [Chaetomium globosum CBS 148.51]
  misc_feature (3)..(968): NCBI GI: 46124997 Blast Desc: FG06876.1 [Gibberella zeae PH-1]
  misc_feature (59)..(970): NCBI GI: 256733121 Blast Desc: NECHADRAFT_37590 [Nectria haematococca mpVI 77-13-4]
  misc_feature (58)..(972): NCBI GI: 39965127 Blast Desc: MGG_09915 [Magnaporthe grisea 70-15] gi|145013183|gb|EDJ97824.1| MGG_09915 [Magnaporthe grisea 70-15]
  misc_feature (52)..(970): NCBI GI: 156045621 Blast Desc: SS1G_10001 [Sclerotinia sclerotiorum 1980] gi|154694394|gb|EDN94132.1| SS1G_10001 [Sclerotinia sclerotiorum 1980]
  misc_feature (59)..(970): NCBI GI: 154309549 Blast Desc: BC1G_07245 [Botryotinia fuckeliana B05.10] gi|150852268|gb|EDN27460.1| BC1G_07245 [Botryotinia fuckeliana B05.10]
  misc_feature (32)..(820): NCBI GI: 261356399 Blast Desc: lysine-specific histone demethylase [Verticillium albo-atrum VaMs.102]
  misc_feature (65)..(938): NCBI GI: 225682507 Blast Desc: anon-37Cs [Paracoccidioides brasiliensis Pb03]
MKTPLESSTSMLWDQSEPASTSTPSSMPPSSKATTPVDFELSHESKPIPSILSTSPVKRKTFEIRPRVSIPTDIAQQDYAHQCIAAAEASRLNPYALHMEEYAILREHISHAQVTTYLNIRNGVLRLWMNNPRIGVAREEAIGCAKDPRWYDVASVCYDWLVRSGHINFGSAEVPMSKKHHKKAKQLKNGKTIVVIGAGMSGLGCARQLDSLFKQYAGQFHDLDQESPRVIVLEGRSRLGGRVYSRALDSSKSPRLIGFKGRRHSVECGGMIITGFERGNPINVLVRGQLGLPYHTLRPEAILYDTNGKPVDEQRDRLVEKLYNDCLERVSDYKFKSLPSKLIEGNKDLIDEGRDSSAEGQKTIASVEETKAALPQALPVSEQSLGPQVNLVPVSTDRATGRTHVEPGTPATFKAAYKARMMGWALREGINEDHDLELHHAANTPNATLGSVVDEAIDQYKDIVDLTAQDFRLMNWHVANLEYSNATNYHQLSIKGWDIDAGNEWEGKHTMVVGGYQNVPLGLAMSPSRLDIRKDMVATKVRYDPNGMGGACVECEDGFKIDADYVVSTIPLGVLKHGSVEFNPPLPANKTGAIGRLGFGILNKIILVYDHIFWDASTDIFGCLRLPLSRHSLKQNEYASQRGRCFQWFNVSKTSGIPVLLALMAGDAGFDTEHSKNDELVAEATQVLRSVFGAKVPQPVHSIVTRWGSDRFARGSYSSAGPEMGIDDYQIMAQPTGNLFFAGEHTTETHPATVHGAYLSGLRAASQVLDTMLGPIHVPTPLVRPRESALLLSQALKRKGLDDMSSPKASKQARVDAYEQALWQHAIFQIGEPPWRPPKAAGNAYILYNKANYHAARQRCEEGRRAGKGKPNANEVRIMTSKMWKEATAEDRKPFEDLAAEQKAKYNAAIKQWEEQTKEWNGRFLAIRAEYQQQHKLDLEDDEESGEASRERRRANVASYAESDDSDIEMGG

SEQ ID NO: 32487 - DNA, 4590 bp, Muscodor strobelii
  misc_feature: SGI EST ID NO. CUFF.76827.0
  misc_feature: Variant of the nucleotide sequence at SEQ ID NO 32485
ggaagcagcagactgggagacggaattctggaacagaaagcccccaagtacagcagcgagtgttccgtcttgccgtgggcacattccgagtcggcgcatcctctattctcactgcggttccgtgaccactcaaaccttcgtattcttacagaatcaaatatttccgggcatcgtatatcatcgccccaacctccaaagaccagttaatttcaaattatttactagcgaggataattttaaagagtcctccagccgattctccatcgaattgtcgttgtattgagatcacctgcattatctagtgcatgaactatcttattcgaaggtacagtatcagcccgatcccttggctactgtagtatgtgaccgatgatggttcgatgattcggccaatccatgtatggactttcatgcatccagacccctacctcaacattgatcccattgagcctcgaggctattgtgtaattaacacctcttgataggccttgacctttaccttcgttatgttcaactcgtgacaataagtcaagagttaggataggcttcggaatcttactcaatgggaggccagtttgcgcaaagaccgcctccgcaccccgcgatatcttgacgaccacccttgtgtacatatatcgatgttgatccctagacgcctcgagtcatcacgttacgagatatggaatcgttacagtggcctctggtagagggagagagttatagggggcatggaccgttaatatcttccgaaagcttttgcgtaaacctgggtgaaaagccgcattcttcagaacacctaacagccaggccgtcattgttattcgacaagaacttgaatcctcaacgcacacctatcgtgccagccgcggatgctatgatggcggagtctgaaataattgtgaagactgagagaacggatgtggaattcagctactccgcgccggtatctgccctgactagagagaacacaccttttcaaaatggaactccttctgagagcacacctcttctctcgggtcaagagaacatgaagactcctcttgaatcatcaacctcaatgttgtgggatcaatcagagccagcttcgacgtcaacgccctcgtcaatgccaccgtctagtaaagccactactccagttgatttcgagttatcacatgaatcaaaacccataccatcaatcctcagcacttcacccgttaaacggaagacattcgaaatacgaccgcgcgtatcgatcccgaccgatatagctcagcaagactacgcccatcagtgtattgctgctgcagaggcatcacgattgaacccgtatgctctgcatatggaagaatatgctatccttagagagcatatcagtcatgctcaagtaaccacatatctcaatatccgcaacggcgtattacgcctgtggatgaataatccgcgcataggcgttgcgcgggaagaagctatcgggtgtgccaaagatccgagatggtatgatgttgcaagtgtttgttatgattggcttgttcgttctggtcacatcaactttgggtcagcagaagtcccaatgagcaagaagcatcataagaaggcgaaacaattgaagaatgggaagacgatcgttgtaattggtgcgggcatgagcggtcttggttgtgctagacaacttgatagcctattcaagcagtatgctggccagtttcacgatctcgaccaagaatcccctcgcgtcattgtcctcgaaggccggtcccgtctcggcgggcgtgtgtattcacgagctctcgacagcagcaaaagcccgcgtctcatagggttcaaaggaagacgccatagtgtcgagtgtggcggaatgatcatcacaggatttgagcgtgggaatcccatcaatgtcttagtacgagggcaattgggccttccctatcatacactgcgacccgaggctattctctacgacactaatggtaagcctgttgatgagcaacgagacagattagttgaaaagctttacaacgactgcctcgaaagggtttctgactacaagtttaagagtctgccgtcaaaactcatcgaggggaacaaagatctaatcgatgaaggccgcgacagctccgctgaaggtcagaagaccatcgccagtgtggaagaaacgaaggcggctcttcctcaggcacttcccgtatcagaacagagcttagggcctcaagtcaatctggtgccggtctctactgatcgagctactggtaggacacatgttgagccaggcactccggctactttcaaggcagcgtacaaagcacgcatgatgggatgggcacttcgcgaaggcatcaatgaggaccatgatttggagcttcatcacgcagccaataccccaaatgccacccttggttccgttgttgacgaagcgattgatcaatacaaagacatagtggatcttacggcccaagattttcgcctgatgaactggcatgtggccaacctagaatatagtaacgccacaaactatcatcagttgagcattaaaggctgggacattgatgcaggaaatgaatgggaaggcaagcataccatggtagttggcggttatcaaaatgttcctcttggtctcgctatgtcgccatctcgtcttgatattcggaaagatatggtggccaccaaagttcgctatgaccccaacggtatgggtggtgcttgcgtggaatgtgaagatgggtttaagatcgacgctgactatgtcgtctcgactataccacttggtgttctcaaacatgggagtgtggagttcaatccaccgcttccagcgaacaagaccggtgccatcggccgtcttggcttcggtatcttgaacaagatcattcttgtctacgaccatattttctgggacgcgagcacagatatcttcggctgcttacgtttgccactatctcgtcacagtctaaagcagaatgagtatgcctcgcaacggggtcgctgctttcaatggttcaatgtttccaagaccagtggtattcctgttcttttagccttgatggctggcgatgccggcttcgacacagaacactctaaaaatgatgagctcgttgcggaagccacgcaagtactgcgtagcgtctttggtgccaaggtccctcagcctgtacactctattgtcacgcgctgggggtctgaccggtttgctcgaggttcttattcttctgccggtcctgaaatgggcatagatgattatcaaatcatggctcaacccactggtaacctgtttttcgctggggaacataccactgagacacacccagcaactgtgcatggggcatatctttccggtctacgtgctgcatctcaagttcttgacaccatgcttgggcctatccatgtcccaactccacttgtccgacccagagaatctgcacttttattatctcaagccctcaaacgcaaaggtctggacgacatgtcgtctcccaaagcgagtaaacaagctcgagtagatgcctacgagcaagctctttggcagcatgcaatttttcaaatcggtgagccaccatggcggccaccaaaggccgccggtaatgcctatattctttacaacaaagcaaattatcacgcggctcgccagagatgcgaagagggccgacgtgcagggaaaggcaaaccaaatgcgaatgaagtccgcataatgacaagtaagatgtggaaggaagcaacagcagaagatcgcaagcctttcgaagacctagctgcggagcaaaaggccaaatataatgcggccatcaaacagtgggaggagcagaccaaggagtggaatggtcgttttctcgccatcagagctgagtaccagcagcagcacaagttagatctcgaagacgacgaggagagtggagaagctagccgagaacgaaggcgtgccaacgtagccagctatgccgagagcgatgatagtgacatagagatgggcggctgagtcggaagctcgcgatccctcaactatgcggctccggcaaagaccttatacgaagtatgatgtttatggcgtcaaacatcgtgtcattacaaccctgtatacatattccaacctgtctaagcagacatgtctgattgtccacggtggaatctgatttaaccttccatattggcttcattgcttgggtttcggagcaaagagcattgccatcgggtgaaacggtggcgttggcggttcatctgtgtgcatttacaatggtttacgatggggagacgagaacaatcatgattctcgagagacttttcgccttagctttattgatattgagctatagcacaacttcattggcttggtgccaccttacccagcatggcaaatggggttatagagcatgggattggtggcttcgaccaggccagtcggtgttgaccggaggtcgatgcacatatataattattttacaaagcgacaattattgctagggggaaagaagtgcagcattagtagtgataatatatctatctagctacatgtcttgtggtactgtgttgtagtaatgtgttgcttgacattttctagtatgtatttcattgctcgttgtatagacactccgagtactttggcttgatagaattctatttaac

SEQ ID NO: 32488 - DNA, 903 bp, Muscodor strobelii
  misc_feature: SGI cDNA ID NO. 571196
  misc_feature: Reduced expression when VOC is produced
  misc_feature: Encodes the peptide sequence at SEQ ID NO 32489
atgctttccagagtagccaggcctgctctgtccggagctgcagctgtgtctgcccactctgcccagaatgctgccggctacgccacgctgcgcgagattgagggccgcctcaagtcgatccgcaacatcgagaagatcaccaacacgatgaagattgtcgcctccaccaagctcacccgggcccagcgcgccatgaccgactcccgcaagtacggcgccacctcccagaaggtcttcgagtccgccgagaccaagcccctcgagggcgagggcaagaagactctctacgtcgtctgctcctccgacaagggtctctgcggtggtgtgcactccggtctctcccgctacatgcgccgcaccgccctcgccgccggctcccaacctgccgacctcgtcctcatcggcgagaagtcgcgtgcccagctcagccgaaccaacgccaaggacatcgtcttgacctttgctggcatcggcaaggacgtccccaccttcgccgacgcccaggccatcgccgaccagatcgtccagctgcccggcgactacaccgacgtcaagctcgtccacaacaagttcctcaacgccacttcctacgagcccataatcaccgaggcctacaacgaggaggccatcgccaattcccccaacttctccgccttcgaggtcgacgaggagctcctctccaacctccgcgaatactctctggccaactctctctactgggccctggctgagggtcacgcctgtgagatttccgcccgccggaacgctatggataacgcctccaagaacgctggtgagatgatcaacaagttccagatcttgtacaaccgaacccgccaagccgtcattaccaacgaactggtcgaaattatcaccggtgccaccgcctctgccgacatgtaa

SEQ ID NO: 32489 - protein, 300 aa, Muscodor strobelii
  misc_feature: SGI Peptide ID NO. 571196
  misc_feature (28)..(297): Pfam Id: PF00231 Pfam Desc: ATP synthase
  misc_feature (28)..(201): Pfam Id: PF00231 Pfam Desc: ATP synthase
  misc_feature (222)..(297): Pfam Id: PF00231 Pfam Desc: ATP synthase
  misc_feature (1)..(300): NCBI GI: 116181976 Blast Desc: ATP synthase gamma chain, mitochondrial precursor [Chaetomium globosum CBS 148.51] gi|88185913|gb|EAQ93381.1| ATP synthase gamma chain, mitochondrial precursor [Chaetomium CBS
  misc_feature (1)..(300): NCBI GI: 39965138 Blast Desc: ATP synthase subunit gamma precursor [Magnaporthe grisea 70-15] gi|145013182|gb|EDJ97823.1| ATP synthase subunit gamma precursor [Magnaporthe grisea 70-15]
  misc_feature (1)..(300): NCBI GI: 59803043 Blast Desc: ATP synthase gamma chain-like protein [Magnaporthe grisea]
  misc_feature (1)..(300): NCBI GI: 85091417 Blast Desc: ATP synthase gamma chain, mitochondrial precursor [Neurospora crassa OR74A] gi|28920282|gb|EAA29655.1| ATP synthase gamma chain, mitochondrial precursor [Neurospora crassa OR74A]
  misc_feature (1)..(300): NCBI GI: 171687331 Blast Desc: protein product [Podospora anserina] gi|170943627|emb|CAP69279.1| protein product [Podospora anserina]
  misc_feature (23)..(300): NCBI GI: 256732671 Blast Desc: [Nectria haematococca mpVI 77-13-4]
  misc_feature (27)..(300): NCBI GI: 261356400 Blast Desc: ATP synthase gamma chain [Verticillium albo-atrum VaMs.102]
  misc_feature (24)..(300): NCBI GI: 46124995 Blast Desc: FG06875.1 [Gibberella zeae PH-1]
  misc_feature (1)..(300): NCBI GI: 119189551 Blast Desc: CIMG_04823 [Coccidioides immitis RS]
  misc_feature (1)..(300): NCBI GI: 240111192 Blast Desc: ATP synthase gamma chain, mitochondrial precursor, [Coccidioides posadasii C735 delta SOWgp]
  misc_feature: Useful for introducing or modulating the production of volatile compounds
MLSRVARPALSGAAAVSAHSAQNAAGYATLREIEGRLKSIRNIEKITNTMKIVASTKLTRAQRAMTDSRKYGATSQKVFESAETKPLEGEGKKTLYVVCSSDKGLCGGVHSGLSRYMRRTALAAGSQPADLVLIGEKSRAQLSRTNAKDIVLTFAGIGKDVPTFADAQAIADQIVQLPGDYTDVKLVHNKFLNATSYEPIITEAYNEEAIANSPNFSAFEVDEELLSNLREYSLANSLYWALAEGHACEISARRNAMDNASKNAGEMINKFQILYNRTRQAVITNELVEIITGATASADM

SEQ ID NO: 32490 - DNA, 1450 bp, Muscodor strobelii
  misc_feature: SGI EST ID NO. CUFF.76834.0
  misc_feature: Variant of the nucleotide sequence at SEQ ID NO 32488
cgggaagatacggggattggttagatgcccagcagacagagcagctctgatttgcagaggctagcagattatcatcagacctgacagacctcactcccgtcgacaccacgcattgccattgattgcccggcgcatcgcaatcaacccacgagccattggtcttctgaggcgccatcactctctttcctccctcctccacaatgctttccagagtagccaggcctgctctgtccggagctgcagctgtgtctgcccactctgcccagaatgctgccggctacgccacgctgcgcgagattgagggccgcctcaagtcgatccgcaacatcgagaagatcaccaacacgatgaagattgtcgcctccaccaagctcacccgggcccagcgcgccatgaccgactcccgcaagtacggcgccacctcccagaaggtcttcgagtccgccgagaccaagcccctcgagggcgagggcaagaagactctctacgtcgtctgctcctccgacaagggtctctgcggtggtgtgcactccggtctctcccgctacatgcgccgcaccgccctcgccgccggctcccaacctgccgacctcgtcctcatcggcgagaagtcgcgtgcccagctcagccgaaccaacgccaaggacatcgtcttgacctttgctggcatcggcaaggacgtccccaccttcgccgacgcccaggccatcgccgaccagatcgtccagctgcccggcgactacaccgacgtcaagctcgtccacaacaagttcctcaacgccacttcctacgagcccataatcaccgaggcctacaacgaggaggccatcgccaattcccccaacttctccgccttcgaggtcgacgaggagctcctctccaacctccgcgaatactctctggccaactctctctactgggccctggctgagggtcacgcctgtgagatttccgcccgccggaacgctatggataacgcctccaagaacgctggtgagatgatcaacaagttccagatcttgtacaaccgaacccgccaagccgtcattaccaacgaactggtcgaaattatcaccggtgccaccgcctctgccgacatgtaaatattggtgcacattagacgaatagaaaaagtcctgtggtggagtcatggggcagcatcggtgatctattagagccgcatcttccctttgtatcaaagttacccctatgcaagcctctttgtaccaaatactcaaaatagttcctgaacctgtgttctctgctgcattgtgaatctggagtagcgacgtgctgtaagactttgaggagttctacgtacgctgccagcgaactgaactctgaattatcgagttagactatcgatatgtcattcaatctcaaatggctaattgcatctatttgaggggacttttaagacgttgttattcgtataagactcaaaacgact

SEQ ID NO: 32491 - DNA, 2694 bp, Muscodor strobelii
  misc_feature: SGI cDNA ID NO. 571197
  misc_feature: Reduced expression when VOC is produced
  misc_feature: Encodes the peptide sequence at SEQ ID NO 32492
atgtcttcttccgaagacgacatgcctctggcgcgtacgaacggtcatttgtcggcggacaagatcaccaaagccgaggacagagccatggatattgactcgacgcaagagccacttcctgcaccgttatcgatccgaaatggccccatcgaggacgactctcatatcaacggaaatggcaagcgcaagtcgcgttcctccattggcaacgtcaactaccaagaggcagagagtgaggacgaacgatcgaccaaaagacagaagaaggctgtcgtcagtgactcttctgactcagatgaaccgatcaagaacaagaggaagctaccgcctgcagccagcgagacagccgttgccgaagactcggatgacgatgtccccttgaccaagaagctagctgacaaacgcaaggcaatcgacaaggctgctgagagagaggccaaggcagcggcgaggaagccggctccaaagaagagcatcaaggaagaatccgatgacgacgacaagcctttggcagggcttaaccgaaaacgcccagtcaacggcacgaatggaaaggcaaagtcaaacggtgtgaagaaggaagaggattccgattcagacacgcccatgcggaaaaaggcgaagcctgctgccaagggaaaagcaaaggctgagccatcctcggtcaagaaagcccccgcgaagaaggcgaagaaggaacagagtgaggatcctgcagatggtgaagacgacgaagaggaagagaaccgatggtgggagcagatcaaatccgacgacagcatcaaatggaacacgctcgaacacaacggcgtcctcttccctccgccttacgagcctttgcctaagaatgtgaagctcctctacgatggttctcccgtcatccttcaagaggaggccgaagaagtcgcgggcttttttggtgcgatgcttcattccacacacaacgtcgagaacccagtcttccagaagaacttttttaacgacttcaaagacatactgaagcgctcaggcggtgccaaagatcgacaaggcaacaaagtcgatattaaggagttctccaagatggattttaagcctatctttgagtattaccaaggaaagagcgaagccagaaaggctcgttctcaacaagagaagaaggctgaaaaggccgagaaggatgaactcgagaatccatacatgttctgcaagtgggatggacgtaaggaaaaagttggcaacttcagagttgagcctcctggactgttccgcggacgtggagagcaccccaagactggcaaagtcaagctgagagtcatgcctgagcaagtcacgatcaatattggtaaggacgcgcaagtccctcgcccgcccgatggtcataaatggaaagcggttcagcacgacaacaaagccacgtggcttgctatgtggcaagagaacatcaatggtgcgtacaagtacgtaatgcttggcgctcaaagcactgtcaagggccaagcagacctgaagaaattcgagaaagctagagagctcaagaagcatattctgaagattcggaaggactacacccgtgatctcaaagctgaatcgatggctgaccgccaacgcgctaccgctgtctatctcatcgacaaatttgctttgagagctggcaacgagaaagatgccgagaatgaagccgagactgtcggttgctgttctctcaaatttgagcatgtcacattgagagagcccaacaccgtgattttcgacttcttgggtaaagacagtattcgattctacgatgaggtcactgtagaccgccaggtcttcaagaacctacgtgtcttcaagaagtcgcccaagaaagacggggatgacatcttcgaccgtctaacgacttcccaactcaacaagcatctttccaactacatgactggcttgaccgccaaagtcttccgtacttacaatgcttctttcaccatgtctaatctacttaaggaaattccaaacgagaagaagaccgttgcggaagtaatgaagctatataacgactgcaatcgcgaagttgctattctttgtaaccacaaacgcactgtcggtgccgctcatgaggcacagatggaaaaacttggtgaccgtatcaaaggtctcaagtaccagatgtggcgaaacaaacacatgatcctcgacgtggacccgaagatgaagaagaagaaaggtgccgactttttcgagatggatccagaacttgacgaggcctggattctagagcatcagaatttcctcgtcgaggaacagcggaccaagatcgagaagaagtttgagaaggacaaccagaaacgccaagagaacggagagaagatcatgcccgacaaggagctcaaggagcggctcaccgccgcggatgacttagcgaagaagttcaagaaggaaaacaagtcaaagaaggtagaggctgagggcaagggcccaaccgttgaaaagattgagggcaacatcaagaagatcgaagagcgcattcgcactttagagttgcaagcagcagacagagatggtaataaggaggtagcgctcggaacctccaaaatcaattacattgaccctcgcctcaccgtcgtttttgctaacaagttcgatgtacccattgagaaattcttttcgaagactcttcgcgagaaatttcactgggctatcaagtcagtcggagacgacgcttcgtgggaattctag

SEQ ID NO: 32492 - protein, 897 aa, Muscodor strobelii
  misc_feature: SGI Peptide ID NO. 571197
  misc_feature (487)..(724): Pfam Id: PF01028 Pfam Desc: Eukaryotic DNA topoisomerase I, catalytic core
  misc_feature (261)..(484): Pfam Id: PF02919 Pfam Desc: Eukaryotic DNA topoisomerase I, DNA binding fragment
  misc_feature (1)..(897): NCBI GI: 154309521 Blast Desc: BC1G_07231 [Botryotinia fuckeliana B05.10] gi|150852254|gb|EDN27446.1| BC1G_07231 [Botryotinia fuckeliana B05.10]
  misc_feature (3)..(897): NCBI GI: 171687333 Blast Desc: protein product [Podospora anserina] gi|170943628|emb|CAP69280.1| protein product [Podospora anserina]
  misc_feature (3)..(897): NCBI GI: 116181974 Blast Desc: CHGG_01615 [Chaetomium globosum CBS 148.51] gi|88185912|gb|EAQ93380.1| CHGG_01615 [Chaetomium globosum CBS 148.51]
  misc_feature (3)..(897): NCBI GI: 156045655 Blast Desc: SS1G_10018 [Sclerotinia sclerotiorum 1980] gi|154694411|gb|EDN94149.1| SS1G_10018 [Sclerotinia sclerotiorum 1980]
  misc_feature (2)..(897): NCBI GI: 39965148 Blast Desc: MGG_09917 [Magnaporthe grisea 70-15] gi|145013181|gb|EDJ97822.1| MGG_09917 [Magnaporthe grisea 70-15]
  misc_feature (2)..(897): NCBI GI: 256733120 Blast Desc: [Nectria haematococca mpVI 77-13-4]
  misc_feature (1)..(897): NCBI GI: 242803152 Blast Desc: topoisomerase I [Talaromyces stipitatus ATCC 10500] gi|218717461|gb|EED16882.1| topoisomerase I [Talaromyces stipitatus ATCC 10500]
  misc_feature (1)..(897): NCBI GI: 212539988 Blast Desc: topoisomerase I [Penicillium marneffei ATCC 18224] gi|212539990|ref|XP_002150150.1| topoisomerase I [Penicillium marneffei ATCC 18224] gi|210067448|gb|EEA21540.1| topoisomerase I
  misc_feature (1)..(897): NCBI GI: 145229165 Blast Desc: An01g04640 [Aspergillus niger] gi|134054991|emb|CAK36999.1| protein product [Aspergillus niger]
  misc_feature (1)..(897): NCBI GI: 115388445 Blast Desc: DNA topoisomerase I [Aspergillus terreus NIH2624] gi|114195812|gb|EAU37512.1| DNA topoisomerase I [Aspergillus terreus NIH2624]
  misc_feature (258)..(897): SWISSPROT Homolog: EC 5.99.1.2 DNA topoisomerase
  misc_feature: Useful for introducing or modulating the production of volatile compounds
MSSSEDDMPLARTNGHLSADKITKAEDRAMDIDSTQEPLPAPLSIRNGPIEDDSHINGNGKRKSRSSIGNVNYQEAESEDERSTKRQKKAVVSDSSDSDEPIKNKRKLPPAASETAVAEDSDDDVPLTKKLADKRKAIDKAAEREAKAAARKPAPKKSIKEESDDDDKPLAGLNRKRPVNGTNGKAKSNGVKKEEDSDSDTPMRKKAKPAAKGKAKAEPSSVKKAPAKKAKKEQSEDPADGEDDEEEENRWWEQIKSDDSIKWNTLEHNGVLFPPPYEPLPKNVKLLYDGSPVILQEEAEEVAGFFGAMLHSTHNVENPVFQKNFFNDFKDILKRSGGAKDRQGNKVDIKEFSKMDFKPIFEYYQGKSEARKARSQQEKKAEKAEKDELENPYMFCKWDGRKEKVGNFRVEPPGLFRGRGEHPKTGKVKLRVMPEQVTINIGKDAQVPRPPDGHKWKAVQHDNKATWLAMWQENINGAYKYVMLGAQSTVKGQADLKKFEKARELKKHILKIRKDYTRDLKAESMADRQRATAVYLIDKFALRAGNEKDAENEAETVGCCSLKFEHVTLREPNTVIFDFLGKDSIRFYDEVTVDRQVFKNLRVFKKSPKKDGDDIFDRLTTSQLNKHLSNYMTGLTAKVFRTYNASFTMSNLLKEIPNEKKTVAEVMKLYNDCNREVAILCNHKRTVGAAHEAQMEKLGDRIKGLKYQMWRNKHMILDVDPKMKKKKGADFFEMDPELDEAWILEHQNFLVEEQRTKIEKKFEKDNQKRQENGEKIMPDKELKERLTAADDLAKKFKKENKSKKVEAEGKGPTVEKIEGNIKKIEERIRTLELQAADRDGNKEVALGTSKINYIDPRLTVVFANKFDVPIEKFFSKTLREKFHWAIKSVGDDASWEF

SEQ ID NO: 32493 - DNA, 3588 bp, Muscodor strobelii
  misc_feature: SGI EST ID NO. CUFF.76872.1
  misc_feature: Variant of the nucleotide sequence at SEQ ID NO 32491
gccagactgactggcgacactcgcctctgactggtgaagccttcaaggccttgctcgcgcgcccatcgtatctacactgcctaacacactactaaaaagccttcttcttagtagtattactcgttgcatcctgcctcccttctctgcccacgtccgcctcggtgcaatttttcctgcatttccccttcccacatcgtctcacccgcctcctccctctctttttccctccttccatacatcattcagtctctcttcaacctctagagtgccagcgtctaatctctatagactggggtggtgcaccacggtgttggccacccatctgcaactattttcgcgccaaataccattgccttaccttcccaactccgtttcacccatccaccccatacacttctcgcgcattctctatctatcgacggctcgatctcgccctcgcaagatctcgactcatcgtcaacataaatctcgccgtcatataacctcactccacacgcccatcatgtcttcttccgaagacgacatgcctctggcgcgtacgaacggtcatttgtcggcggacaagatcaccaaagccgaggacagagccatggatattgactcgacgcaagagccacttcctgcaccgttatcgatccgaaatggccccatcgaggacgactctcatatcaacggaaatggcaagcgcaagtcgcgttcctccattggcaacgtcaactaccaagaggcagagagtgaggacgaacgatcgaccaaaagacagaagaaggctgtcgtcagtgactcttctgactcagatgaaccgatcaagaacaagaggaagctaccgcctgcagccagcgagacagccgttgccgaagactcggatgacgatgtccccttgaccaagaagctagctgacaaacgcaaggcaatcgacaaggctgctgagagagaggccaaggcagcggcgaggaagccggctccaaagaagagcatcaaggaagaatccgatgacgacgacaagcctttggcagggcttaaccgaaaacgcccagtcaacggcacgaatggaaaggcaaagtcaaacggtgtgaagaaggaagaggattccgattcagacacgcccatgcggaaaaaggcgaagcctgctgccaagggaaaagcaaaggctgagccatcctcggtcaagaaagcccccgcgaagaaggcgaagaaggaacagagtgaggatcctgcagatggtgaagacgacgaagaggaagagaaccgatggtgggagcagatcaaatccgacgacagcatcaaatggaacacgctcgaacacaacggcgtcctcttccctccgccttacgagcctttgcctaagaatgtgaagctcctctacgatggttctcccgtcatccttcaagaggaggccgaagaagtcgcgggcttttttggtgcgatgcttcattccacacacaacgtcgagaacccagtcttccagaagaacttttttaacgacttcaaagacatactgaagcgctcaggcggtgccaaagatcgacaaggcaacaaagtcgatattaaggagttctccaagatggattttaagcctatctttgagtattaccaaggaaagagcgaagccagaaaggctcgttctcaacaagagaagaaggctgaaaaggccgagaaggatgaactcgagaatccatacatgttctgcaagtgggatggacgtaaggaaaaagttggcaacttcagagttgagcctcctggactgttccgcggacgtggagagcaccccaagactggcaaagtcaagctgagagtcatgcctgagcaagtcacgatcaatattggtaaggacgcgcaagtccctcgcccgcccgatggtcataaatggaaagcggttcagcacgacaacaaagccacgtggcttgctatgtggcaagagaacatcaatggtgcgtacaagtacgtaatgcttggcgctcaaagcactgtcaagggccaagcagacctgaagaaattcgagaaagctagagagctcaagaagcatattctgaagattcggaaggactacacccgtgatctcaaagctgaatcgatggctgaccgccaacgcgctaccgctgtctatctcatcgacaaatttgctttgagagctggcaacgagaaagatgccgagaatgaagccgagactgtcggttgctgttctctcaaatttgagcatgtcacattgagagagcccaacaccgtgattttcgacttcttgggtaaagacagtattcgattctacgatgaggtcactgtagaccgccaggtcttcaagaacctacgtgtcttcaagaagtcgcccaagaaagacggggatgacatcttcgaccgtctaacgacttcccaactcaacaagcatctttccaactacatgactggcttgaccgccaaagtcttccgtacttacaatgcttctttcaccatgtctaatctacttaaggaaattccaaacgagaagaagaccgttgcggaagtaatgaagctatataacgactgcaatcgcgaagttgctattctttgtaaccacaaacgcactgtcggtgccgctcatgaggcacagatggaaaaacttggtgaccgtatcaaaggtctcaagtaccagatgtggcgaaacaaacacatgatcctcgacgtggacccgaagatgaagaagaagaaaggtgccgactttttcgagatggatccagaacttgacgaggcctggattctagagcatcagaatttcctcgtcgaggaacagcggaccaagatcgagaagaagtttgagaaggacaaccagaaacgccaagagaacggagagaagatcatgcccgacaaggagctcaaggagcggctcaccgccgcggatgacttagcgaagaagttcaagaaggaaaacaagtcaaagaaggtagaggctgagggcaagggcccaaccgttgaaaagattgagggcaacatcaagaagatcgaagagcgcattcgcactttagagttgcaagcagcagacagagatggtaataaggaggtagcgctcggaacctccaaaatcaattacattgaccctcgcctcaccgtcgtttttgctaacaagttcgatgtacccattgagaaattcttttcgaagactcttcgcgagaaatttcactgggctatcaagtcagtcggagacgacgcttcgtgggaattctagacagacaaaggagccatacaccacgaagtatcacgtctcattgctcggattcatcacccgccgccagttgtatggtcatttacgcacgttacagtacccaccttattcacaacagccaactttccagcgatacaacatagtatggcagatacgatagcattacaagtcctaccatcttgagaagaaatagtccaggacgccctggcataggatttacattctggcgcgagcctggcattctgcatagctggtgcgcctgtcggaatagcgatttcatctcgttgcattcgccgggtgctttttggccaagaaaaaacattggccacttttgtacgagacagaaccagctattttatagatagatggaccagaaatataaactaacattatca

SEQ ID NO: 32494 - DNA, 1113 bp, Muscodor strobelii
  misc_feature: SGI cDNA ID NO. 571198
  misc_feature: Reduced expression when VOC is produced
  misc_feature: Encodes the peptide sequence at SEQ ID NO 32495
atgttgttttcaggcaggccgcttgtggcgactgtggcagctacaatcgccaccttcttcttcacctcagctacagcacagacttcgtcgtcttgtagtcctctgtcgtcgaccgaatgcccagccgatcccgccctcggtactgccctcaatgtcgacttcacccaaggcagctcggatcagttcacagcctctggcggtaacccaacgtacggttctgatggcgtttccttcaccatcagcggcagtggcgatgctccccagctcaactccctgttctacatcatgttcggccgagttgaaatcaccatgaagtgcgcccccggtgcaggcatcgtgtcgaccctggtgcttatatcggacgacctcgacgagatcgactgcgaatggctcggtgccgacgatagcgagttacagaccaattactttggcaagggccagaccacgacctataacagaggacagttcaaccctgcccctgataatcaggccaacttcattacgtacgccatcgactggacgagcgaccgtgtcgtatggacagtgggagagacggtcgttcgcacactcaacgccgccgaagccgaagccggccaatacccccagacgcctatgcaaatcaaatttggcgcatggtctggtggcgatccgagcaatgcacaaggcaccatcgagtgggcacgtgggccgaccgattattcaaaggggcctttctccatggtcgtgcagagcatcaaagtgacggactacagcaccggcacgaaatacacatatggcgaccaaacaggcaattggcagtccatccaggcggaaggaggctccgtgaatggcaatctcaacggcgccggtgaattgagcaccacagccgtagtcactgcgcccgcatcaacctcatcttccgaagttcctgctggaggtattggatctgggagcacttcatgttctgattcatctaaccttccagctggctgggtgtacacgtcagactgcaaagttgttccgtctgctacctcagccgctgtacggccgtgtaacacctacacctacctcttcgccggcttactcatctacatctacgcagccctcgtcggagaccgcagaatctggtcatga

SEQ ID NO: 32495 - protein, 370 aa, Muscodor strobelii
  misc_feature: SGI Peptide ID NO. 571198
  misc_feature (58)..(228): Pfam Id: PF00722 Pfam Desc: Glycosyl hydrolases family 16
  misc_feature (12)..(348): NCBI GI: 116181972 Blast Desc: CHGG_01614 [Chaetomium globosum CBS 148.51] gi|88185911|gb|EAQ93379.1| CHGG_01614 [Chaetomium globosum CBS 148.51]
  misc_feature (24)..(343): NCBI GI: 39965159 Blast Desc: MGG_09918 [Magnaporthe grisea 70-15] gi|145013180|gb|EDJ97821.1| MGG_09918 [Magnaporthe grisea 70-15]
  misc_feature (7)..(357): NCBI GI: 46124991 Blast Desc: FG06873.1 [Gibberella zeae PH-1]
  misc_feature (37)..(345): NCBI GI: 156045697 Blast Desc: SS1G_10043 [Sclerotinia sclerotiorum 1980] gi|154694432|gb|EDN94170.1| SS1G_10043 [Sclerotinia sclerotiorum 1980]
  misc_feature (25)..(357): NCBI GI: 256732670 Blast Desc: NECHADRAFT_79097 [Nectria haematococca mpVI 77-13-4]
  misc_feature (27)..(364): NCBI GI: 85089620 Blast Desc: NCU09117 [Neurospora crassa OR74A] gi|28919342|gb|EAA28796.1| conserved [Neurospora crassa OR74A]
  misc_feature (26)..(343): NCBI GI: 189210884 Blast Desc: extracellular cell wall glucanase Crf1/allergen Asp F9 [Pyrenophora tritici-repentis Pt-1C-BFP] gi|187977866|gb|EDU44492.1| extracellular cell wall glucanase Asp
  misc_feature (7)..(334): NCBI GI: 145243240 Blast Desc: An11g01540 [Aspergillus niger] gi|134078829|emb|CAK45888.1| protein product [Aspergillus niger]
  misc_feature (21)..(338): NCBI GI: 169613074 Blast Desc: SNOG_09667 [Phaeosphaeria nodorum SN15] gi|160702643|gb|EAT82932.2| SNOG_09667 [Phaeosphaeria nodorum SN15]
  misc_feature (24)..(350): NCBI GI: 67526913 Blast Desc: AN3914.2 [Aspergillus nidulans FGSC A4] gi|40740033|gb|EAA59223.1| AN3914.2 [Aspergillus nidulans FGSC A4]
  misc_feature: Useful for introducing or modulating the production of volatile compounds
MLFSGRPLVATVAATIATFFFTSATAQTSSSCSPLSSTECPADPALGTALNVDFTQGSSDQFTASGGNPTYGSDGVSFTISGSGDAPQLNSLFYIMFGRVEITMKCAPGAGIVSTLVLISDDLDEIDCEWLGADDSELQTNYFGKGQTTTYNRGQFNPAPDNQANFITYAIDWTSDRVVWTVGETVVRTLNAAEAEAGQYPQTPMQIKFGAWSGGDPSNAQGTIEWARGPTDYSKGPFSMVVQSIKVTDYSTGTKYTYGDQTGNWQSIQAEGGSVNGNLNGAGELSTTAVVTAPASTSSSEVPAGGIGSGSTSCSDSSNLPAGWVYTSDCKVVPSATSAAVRPCNTYTYLFAGLLIYIYAALVGDRRIWS

SEQ ID NO: 32496 - DNA, 1970 bp, Muscodor strobelii
  misc_feature: SGI EST ID NO. CUFF.76887.2
  misc_feature: Variant of the nucleotide sequence at SEQ ID NO 32494
ttcttgcttgcttgatcacctgattggtgactggttctttcttccttgactgttttgtcgtacactccgaaactattaatcatttggttgcgtcttgcattctgccatcttccacttgacggacatctagcatctgcgcattctgacctcttttcctctggatgatacggacagtgccgcgatcgacgaagggatacatttaccacggttccagtccttcgcttgcactgcgaagtaacgaagcaacatgttgttttcaggcaggccgcttgtggcgactgtggcagctacaatcgccaccttcttcttcacctcagctacagcacagacttcgtcgtcttgtagtcctctgtcgtcgaccgaatgcccagccgatcccgccctcggtactgccctcaatgtcgacttcacccaaggcagctcggatcagttcacagcctctggcggtaacccaacgtacggttctgatggcgtttccttcaccatcagcggcagtggcgatgctccccagctcaactccctgttctacatcatgttcggccgagttgaaatcaccatgaagtgcgcccccggtgcaggcatcgtgtcgaccctggtgcttatatcggacgacctcgacgagatcgactgcgaatggctcggtgccgacgatagcgagttacagaccaattactttggcaagggccagaccacgacctataacagaggacagttcaaccctgcccctgataatcaggccaacttcattacgtacgccatcgactggacgagcgaccgtgtcgtatggacagtgggagagacggtcgttcgcacactcaacgccgccgaagccgaagccggccaatacccccagacgcctatgcaaatcaaatttggcgcatggtctggtggcgatccgagcaatgcacaaggcaccatcgagtgggcacgtgggccgaccgattattcaaaggggcctttctccatggtcgtgcagagcatcaaagtgacggactacagcaccggcacgaaatacacatatggcgaccaaacaggcaattggcagtccatccaggcggaaggaggctccgtgaatggcaatctcaacggcgccggtgaattgagcaccacagccgtagtcactgcgcccgcatcaacctcatcttccgaagttcctgctggaggtattggatctgggagcacttcatgttctgattcatctaaccttccagctggctgggtgtacacgtcagactgcaaagttgttccgtctgctacctcagccgctgtacgtatgtctaaagcccctacatcccatcccattctattaggggcgaattgctaagcagggctaacatcgaccagggccgtgtaacacctacacctacctcttcgccggcttactcatctacatctacgcagccctcgtcggagaccgcagaatctggtcatgataccaccaatacagcatcgagtctgctatgtgataatcagtggtatctcgtgttctctacaatcatgatcttggctatatgtctgaaaggtgtagacggggaatccggttgacagttgcgcaatacttcgtcatcatttcgggtctactgagtgacaaccatgtataccacttcaccttggccaggtgatgcttgttctatatcaccagtagagaggaacgtccggccctacattattttcccccttcttagatgaggtgcatggcggaggcgttctgttgcattactgagcattttcatttgtatttactaaatgaaggggtctgaaagggctgcatggataggaaaaagcatgagcatactgaacataaaagagatagcccgacatagcgttgcgaatagattctcgaatagatgtccgatttggcatatttcacgatcacaggattgatcatcgttgagtttggggtataatgttggaatttaaggtctacagaataggaaatactacgtaaaaagcgacagttttgataaaag

SEQ ID NO: 32497 - DNA, 1221 bp, Muscodor strobelii
  misc_feature: SGI cDNA ID NO. 571199
  misc_feature: Reduced expression when VOC is produced
  misc_feature: Encodes the peptide sequence at SEQ ID NO 32498
atgttgttttcaggcaggccgcttgtggcgactgtggcagctacaatcgccaccttcttcttcacctcagctacagcacagacttcgtcgtcttgtagtcctctgtcgtcgaccgaatgcccagccgatcccgccctcggtactgccctcaatgtcgacttcacccaaggcagctcggatcagttcacagcctctggcggtaacccaacgtacggttctgatggcgtttccttcaccatcagcggcagtggcgatgctccccagctcaactccctgttctacatcatgttcggccgagttgaaatcaccatgaagtgcgcccccggtgcaggcatcgtgtcgaccctggtgcttatatcggacgacctcgacgagatcgactgcgaatggctcggtgccgacgatagcgagttacagaccaattactttggcaagggccagaccacgacctataacagaggacagttcaaccctgcccctgataatcaggccaacttcattacgtacgccatcgactggacgagcgaccgtgtcgtatggacagtgggagagacggtcgttcgcacactcaacgccgccgaagccgaagccggccaatacccccagacgcctatgcaaatcaaatttggcgcatggtctggtggcgatccgagcaatgcacaaggcaccatcgagtgggcacgtgggccgaccgattattcaaaggggcctttctccatggtcgtgcagagcatcaaagtgacggactacagcaccggcacgaaatacacatatggcgaccaaacaggcaattggcagtccatccaggcggaaggaggctccgtgaatggcaatctcaacggcgccggtgaattgagcaccacagccgtagtcactgcgcccgcatcaacctcatcttccgaagttcctgctggaggtattggatctgggagcacttcatgttctgattcatctaaccttccagctggctgggtgtacacgtcagactgcaaagttgttccgtctgctacctcagccgctggccgtgtaacacctacacctacctcttcgccggcttactcatctacatctacgcagccctcgtcggagaccgcagaatctggtcatgataccaccaatacagcatcgagtctgctatgtgataatcagtggtatctcgtgttctctacaatcatgatcttggctatatgtctgaaaggtgtagacggggaatccggttga

SEQ ID NO: 32498 - protein, 406 aa, Muscodor strobelii
  misc_feature: SGI Peptide ID NO. 571199
  misc_feature (58)..(228): Pfam Id: PF00722 Pfam Desc: Glycosyl hydrolases family 16
  misc_feature (12)..(358): NCBI GI: 116181972 Blast Desc: CHGG_01614 [Chaetomium globosum CBS 148.51] gi|88185911|gb|EAQ93379.1| CHGG_01614 [Chaetomium globosum CBS 148.51]
  misc_feature (24)..(342): NCBI GI: 39965159 Blast Desc: MGG_09918 [Magnaporthe grisea 70-15] gi|145013180|gb|EDJ97821.1| MGG_09918 [Magnaporthe grisea 70-15]
  misc_feature (7)..(345): NCBI GI: 46124991 Blast Desc: FG06873.1 [Gibberella zeae PH-1]
  misc_feature (37)..(345): NCBI GI: 156045697 Blast Desc: SS1G_10043 [Sclerotinia sclerotiorum 1980] gi|154694432|gb|EDN94170.1| SS1G_10043 [Sclerotinia sclerotiorum 1980]
  misc_feature (25)..(348): NCBI GI: 256732670 Blast Desc: NECHADRAFT_79097 [Nectria haematococca mpVI 77-13-4]
  misc_feature (27)..(342): NCBI GI: 85089620 Blast Desc: NCU09117 [Neurospora crassa OR74A] gi|28919342|gb|EAA28796.1| conserved [Neurospora crassa OR74A]
  misc_feature (26)..(369): NCBI GI: 189210884 Blast Desc: extracellular cell wall glucanase Crf1/allergen Asp F9 [Pyrenophora tritici-repentis Pt-1C-BFP] gi|187977866|gb|EDU44492.1| extracellular cell wall glucanase Asp
  misc_feature (21)..(370): NCBI GI: 169613074 Blast Desc: SNOG_09667 [Phaeosphaeria nodorum SN15] gi|160702643|gb|EAT82932.2| SNOG_09667 [Phaeosphaeria nodorum SN15]
  misc_feature (7)..(345): NCBI GI: 145243240 Blast Desc: An11g01540 [Aspergillus niger] gi|134078829|emb|CAK45888.1| protein product [Aspergillus niger]
  misc_feature (24)..(325): NCBI GI: 67526913 Blast Desc: AN3914.2 [Aspergillus nidulans FGSC A4] gi|40740033|gb|EAA59223.1| AN3914.2 [Aspergillus nidulans FGSC A4]
  misc_feature: Useful for introducing or modulating the production of volatile compounds
MLFSGRPLVATVAATIATFFFTSATAQTSSSCSPLSSTECPADPALGTALNVDFTQGSSDQFTASGGNPTYGSDGVSFTISGSGDAPQLNSLFYIMFGRVEITMKCAPGAGIVSTLVLISDDLDEIDCEWLGADDSELQTNYFGKGQTTTYNRGQFNPAPDNQANFITYAIDWTSDRVVWTVGETVVRTLNAAEAEAGQYPQTPMQIKFGAWSGGDPSNAQGTIEWARGPTDYSKGPFSMVVQSIKVTDYSTGTKYTYGDQTGNWQSIQAEGGSVNGNLNGAGELSTTAVVTAPASTSSSEVPAGGIGSGSTSCSDSSNLPAGWVYTSDCKVVPSATSAAGRVTPTPTSSPAYSSTSTQPSSETAESGHDTTNTASSLLCDNQWYLVFSTIMILAICLKGVDGESG

SEQ ID NO: 32499 - DNA, 1970 bp, Muscodor strobelii; identical to SEQ ID NO: 32496
  misc_feature: SGI EST ID NO. CUFF.76887.2
  misc_feature: Variant of the nucleotide sequence at SEQ ID NO 32497

SEQ ID NO: 32500 - DNA, 1707 bp, Muscodor strobelii
  misc_feature: SGI cDNA ID NO. 571200
  misc_feature: Encodes the peptide sequence at SEQ ID NO 32501
atgacgttgaagagcggcggcgatgagcttgccgcaccgcactccacaactacccgccacaaataccctccaactaacgttggtggcattggcctagccgaagatgctactattgtcggggagcaggctgatgagccactcactttagcaggtattgctgcacgccgtgtcaaagctggcaaactggttgcaggaaccgcggcatactcagatagtgacatgttcaagagtccgcaatctgctaataaaaagaaagcaaatcgatgggaccatctcctaactgacgaatcgaaatcacgtaggccgtgtattttgaaggaagcagctaaatttctgaagaagcctggtatcatttcattgggcggtggattgccatctgcggataactttcctcttgacgagataagcatcaaaataccacaaccaccagctttcgacgcgggcagcgtcaacaatgccgaagacgacaaagttgccatgggcaaatacgacgtccgagacagagatggcgtctatgatctttctatagcgctcaactatggtcaatctattggatcggcgcagttggtgcggtgggtgaccgagcatacggaactcgtgtgtcggccgccatatgcagactggcgatgctccttgtccatcggcagcacaggcgccctagaacaggccttgagaatgttttgtgatcggaaccggaaggactccgttctcacggaggaatacagcttctcgactgcgctggagactcttgtgccgctgggtatcaaagcttttggtatagaaatggatgagcagggtctcctaccggaagtcatggacgatatcttaaccaattgggatgagagcgttaagggcgctcggaaaccacacgtattgtacaccgtgccttccggtcagaatccgactggagcgacgatgggggctgagagaaggaagaaagtctacgctgtttgccagaagcacgacgtcttcattcttgaggacgagccttactacttcttgcagatgcctgcttacgaccctgccaattccgcagcgcggcccggcgccgtcgacccaaatgctaatcagagcccggaggattttctgaaatctctcgctcctactatgttgagcctcgacgtcgatggtcgcgttttgcgcatggactcttttagcaaggtcgtcttcccaggctccagagcgggttgggtgacaggaagcgagcagatcatcgagcgctatatccgacatgcggagtgttgctcgcagggcccggcgggtgtctcacaggcgattttgtataaaatgctcgatgatgcgtggggccatgaaggctatctgcgctggttgatgcatacgagatatgagtataccaagaggagagacgcgctgctcgatgcttgcgagaagcatttgcctaagggggtcgtgagctgggtaccacctgcttgtggcatgtttcattggttgcgggtagatcacaagcttcatccacacgctgacaaaaagagtgttcgtgagatcgaggaggagattttcgacttgggcattgaaactggtgtcctcgcatgtcgtggctcctggttccgcgccgagcgtagcactgagcctaagagtctcttcttccgcacgacgtttgccgcagcttctcaggccgacatggatgtggcgatttcgaggtttggagacgcggtcaggaaaagctttgagttggagtcaaaatag

SEQ ID NO: 32501 - protein, 568 aa, Muscodor strobelii
  misc_feature: SGI Peptide ID NO. 571200
  misc_feature (155)..(555): Pfam Id: PF00155 Pfam Desc: Aminotransferase class I and II
  misc_feature (20)..(566): NCBI GI: 261356403 Blast Desc: aromatic amino acid aminotransferase [Verticillium albo-atrum VaMs.102]
  misc_feature (51)..(563): NCBI GI: 46108806 Blast Desc: FG01285.1 [Gibberella zeae PH-1]
  misc_feature (52)..(563): NCBI GI: 256734334 Blast Desc: [Nectria haematococca mpVI 77-13-4]
  misc_feature (47)..(565): NCBI GI: 145605359 Blast Desc: MGG_09919 [Magnaporthe grisea 70-15] gi|145013178|gb|EDJ97819.1| MGG_09919 [Magnaporthe grisea 70-15]
  misc_feature (49)..(566): NCBI GI: 238505226 Blast Desc: L-kynurenine/alpha-aminoadipate aminotransferase, [Aspergillus flavus NRRL3357] gi|220689956|gb|EED46306.1| L-kynurenine/alpha-aminoadipate aminotransferase, [Aspergillus
  misc_feature (49)..(566): NCBI GI: 169780598 Blast Desc: [Aspergillus oryzae RIB40] gi|83773503|dbj|BAE63630.1| protein product [Aspergillus oryzae]
  misc_feature (23)..(566): NCBI GI: 156045681 Blast Desc: SS1G_10035 [Sclerotinia sclerotiorum 1980] gi|154694424|gb|EDN94162.1| SS1G_10035 [Sclerotinia sclerotiorum 1980]
  misc_feature (33)..(566): NCBI GI: 119189161 Blast Desc: CIMG_04628 [Coccidioides immitis RS]
  misc_feature (39)..(566): NCBI GI: 240111344 Blast Desc: aminotransferase, classes I and II family protein [Coccidioides posadasii C735 delta SOWgp]
  misc_feature (23)..(566): NCBI GI: 154309497 Blast Desc: BC1G_07219 [Botryotinia fuckeliana B05.10] gi|150852242|gb|EDN27434.1| BC1G_07219 [Botryotinia fuckeliana B05.10]
  misc_feature (91)..(564): SWISSPROT Homolog: EC 2.6.1.57 Aromatic-amino-acid transaminase
  misc_feature: Useful for introducing or modulating the production of volatile compounds
  misc_feature: Useful for fungicidal and/or biocontrol applications
  misc_feature: Useful for production of fusel alcohols
MTLKSGGDELAAPHSTTTRHKYPPTNVGGIGLAEDATIVGEQADEPLTLAGIAARRVKAGKLVAGTAAYSDSDMFKSPQSANKKKANRWDHLLTDESKSRRPCILKEAAKFLKKPGIISLGGGLPSADNFPLDEISIKIPQPPAFDAGSVNNAEDDKVAMGKYDVRDRDGVYDLSIALNYGQSIGSAQLVRWVTEHTELVCRPPYADWRCSLSIGSTGALEQALRMFCDRNRKDSVLTEEYSFSTALETLVPLGIKAFGIEMDEQGLLPEVMDDILTNWDESVKGARKPHVLYTVPSGQNPTGATMGAERRKKVYAVCQKHDVFILEDEPYYFLQMPAYDPANSAARPGAVDPNANQSPEDFLKSLAPTMLSLDVDGRVLRMDSFSKVVFPGSRAGWVTGSEQIIERYIRHAECCSQGPAGVSQAILYKMLDDAWGHEGYLRWLMHTRYEYTKRRDALLDACEKHLPKGVVSWVPPACGMFHWLRVDHKLHPHADKKSVREIEEEIFDLGIETGVLACRGSWFRAERSTEPKSLFFRTTFAAASQADMDVAISRFGDAVRKSFELESK

SEQ ID NO: 32502 - DNA, 2206 bp, Muscodor strobelii
  misc_feature: SGI EST ID NO. CUFF.76848.0
  misc_feature: Variant of the nucleotide sequence at SEQ ID NO 32500
ccaatatcatttacataatgttgcgaagtttgctcataggtaaagctagtccatttgccagacaatcattaattgccttgctatttctttgatcgtgctccccacctttgtttaacttcctacatatcaacttctacttttaacatagtaacatctttgttacctggatgctcttatcttagcttcatatcatacaatctacaccgaaatcttccaccgacttataacgtcgaccaaacctcgcgttgcgacgactagaactgtcgacatgacgttgaagagcggcggcgatgagcttgccgcaccgcactccacaactacccgccacaaataccctccaactaacgttggtggcattggcctagccgaagatgctactattgtcggggagcaggctgatgagccactcactttagcaggtattgctgcacgccgtgtcaaagctggcaaactggttgcaggaaccgcggcatactcagatagtgacatgttcaagagtccgcaatctgctaataaaaagaaagcaaatcgatgggaccatctcctaactgacgaatcgaaatcacgtaggccgtgtattttgaaggaagcagctaaatttctgaagaagcctggtatcatttcattgggcggtggattgccatctgcggataactttcctcttgacgagataagcatcaaaataccacaaccaccagctttcgacgcgggcagcgtcaacaatgccgaagacgacaaagttgccatgggcaaatacgacgtccgagacagagatggcgtctatgatctttctatagcgctcaactatggtcaatctattggatcggcgcagttggtgcggtgggtgaccgagcatacggaactcgtgtgtcggccgccatatgcagactggcgatgctccttgtccatcggcagcacaggcgccctagaacaggccttgagaatgttttgtgatcggaaccggaaggactccgttctcacggaggaatacagcttctcgactgcgctggagactcttgtgccgctgggtatcaaagcttttggtatagaaatggatgagcagggtctcctaccggaagtcatggacgatatcttaaccaattgggatgagagcgttaagggcgctcggaaaccacacgtattgtacaccgtgccttccggtcagaatccgactggagcgacgatgggggctgagagaaggaagaaagtctacgctgtttgccagaagcacgacgtcttcattcttgaggacgagccttactacttcttgcagatgcctgcttacgaccctgccaattccgcagcgcggcccggcgccgtcgacccaaatgctaatcagagcccggaggattttctgaaatctctcgctcctactatgttgagcctcgacgtcgatggtcgcgttttgcgcatggactcttttagcaaggtcgtcttcccaggctccagagcgggttgggtgacaggaagcgagcagatcatcgagcgctatatccgacatgcggagtgttgctcgcagggcccggcgggtgtctcacaggcgattttgtataaaatgctcgatgatgcgtggggccatgaaggctatctgcgctggttgatgcatacgagatatgagtataccaagaggagagacgcgctgctcgatgcttgcgagaagcatttgcctaagggggtcgtgagctgggtaccacctgcttgtggcatgtttcattggttgcgggtagatcacaagcttcatccacacgctgacaaaaagagtgttcgtgagatcgaggaggagattttcgacttgggcattgaaactggtgtcctcgcatgtcgtggctcctggttccgcgccgagcgtagcactgagcctaagagtctcttcttccgcacgacgtttgccgcagcttctcaggccgacatggatgtggcgatttcgaggtttggagacgcggtcaggaaaagctttgagttggagtcaaaatagaaggcgaccatgttgacatgtcacgggtggcatgtttgatcaactgaacggtctctaggccagttgccagtggtcgtgagtgtgtggatgtgaaaagcatatcagtttcgtttgaaatagacattggaagtcttcaacaattgaagcgattttggaggtataggtagatcacatggaatagcctcatgaacgaatgactgtccattactatatcatctttgattaaatcag

SEQ ID NO: 32503 - DNA, 1500 bp, Muscodor strobelii
  misc_feature: SGI cDNA ID NO. 571201
  misc_feature: Elevated expression when VOC is produced
  misc_feature: Encodes the peptide sequence at SEQ ID NO 32504
atgaccgacctcaaagtcgatttgactgcccctaatggcaagaagttcacgctgccgacgggtttgtttattaacaatgaattcgtcaaggcgactagtggagaaactatcacgagcgtcaatcctacaaatgaggaagatatctgttcagttgaagcagcttcccccgatgatatcgacaaagcggtagcagcagcacgcgcagcattgaaccatgaatcgtggcgtgatctatcagtaacagaccgcggacgtctcatgttcgcgctggctgatctggcggagcaagaaaaagagatcctggccaccatcgagacttgggacaatggcaagccctatggagatgcgttgggtgatctcggcgaagtcatcgattgtcttcgttactacgctgggtgggcggacaagatctacgggcagacgatcccgacgacttcacaaaagttcgcttacacgcttcgccagcctattggtgtttgtgcacagatcattccttggaattaccctttagctatggcggcatggaagctgggtcccgctttggcctgcggcaacactgtggtcctcaaacccgctgagcagactcctctgtctatcctctattttgcgcaacttgttgctaaagccggattcccaaaaggtgttgtcaacattacaaacggattgggcaaggttgctgggcacgcactggcaagccacctcgggatcgataagattgccttcacggggtcgacgatgacgggaaagttaatcatgaagatagcatctgtaaacatgaagaatatcacgctcgagacgggtggcaagtcgcctttcctagtttttaaagatgctgatctggatcaagcagctaaatgggcacacattggtatcatgagcaaccagggacagatttgcactgcaacaagccgaattttggtacaagatacggtctatgacgattttgtcgcacgtttccgagaagttatcaagactacaagcaaagttggcgatccctttgaagatggcgtattccaggggcctcaggtcactaaagcacagtatgagaaagtcctgagctttgttgaatcaggagaatccgagggtgcgacgttgacgacgggtggcaaaccagcacctcttaatgggaagggtttcttcattgagcccacagttttcactaacgtgaaagactcgatgaagatctatcgtgaggaaatctttgggccattctgcgtcattgcctcgttcaacaccgaagatgaagcgatacgtatggcaaacgatacgacatacggacttggagccgccgtgttcacccagaatctggagctcgcacaccgcgccgctgcgcgtatcgattctggcatggtttggattaactcatcacaggactctgatgttagagttccatttggtggtgtcaagcagagtggaattggccgtgagctcggctctgccggattagaggcttacacgcagataaaggccattcacgtgaatatgggccaaaaattgtag

SEQ ID NO: 32504 - protein, 499 aa, Muscodor strobelii
  misc_feature: SGI Peptide ID NO. 571201
  misc_feature (28)..(491): Pfam Id: PF00171 Pfam Desc: Aldehyde dehydrogenase family
  misc_feature (1)..(499): NCBI GI: 145257373 Blast Desc: An04g03400 [Aspergillus niger] gi|134058621|emb|CAK38605.1| protein product [Aspergillus niger]
  misc_feature (1)..(499): NCBI GI: 255942697 Blast Desc: Pc18g02760 [Penicillium chrysogenum Wisconsin 54-1255] gi|211586850|emb|CAP94500.1| Pc18g02760 [Penicillium chrysogenum Wisconsin 54-1255]
  misc_feature (1)..(499): NCBI GI: 115397849 Blast Desc: retinal dehydrogenase 2 [Aspergillus terreus NIH2624] gi|114192707|gb|EAU34407.1| retinal dehydrogenase 2 [Aspergillus terreus NIH2624]
  misc_feature (1)..(499): NCBI GI: 119180485 Blast Desc: CIMG_08871 [Coccidioides immitis RS] gi|240110353|gb|EER28512.1| aldehyde dehydrogenase, [Coccidioides posadasii C735 delta SOWgp]
  misc_feature (1)..(499): NCBI GI: 159125120 Blast Desc: aldehyde dehydrogenase Ald3, [Aspergillus fumigatus A1163]
  misc_feature (1)..(499): NCBI GI: 119500812 Blast Desc: aldehyde dehydrogenase Ald3, [Neosartorya fischeri NRRL 181] gi|119415328|gb|EAW25266.1| aldehyde dehydrogenase Ald3, [Neosartorya fischeri NRRL 181]
  misc_feature (1)..(499): NCBI GI: 258578177 Blast Desc: aldehyde dehydrogenase [Uncinocarpus reesii 1704] gi|237903536|gb|EEP77937.1| aldehyde dehydrogenase [Uncinocarpus reesii 1704]
  misc_feature (1)..(499): NCBI GI: 70994240 Blast Desc: aldehyde dehydrogenase [Aspergillus fumigatus Af293] gi|66849601|gb|EAL89929.1| aldehyde dehydrogenase, [Aspergillus fumigatus Af293]
  misc_feature (6)..(499): NCBI GI: 67522465 Blast Desc: AN1689.2 [Aspergillus nidulans FGSC A4] gi|40745653|gb|EAA64809.1| AN1689.2 [Aspergillus nidulans FGSC A4] gi|259487029|tpe|CBF85372.1| TPA: aldehyde dehydrogenase FGSC
  misc_feature (1)..(499): NCBI GI: 242822726 Blast Desc: betaine-aldehyde dehydrogenase, [Talaromyces stipitatus ATCC 10500] gi|218712867|gb|EED12292.1| betaine-aldehyde dehydrogenase, [Talaromyces stipitatus ATCC
  misc_feature (1)..(499): SWISSPROT Homolog: EC 1.2.1.3 Aldehyde dehydrogenase (NAD(+))
  misc_feature: Useful for introducing or modulating the production of volatile compounds
  misc_feature: Useful for fungicidal and/or biocontrol applications
MTDLKVDLTAPNGKKFTLPTGLFINNEFVKATSGETITSVNPTNEEDICSVEAASPDDIDKAVAAARAALNHESWRDLSVTDRGRLMFALADLAEQEKEILATIETWDNGKPYGDALGDLGEVIDCLRYYAGWADKIYGQTIPTTSQKFAYTLRQPIGVCAQIIPWNYPLAMAAWKLGPALACGNTVVLKPAEQTPLSILYFAQLVAKAGFPKGVVNITNGLGKVAGHALASHLGIDKIAFTGSTMTGKLIMKIASVNMKNITLETGGKSPFLVFKDADLDQAAKWAHIGIMSNQGQICTATSRILVQDTVYDDFVARFREVIKTTSKVGDPFEDGVFQGPQVTKAQYEKVLSFVESGESEGATLTTGGKPAPLNGKGFFIEPTVFTNVKDSMKIYREEIFGPFCVIASFNTEDEAIRMANDTTYGLGAAVFTQNLELAHRAAARIDSGMVWINSSQDSDVRVPFGGVKQSGIGRELGSAGLEAYTQIKAIHVNMGQKL

SEQ ID NO: 32505 - DNA, 1921 bp, Muscodor strobelii
  misc_feature: SGI EST ID NO. CUFF.76851.0
  misc_feature: Variant of the nucleotide sequence at SEQ ID NO 32503
acgccttgtaactgtatcaagcaagtatttccgtgataacggacatctgatgcggggagaccgtttctacccgtactcctgattcgcaagaagctgacttgaggggaggggaaaagccgtgagacctattaccgtattacgtgtctcggtatagtcgtcgggtttggtcatgttgaagacgtttgttcgaagacaactgttttctgcagcaaaagtccgcacatttaacagaagtcacataggatttatacgactcatagctacgatgaccgacctcaaagtcgatttgactgcccctaatggcaagaagttcacgctgccgacgggtttgtttattaacaatgaattcgtcaaggcgactagtggagaaactatcacgagcgtcaatcctacaaatgaggaagatatctgttcagttgaagcagcttcccccgatgatatcgacaaagcggtagcagcagcacgcgcagcattgaaccatgaatcgtggcgtgatctatcagtaacagaccgcggacgtctcatgttcgcgctggctgatctggcggagcaagaaaaagagatcctggccaccatcgagacttgggacaatggcaagccctatggagatgcgttgggtgatctcggcgaagtcatcgattgtcttcgttactacgctgggtgggcggacaagatctacgggcagacgatcccgacgacttcacaaaagttcgcttacacgcttcgccagcctattggtgtttgtgcacagatcattccttggaattaccctttagctatggcggcatggaagctgggtcccgctttggcctgcggcaacactgtggtcctcaaacccgctgagcagactcctctgtctatcctctattttgcgcaacttgttgctaaagccggattcccaaaaggtgttgtcaacattacaaacggattgggcaaggttgctgggcacgcactggcaagccacctcgggatcgataagattgccttcacggggtcgacgatgacgggaaagttaatcatgaagatagcatctgtaaacatgaagaatatcacgctcgagacgggtggcaagtcgcctttcctagtttttaaagatgctgatctggatcaagcagctaaatgggcacacattggtatcatgagcaaccagggacagatttgcactgcaacaagccgaattttggtacaagatacggtctatgacgattttgtcgcacgtttccgagaagttatcaagactacaagcaaagttggcgatccctttgaagatggcgtattccaggggcctcaggtcactaaagcacagtatgagaaagtcctgagctttgttgaatcaggagaatccgagggtgcgacgttgacgacgggtggcaaaccagcacctcttaatgggaagggtttcttcattgagcccacagttttcactaacgtgaaagactcgatgaagatctatcgtgaggaaatctttgggccattctgcgtcattgcctcgttcaacaccgaagatgaagcgatacgtatggcaaacgatacgacatacggacttggagccgccgtgttcacccagaatctggagctcgcacaccgcgccgctgcgcgtatcgattctggcatggtttggattaactcatcacaggactctgatgttagagttccatttggtggtgtcaagcagagtggaattggccgtgagctcggctctgccggattagaggcttacacgcagataaaggccattcacgtgaatatgggccaaaaattgtagtgcaggtatttgcgtttgaattggagtttctttgtacgttatagctttatcagagaatgaattcgatagcttctcgggttttagtgcataagtcatgttcatatctttattatgaattgtgtcttgttgacatatcacaagactcgcttgttgaga

SEQ ID NO: 32506 - DNA, 933 bp, Muscodor strobelii
  misc_feature: SGI cDNA ID NO. 571202
  misc_feature: Encodes the peptide sequence at SEQ ID NO 32507
atggagacattcttaaacaacctgcctgcaaataacgtcgcacctctttggactgttatggaggcaatggtgccgccgaagcctgcacccaaggctgtgacagcaatgtggaagtacgatgaaatccgtcctttactactacagtctggcgaagtggtgaaagccgaggaggccgagcgtcgcgtcctcatgctcgtcaacccagccatgaaggcaccctatacaaccgacaccatctacgctggcctccagctcatactcccgggagagacggctccggcacataggcatacggcatttgccttgcgcttcatcatcgagggtgagcggggatttaccgccgtcggcggcaagaagataatgatgcgcagaggcgacgttattctcacgccaagttggcaatggcacgatcacggtcacgagggcgagggtccaatgatctggctcgacgggttagatctccccctatatcaggggtttccaaccaattttgctcagatgtatgaggaaagccgatatccgagcaagctctccgatgacgaagacgacctccgagtcggctggaatgaagtaatggcgtccttgaacgcacaaccccggtgcatcttccactatactgtcggccctaaggattcgaagcgacccctatcccgcacgattggtgcacaggcggaactcatcatgaaagaaagcgatactaatgcaattcgcgagtcttgctcctttgtgtaccactgtgtcgaaggagagggccgaaccacgttgaaactggcagatggaagtacacgagatatcgaatggaagcgaggagatacatttgctatacccggatggtcacaaagagttcatagttcttttcgcgcccgaagttacctattcgctatcaacgaccgcccgctattagataatctaggcatatataaacaggagtga

SEQ ID NO: 32507 - protein, 310 aa, Muscodor strobelii
  misc_feature: SGI Peptide ID NO. 571202
  misc_feature (82)..(155): Pfam Id: PF07883 Pfam Desc: Cupin domain
  misc_feature (2)..(305): NCBI GI: 145607671 Blast Desc: MGG_12246 [Magnaporthe grisea 70-15] gi|145015180|gb|EDJ99748.1| MGG_12246 [Magnaporthe grisea 70-15]
  misc_feature (4)..(310): NCBI GI: 171683099 Blast Desc: protein product [Podospora anserina] gi|170941509|emb|CAP67161.1| protein product [Podospora anserina]
  misc_feature (2)..(308): NCBI GI: 258575401 Blast Desc: conserved [Uncinocarpus reesii 1704] gi|237902148|gb|EEP76549.1| conserved [Uncinocarpus reesii 1704]
  misc_feature (2)..(309): NCBI GI: 145234077 Blast Desc: An02g12800 [Aspergillus niger] gi|134057352|emb|CAK44550.1| protein product [Aspergillus niger]
  misc_feature (15)..(310): NCBI GI: 255944075 Blast Desc: Pc20g02510 [Penicillium chrysogenum Wisconsin 54-1255] gi|211587540|emb|CAP85580.1| Pc20g02510 [Penicillium chrysogenum Wisconsin 54-1255]
  misc_feature (2)..(310): NCBI GI: 149211039 Blast Desc: MGCH7_ch7g982 [Magnaporthe grisea 70-15] gi|86196937|gb|EAQ71575.1| MGCH7_ch7g982 [Magnaporthe grisea 70-15]
  misc_feature (2)..(308): NCBI GI: 242796765 Blast Desc: gentisate 1,2-dioxygenase, [Talaromyces stipitatus ATCC 10500] gi|218719457|gb|EED18877.1| gentisate 1,2-dioxygenase, [Talaromyces stipitatus ATCC 10500]
  misc_feature (2)..(308): NCBI GI: 256721384 Blast Desc: [Nectria haematococca mpVI 77-13-4]
  misc_feature (4)..(308): NCBI GI: 70981552 Blast Desc: gentisate 1,2-dioxygenase [Aspergillus fumigatus Af293] gi|66843927|gb|EAL84267.1| gentisate 1,2-dioxygenase, [Aspergillus fumigatus Af293]
  misc_feature (1)..(310): NCBI GI: 46115524 Blast Desc: FG03604.1 [Gibberella zeae PH-1]
METFLNNLPANNVAPLWTVMEAMVPPKPAPKAVTAMWKYDEIRPLLLQSGEVVKAEEAERRVLMLVNPAMKAPYTTDTIYAGLQLILPGETAPAHRHTAFALRFIIEGERGFTAVGGKKIMMRRGDVILTPSWQWHDHGHEGEGPMIWLDGLDLPLYQGFPTNFAQMYEESRYPSKLSDDEDDLRVGWNEVMASLNAQPRCIFHYTVGPKDSKRPLSRTIGAQAELIMKESDTNAIRESCSFVYHCVEGEGRTTLKLADGSTRDIEWKRGDTFAIPGWSQRVHSSFRARSYLFAINDRPLLDNLGIYKQE

SEQ ID NO: 32508 - DNA, 1539 bp, Muscodor strobelii
  misc_feature: SGI EST ID NO. CUFF.76855.0
  misc_feature: Variant of the nucleotide sequence at SEQ ID NO 32506
gcggggtgtcggccaatataaatccatcatgtttacatacttctctttgcttgacacttaaataataataggagaatctcctcaacaagtcgcggtgagtttgaatcggttcgaaatattttttccttgttgatgttgcattcattgtatctgaagtgttcctgaatccttccaagccacttgattcggacaacagaattaaagaatcgcgagaaaacatatctcttcaaaaagtagacgtgccctttacagacggggtgacaatggagacattcttaaacaacctgcctgcaaataacgtcgcacctctttggactgttatggaggcaatggtgccgccgaagcctgcacccaaggctgtgacagcaatgtggaagtacgatgaaatccgtcctttactactacagtctggcgaagtggtgaaagccgaggaggccgagcgtcgcgtcctcatgctcgtcaacccagccatgtaagcgcgataaagtggacaagcttcaaacaagcgattaagacagttctaatggggactaaaaacaaggaaggcaccctatacaaccgacaccatctacgctggcctccagctcatactcccgggagagacggctccggcacataggcatacggcatttgccttgcgcttcatcatcgagggtgagcggggatttaccgccgtcggcggcaagaagataatgatgcgcagaggcgacgttattctcacgccaagttggcaatggcacgatcacggtcacgagggtgagttgagtgtcaggttgtcgttgtgtcttgatgtatcgtctccgctgataattaacgtcttgtaggcgagggtccaatgatctggctcgacgggttagatctccccctatatcaggggtttccaaccaattttgctcagatgtatgaggaaagccgatatccgagcaagctctccgatgacgaagacgacctccgagtcggctggaatgaagtaatggcgtccttgaacgcacaaccccggtgcatcttccactatactgtcggccctaaggattcgaagcgacccctatcccgcacgattggtgcacaggcggaactcatcatgaaagaaagcgatactaatgcaattcgcgagtcttgctcctttgtgtaccactgtgtcgaaggagagggccgaaccacgttgaaactggcagatggaagtacacgagatatcgaatggaagcgaggagatacatttgctatacccggatggtcacaaagagttcatagttcttttcgcgcccgaagttacctattcgctatcaacgaccgcccgctattagataatctaggcatatataaacaggagtgagctatttcggaaacatataaggcggtacttcatggtagatagtaggcgtatgaatcgtgacgataggttattattgatttctcaggcttttcatcgtactgttcagtatgcataagtaccagtcatctcacctcccttgtgaggtaaggtactgaaccaatctcggtggctgcgagcaactttgactcagcatcgtcatgtttaaa

SEQ ID NO: 32509 - DNA, 1803 bp, Muscodor strobelii
  misc_feature: SGI cDNA ID NO. 571203
  misc_feature: Encodes the peptide sequence at SEQ ID NO 32510
atgacagtggattcaactgcaggcatcgtccaaggagcaccgtttcaagacacaaatctcaagatgttgctatcgtcgcttttgctgctggcctcgccagtattggctatctggcccgcgcctacgtctttgaagaccggggattctgtattatttattaaggatagtctctccgtcacgtacaatgggaagcacgttgcatggtctgccggctatcaatcggaaggatcagatttctctagtactagtatcgtgaagggtggtgtgtctcgggccatgcaaaacatcctacacaaaaacttcgtgccatggatgttgtacggccgaaatgagttgcaacagacggagcctagcatctcttcgtaccgaacatacatcactcatctcagcatcacgcagaccggaaaagacagcaccaagacttacaagcctttagctggccaaagcgacgagtcttacaccctgaaggtcgacaagaagggagtagccacgattaaagctgctacctcaaccggtgtgctccgtgctttggagtcgttctcccaactgtttttcctgcactcgacgggctcggtagtatacaccaacttggcaccaattgagatctccgacacccctgaatatgaccatcgtggtattctcttcgatgtatccagaagcttctttcccgtggacagtgtcaagcgcacgattgatgctatgtcttggaataagttgaaccgtcttcacatccatgccactgactctcaatcgtggcccctggagatcccgtcgatgcccgagcttgcgaagaaaggcgcatacgccgccggcaagacgtttactcctggcgatcttgctgagatccaggagtatgcaatttggcgcggagtcgaagctatcgttgaaatcgattctcccggtcactttggcggcgccgtgttctcccaccctgaggtcattgctggctgggacgctacgccttggtctgcttattgcgccgaacctccttgtggccagctgcgcctcaacgaccccgatgtcgttgacccattccttgacaaactgatggacgacctgttgcctcgcctttcgccatattctgcctacttccacacaggcggtgatgaggtcaacttcaacttatacaaccttgatccttctgtagggaccaatgattccgccgtcattgtccctcttctccaaaagttcattgacaaacaccatgctcgagtacgaaaggctggtcttactcctatggtgtgggaagaaattcctgccagctacaacgttactatcggcaaagatgttgttgttcagtcgtggttaggcgacgaagcgatcgacgctcttactgcgcaggggcacaaggttattacaagtaattacaactactggtacctcgactgcggccgtggtcagtggctcaacttcgagaacggcgcgaatttcgatacatatttccccttcaatgactggtgcagtcctgctaagggctggcgcctggtttactcctatgatccccgcaaaggattgagtaaagagcaggctaaacttgtgctcggtggtgaagtggctgcatggagtgagtccatagatgacgctattattgatagcattctatggccgcgaagtagcgctatgggcgaggtcctatggtcgggtcgtactgacggctcgggtcaaaatcgttcgcaactcgaagctgctccaagactggctgagttccgtgagcgtatggttgcaagaggcgttggatctgcctcggtgcacatgccattctgtacccaggggatgaacgcaactgcttgtgagttcctgtag

SEQ ID NO: 32510 - protein, 600 aa, Muscodor strobelii
  misc_feature: SGI Peptide ID NO. 571203
  misc_feature (208)..(549): Pfam Id: PF00728 Pfam Desc: Glycosyl hydrolase family 20, catalytic domain
  misc_feature (68)..(206): Pfam Id: PF02838 Pfam Desc: Glycosyl hydrolase family 20, domain 2
  misc_feature (149)..(206): Pfam Id: PF02838 Pfam Desc: Glycosyl hydrolase family 20, domain 2
  misc_feature (20)..(599): NCBI GI: 39965199 Blast Desc: MGG_09922 [Magnaporthe grisea 70-15] gi|145013176|gb|EDJ97817.1| MGG_09922 [Magnaporthe grisea 70-15]
  misc_feature (32)..(579): NCBI GI: 256735041 Blast Desc: glycoside hydrolase family 20 [Nectria haematococca mpVI 77-13-4]
  misc_feature (21)..(577): NCBI GI: 46108802 Blast Desc: FG01283.1 [Gibberella zeae PH-1]
  misc_feature (33)..(599): NCBI GI: 116181962 Blast Desc: CHGG_01609 [Chaetomium globosum CBS 148.51] gi|88185906|gb|EAQ93374.1| CHGG_01609 [Chaetomium globosum CBS 148.51]
  misc_feature (32)..(600): NCBI GI: 18765883 Blast Desc: AF397022_1 family 20 chitobiase [Hypocrea virens] gi|19073007|gb|AAL84700.1|AF395761_1 chitobiase precursor [Hypocrea virens]
  misc_feature (21)..(600): NCBI GI: 21213857 Blast Desc: hexosaminidase [Hypocrea lixii]
  misc_feature (29)..(599): NCBI GI: 171687347 Blast Desc: protein product [Podospora anserina] gi|170943635|emb|CAP69287.1| protein product [Podospora anserina]
  misc_feature (32)..(600): NCBI GI: 48375118 Blast Desc: N-acetyl-beta-D-glucosaminidase [Trichoderma atroviride] gi|50083267|gb|AAT70228.1| N-acetyl-beta-D-glucosaminidase [Trichoderma atroviride]
  misc_feature (32)..(600): NCBI GI: 1839391 Blast Desc: exochitinase [Hypocrea lixii]
  misc_feature (33)..(599): NCBI GI: 164424934 Blast Desc: NCU10852 [Neurospora crassa OR74A] gi|157070720|gb|EDO65100.1| NCU10852 [Neurospora crassa OR74A]
  misc_feature (149)..(591): SWISSPROT Homolog: EC 3.2.1.52 Beta-N-acetylhexosaminidase
MTVDSTAGIVQGAPFQDTNLKMLLSSLLLLASPVLAIWPAPTSLKTGDSVLFIKDSLSVTYNGKHVAWSAGYQSEGSDFSSTSIVKGGVSRAMQNILHKNFVPWMLYGRNELQQTEPSISSYRTYITHLSITQTGKDSTKTYKPLAGQSDESYTLKVDKKGVATIKAATSTGVLRALESFSQLFFLHSTGSVVYTNLAPIEISDTPEYDHRGILFDVSRSFFPVDSVKRTIDAMSWNKLNRLHIHATDSQSWPLEIPSMPELAKKGAYAAGKTFTPGDLAEIQEYAIWRGVEAIVEIDSPGHFGGAVFSHPEVIAGWDATPWSAYCAEPPCGQLRLNDPDVVDPFLDKLMDDLLPRLSPYSAYFHTGGDEVNFNLYNLDPSVGTNDSAVIVPLLQKFIDKHHARVRKAGLTPMVWEEIPASYNVTIGKDVVVQSWLGDEAIDALTAQGHKVITSNYNYWYLDCGRGQWLNFENGANFDTYFPFNDWCSPAKGWRLVYSYDPRKGLSKEQAKLVLGGEVAAWSESIDDAIIDSILWPRSSAMGEVLWSGRTDGSGQNRSQLEAAPRLAEFRERMVARGVGSASVHMPFCTQGMNATACEFL

SEQ ID NO: 32511 - DNA, 2024 bp, Muscodor strobelii
  misc_feature: SGI EST ID NO. CUFF.76863.0
  misc_feature: Variant of the nucleotide sequence at SEQ ID NO 32509
gtccaagggtacgctttgcccaagatctcatatcgccacgcgacatagccgctattgataataagaagttttgagctacatattcgctttgctccccttgctgtctcttttgcctatcttgaatccacggttcctctacacccagcccatcttatgtcttagagcaccgtttcaagacacaaatctcaagatgttgctatcgtcgcttttgctgctggcctcgccagtattggctatctggcccgcgcctacgtctttgaagaccggggattctgtattatttattaaggatagtctctccgtcacgtacaatgggaagcacgttgcatggtctgccggctatcaatcggaaggatcagatttctctagtactagtatcgtgaagggtggtgtgtctcgggccatgcaaaacatcctacacaaaaacttcgtgccatggatgttgtacggccgaaatgagttgcaacagacggagcctagcatctcttcgtaccgaacatacatcactcatctcagcatcacgcagaccggaaaagacagcaccaagacttacaagcctttagctggccaaagcgacgagtcttacaccctgaaggtcgacaagaagggagtagccacgattaaagctgctacctcaaccggtgtgctccgtgctttggagtcgttctcccaactgtttttcctgcactcgacgggctcggtagtatacaccaacttggcaccaattgagatctccgacacccctgaatatgaccatcgtggtattctcttcgatgtatccagaagcttctttcccgtggacagtgtcaagcgcacgattgatgctatgtcttggaataagttgaaccgtcttcacatccatgccactgactctcaatcgtggcccctggagatcccgtcgatgcccgagcttgcgaagaaaggcgcatacgccgccggcaagacgtttactcctggcgatcttgctgagatccaggagtatgcaatttggcgcggagtcgaagctatcgttgaaatcgattctcccggtcactttggcggcgccgtgttctcccaccctgaggtcattgctggctgggacgctacgccttggtctgcttattgcgccgaacctccttgtggccagctgcgcctcaacgaccccgatgtcgttgacccattccttgacaaactgatggacgacctgttgcctcgcctttcgccatattctgcctacttccacacaggcggtgatgaggtcaacttcaacttatacaaccttgatccttctgtagggaccaatgattccgccgtcattgtccctcttctccaaaagttcattgacaaacaccatgctcgagtacgaaaggctggtcttactcctatggtgtgggaagaaattcctgccagctacaacgttactatcggcaaagatgttgttgttcagtcgtggttaggcgacgaagcgatcgacgctcttactgcgcaggggcacaaggttattacaagtaattacaactactggtacctcgactgcggccgtggtcagtggctcaacttcgagaacggcgcgaatttcgatacatatttccccttcaatgactggtgcagtcctgctaagggctggcgcctggtttactcctatgatccccgcaaaggattgagtaaagagcaggctaaacttgtgctcggtggtgaagtggctgcatggagtgagtccatagatgacgctattattgatagcattctatggccgcgaagtagcgctatgggcgaggtcctatggtcgggtcgtactgacggctcgggtcaaaatcgttcgcaactcgaagctgctccaagactggctgagttccgtgagcgtatggttgcaagaggcgttggatctgcctcggtgcacatgccattctgtacccaggggatgaacgcaactgcttgtgagttcctgtagagtgggaagtcaaattattgaccataaatgtgtaattaagaccaagagtgtaatcattataatatgataatatctaccgcacgtatgcacgatc

SEQ ID NO: 32512 - DNA, 1494 bp, Muscodor strobelii
  misc_feature: SGI cDNA ID NO. 571204
  misc_feature: Reduced expression when VOC is produced
  misc_feature: Encodes the peptide sequence at SEQ ID NO 32513
atgggtctagttgaggtagtggtggagcgttcgactcctaaggctgtcttcatttttctgactgtggctcttacgttatggtacatatactctaaggtcgatgagacggtcaggcttcgacgtctcgggggtcgggcgacgcgcgcagtgaaccagaggccattcggtctgggtattatcatgcaacaggtcaaagctacgatgaactacaagaatctcgaggcattcttagaggtcataaagccgtctccgacgtacacggtggaggctcggatgtttggacgtcgcatcattttcacagcggacccggaaaatatcaaggccattcttgcaacacagttccaagattacggaaagggtgaaccattccaccgcgagtgggaggagttcctgggcgatagtattttcacgactgatggccacgcatggcatgccagtcgacagcttctacggccacagttctccagagagcgcgtcagtgacttgcataccttcgaatcacatctcgatattctctttcaagcgattgccaatggtggacctttgaatgggccggaccacaaggtggacttagcggcgggcaacggcaaaccactggatatctgcgatctgttcttccgttatacgctagacgtctcaacgagctttctgcttggaaagggtgttgactcgttgagactaccacgtgagccttttgctgaagccttcaacgaggttcaacgagttcaaagtatcaaggcacgcgccggaccactacagaaactcgttccactaggcggattcaagtcaggccttgtagtcgttaacgagctttgcgacacgtatatcgatgccgcattgcgcctaagcaaggaggaactcgactccaagactcgatcagactccgaatacactttcctacacgaactggcattattcactcgcgatcgcaaagtgattcgggatcaactcgtcgcagtattgctggcgggccgtgacacaaccgcggcgacgttatcatggacattgtacgagcttggccgccatccagaagtcgtgcgcaaactacgacaagagatccttgagacagtcggtcctaacaagatacctgattatgccgacctcaaaagcatgaaatacttacaatataccgtgcaagagactctgcgactatatcctgtagtaccgttcaacgtccgcctagccctcaaagacacgacgctcccacgtggcggtggaccagatggcctggatcccgtcgcggtactcaaggacacaccgatcggatactcacccatcgtgatgcagcgccgccgtgatctctaccctgacgtctcagagaacttcccagatccggccgagtactgtcccgaccgctggttcaactggcaacctcgcccctggcagtatatccctttcaacggcggcccgcggatctgcattggccagcagtttgcgcttactgagatgacgtacgtgctcacgcgcatgttccagcgttttgaacgcgtggag

SEQ ID NO: 32513 - protein, 498 aa, Muscodor strobelii
  misc_feature: SGI Peptide ID NO. 571204
  misc_feature (54)..(498): Pfam Id: PF00067 Pfam Desc: Cytochrome P450
  misc_feature (187)..(402): Pfam Id: PF00067 Pfam Desc: Cytochrome P450
  misc_feature (442)..(495): Pfam Id: PF00067 Pfam Desc: Cytochrome P450
  misc_feature (1)..(497): NCBI GI: 39965179 Blast Desc: MGG_09920 [Magnaporthe grisea 70-15] gi|145013177|gb|EDJ97818.1| MGG_09920 [Magnaporthe grisea 70-15]
  misc_feature (1)..(498): NCBI GI: 116181964 Blast Desc: CHGG_01610 [Chaetomium globosum CBS 148.51] gi|88185907|gb|EAQ93375.1| CHGG_01610 [Chaetomium globosum CBS 148.51]
  misc_feature (1)..(497): NCBI GI: 164424932 Blast Desc: NCU09115 [Neurospora crassa OR74A] gi|157070719|gb|EAA28794.2| NCU09115 [Neurospora crassa OR74A]
  misc_feature (1)..(498): NCBI GI: 171687345 Blast Desc: protein product [Podospora anserina] gi|170943634|emb|CAP69286.1| protein product [Podospora anserina]
  misc_feature (1)..(498): NCBI GI: 46108804 Blast Desc: FG01284.1 [Gibberella zeae PH-1]
  misc_feature (1)..(498): NCBI GI: 261356405 Blast Desc: cytochrome P450 52A11 [Verticillium albo-atrum VaMs.102]
  misc_feature (1)..(497): NCBI GI: 256735040 Blast Desc: NECHADRAFT_31103 [Nectria haematococca mpVI 77-13-4]
  misc_feature (7)..(498): NCBI GI: 156045685 Blast Desc: SS1G_10037 [Sclerotinia sclerotiorum 1980] gi|154694426|gb|EDN94164.1| SS1G_10037 [Sclerotinia sclerotiorum 1980]
  misc_feature (19)..(498): NCBI GI: 189210960 Blast Desc: cytochrome P450 52A11 [Pyrenophora tritici-repentis Pt-1C-BFP] gi|187977904|gb|EDU44530.1| cytochrome P450 52A11 [Pyrenophora tritici-repentis Pt-1C-BFP]
  misc_feature (3)..(498): NCBI GI: 67526919 Blast Desc: AN3917.2 [Aspergillus nidulans FGSC A4] gi|40740036|gb|EAA59226.1| AN3917.2 [Aspergillus nidulans FGSC A4] gi|259481509|tpe|CBF75096.1| TPA: cytochrome P450, (Eurofung)
  misc_feature (101)..(494): SWISSPROT Homolog: EC 1.14.14.1 Unspecific monooxygenase
  misc_feature: Useful for introducing or modulating the production of volatile compounds
MGLVEVVVERSTPKAVFIFLTVALTLWYIYSKVDETVRLRRLGGRATRAVNQRPFGLGIIMQQVKATMNYKNLEAFLEVIKPSPTYTVEARMFGRRIIFTADPENIKAILATQFQDYGKGEPFHREWEEFLGDSIFTTDGHAWHASRQLLRPQFSRERVSDLHTFESHLDILFQAIANGGPLNGPDHKVDLAAGNGKPLDICDLFFRYTLDVSTSFLLGKGVDSLRLPREPFAEAFNEVQRVQSIKARAGPLQKLVPLGGFKSGLVVVNELCDTYIDAALRLSKEELDSKTRSDSEYTFLHELALFTRDRKVIRDQLVAVLLAGRDTTAATLSWTLYELGRHPEVVRKLRQEILETVGPNKIPDYADLKSMKYLQYTVQETLRLYPVVPFNVRLALKDTTLPRGGGPDGLDPVAVLKDTPIGYSPIVMQRRRDLYPDVSENFPDPAEYCPDRWFNWQPRPWQYIPFNGGPRICIGQQFALTEMTYVLTRMFQRFERVE

SEQ ID NO: 32514 - DNA, 1724 bp, Muscodor strobelii
  misc_feature: SGI EST ID NO. CUFF.76875.1
  misc_feature: Variant of the nucleotide sequence at SEQ ID NO 32512
cgcagaaggtatcttcgaggtttgcggttgtgcgatgattgccactccgctagactaaaccgaattggcggcaccgactactatatcagattattcattgaacattgaaacaacaccacgatacatggatagccgtaaggagaacgctgctaaggacctctcatacagctaagacctgtctcggcaatttcccctagatttttttcaattcaaattccgacgccttcaacatgggtctagttgaggtagtggtggagcgttcgactcctaaggctgtcttcatttttctgactgtggctcttacgttatggtacatatactctaaggtcgatgagacggtcaggcttcgacgtctcgggggtcgggcgacgcgcgcagtgaaccagaggccattcggtctgggtattatcatgcaacaggtcaaagctacgatgaactacaagaatctcgaggcattcttagaggtcataaagccgtctccgacgtacacggtggaggctcggatgtttggacgtcgcatcattttcacagcggacccggaaaatatcaaggccattcttgcaacacagttccaagattacggaaagggtgaaccattccaccgcgagtgggaggagttcctgggcgatagtattttcacgactgatggccacgcatggcatgccagtcgacagcttctacggccacagttctccagagagcgcgtcagtgacttgcataccttcgaatcacatctcgatattctctttcaagcgattgccaatggtggacctttgaatgggccggaccacaaggtggacttagcggcgggcaacggcaaaccactggatatctgcgatctgttcttccgttatacgctagacgtctcaacgagctttctgcttggaaagggtgttgactcgttgagactaccacgtgagccttttgctgaagccttcaacgaggttcaacgagttcaaagtatcaaggcacgcgccggaccactacagaaactcgttccactaggcggattcaagtcaggccttgtagtcgttaacgagctttgcgacacgtatatcgatgccgcattgcgcctaagcaaggaggaactcgactccaagactcgatcagactccgaatacactttcctacacgaactggcattattcactcgcgatcgcaaagtgattcgggatcaactcgtcgcagtattgctggcgggccgtgacacaaccgcggcgacgttatcatggacattgtacgagcttggccgccatccagaagtcgtgcgcaaactacgacaagagatccttgagacagtcggtcctaacaagatacctgattatgccgacctcaaaagcatgaaatacttacaatataccgtgcaagagactctgcgactatatcctgtagtaccgttcaacgtccgcctagccctcaaagacacgacgctcccacgtggcggtggaccagatggcctggatcccgtcgcggtactcaaggacacaccgatcggatactcacccatcgtgatgcagcgccgccgtgatctctaccctgacgtctcagagaacttcccagatccggccgagtactgtcccgaccgctggttcaactggcaacctcgcccctggcagtatatccctttcaacggcggcccgcggatctgcattggccagcagtttgcgcttactgagatgacgtacgtgctcacgcgcatgttccagcgttttgaacgcgtggag

SEQ ID NO: 32515 - DNA, 915 bp, Muscodor strobelii
  misc_feature: SGI cDNA ID NO. 571205
  misc_feature: Reduced expression when VOC is produced
  misc_feature: Encodes the peptide sequence at SEQ ID NO 32516
atggatctgtcactcccatccctgaaattgaaaggtatagttgtctttggcggcgggacagcaacgaatagcctggtggacatatttgagaaactgagggagagccgacgctgtacactcagttatatcatcccgattagtgacaatggggggagttcatcggaattgatacgtgtctttgggggaccgggcattggtgatattcgtagccgactggtccgtctcataccagatgcggaaacgaatacggagcgagcatgtatcaaggaactgttcaaccatcgtctctcatccgacccattggagtcgcgttcagagtggctggatatagtcgagggccgggacaagctttgggttaatatctcaagcgagaagcgtgagctcatccggtctatattcaacctcatgaacctggagatcgtgaagcggaatcgcccgagctccgtcttcaacttcgccaaggccagcatcggcaatttgttcttgactggcgcccgtctcttcacaggcagtctcgaatcagcaatctacctcctctcaacaatctgttccatcccaggcaccgtaacaaccctcccagcaataaccagcaacttcacacaccacatctcggcaggtctcctcgacgggacccaaatcaccggccaaaacgcgatatcccacccctccgcacccaccgcgctctccgaagcaccgttaggcgacgaaaccgaagcccacgacctaatcgaagacgcaaccctgcctggctccctgccctccttacgaaaacaatacataaacttctccaaactccccacagacagcgacgagctgtcctccccaataaacagaatatggtacataaacccctacgggcacgagatccggccgcccgccaacccaaaagtgatatccgccatcaccaactcatcc

SEQ ID NO: 32516 - protein, 305 aa, Muscodor strobelii
  misc_feature: SGI Peptide ID NO. 571205
  misc_feature (13)..(290): Pfam Id: PF01933 Pfam Desc: Uncharacterised protein family UPF0052
  misc_feature (13)..(301): Pfam Id: PF01933 Pfam Desc: Uncharacterised protein family UPF0052
  misc_feature (7)..(304): NCBI GI: 169625485 Blast Desc: SNOG_16015 [Phaeosphaeria nodorum SN15] gi|111055474|gb|EAT76594.1| SNOG_16015 [Phaeosphaeria nodorum SN15]
  misc_feature (8)..(304): NCBI GI: 189199472 Blast Desc: PTRG_05740 [Pyrenophora tritici-repentis Pt-1C-BFP] gi|187983172|gb|EDU48660.1| PTRG_05740 [Pyrenophora tritici-repentis Pt-1C-BFP]
  misc_feature (11)..(304): NCBI GI: 121713884 Blast Desc: UPF0052 domain protein [Aspergillus clavatus NRRL 1] gi|119402706|gb|EAW13127.1| UPF0052 domain protein [Aspergillus clavatus NRRL 1]
  misc_feature (8)..(301): NCBI GI: 145610683 Blast Desc: MGG_00983 [Magnaporthe grisea 70-15] gi|145018062|gb|EDK02341.1| MGG_00983 [Magnaporthe grisea 70-15]
  misc_feature (11)..(304): NCBI GI: 70997276 Blast Desc: UPF0052 domain protein [Aspergillus fumigatus Af293] gi|66851024|gb|EAL91350.1| UPF0052 domain protein [Aspergillus fumigatus Af293] gi|159126885|gb|EDP52001.1| UPF0052 domain
  misc_feature (11)..(304): NCBI GI: 119478756 Blast Desc: UPF0052 domain protein [Neosartorya fischeri NRRL 181] gi|119407587|gb|EAW17536.1| UPF0052 domain protein [Neosartorya fischeri NRRL 181]
  misc_feature (10)..(301): NCBI GI: 46124443 Blast Desc: FG06599.1 [Gibberella zeae PH-1]
  misc_feature (12)..(301): NCBI GI: 256726509 Blast Desc: [Nectria haematococca mpVI 77-13-4]
  misc_feature (11)..(304): NCBI GI: 226294176 Blast Desc: conserved [Paracoccidioides brasiliensis Pb18]
  misc_feature (11)..(304): NCBI GI: 225684517 Blast Desc: conserved [Paracoccidioides brasiliensis Pb03]
  misc_feature: Useful for introducing or modulating the production of volatile compounds
MDLSLPSLKLKGIVVFGGGTATNSLVDIFEKLRESRRCTLSYIIPISDNGGSSSELIRVFGGPGIGDIRSRLVRLIPDAETNTERACIKELFNHRLSSDPLESRSEWLDIVEGRDKLWVNISSEKRELIRSIFNLMNLEIVKRNRPSSVFNFAKASIGNLFLTGARLFTGSLESAIYLLSTICSIPGTVTTLPAITSNFTHHISAGLLDGTQITGQNAISHPSAPTALSEAPLGDETEAHDLIEDATLPGSLPSLRKQYINFSKLPTDSDELSSPINRIWYINPYGHEIRPPANPKVISAITNSS

SEQ ID NO: 32517 - DNA, 1013 bp, Muscodor strobelii
  misc_feature: SGI EST ID NO. CUFF.76882.1
  misc_feature: Variant of the nucleotide sequence at SEQ ID NO 32515
ctccgtgaacgaatcaaatccagaagatcttgaaccatatgacacagaaactgatattatttaattctcagccgtatctcaaatttgggtgcgcgaaatcggcctcatggatctgtcactcccatccctgaaattgaaaggtatagttgtctttggcggcgggacagcaacgaatagcctggtggacatatttgagaaactgagggagagccgacgctgtacactcagttatatcatcccgattagtgacaatggggggagttcatcggaattgatacgtgtctttgggggaccgggcattggtgatattcgtagccgactggtccgtctcataccagatgcggaaacgaatacggagcgagcatgtatcaaggaactgttcaaccatcgtctctcatccgacccattggagtcgcgttcagagtggctggatatagtcgagggccgggacaagctttgggttaatatctcaagcgagaagcgtgagctcatccggtctatattcaacctcatgaacctggagatcgtgaagcggaatcgcccgagctccgtcttcaacttcgccaaggccagcatcggcaatttgttcttgactggcgcccgtctcttcacaggcagtctcgaatcagcaatctacctcctctcaacaatctgttccatcccaggcaccgtaacaaccctcccagcaataaccagcaacttcacacaccacatctcggcaggtctcctcgacgggacccaaatcaccggccaaaacgcgatatcccacccctccgcacccaccgcgctctccgaagcaccgttaggcgacgaaaccgaagcccacgacctaatcgaagacgcaaccctgcctggctccctgccctccttacgaaaacaatacataaacttctccaaactccccacagacagcgacgagctgtcctccccaataaacagaatatggtacataaacccctacgggcacgagatccggccgcccgccaacccaaaagtgatatccgccatcacca

SEQ ID NO: 32518 - DNA, 3978 bp, Muscodor strobelii
  misc_feature: SGI cDNA ID NO. 571206
  misc_feature: Encodes the peptide sequence at SEQ ID NO 32519
atggcccctctggtcgacaacccgcagatcaagagcgccgagctcttgtccccgctgcctttttacctgcacgcctacatctggcccttcgccataatatggcctatctttgcccgctactactacacccccgagctctacgagaagcacatcgcctcgtctgaatggacctttgtctggtgcggcaccatcatcaccctccagagtttggtctggctgagcaccaactggaacatcgacctcaaggctcgcttcacggctaccaaggccaagtctgtccaagatgctcagctcatcaaagtcatccccatcgaaaactccggctcggccgatatatgccccctttctcgtgaacataccaacggtgccatcgatctctcgttcctgttccagaagcgtcgcttcctctacgatcctgaaaagcagtcgttcgctcccctcacatacgagatcgatgccgagccgaccccctctctgagcaaattccaaagctccaagggtatcacctcggccgccgacctcaagaaactcgaacattactatggctccaacactttcgatattcctgttcccaccttcaccgagctcttcaaggagcattccgttgcccccttctttgtgttccaggtcttctgtgttggcctgtggatgctggatgaatactggtactactcgctattcacgcttttcatgctggttgtgttcgagagcactgttgtctggcagcgtcagcgaaccctcaacgagttccgaggaatgagcatcaagccctacgacgtgtgggtctaccgcctgggcaaatggacagagattcagagtgacaagctgctccccggcgatcttgtctctgttggccgcaccaaggaagacagtggtgtggcctgcgatatgcttctcgtggagggtactgccattgtgaacgaagctatgctgtctggtgaaagtactccacttctcaaagactcgattcaattgcgaccaggtgatgctcagattgacactgagggactggacaagaactccttcctctggggcggcaccaaggttttgcaagttacgcacggtaatcccgacgaagagaaacccaaactcgcatcgggtgtccccgccccacccgacaacggtgtgatggccattgtcatgaagactggtttcgaaacatcgcaaggaagtctcgttcgcactatgatctactctaccgagcgtgtctctgccaacaatgttgaggccctgctcttcattctgttcctactggttttcgcattggctgcgtcttggtatgtttgggacgagggtgtcagaaaggaccgaaagcgatcaaagctgcttctggactgtatcctcattgtcacgagtgtcgtaccccctgaattacccatggaactcagtcttgctgtcaacacaagtctagctgccttggctaagtttgccatcttctgtaccgagccattccgaatccccttcgctggtcgcattgatgttgcttgtttcgacaagacaggcactctgactggcgaggatctggtggtagaaggtattgctggactgggtcttggtcacactggaactgatacccctgttgaatctgatggtgcccacagtcatatgactccagtccgacatgctggcatggagacaacgttggtgttggcaactgctcatgccttggtcaaactcgacgagggtgatattgttggtgatcctatggaaaaggcaaccctcattgctcttggatggggactcggtaaaaacgatgtactggctgctaagcctgctacaactgcagctggaggtacatccggctcagtgcaggtcaagcgtcgtttccaattctcgtcagccttaaagcgtcaaagctccgttgctagtgtcaacgcaatggatccgatgacaggccaaaagatccgcggaacctttgttggcgtaaagggagctccagagaccatcatgaaaatgctagtcactgtgccaaaagactacgaagagacctacaaatacttcactcgtcgtggctctcgtgttcttgctctcgcatacaagcaattgtcagttgacagcgaactaggttccggcaggatcaacgaactgaagcgcgaaaaagtcgaggctgaacttacgtttgctggtttcttggttcttcaatgtcctctcaaggatgacgctaagcaagcagtccagatgctgaacgagagcagtcatcgtgtcgtcatgatcacaggagataatccgctcacggcagtacacgttgcgcgcgaggtcgaaattgttgatcgggatgttctcattctcgacgctcccgagaagaacgatggaggcgagaagctcgtttggcgcagtgttgacgacaaagttaatatcgaagttgatgcttccaagcccatcgaccctgagatcattaagacaaaggatatctgtgtcaccggttatgctcttgccaaatactctgacaacgtctctgcctggaaatcattgctgcgccatacttgggtgtatgctcgtgtctctcccaaacagaaggaagaaattcttctaggtcttaaggatatgggatatttcaccctcatggctggtgatggtaccaatgatgtcggcgctctcaagcaggcgcacattggtattgccttattgaacggaacccaggaggatttgaccagaatcgcagaacacgctcgaaacaccaaaatgaaggaattgtaccagaagcaagtcgacctcatgaagagattcaaccaaccagctcctccagtccccgtactgattgcccatctgtatccatccggtccttcgaacccacacctccgaaaggcactggaacgcgaagcatcaaagaaggggatggctgtcgaggaatatgccaagctgaatggacacgacctggagactatcacatcgccaggtgctcaacagctcatgcaaccagatcccaagaccgccaagcagcaagaaaatatgaaaaaggctgctggttttgccgacaagatgactagtgctatgatggagcaagagatggatgacggtgaaccacctactctcaagctcggtgatgcgtctgttgctgcccctttcactagcaagctccgcaacgtcattgcagttcccaacatcattcgtcagggccgctgtacattggtggcaactattcagatgtacaagattctggctctcaactgtctgatcagcgcctacagtctcagtgtcctctatctggaaggtatcaagttcggtgatggtcagattacgatcagcggaatgcttatgagtgtctgtttcctgtctatttctcgtgctaagtcggtcgaggggctctcgaaagagcgaccccaacctaacattttcaacttctacatcatcggttccattttaggtcaatttgcggtacacatcgtcactttgatctacattgctcgattctgcgacagacttgaaccccgtgccgaaattgtcgacttggaggcagaattcaaaccatctctgctcaatagcgcagtttacctccttcagctcatccaacaagtctcaacctttgctgtcaactatcaaggcaggcctttccgtgaggctttaaccgagaataagggcatgttctacggtatcatcggcgtgactggtatcgcttttgcctgctcgactgagttcatccctgaaatcaacgagcagatgaaactggtcaagttcagcgacgagtttaagatgactatgaccgctgtgatggtaattgactacatcggctgttgggtcattgaagtagttttgaagaagctgttcagcgactatcgtccacgtgacattgctgagcgacgaccggagcagctcgaacgtgagcgggtgcggaaggcagctgagcagaagatcaaggacgaggaagacgagaagaagcgcctcgctaaggtagcggagttcgagagaaaggtcgaggaacgaagacagaagattcaggcgtggagtcagggccgtcgtgacgctgtccaggccacgtaa

SEQ ID NO: 32519 - protein, 1325 aa, Muscodor strobelii
  misc_feature: SGI Peptide ID NO. 571206
  misc_feature (492)..(879): Pfam Id: PF00702 Pfam Desc: haloacid dehalogenase-like hydrolase
  misc_feature (228)..(475): Pfam Id: PF00122 Pfam Desc: E1-E2 ATPase
  misc_feature (262)..(351): Pfam Id: PF00122 Pfam Desc: E1-E2 ATPase
  misc_feature (492)..(756): Pfam Id: PF00702 Pfam Desc: haloacid dehalogenase-like hydrolase
  misc_feature (829)..(879): Pfam Id: PF00702 Pfam Desc: haloacid dehalogenase-like hydrolase
  misc_feature (1)..(1324): NCBI GI: 116197150 Blast Desc: conserved [Chaetomium globosum CBS 148.51] gi|88181086|gb|EAQ88554.1| conserved [Chaetomium globosum CBS 148.51]
  misc_feature (1)..(1317): NCBI GI: 171688172 Blast Desc: protein product [Podospora anserina] gi|170944048|emb|CAP70158.1| protein product [Podospora anserina]
  misc_feature (1)..(1318): NCBI GI: 46111157 Blast Desc: FG02460.1 [Gibberella zeae PH-1]
  misc_feature (1)..(1307): NCBI GI: 85090418 Blast Desc: cation-transporting ATPase 4 [Neurospora crassa OR74A] gi|28919767|gb|EAA29171.1| cation-transporting ATPase 4 [Neurospora crassa OR74A]
  misc_feature (1)..(1317): NCBI GI: 261360050 Blast Desc: cation-transporting ATPase [Verticillium albo-atrum VaMs.102]
  misc_feature (1)..(1311): NCBI GI: 145606635 Blast Desc: MGG_12005 [Magnaporthe grisea 70-15] gi|145014317|gb|EDJ98885.1| MGG_12005 [Magnaporthe grisea 70-15]
  misc_feature (1)..(1318): NCBI GI: 256726046 Blast Desc: [Nectria haematococca mpVI 77-13-4]
  misc_feature (19)..(1307): NCBI GI: 156048877 Blast Desc: SS1G_08145 [Sclerotinia sclerotiorum 1980] gi|154692544|gb|EDN92282.1| SS1G_08145 [Sclerotinia sclerotiorum 1980]
  misc_feature (1)..(1307): NCBI GI: 154317198 Blast Desc: BC1G_03501 [Botryotinia fuckeliana B05.10] gi|150844918|gb|EDN20111.1| BC1G_03501 [Botryotinia fuckeliana B05.10]
  misc_feature (2)..(1293): NCBI GI: 119490719 Blast Desc: cation transporting ATPase, [Neosartorya fischeri NRRL 181] gi|119411242|gb|EAW21185.1| cation transporting ATPase, [Neosartorya fischeri NRRL 181]
  misc_feature (158)..(878): SWISSPROT Homolog: EC 3.6.3.8 Calcium-transporting ATPase
MAPLVDNPQIKSAELLSPLPFYLHAYIWPFAIIWPIFARYYYTPELYEKHIASSEWTFVWCGTIITLQSLVWLSTNWNIDLKARFTATKAKSVQDAQLIKVIPIENSGSADICPLSREHTNGAIDLSFLFQKRRFLYDPEKQSFAPLTYEIDAEPTPSLSKFQSSKGITSAADLKKLEHYYGSNTFDIPVPTFTELFKEHSVAPFFVFQVFCVGLWMLDEYWYYSLFTLFMLVVFESTVVWQRQRTLNEFRGMSIKPYDVWVYRLGKWTEIQSDKLLPGDLVSVGRTKEDSGVACDMLLVEGTAIVNEAMLSGESTPLLKDSIQLRPGDAQIDTEGLDKNSFLWGGTKVLQVTHGNPDEEKPKLASGVPAPPDNGVMAIVMKTGFETSQGSLVRTMIYSTERVSANNVEALLFILFLLVFALAASWYVWDEGVRKDRKRSKLLLDCILIVTSVVPPELPMELSLAVNTSLAALAKFAIFCTEPFRIPFAGRIDVACFDKTGTLTGEDLVVEGIAGLGLGHTGTDTPVESDGAHSHMTPVRHAGMETTLVLATAHALVKLDEGDIVGDPMEKATLIALGWGLGKNDVLAAKPATTAAGGTSGSVQVKRRFQFSSALKRQSSVASVNAMDPMTGQKIRGTFVGVKGAPETIMKMLVTVPKDYEETYKYFTRRGSRVLALAYKQLSVDSELGSGRINELKREKVEAELTFAGFLVLQCPLKDDAKQAVQMLNESSHRVVMITGDNPLTAVHVAREVEIVDRDVLILDAPEKNDGGEKLVWRSVDDKVNIEVDASKPIDPEIIKTKDICVTGYALAKYSDNVSAWKSLLRHTWVYARVSPKQKEEILLGLKDMGYFTLMAGDGTNDVGALKQAHIGIALLNGTQEDLTRIAEHARNTKMKELYQKQVDLMKRFNQPAPPVPVLIAHLYPSGPSNPHLRKALEREASKKGMAVEEYAKLNGHDLETITSPGAQQLMQPDPKTAKQQENMKKAAGFADKMTSAMMEQEMDDGEPPTLKLGDASVAAPFTSKLRNVIAVPNIIRQGRCTLVATIQMYKILALNCLISAYSLSVLYLEGIKFGDGQITISGMLMSVCFLSISRAKSVEGLSKERPQPNIFNFYIIGSILGQFAVHIVTLIYIARFCDRLEPRAEIVDLEAEFKPSLLNSAVYLLQLIQQVSTFAVNYQGRPFREALTENKGMFYGIIGVTGIAFACSTEFIPEINEQMKLVKFSDEFKMTMTAVMVIDYIGCWVIEVVLKKLFSDYRPRDIAERRPEQLERERVRKAAEQKIKDEEDEKKRLAKVAEFERKVEERRQKIQAWSQGRRDAVQAT

SEQ ID NO: 32520 - DNA, 7919 bp, Muscodor strobelii
  misc_feature: SGI EST ID NO. CUFF.77266.0
  misc_feature: Variant of the nucleotide sequence at SEQ ID NO 32518
ccgccaagcaaggttttgaagattacaatatcattagtctttaggtaaggtggcttaggtgtttgaaagttagtgtgcaatttcacgatgtcattgatcctcaaagccgggacaagatattagtcatcccgatattcgatttgatcttctggcctcttataccctatacccatttccatttggttgtacaagccaacagcgtcacttttaaatgttgacctattccaccaaacatatgtacttatatggaattcttcacaggtaacggtcttccaagtgacggtcgttgaaggtgaatgtcgaaaatgtcgtcttcttataagacgtctaaatcgacaattccgtccgaagaaaaccaaaacttgctgcctcaatacactgtcagcagcaaagaggaaaagagtcgagatgggcttgctggccacatcaacgatgtaccagctacccgcagcctcggactgaagatcggagctctcatcgccatctctctgacacttatcgctggaatcggatacaccaaggtgggctgtgacctgccatctgcgtctttcaccagctctcctggccgtaaggttgccagggctgactcaacgggcacttcgtttctggaccatgatgaacccattagcggtttttttggacagactttcttgaaagataatattccttacctcgatattcccgactcgcttattcaagatgtctattattaccgctggtcagcgatacagcgacatctccgttacattttgccaggcacgggttacatgctcaccgagttcatgcaaagtgtcggatacgccaaagccttcgggacaattgacgcagcagctggtcatcagatcgacgagtcgagatggctgagaaatgttgcttttgcagacgactacatacagttgtacacgcgaggccccgcagatccgttacaatatacacagtggattcttgatgccatgagtcgccgggccatggtgacaggtgacaacgacttcctcacgacgcagctcgaagatatgattcgcgtctggcatctatgggacaactcttttgactcgggagccggactatactactatgaacccaactgggatgcacaggagctctcgttgccaggctttgtggccgacgctgatggtactaattatactctcagacttaacgggccagatacttttcggccaagtcacaatgcctatatggtcgctaatgctcgagcaatcgcgagagctgcaaatttgataaacgacgggttcaatcaagatcaatttatggagctggcagataacattgaggccgctatgtataaacatttgtgggctcccgagcaagaattcttcatggatatcatccgtcctaataacccagacttcacaccattgactggccgtgaagcagttgggctttatccttatcgatttgggataggactgaaccagtcgtactcccagccggccttagaccaactatttgatccacagggattcctggccacctacggaccaacgactcttgaaatccgcaaccagtattacagtgctactaagcttgacgatggatactgctgctggtggaacggccagtcttggccatttacaacaagtcacgttctgaagtctatggccgctatctatcaagcagggaatacggatatgacagcggatcagtatgtggactacctccgcacatacgcaattacgcaacagaaggatggaaagccgtacgtggccgaatctcactaccctctgatggactcttggtctgcagacagctcgaaccactctgaaaactacgaccactcaaccaataatgatgatgtgatcactggtctgttgggcataatgccacagcccgacgacacgctgcgcatttcacctatcgtgcccgacaactggacctacttcgctcttgagaatctcccatatcatggacatttagtcactgttctttatgataaggatggctcacgatataatactggatcatcgggattgagtgtctacatcgacggctcgattgtgcacaatgacgaagccagacaagcaacagtgacgatcccgccggccaatgcgcccgaaaccgcccctgtcaacatcgccgtcaatcccacagggcccggctattacccaatggcaggtgccacatacacttatgaagcggactacgaattcaaagctattgatggcgttgtcttctatgacagtatccccgacaaccgttggacaaactatcagtctcccaacgacaacgacacgcttacggtcacatttgcccgtccacgtaaaatctcatccattactctggcgcttttctcggatgctgcgcgaggaggttctgtagacataccttccaagattgaaatctacggttcggatggtctcataaagacagtaccggtagatgacagctcggaatttctgcccaatgacaagaacgagatcactttcgacgaagtagagacaacattcgttgcggtcaacatgttccgcagagattcaaacacgtgggttggtctctgtgaggtcgaggcatggacagcgccagtctctggacctacatactacgccgtagatgcctatctcacgggctcgaccactaaggtccagtttgactcgtcgtcgaaagcaacgtccaatggagctgtggtggcaggcgtacagactgacagcaccatcgccttctcaggcatcgagtcggctgatggcggaagtgccactttgacacttagctacgccaattctgggtctgccagtggaaacataacagttttggtcaaccaggtatcgtcaggtactttgacgttgacaccaacatcgggagattatgacaccgccgacatggagattaaattggcggtggggaagaattacgtgagcttggttggtgggattgatggggatggaaccgacctgaaggttgagacgatgatgattgcttaggtacatcaaaggggattgcttaggtacatcaaaggggattggaacggtgttgcatagcgttctggttggaatacaagcggagcattcagtggtttggacaggtcctatgtctcattgatacatgcagctttaaggctcaatgctgaaaatttccatagcatccatagcatcattaatattattgaggaagagcagaaacacggaagtcatcttcatcttgacaagaatatgtttgaggtattgagtgtatgtgatgctgaagttgtcccattgcctgtcgtagtccactgttagcagctgatgagggggacgggatcggacagggcatgcgccacagactgacgtcgtgcacgcctcgtttcattggcatttggaattcgatagcaaaagtttcgacatgacttggctattgtcttcacgttagggattcttagttcgaacaggggtctgacaagagcaaagaaaagaaactcgaggaacattgaaatttcgggctgcatccatgatccgccacccccgtaggcatcgacttggacgcgctaatctcatccagagctgaagaggtcccaactaattttcatgtccccgcgaatcgatagcggatctgagtcgctgcccctggaactttgtgaagacgccacggttgtcagttgcgcactgcactaataattgtatcaactgtcgccgtcttcacgttcacggttccatcccactttcgagacagcagccatctcgccgaatttgaagtccaacaaccttcactccccacgcccctacaccgtagtaggggttttattgtcgtctcctcatgactgtccgggcgacatagacaccccgacatcatggcccctctggtcgacaacccgcagatcaagagcgccgagctcttgtccccgctgcctttttacctgcacgcctacatctggcccttcgccataatatggcctatctttgcccgctactactacacccccgagctctacgagaagcacatcgcctcgtctgaatggacctttgtctggtgcggcaccatcatcaccctccagagtttggtctggctgagcaccaactggaacatcgacctcaaggctcgcttcacggctaccaaggccaagtctgtccaagatgctcagctcatcaaagtcatccccatcgaaaactccggctcggccgatatatgccccctttctcgtgaacataccaacggtgccatcgatctctcgttcctgttccagaagcgtcgcttcctctacgatcctgaaaagcagtcgttcgctcccctcacatacgagatcgatgccgagccgaccccctctctgagcaaattccaaagctccaagggtatcacctcggccgccgacctcaagaaactcgaacattactatggctccaacactttcgatattcctgttcccaccttcaccgagctcttcaaggagcattccgttgcccccttctttgtgttccaggtcttctgtgttggcctgtggatgctggatgaatactggtactactcgctattcacgcttttcatgctggttgtgttcgagagcactgttgtctggcagcgtcagcgaaccctcaacgagttccgaggaatgagcatcaagccctacgacgtgtgggtctaccgcctgggcaaatggacagagattcagagtgacaagctgctccccggcgatcttgtctctgttggccgcaccaaggaagacagtggtgtggcctgcgatatgcttctcgtggagggtactgccattgtgaacgaagctatgctgtctggtgaaagtactccacttctcaaagactcgattcaattgcgaccaggtgatgctcagattgacactgagggactggacaagaactccttcctctggggcggcaccaaggttttgcaagttacgcacggtaatcccgacgaagagaaacccaaactcgcatcgggtgtccccgccccacccgacaacggtgtgatggccattgtcatgaagactggtttcgaaacatcgcaaggaagtctcgttcgcactatgatctactctaccgagcgtgtctctgccaacaatgttgaggccctgctcttcattctgttcctactggttttcgcattggctgcgtcttggtatgtttgggacgagggtgtcagaaaggaccgaaagcgatcaaagctgcttctggactgtatcctcattgtcacgagtgtcgtaccccctgaattacccatggaactcagtcttgctgtcaacacaagtctagctgccttggctaagtttgccatcttctgtaccgagccattccgaatccccttcgctggtcgcattgatgttgcttgtttcgacaagacaggcactctgactggcgaggatctggtggtagaaggtattgctggactgggtcttggtcacactggaactgatacccctgttgaatctgatggtgcccacagtcatatgactccagtccgacatgctggcatggagacaacgttggtgttggcaactgctcatgccttggtcaaactcgacgagggtgatattgttggtgatcctatggaaaaggcaaccctcattgctcttggatggggactcggtaaaaacgatgtactggctgctaagcctgctacaactgcagctggaggtacatccggctcagtgcaggtcaagcgtcgtttccaattctcgtcagccttaaagcgtcaaagctccgttgctagtgtcaacgcaatggatccgatgacaggccaaaagatccgcggaacctttgttggcgtaaagggagctccagagaccatcatgaaaatgctagtcactgtgccaaaagactacgaagagacctacaaatacttcactcgtcgtggctctcgtgttcttgctctcgcatacaagcaattgtcagttgacagcgaactaggttccggcaggatcaacgaactgaagcgcgaaaaagtcgaggctgaacttacgtttgctggtttcttggttcttcaatgtcctctcaaggatgacgctaagcaagcagtccagatgctgaacgagagcagtcatcgtgtcgtcatgatcacaggagataatccgctcacggcagtacacgttgcgcgcgaggtcgaaattgttgatcgggatgttctcattctcgacgctcccgagaagaacgatggaggcgagaagctcgtttggcgcagtgttgacgacaaagttaatatcgaagttgatgcttccaagcccatcgaccctgagatcattaagacaaaggatatctgtgtcaccggttatgctcttgccaaatactctgacaacgtctctgcctggaaatcattgctgcgccatacttgggtgtatgctcgtgtctctcccaaacagaaggaagaaattcttctaggtcttaaggatatgggatatttcaccctcatggctggtgatggtaccaatgatgtcggcgctctcaagcaggcgcacattggtattgccttattgaacggaacccaggaggatttgaccagaatcgcagaacacgctcgaaacaccaaaatgaaggaattgtaccagaagcaagtcgacctcatgaagagattcaaccaaccagctcctccagtccccgtactgattgcccatctgtatccatccggtccttcgaacccacacctccgaaaggcactggaacgcgaagcatcaaagaaggggatggctgtcgaggaatatgccaagctgaatggacacgacctggagactatcacatcgccaggtgctcaacagctcatgcaaccagatcccaagaccgccaagcagcaagaaaatatgaaaaaggctgctggttttgccgacaagatgactagtgctatgatggagcaagagatggatgacggtgaaccacctactctcaagctcggtgatgcgtctgttgctgcccctttcactagcaagctccgcaacgtcattgcagttcccaacatcattcgtcagggccgctgtacattggtggcaactattcagatgtacaagattctggctctcaactgtctgatcagcgcctacagtctcagtgtcctctatctggaaggtatcaagttcggtgatggtcagattacgatcagcggaatgcttatgagtgtctgtttcctgtctatttctcgtgctaagtcggtcgaggggctctcgaaagagcgaccccaacctaacattttcaacttctacatcatcggttccattttaggtcaatttgcggtacacatcgtcactttgatctacattgctcgattctgcgacagacttgaaccccgtgccgaaattgtcgacttggaggcagaattcaaaccatctctgctcaatagcgcagtttacctccttcagctcatccaacaagtctcaacctttgctgtcaactatcaaggcaggcctttccgtgaggctttaaccgagaataagggcatgttctacggtatcatcggcgtgactggtatcgcttttgcctgctcgactgagttcatccctgaaatcaacgagcagatgaaactggtcaagttcagcgacgagtttaagatgactatgaccgctgtgatggtaattgactacatcggctgttgggtcattgaagtagttttgaagaagctgttcagcgactatcgtccacgtgacattgctgagcgacgaccggagcagctcgaacgtgagcgggtgcggaaggcagctgagcagaagatcaaggacgaggaagacgagaagaagcgcctcgctaaggtagcggagttcgagagaaaggtcgaggaacgaagacagaagattcaggcgtggagtcagggccgtcgtgacgctgtccaggccacgtaagtggtttagtctccgctgtatcattgctcaaaataggggctggaagctgctttggatgctgcgctcaagtatatagactgtacattcctactagattagacatgtggtcttagagtggccttgttggctacgaaataattacatctctttactcgaatggagt

SEQ ID NO: 32521 - DNA, 2631 bp, Muscodor strobelii
  misc_feature: SGI cDNA ID NO. 571207
  misc_feature: Elevated expression when VOC is produced
  misc_feature: Encodes the peptide sequence at SEQ ID NO 32522
atgtcgtcttcttataagacgtctaaatcgacaattccgtccgaagaaaaccaaaacttgctgcctcaatacactgtcagcagcaaagaggaaaagagtcgagatgggcttgctggccacatcaacgatgtaccagctacccgcagcctcggactgaagatcggagctctcatcgccatctctctgacacttatcgctggaatcggatacaccaaggtgggctgtgacctgccatctgcgtctttcaccagctctcctggccgtaaggttgccagggctgactcaacgggcacttcgtttctggaccatgatgaacccattagcggtttttttggacagactttcttgaaagataatattccttacctcgatattcccgactcgcttattcaagatgtctattattaccgctggtcagcgatacagcgacatctccgttacattttgccaggcacgggttacatgctcaccgagttcatgcaaagtgtcggatacgccaaagccttcgggacaattgacgcagcagctggtcatcagatcgacgagtcgagatggctgagaaatgttgcttttgcagacgactacatacagttgtacacgcgaggccccgcagatccgttacaatatacacagtggattcttgatgccatgagtcgccgggccatggtgacaggtgacaacgacttcctcacgacgcagctcgaagatatgattcgcgtctggcatctatgggacaactcttttgactcgggagccggactatactactatgaacccaactgggatgcacaggagctctcgttgccaggctttgtggccgacgctgatggtactaattatactctcagacttaacgggccagatacttttcggccaagtcacaatgcctatatggtcgctaatgctcgagcaatcgcgagagctgcaaatttgataaacgacgggttcaatcaagatcaatttatggagctggcagataacattgaggccgctatgtataaacatttgtgggctcccgagcaagaattcttcatggatatcatccgtcctaataacccagacttcacaccattgactggccgtgaagcagttgggctttatccttatcgatttgggataggactgaaccagtcgtactcccagccggccttagaccaactatttgatccacagggattcctggccacctacggaccaacgactcttgaaatccgcaaccagtattacagtgctactaagcttgacgatggatactgctgctggtggaacggccagtcttggccatttacaacaagtcacgttctgaagtctatggccgctatctatcaagcagggaatacggatatgacagcggatcagtatgtggactacctccgcacatacgcaattacgcaacagaaggatggaaagccgtacgtggccgaatctcactaccctctgatggactcttggtctgcagacagctcgaaccactctgaaaactacgaccactcaaccaataatgatgatgtgatcactggtctgttgggcataatgccacagcccgacgacacgctgcgcatttcacctatcgtgcccgacaactggacctacttcgctcttgagaatctcccatatcatggacatttagtcactgttctttatgataaggatggctcacgatataatactggatcatcgggattgagtgtctacatcgacggctcgattgtgcacaatgacgaagccagacaagcaacagtgacgatcccgccggccaatgcgcccgaaaccgcccctgtcaacatcgccgtcaatcccacagggcccggctattacccaatggcaggtgccacatacacttatgaagcggactacgaattcaaagctattgatggcgttgtcttctatgacagtatccccgacaaccgttggacaaactatcagtctcccaacgacaacgacacgcttacggtcacatttgcccgtccacgtaaaatctcatccattactctggcgcttttctcggatgctgcgcgaggaggttctgtagacataccttccaagattgaaatctacggttcggatggtctcataaagacagtaccggtagatgacagctcggaatttctgcccaatgacaagaacgagatcactttcgacgaagtagagacaacattcgttgcggtcaacatgttccgcagagattcaaacacgtgggttggtctctgtgaggtcgaggcatggacagcgccagtctctggacctacatactacgccgtagatgcctatctcacgggctcgaccactaaggtccagtttgactcgtcgtcgaaagcaacgtccaatggagctgtggtggcaggcgtacagactgacagcaccatcgccttctcaggcatcgagtcggctgatggcggaagtgccactttgacacttagctacgccaattctgggtctgccagtggaaacataacagttttggtcaaccaggtatcgtcaggtactttgacgttgacaccaacatcgggagattatgacaccgccgacatggagattaaattggcggtggggaagaattacgtgagcttggttggtgggattgatggggatggaaccgacctgaaggttgagacgatgatgattgcttag

SEQ ID NO: 32522 - protein, 876 aa, Muscodor strobelii
  misc_feature: SGI Peptide ID NO. 571207
  misc_feature (608)..(739): Pfam Id: PF00754 Pfam Desc: F5/8 type C domain
  misc_feature (96)..(792): NCBI GI: 115372614 Blast Desc: carbohydrate binding module (family 6) [Stigmatella aurantiaca DW4/3-1] gi|115370335|gb|EAU69263.1| carbohydrate binding module (family 6) [Stigmatella aurantiaca DW4/3-1]
  misc_feature (90)..(746): NCBI GI: 46126641 Blast Desc: FG07698.1 [Gibberella zeae PH-1]
  misc_feature (97)..(746): NCBI GI: 85067653 Blast Desc: NCU07050 [Neurospora crassa OR74A] gi|28921606|gb|EAA30896.1| conserved [Neurospora crassa OR74A]
  misc_feature (97)..(793): NCBI GI: 256378819 Blast Desc: coagulation factor 5/8 type domain protein [Actinosynnema mirum DSM 43827] gi|255923122|gb|ACU38633.1| coagulation factor 5/8 type domain protein [Actinosynnema mirum
  misc_feature (115)..(670): NCBI GI: 167647573 Blast Desc: Caul_3611 [Caulobacter sp. K31] gi|167350003|gb|ABZ72738.1| conserved [Caulobacter sp. K31]
  misc_feature (114)..(725): NCBI GI: 149198021 Blast Desc: LNTAR_21530 [Lentisphaera araneosa HTCC2155] gi|149138933|gb|EDM27338.1| LNTAR_21530 [Lentisphaera araneosa HTCC2155]
  misc_feature (92)..(569): NCBI GI: 255034444 Blast Desc: Dfer_0637 [Dyadobacter fermentans DSM 18053] gi|254947200|gb|ACT91900.1| conserved [Dyadobacter fermentans DSM 18053]
  misc_feature (115)..(582): NCBI GI: 218129051 Blast Desc: BACEGG_00625 [Bacteroides eggerthii DSM 20697] gi|217988686|gb|EEC55005.1| BACEGG_00625 [Bacteroides eggerthii DSM 20697]
  misc_feature (115)..(571): NCBI GI: 260170385 Blast Desc: BacD2_00823 [Bacteroides sp. D2]
  misc_feature (115)..(572): NCBI GI: 255532708 Blast Desc: Phep_2819 [Pedobacter heparinus DSM 2366] gi|255345692|gb|ACU05018.1| conserved [Pedobacter heparinus DSM 2366]
  misc_feature: Useful for introducing or modulating the production of volatile compounds
MSSSYKTSKSTIPSEENQNLLPQYTVSSKEEKSRDGLAGHINDVPATRSLGLKIGALIAISLTLIAGIGYTKVGCDLPSASFTSSPGRKVARADSTGTSFLDHDEPISGFFGQTFLKDNIPYLDIPDSLIQDVYYYRWSAIQRHLRYILPGTGYMLTEFMQSVGYAKAFGTIDAAAGHQIDESRWLRNVAFADDYIQLYTRGPADPLQYTQWILDAMSRRAMVTGDNDFLTTQLEDMIRVWHLWDNSFDSGAGLYYYEPNWDAQELSLPGFVADADGTNYTLRLNGPDTFRPSHNAYMVANARAIARAANLINDGFNQDQFMELADNIEAAMYKHLWAPEQEFFMDIIRPNNPDFTPLTGREAVGLYPYRFGIGLNQSYSQPALDQLFDPQGFLATYGPTTLEIRNQYYSATKLDDGYCCWWNGQSWPFTTSHVLKSMAAIYQAGNTDMTADQYVDYLRTYAITQQKDGKPYVAESHYPLMDSWSADSSNHSENYDHSTNNDDVITGLLGIMPQPDDTLRISPIVPDNWTYFALENLPYHGHLVTVLYDKDGSRYNTGSSGLSVYIDGSIVHNDEARQATVTIPPANAPETAPVNIAVNPTGPGYYPMAGATYTYEADYEFKAIDGVVFYDSIPDNRWTNYQSPNDNDTLTVTFARPRKISSITLALFSDAARGGSVDIPSKIEIYGSDGLIKTVPVDDSSEFLPNDKNEITFDEVETTFVAVNMFRRDSNTWVGLCEVEAWTAPVSGPTYYAVDAYLTGSTTKVQFDSSSKATSNGAVVAGVQTDSTIAFSGIESADGGSATLTLSYANSGSASGNITVLVNQVSSGTLTLTPTSGDYDTADMEIKLAVGKNYVSLVGGIDGDGTDLKVETMMIA

SEQ ID NO: 32523 - DNA, 7919 bp, Muscodor strobelii; identical to SEQ ID NO: 32520
  misc_feature: SGI EST ID NO. CUFF.77266.0
  misc_feature: Variant of the nucleotide sequence at SEQ ID NO 32521

SEQ ID NO: 32524 - DNA, 1542 bp, Muscodor strobelii
  misc_feature: SGI cDNA ID NO. 571208
  misc_feature: Encodes the peptide sequence at SEQ ID NO 32525
atgtcgaccgcgcagctatcccggctcctgcctctaccggaagatgagctaaagcaggtccttgactacgcgacgactctgtctaaagccgaggctgcggaccattttcggaatctactgggtgactcgccagaagctgtcgatttcattgcaactttcaattcaagaagacaggacccaaagtcagccttcaatgctacacaggaatcatcagtagaaggtgtgccaaaatccaatcgaggtggtgcaaaaaagaagaaagcgcccctacacacgcctgtgcctcgcagggtcactgattctggcccattacctggcactgcgtatagcaagaaagacttcggaaatgactacgttacgcgtgcatccggctctgccaccccgccaactactgcttcgttaacagttagaaatgcgccgcggaaagctgtgacaccgcccccagcgcctagaggtcacccacaagcggctgggcgattaatatctaatctcccgccctcaaaatcaagatctactccgggctcgcgctcttctactccggccccgaagacaaaggtcaatatctcaggcggtacccccatgcatggcgcatccaccgccgtgtctgatctggacgatgccatccgttccctcgaaatgaccacaaatcccgcaaacgcaactgatgctacagtgaggcggtgtaattgtgttgcagcacggcaccctcttctgtctgcagctccaaattgcctcagctgtggcaaagtagtctgtgtcaaggaaggcctcgggccctgcacattctgtggcaccccattgttgagctcaagcgaaattcagtcaatgattcgcgaattacgtgatgagcgtggaagggagaagatggccctggaccgtcaggctcacagaaaagccgaagtctctaagacccctgcgcctttttcgaagcaaagggacacccctgaaggcattagtgatgcggaagccaaagctctagaacatcgtgaccgtctccttaactttcaggcacaaaacgcacgccgtacaacagtcagagacgaagctgctgatttcgatgtcagtgatgcggtatcaggaactggtggaagtatctgggcaactcccgaagaacgcgcgagagaactgaagcgccagcaaaaagttctcagggaaatggaatggaacgctcgcccggattatgaaaagcgtagacaagtcgtatcgattgacctcgttggcggcaaggttgtgcggaaaatggccgccgtcgagcggccggaaagtcctgatgacgagatgccttctgtgacacacagtccagctttagaagagatcaatggaaatcgtgagaaagggagcggtggcacgttcagtaaaaacccattactgggcagcctcatcaagcctgtatttgacgttaagggtaagggagcagagaaggagggacgcaaagcaaatgcaacaaaatggcgccgtgttcaagatgacctcgacgacaatgaagctgtcatccttgatggaggtatatatggccagacaaccgagagcaagagcacttga

SEQ ID NO: 32525 - protein, 513 aa, Muscodor strobelii
  misc_feature: SGI Peptide ID NO. 571208
  misc_feature (224)..(279): Pfam Id: PF06221 Pfam Desc: zinc finger motif, C2HC5-type
  misc_feature (226)..(279): Pfam Id: PF06221 Pfam Desc: zinc finger motif, C2HC5-type
  misc_feature (1)..(506): NCBI GI: 46111161 Blast Desc: FG02462.1 [Gibberella zeae PH-1]
  misc_feature (1)..(508): NCBI GI: 261360052 Blast Desc: C2HC5 finger protein [Verticillium albo-atrum VaMs.102]
  misc_feature (1)..(509): NCBI GI: 116197118 Blast Desc: CHGG_05157 [Chaetomium globosum CBS 148.51] gi|88181070|gb|EAQ88538.1| CHGG_05157 [Chaetomium globosum CBS 148.51]
  misc_feature (14)..(506): NCBI GI: 256726045 Blast Desc: NECHADRAFT_94348 [Nectria haematococca mpVI 77-13-4]
  misc_feature (1)..(499): NCBI GI: 171688088 Blast Desc: protein product [Podospora anserina] gi|170944006|emb|CAP70116.1| protein product [Podospora anserina]
  misc_feature (1)..(509): NCBI GI: 85091868 Blast Desc: NCU04855 [Neurospora crassa OR74A] gi|28920512|gb|EAA29876.1| conserved [Neurospora crassa OR74A]
  misc_feature (1)..(460): NCBI GI: 145606633 Blast Desc: MGG_12004 [Magnaporthe grisea 70-15] gi|145014316|gb|EDJ98884.1| MGG_12004 [Magnaporthe grisea 70-15]
  misc_feature (1)..(500): NCBI GI: 156059352 Blast Desc: SS1G_03688 [Sclerotinia sclerotiorum 1980] gi|154701475|gb|EDO01214.1| SS1G_03688 [Sclerotinia sclerotiorum 1980]
  misc_feature (5)..(512): NCBI GI: 189200204 Blast Desc: C2HC5 finger protein [Pyrenophora tritici-repentis Pt-1C-BFP] gi|187983538|gb|EDU49026.1| C2HC5 finger protein [Pyrenophora tritici-repentis Pt-1C-BFP]
  misc_feature (5)..(505): NCBI GI: 169608424 Blast Desc: SNOG_07290 [Phaeosphaeria nodorum SN15] gi|160701643|gb|EAT84756.2| SNOG_07290 [Phaeosphaeria nodorum SN15]
MSTAQLSRLLPLPEDELKQVLDYATTLSKAEAADHFRNLLGDSPEAVDFIATFNSRRQDPKSAFNATQESSVEGVPKSNRGGAKKKKAPLHTPVPRRVTDSGPLPGTAYSKKDFGNDYVTRASGSATPPTTASLTVRNAPRKAVTPPPAPRGHPQAAGRLISNLPPSKSRSTPGSRSSTPAPKTKVNISGGTPMHGASTAVSDLDDAIRSLEMTTNPANATDATVRRCNCVAARHPLLSAAPNCLSCGKVVCVKEGLGPCTFCGTPLLSSSEIQSMIRELRDERGREKMALDRQAHRKAEVSKTPAPFSKQRDTPEGISDAEAKALEHRDRLLNFQAQNARRTTVRDEAADFDVSDAVSGTGGSIWATPEERARELKRQQKVLREMEWNARPDYEKRRQVVSIDLVGGKVVRKMAAVERPESPDDEMPSVTHSPALEEINGNREKGSGGTFSKNPLLGSLIKPVFDVKGKGAEKEGRKANATKWRRVQDDLDDNEAVILDGGIYGQTTESKST

SEQ ID NO: 32526 - DNA, 3226 bp, Muscodor strobelii
  misc_feature: SGI EST ID NO. CUFF.76984.1
  misc_feature: Variant of the nucleotide sequence at SEQ ID NO 32524
tttggttgtttgttgaagtcgattgcatgtggataccactaccgtcatccccattggacgagatttggcacctgtgccttagttcgagtatgattcatccggcgatgacttcaatattctgagccgtttcgtgccaaaagacacgatctattttaagtcacttacttattaacagcagaaaccgaaatcaagaggccacaacgcagcatatacacaccccttcactgctccgtctaggcagattgcgaggtaacatgtcgaccgcgcagctatcccggctcctgcctctaccggaagatgagctaaagcaggtccttgactacgcgacgactctgtctaaagccgaggctgcggaccattttcggaatctactgggtgactcgccagaagctgtcgatttcattgcaactttcaattcaagaagacaggacccaaagtcagccttcaatgctacacaggaatcatcagtagaaggtgtgccaaaatccaatcgaggtggtgcaaaaaagaagaaagcgcccctacacacgcctgtgcctcgcagggtcactgattctggcccattacctggcactgcgtatagcaagaaagacttcggaaatgactacgttacgcgtgcatccggctctgccaccccgccaactactgcttcgttaacagttagaaatgcgccgcggaaagctgtgacaccgcccccagcgcctagaggtcacccacaagcggctgggcgattaatatctaatctcccgccctcaaaatcaagatctactccgggctcgcgctcttctactccggccccgaagacaaaggtcaatatctcaggcggtacccccatgcatggcgcatccaccgccgtgtctgatctggacgatgccatccgttccctcgaaatgaccacaaatcccgcaaacgcaactgatgctacagtgaggcggtgtaattgtgttgcagcacggcaccctcttctgtctgcagctccaaattgcctcagctgtggcaaagtagtctgtgtcaaggaaggcctcgggccctgcacattctgtggcaccccattgttgagctcaagcgaaattcagtcaatgattcgcgaattacgtgatgagcgtggaagggagaagatggccctggaccgtcaggctcacagaaaagccgaagtctctaagacccctgcgcctttttcgaagcaaagggacacccctgaaggcattagtgatgcggaagccaaagctctagaacatcgtgaccgtctccttaactttcaggcacaaaacgcacgccgtacaacagtcagagacgaagctgctgatttcgatgtcagtgatgcggtatcaggaactggtggaagtatctgggcaactcccgaagaacgcgcgagagaactgaagcgccagcaaaaagttctcagggaaatggaatggaacgctcgcccggattatgaaaagcgtagacaagtcgtatcgattgacctcgttggcggcaaggttgtgcggaaaatggccgccgtcgagcggccggaaagtcctgatgacgagatgccttctgtgacacacagtccagctttagaagagatcaatggaaatcgtgagaaagggagcggtggcacgttcagtaaaaacccattactgggcagcctcatcaagcctgtatttgacgttaagggtaagggagcagagaaggagggacgcaaagcaaatgcaacaaaatggcgccgtgttcaagatgacctcgacgacaatgaagctgtcatccttgatggaggtatatatggccagacaaccgagagcaagagcacttgattagactctatacacttgtctcaatgaaagagagccttctaagtcttgctataatctagacatagatgagtagtgtaatctttaactgctctgtccaatgcatctaccattacctggacgtctcgacgtgttattcaaagagtatgagaacccggtcaagccatgcaaagtgttgagctatcgatatctttcctcggcccagacaacaaggggtagaatgctacaaatacactgagagacaatgggcccatcgatcacgaataagactctggcccatttgtttctctgttgcgatgctgacagtcgagacctatggcatttgtgagacaggcatagcgacctgtttgaaaaggctgaacatgtccatagccctacgaaattagacgtagttgagcaggcaatgaccgcaaggtgcaaagtagaggatacctattcatagagaacaggagcagcatgcccacagtgtgctgttataatccaactgtcaattcatcacagccgcgtggctgtcacttgtcccccgtgaaggaaatctatacacattcatataaggactagaaaattgagaactacgagtttatgccgaaaggttctgtacacatcatagccatcagagtcctcgtgggaacaaggaaggcaggtagcatagagctagacatttggataaatcatctttacatctcagtttatcttgtcttcgaaattgctgacaattacaagtacaagcgctttatgttcgtttttgtctgtgataaactggacagaagatcatccacttgctctcacactggtgttgccggccaccgcctttctgctggcggttgcaggtcccaacccagtcaagcacagaagtaggcggcaacaattcacagcaagggtccaatgaggacagggatctttgtactcgattgcccttttgtgcaatgtggatatcttgtaggtcggacctagctctcttgggagacatgccaaggatgccactcgataattttcacttgtcaacgataaagtgcatcgtggaatgaggaattgaaactctcggaggtctctcgaaaaattctgttcattgttgagtctgtaaggccaactttagaacatcatcagccaggttgaaagcccggccacaattaaagccgatattcggtattttcagtcatgtactgtagtgccagcagtccggtcaaattacaactgtggaccagggaagctcattaaacccagcccaaatttttgtatcttgaaagttgccgaggcgcccgaaagaacctctctgcctgcttgcctgtgagaagcagaaattgtatcatcagcgcccatgcccatttcttgacatgagtattgcgtgcatcacagtactcacctcgccagcttgggctccggtataactggagaacgggctttttgggccagtagcatgccctcaaaactcg

SEQ ID NO: 32527 - DNA, 1125 bp, Muscodor strobelii
  misc_feature: SGI cDNA ID NO. 571210
  misc_feature: Encodes the peptide sequence at SEQ ID NO 32528
atgcgtcgcgtgatgcttttgttctacacactcctagcatccctctttgcgctcgccaaaggatgcaccacagacgaagactgcagtctaaatggaatatgctcttcagatcaaacatgtctctgtgacgccggttggcgagccaacgattgcggtgaattagatctttacccggccacgagatggagtggatataaccacacaaacgcaacagggccagactactacaaacaaggcgcaggtaattcgtcctggtgtggacacatcgtgcaagaccgcgaagacaaacaactcttccacctcattctcagccaaatgatacacggctgtggcctaagcggttggagacctttcagcacagtagtccgagcggaatctcggacagggccagctggaccgtataactttgcgcagagtctgtttagtactttccatcacaacccaactgtggtgtatagtcctgcagatgacaaatacctgctatactgcattggaaaagacgtcgaagcaccggcgacatgcagctctcaaaaatgggccaacacaatctcagtcagcagttcatcggatttacgagaatggagcgcgctccagccattattagagaaccagacgaacccagcgccttggcccctctggagcgctgagaaccaaacgggtgatatgctcctcgctgtggaagacaacaatatctacgaagcggcaaacttcaacggtccttatacacagattgtcaccacatcatacaacaaatctttcgaagatccctttctctggaaagataaacgggggaactggcatttccttgcgcactatcttatcgacataccccttggtctgaagggacctagagtcggagcccattcgtttgcaaggaattgggagggtccttggatttttcggaatatgacactggcttataacacgacggcggagtttacggatgggacaagtgttgtttattataggagagagaggccgaagttgtatttctccgatgatggaaatatgacgccgttgtatcttgtaaacggcgtgcaagagtttaatactagtgcgagttatacgctcattcaacctattggggctgcggcgagggagtatgagaaggggcttgggttttag

SEQ ID NO: 32528 - protein, 374 aa, Muscodor strobelii
  misc_feature: SGI Peptide ID NO. 571210
  misc_feature (1)..(374): NCBI GI: 261354335 Blast Desc: conserved [Verticillium albo-atrum VaMs.102]
  misc_feature (3)..(373): NCBI GI: 119490112 Blast Desc: NFIA_062350 [Neosartorya fischeri NRRL 181] gi|119411131|gb|EAW21074.1| conserved [Neosartorya fischeri NRRL 181]
  misc_feature (3)..(374): NCBI GI: 169782331 Blast Desc: [Aspergillus oryzae RIB40] gi|83774371|dbj|BAE64495.1| protein product [Aspergillus oryzae]
  misc_feature (14)..(374): NCBI GI: 238500782 Blast Desc: conserved [Aspergillus flavus NRRL3357] gi|220691862|gb|EED48209.1| conserved [Aspergillus flavus NRRL3357]
  misc_feature (4)..(374): NCBI GI: 67902558 Blast Desc: AN8266.2 [Aspergillus nidulans FGSC A4] gi|40739814|gb|EAA59004.1| [Aspergillus nidulans FGSC A4] gi|259481057|tpe|CBF74242.1| TPA: conserved [Aspergillus nidulans
  misc_feature (106)..(352): NCBI GI: 115399416 Blast Desc: [Aspergillus terreus NIH2624] gi|114192180|gb|EAU33880.1| [Aspergillus terreus NIH2624]
  misc_feature (11)..(374): NCBI GI: 242814893 Blast Desc: conserved [Talaromyces stipitatus ATCC 10500] gi|218714802|gb|EED14225.1| conserved [Talaromyces stipitatus ATCC 10500]
  misc_feature (76)..(361): NCBI GI: 167523735 Blast Desc: [Monosiga brevicollis MX1] gi|163775475|gb|EDQ89099.1| [Monosiga brevicollis MX1]
  misc_feature (85)..(361): NCBI GI: 167764073 Blast Desc: BACSTE_02456 [Bacteroides stercoris ATCC 43183] gi|167698189|gb|EDS14768.1| BACSTE_02456 [Bacteroides stercoris ATCC 43183]
MRRVMLLFYTLLASLFALAKGCTTDEDCSLNGICSSDQTCLCDAGWRANDCGELDLYPATRWSGYNHTNATGPDYYKQGAGNSSWCGHIVQDREDKQLFHLILSQMIHGCGLSGWRPFSTVVRAESRTGPAGPYNFAQSLFSTFHHNPTVVYSPADDKYLLYCIGKDVEAPATCSSQKWANTISVSSSSDLREWSALQPLLENQTNPAPWPLWSAENQTGDMLLAVEDNNIYEAANFNGPYTQIVTTSYNKSFEDPFLWKDKRGNWHFLAHYLIDIPLGLKGPRVGAHSFARNWEGPWIFRNMTLAYNTTAEFTDGTSVVYYRRERPKLYFSDDGNMTPLYLVNGVQEFNTSASYTLIQPIGAAAREYEKGLGF

SEQ ID NO: 32529 - DNA, 297 bp, Muscodor strobelii
  misc_feature: SGI EST ID NO. CUFF.76897.0
  misc_feature: Variant of the nucleotide sequence at SEQ ID NO 32527
acaaggcgcaggtaattcgtcctggtgtggacacatcgtgcaagaccgcgaagacaaacaactcttccacctcattctcagccaaatgatacacggctgtggcctaagcggttggagacctttcagcacagtagtccgagcggaatctcggacagggccagctggaccgtataactttgcgcagagtctgtttagtactttccatcacaacccaactgtggtgtatagtcctgcagatgacaaatacctgctatactgcattggaaaagacgtcgaagcaccggcgacatgcagctc

SEQ ID NO: 32530 - DNA, 1170 bp, Muscodor strobelii
  misc_feature: SGI cDNA ID NO. 571211
  misc_feature: Encodes the peptide sequence at SEQ ID NO 32531
atggacatgcacttcccgataatcaatccgagctacgatgaggctttttcgtttaaacggttttctcttttaccggtagaaattcgattcctcatttgggaattctccctgagccgacatcgtatgatcacaatcgagctgttcggaaattacaatgacgaacagtactttgtctctgtccagggacacaggatgctgagcaagcttctacgcgttagtagcgaagctcgtgctgttgcactgcgtttctacagagtcaaaatacactgcgtgtctggaccttggtcaacaatccacgacaaatttcctctctatctcaaccctgaatttgatttcctgtggatagaaaaaccgaagggaaaactcattgcccgcttcttacatgatgttcgcgccaaggatcccttgaacgtgggtgtttgcaaccttgcttttaacgacgcaggtgtcagcaatctcacccacattcagctctcgaatctgcgtgctgttgaccaagctgccttcacccaaatcatcaaacagctgcgtcaagtctttttcatcagtgctggatatgcaggaaggattttcttgggcggccacagtggaattctctcaaatccgaggcttgaatatcaacgatctcggcctcttgttgcgtttgaattgtctaccattccttcatttgaccgcttgccacgtgatcctcgcgccaaaattgaacaagatcttagccgtgtctacatgggcgcggtcgatgtgcgacgcatgatttaccactggcatggctgtctccgccaatgggggattgagcacacagaagcaacgccagaatatcgccttctggtcactacctatgggggcggctgtgaggtcaccgatcaatccagtgcgcaaaaggcgttgcgcatcgttgagaagtattgggttcagattcggcaattaatgatgatacgaaaggggatacaagatgatgaaattccagccgaaagttcagaagaaatagcgcaagggcccaggacagctattggcttctggttgtttcctatcgaagccttggggccgactccaaagccagaaggaagttcgacggctgatccgactggtgaagaacccaaatgggtatcgaaggaaacaagggacatgcgagatcactggcctgagctttgcttgtcccatttgccgtag

SEQ ID NO: 32531 - protein, 389 aa, Muscodor strobelii
  misc_feature: SGI Peptide ID NO. 571211
  misc_feature (2)..(389): NCBI GI: 256728994 Blast Desc: NECHADRAFT_79831 [Nectria haematococca mpVI 77-13-4]
  misc_feature (4)..(388): NCBI GI: 39974073 Blast Desc: [Magnaporthe grisea 70-15] gi|145018246|gb|EDK02525.1| [Magnaporthe grisea 70-15]
  misc_feature (11)..(389): NCBI GI: 256724034 Blast Desc: NECHADRAFT_86393 [Nectria haematococca mpVI 77-13-4]
  misc_feature (4)..(388): NCBI GI: 169597141 Blast Desc: SNOG_01352 [Phaeosphaeria nodorum SN15] gi|111069881|gb|EAT91001.1| SNOG_01352 [Phaeosphaeria nodorum SN15]
  misc_feature (1)..(388): NCBI GI: 46139773 Blast Desc: FG11401.1 [Gibberella zeae PH-1]
  misc_feature (6)..(388): NCBI GI: 171677780 Blast Desc: protein product [Podospora anserina] gi|170936958|emb|CAP61617.1| protein product [Podospora anserina]
  misc_feature (18)..(304): NCBI GI: 149210945 Blast Desc: MGCH7_ch7g942 [Magnaporthe grisea 70-15] gi|86196897|gb|EAQ71535.1| MGCH7_ch7g942 [Magnaporthe grisea 70-15]
  misc_feature (35)..(241): NCBI GI: 145609592 Blast Desc: [Magnaporthe grisea 70-15] gi|145017009|gb|EDK01372.1| [Magnaporthe grisea 70-15]
  misc_feature (6)..(347): NCBI GI: 116197619 Blast Desc: CHGG_06965 [Chaetomium globosum CBS 148.51] gi|88178244|gb|EAQ85712.1| CHGG_06965 [Chaetomium globosum CBS 148.51]
  misc_feature (21)..(349): NCBI GI: 116207304 Blast Desc: [Chaetomium globosum CBS 148.51] gi|88183542|gb|EAQ91010.1| [Chaetomium globosum CBS 148.51]
MDMHFPIINPSYDEAFSFKRFSLLPVEIRFLIWEFSLSRHRMITIELFGNYNDEQYFVSVQGHRMLSKLLRVSSEARAVALRFYRVKIHCVSGPWSTIHDKFPLYLNPEFDFLWIEKPKGKLIARFLHDVRAKDPLNVGVCNLAFNDAGVSNLTHIQLSNLRAVDQAAFTQIIKQLRQVFFISAGYAGRIFLGGHSGILSNPRLEYQRSRPLVAFELSTIPSFDRLPRDPRAKIEQDLSRVYMGAVDVRRMIYHWHGCLRQWGIEHTEATPEYRLLVTTYGGGCEVTDQSSAQKALRIVEKYWVQIRQLMMIRKGIQDDEIPAESSEEIAQGPRTAIGFWLFPIEALGPTPKPEGSSTADPTGEEPKWVSKETRDMRDHWPELCLSHLP

SEQ ID NO: 32532 - DNA, 1946 bp, Muscodor strobelii
  misc_feature: SGI EST ID NO. CUFF.76900.0
  misc_feature: Variant of the nucleotide sequence at SEQ ID NO 32530
gtactttgtctctgtccagggacacaggatgctgagcaagcttctacgcgttagtagcgaagctcgtgctgttgcactgcgtttctacagagtcaaaatacactgcgtgtctggaccttggtcaacaatccacgacaaatttcctctctatctcaaccctgaatttgatttcctgtggatagaaaaaccgaagggaaaactcattgcccgcttcttacatgatgttcgcgccaaggatcccttgaacgtgggtgtttgcaaccttgcttttaacgacgcaggtgtcagcaatctcacccacattcagctctcgaatctgcgtgctgttgaccaagctgccttcacccaaatcatcaaacagctgcgtcaagtctttttcatcagtgctggatatgcaggaaggattttcttgggcggccacagtggaattctctcaaatccgaggcttgaatatcaacgatctcggcctcttgttgcgtttgaattgtctaccattccttcatttgaccgcttgccacgtgatcctcgcgccaaaattgaacaagatcttagccgtgtctacatgggcgcggtcgatgtgcgacgcatgatttaccactggcatggctgtctccgccaatgggggattgagcacacagaagcaacgccagaatatcgccttctggtcactacctatgggggcggctgtgaggtcaccgatcaatccagtgcgcaaaaggcgttgcgcatcgttgagaagtattgggttcagattcggcaattaatgatgatacgaaaggggatacaagatgatgaaattccagccgaaagttcagaagaaatagcgcaagggcccaggacagctattggcttctggttgtttcctatcgaagccttggggccgactccaaagccagaaggaagttcgacggctgatccgactggtgaagaacccaaatgggtatcgaaggaaacaagggacatgcgagatcactggcctgagctttgcttgtcccatttgccgtagtcgccatcggaaattttaccattttagtctctatctcgaggactttccaaaattcaattcgtcatgagcaggagaagacaagtccgaaagtgtatgataaaatggaggttgcaattcctcaactcacttcattgaagatagcatccaacactatttacgcatagttaatgaatcttagcaacgcccggaaggcttcgaatatcatgtttctcggtggactctgctcttatgatcttaatcttcacgatcttcgcatatctgaagagcgaagcacatgatcacgttctcatcattaatcaggccaaaggatgaacaaatgctccgaatttgttacagtgtagcgatactatgtcagcttggcgctcagttgacgaatctatcgttcgaccgacctcatgaggaagacaagtcgagaggctcaaaggatttgataatccacttagctatcaaggcagccgagctccgaaatagccagagcctcgccggattacaatttgatctcgcgaattaagtcagcttgggacgggttggaaagggggtttgagagatactgaagcctttggattgcgagttgcgatggcgttaggtcctggtatgtagacacatgaatttgagtcacgttgtacgatatatcaataattaaatggattatcatttgatttcgtacgcctgcactattcatccgcggagactataccaactcaaatttacgttatcgtaccgaacatccctaaaacccaagccccttctcatactccctcgccgcagccccaataggttgaatgagcgtataactcgcactagtattaaactcttgcacgccgtttacaagatacaacggcgtcatatttccatcatcggagaaatacaacttcggcctctctctcctataataaacaacacttgtcccatccgtaaactccgccgtcgtgttataagc

SEQ ID NO: 32533 - DNA, 1203 bp, Muscodor strobelii
  misc_feature: SGI cDNA ID NO. 571212
  misc_feature: Encodes the peptide sequence at SEQ ID NO 32534
atggcggagcaggatatgacattatcgcggcccagtgccgatcgccgcacgccgcgcttcagctggaaccaggccttcgaagagacattcttcaggtcgctgtgcgaatccgtacagctaggatataaggagaaccacaatttcaagtcgggcgcatgggagagagctgcgacagctttgcgcgacagacacggcgcatatccagagaagagccacctcatcaacaaggccgacaatgcccgcaagaagttccgcatgtggcgtggcctgagggaagatcccgccttcctctacaacccctcgtcgcgcatggtgacggcaagtgaagacgcatggaagaaacactttgagaaagaacccctctccaaagccctaagaggccgccccttcgaccacgaagaatacatggagatcctcttccccgacgtaatcggttctggcggcgcacccaagcgcatcatgaagcctcgccgcagaaaccccgacggcacaatgccaccacggcaaagcaccggagacacatccacgctcgacccaacaaccgactcctcgcccctacgccaccagacacccacacacaacgccctcgccgcgctccagcctccaatccaaccaccaccgacaccgtccacgatgctatctcaacaatccacccaccgccaatccacgaccgctattccgccaccacccatagacctcacgcaaaccgccctgacaccaccagaagaaaccacacccctcacaaacccacgcaaacgtcccgccccagacagcatgtcaacaccctacacccactctcactcctcatcccaatcccccgaaaagcgccgcggccgaccctctcgcttcgcgccctccttctacagcgccagcggctcctccaccacaccacacatcccaccctcgcaatcaaccgccacagccagtctgctcgagacctctctccaagccctagccgacgctttgaagacccgacagccaaagcaataccccgaactagcgctcgagatcttcttccgcgagtttgaaaacgaggaggcagatctgcagttgaagatcgcggagaaggctctttgcgacgagaataaggccttggtatttgttaagatgacgcctctcctaagaagacattgggttagtagactgagggaggtgcatatgaggggactgggattgggtagggttggggaggaggcttcatag

SEQ ID NO: 32534 - protein, 400 aa, Muscodor strobelii
  misc_feature: SGI Peptide ID NO. 571212
  misc_feature (14)..(384): NCBI GI: 46111129 Blast Desc: FG02446.1 [Gibberella zeae PH-1]
  misc_feature (5)..(388): NCBI GI: 145606615 Blast Desc: MGG_09350 [Magnaporthe grisea 70-15] gi|145014298|gb|EDJ98866.1| MGG_09350 [Magnaporthe grisea 70-15]
  misc_feature (9)..(388): NCBI GI: 256726056 Blast Desc: NECHADRAFT_43289 [Nectria haematococca mpVI 77-13-4]
  misc_feature (1)..(386): NCBI GI: 171676644 Blast Desc: protein product [Podospora anserina] gi|170936389|emb|CAP61046.1| protein product [Podospora anserina]
  misc_feature (16)..(390): NCBI GI: 85092453 Blast Desc: NCU04954 [Neurospora crassa OR74A] gi|28920807|gb|EAA30166.1| NCU04954 [Neurospora crassa OR74A]
  misc_feature (1)..(117): NCBI GI: 261360058 Blast Desc: conserved [Verticillium albo-atrum VaMs.102]
  misc_feature (330)..(388): NCBI GI: 116197182 Blast Desc: CHGG_05189 [Chaetomium globosum CBS 148.51] gi|88181102|gb|EAQ88570.1| CHGG_05189 [Chaetomium globosum CBS 148.51]
  misc_feature (334)..(386): NCBI GI: 261360058 Blast Desc: conserved [Verticillium albo-atrum VaMs.102]
  misc_feature (1)..(177): NCBI GI: 224075896 Blast Desc: [Populus trichocarpa] gi|222842250|gb|EEE79797.1| [Populus trichocarpa]
  misc_feature (22)..(166): NCBI GI: 225449804 Blast Desc: [Vitis vinifera]
MAEQDMTLSRPSADRRTPRFSWNQAFEETFFRSLCESVQLGYKENHNFKSGAWERAATALRDRHGAYPEKSHLINKADNARKKFRMWRGLREDPAFLYNPSSRMVTASEDAWKKHFEKEPLSKALRGRPFDHEEYMEILFPDVIGSGGAPKRIMKPRRRNPDGTMPPRQSTGDTSTLDPTTDSSPLRHQTPTHNALAALQPPIQPPPTPSTMLSQQSTHRQSTTAIPPPPIDLTQTALTPPEETTPLTNPRKRPAPDSMSTPYTHSHSSSQSPEKRRGRPSRFAPSFYSASGSSTTPHIPPSQSTATASLLETSLQALADALKTRQPKQYPELALEIFFREFENEEADLQLKIAEKALCDENKALVFVKMTPLLRRHWVSRLREVHMRGLGLGRVGEEAS

SEQ ID NO: 32535 - DNA, 2319 bp, Muscodor strobelii
  misc_feature: SGI cDNA ID NO. 571213
  misc_feature: Encodes the peptide sequence at SEQ ID NO 32536
atgtcctcgtcacggcctagttcgaattcacagtcctcgcggccgcacaaccatgccccctctacaccgagcggtcttcgccagagccgcacactctcctcctctagcagccaccccgatggcagcgatgagaacgaccacctgccagggcccagtgcccattccagcagccccgagctaggatctgcccatgagaccacgtcccttctccacgaacatgcccacgatgggccctgcaatcatggcacattctctccgcgcgcaaacactcctccgcagcgagacctgcacaacgattcggagaggaactcggtgctcgactccgaaggctcgctgttctccagtgaggcccctctgctaaagggaacatggaggaagacgttctcaaataggatgaggagcaagaagatggcaacctccagtgccctagctgagcgccatggcttcgaggattcttggttgatgtacctctcctattatatcccctgcctgacctggatgaggcagtacaagtggtcctggctgcagggcgacatgaccgctgccgtgaccatggcctccatgtatctccccatggctctgtcttatgcagacaacctggctcacgtccctccaatcaatggtctctatgccttcgtctttaacccctttctctatgctctgctaggaagttgtccccagatggtcgttggccccgaagccgctggatcgctgctcgtgggctccatcgtgaagaacagcatcgacctgggccgtggcgaggaggataaccccgtcctgcactctcagattgctggtgtcgctgttggaatcgccggggcctccgtgttcatcatgggtctctcacgctttggttttgtcgacaatgtcctaagcagaccttttctgcgcggctttatttcgtctattggcgttgttatcttcatcgaccaattgactccggtgctaggtctgaccggagcatcacgcgaggagccgggcgtatcgcacggcagtaccgtggagaaacttgggtttgtgttgacccatctgggacgatggcataatctttctgccatagtcggcactgtgagctttgcggtgattatggtacttcgtgaaatcaaacgtcgcctacaaccgcggtacccaggcgtggtgttcttcccagatcgtctgcttgttattatactcacggctgttcttgcataccacctcgattgggaagagaaaggtgtggaagtcctgggcgagatcgaggcggcatcaggccatatcttcacattccgcaaccctttccagttatctcatatgacgcatattcgtgatgctatggggacttcatttctgatcggcatgctcggctttttcgagtcctcagttgctgccaagagtttaggcgatgcagaaacgatcgaaggcatgcagcatagtcccaatcgtgagctgatcgccttgggcactgcaaatctcgttggcgcctgtttcatggcgattccggcattcggtggatacggcaggagcaaagtcaataagtcaaccggtgggaaaagcccaatgagcaatatcttactgagcatcttgactgttatttgtattttgtatcttctgccgtatttctactatctccctaaacccgtgctctcagccatgatcatggcagtagcaatctctctagtcgaggaactacctgaagacctaatattcttcacacgcataaagggatggacagagttatctctgatggccatcatcttcctcgtgaccgtcttcttctccctcaacctcggcatcgccatcggcatcggtctatcccttctgcaggtcgtgcgccacgccacccgcccccgtatccagatcctgggccgagttccgaacagtgatcgcttcgccaatgccgaagagcaccccgaggaagtcgagttcatcgagggttgtctcatcgtcaagattcctgagccgcttacttttgcgaatacgggagatctggcgaagaggctctcgaggctggagaggtatggtacggcgatggcgcatccggcgctgccgagactgaggcctcaggacagtaacaagaatgtgatttttgatattcatggcgtgacgtcgatggatggttcgggcacgcaggtgctggaggaaatcgtggcgaagtatgtgaatagaggggttagggtgttcttcagtagggcgccgagtagagataacaaggtctggagtttattggagaggagtggcattgtggagcttgttgggggcgaggagaggtttgtggatgatatcaaggatgcgctgaggatggctgagtctgatgaaccgactagaccggcggagctgtga

SEQ ID NO: 32536 - protein, 772 aa, Muscodor strobelii
  misc_feature: SGI Peptide ID NO. 571213
  misc_feature (630)..(757): Pfam Id: PF01740 Pfam Desc: STAS domain
  misc_feature (279)..(606): Pfam Id: PF00916 Pfam Desc: Sulfate transporter family
  misc_feature (4)..(762): NCBI GI: 39964348 Blast Desc: MGG_09838 [Magnaporthe grisea 70-15] gi|145011143|gb|EDJ95799.1| MGG_09838 [Magnaporthe grisea 70-15]
  misc_feature (18)..(761): NCBI GI: 171676708 Blast Desc: protein product [Podospora anserina] gi|170936421|emb|CAP61078.1| protein product [Podospora anserina]
  misc_feature (5)..(750): NCBI GI: 156049293 Blast Desc: SS1G_08353 [Sclerotinia sclerotiorum 1980] gi|154692752|gb|EDN92490.1| SS1G_08353 [Sclerotinia sclerotiorum 1980]
  misc_feature (3)..(765): NCBI GI: 46116800 Blast Desc: FG04242.1 [Gibberella zeae PH-1]
  misc_feature (133)..(763): NCBI GI: 154317449 Blast Desc: BC1G_03076 [Botryotinia fuckeliana B05.10] gi|150844250|gb|EDN19443.1| BC1G_03076 [Botryotinia fuckeliana B05.10]
  misc_feature (4)..(765): NCBI GI: 256725576 Blast Desc: [Nectria haematococca mpVI 77-13-4]
  misc_feature (7)..(765): NCBI GI: 116197296 Blast Desc: CHGG_05246 [Chaetomium globosum CBS 148.51] gi|88181159|gb|EAQ88627.1| CHGG_05246 [Chaetomium globosum CBS 148.51]
  misc_feature (1)..(765): NCBI GI: 85088386 Blast Desc: NCU09642 [Neurospora crassa OR74A] gi|28919069|gb|EAA28617.1| NCU09642 [Neurospora crassa OR74A]
  misc_feature (20)..(767): NCBI GI: 225685323 Blast Desc: conserved [Paracoccidioides brasiliensis Pb03]
  misc_feature (20)..(766): NCBI GI: 226294660 Blast Desc: sulfate transporter [Paracoccidioides brasiliensis Pb18]
MSSSRPSSNSQSSRPHNHAPSTPSGLRQSRTLSSSSSHPDGSDENDHLPGPSAHSSSPELGSAHETTSLLHEHAHDGPCNHGTFSPRANTPPQRDLHNDSERNSVLDSEGSLFSSEAPLLKGTWRKTFSNRMRSKKMATSSALAERHGFEDSWLMYLSYYIPCLTWMRQYKWSWLQGDMTAAVTMASMYLPMALSYADNLAHVPPINGLYAFVFNPFLYALLGSCPQMVVGPEAAGSLLVGSIVKNSIDLGRGEEDNPVLHSQIAGVAVGIAGASVFIMGLSRFGFVDNVLSRPFLRGFISSIGVVIFIDQLTPVLGLTGASREEPGVSHGSTVEKLGFVLTHLGRWHNLSAIVGTVSFAVIMVLREIKRRLQPRYPGVVFFPDRLLVIILTAVLAYHLDWEEKGVEVLGEIEAASGHIFTFRNPFQLSHMTHIRDAMGTSFLIGMLGFFESSVAAKSLGDAETIEGMQHSPNRELIALGTANLVGACFMAIPAFGGYGRSKVNKSTGGKSPMSNILLSILTVICILYLLPYFYYLPKPVLSAMIMAVAISLVEELPEDLIFFTRIKGWTELSLMAIIFLVTVFFSLNLGIAIGIGLSLLQVVRHATRPRIQILGRVPNSDRFANAEEHPEEVEFIEGCLIVKIPEPLTFANTGDLAKRLSRLERYGTAMAHPALPRLRPQDSNKNVIFDIHGVTSMDGSGTQVLEEIVAKYVNRGVRVFFSRAPSRDNKVWSLLERSGIVELVGGEERFVDDIKDALRMAESDEPTRPAEL

SEQ ID NO: 32537 - DNA, 4793 bp, Muscodor strobelii
  misc_feature: SGI EST ID NO. CUFF.77096.2
  misc_feature: Variant of the nucleotide sequence at SEQ ID NO 32535
cagaagcggatgcagggccaagccgacaccgggcatcgctaagcagcaccgtaccgatctgccaccgttagatccctggcttggccgagtcagcgccttatgccgtgcctggcgccggcaaggcggcttgactttgtgctaccgttagcttcctccccctccaacatggaaaatgcgcatcgtcacgatcaactcgcactcctcctagatcctacctcatcaacatcatgtctttattgcttaagctacattctcaccccagaccgtagtctttccagattgtgatgtttgtttgtacatgatcgcctaccgctactcccgcgtctacccgccttgaaattttgtcggtttcgtaaatcgcctattcgcatacgccgagattagacgtcatacttacataactgtcgttgtcgcctagtgattttggaatatttcagttcgtcgtgacttcaaatgcctattatgtcacaacatgtcctcgtcacggcctagttcgaattcacagtcctcgcggccgcacaaccatgccccctctacaccgagcggtcttcgccagagccgcacactctcctcctctagcagccaccccgatggcagcgatgagaacgaccacctgccagggcccagtgcccattccagcagccccgagctaggatctgcccatgagaccacgtcccttctccacgaacatgcccacgatgggccctgcaatcatggcacattctctccgcgcgcaaacactcctccgcagcgagacctgcacaacgattcggagaggaactcggtgctcgactccgaaggctcgctgttctccagtgaggcccctctgctaaagggaacatggaggaagacgttctcaaataggatgaggagcaagaagatggcaacctccagtgccctagctgagcgccatggcttcgaggattcttggttgatgtacctctcctattatatcccctgcctgacctggatgaggcagtacaagtggtcctggctgcagggcgacatgaccgctgccgtgaccatggcctccatgtatctccccatggctctgtcttatgcagacaacctggctcacgtccctccaatcaatggtctctatgccttcgtctttaacccctttctctatgctctgctaggaagttgtccccagatggtcgttggccccgaagccgctggatcgctgctcgtgggctccatcgtgaagaacagcatcgacctgggccgtggcgaggaggataaccccgtcctgcactctcagattgctggtgtcgctgttggaatcgccggggcctccgtgttcatcatgggtctctcacgctttggttttgtcgacaatgtcctaagcagaccttttctgcgcggctttatttcgtctattggcgttgttatcttcatcgaccaattgactccggtgctaggtctgaccggagcatcacgcgaggagccgggcgtatcgcacggcagtaccgtggagaaacttgggtttgtgttgacccatctgggacgatggcataatctttctgccatagtcggcactgtgagctttgcggtgattatggtacttcgtgaaatcaaacgtcgcctacaaccgcggtacccaggcgtggtgttcttcccagatcgtctgcttgttattatactcacggctgttcttgcataccacctcgattgggaagagaaaggtgtggaagtcctgggcgagatcgaggcggcatcaggccatatcttcacattccgcaaccctttccagttatctcatatgacgcatattcgtgatgctatggggacttcatttctgatcggcatgctcggctttttcgagtcctcagttgctgccaagagtttaggcgatgcagaaacgatcgaaggcatgcagcatagtcccaatcgtgagctgatcgccttgggcactgcaaatctcgttggcgcctgtttcatggcgattccggcattcggtggatacggcaggagcaaagtcaataagtcaaccggtgggaaaagcccaatgagcaatatcttactgagcatcttgactgttatttgtattttgtatcttctgccgtatttctactatctccctaaacccgtgctctcagccatgatcatggcagtagcaatctctctagtcgaggaactacctgaagacctaatattcttcacacgcataaagggatggacagagttatctctgatggccatcatcttcctcgtgaccgtcttcttctccctcaacctcggcatcgccatcggcatcggtctatcccttctgcaggtcgtgcgccacgccacccgcccccgtatccagatcctgggccgagttccgaacagtgatcgcttcgccaatgccgaagagcaccccgaggaagtcgagttcatcgagggttgtctcatcgtcaagattcctgagccgcttacttttgcgaatacgggagatctggcgaagaggctctcgaggctggagaggtatggtacggcgatggcgcatccggcgctgccgagactgaggcctcaggacagtaacaagaatgtgatttttgatattcatggcgtgacgtcgatggatggttcgggcacgcaggtgctggaggaaatcgtggcgaagtatgtgaatagaggggttagggtgttcttcagtagggcgccgagtagagataacaaggtctggagtttattggagaggagtggcattgtggagcttgttgggggcgaggagaggtttgtggatgatatcaaggatgcgctgaggatggctgagtctgatgaaccgactagaccggcggagctgtgaggcgtatgagtacctgtgttgtacatatgatgaggagaggtggtatccgcatggcttgcgagcgatgatttgcatgcatgagcataagtgttatagaattgtgcgatgataccaatagaacagacatttcactgcttatattatagctcaataatccacattttcaagcaattatttggtagattccttatgcacctttgtgactaggttagtatatggcatccgtcctccaagacactatcttgaccctttataggaaatgcgccccctcaaagcaacaattggtatctcatgcaagcgaaatcaaagcaactagccgaccctgcaatgcccctgattatagacctgtcgatcgacctccaacgcccttaccattcataatgttcgtgcactcgtaaaccccaatgacgacgtcattacctctttgactcccgtcctcccccagttcgccttcgtagttccgtagatttttcggcggattcagcgaggatctgctcctatgaagcctcctccccaaccctacccaatcccagtcccctcatatgcacctccctcagtctactaacccaatgtcttcttaggagaggcgtcatcttaacaaataccaaggccttattctcgtcgcaaagagccttctccgcgatcttcaactgcagatctgcctcctcgttttcaaactcgcggaagaagatctcgagcgctagttcggggtattgctttggctgtcgggtcttcaaagcgtcggctagggcttggagagaggtctcgagcagactggctgtggcggttgattgcgagggtgggatgtgtggtgtggtggaggagccgctggcgctgtagaaggagggcgcgaagcgagagggtcggccgcggcgcttttcgggggattgggatgaggagtgagagtgggtgtagggtgttgacatgctgtctggggcgggacgtttgcgtgggtttgtgaggggtgtggtttcttctggtggtgtcagggcggtttgcgtgaggtctatgggtggtggcggaatagcggtcgtggattggcggtgggtggattgttgagatagcatcgtggacggtgtcggtggtggttggattggaggctggagcgcggcgagggcgttgtgtgtgggtgtctggtggcgtaggggcgaggagtcggttgttgggtcgagcgtggatgtgtctccggtgctttgccgtggtggcattgtgccgtcggggtttctgcggcgaggcttcatgatgcgcttgggtgcgccgccagaaccgattacgtcggggaagaggatctccatgtattcttcgtggtcgaaggggcggcctcttagggctttggagaggggttctttctcaaagtgtttcttccatgcgtcttcacttgccgtcaccatgcgcgacgaggggttgtagaggaaggcgggatcttccctcaggccacgccacatgcggaacttcttgcgggcattgtcggccttgttgatgaggtggctcttctctggatatgcgccgtgtctgtcgcgcaaagctgtcgcagctctctcccatgcgcccgacttgaaattgtggttctccttatatcctagctgtacggattcgcacagcgacctgaagaatgtctcttcgaaggcctggttccagctgaagcgcggcgtgcggcgatcggcactgggccgcgataatgtcatatcctgctccgccatcgtcgtgtggttgtgacgatggtggttgtgccggatgttcgtctaccgaagaattggactgcacaagccgccagcgtcttgacaatctgattttggcgacagtatgctggacaccgctgcaccagctgagcacaacacggtgcgcgatagcgacggcgatagtgacgacgatggtgagagtcgtcgctggtgtttcaagccttatcgatactgatagcttgccatggatctgactcggaatggcccaagactcgacggctgcagggacccggtgggttagattaagacggaggacgtgtttg

SEQ ID NO: 32538 - DNA, 693 bp, Muscodor strobelii
  misc_feature: SGI cDNA ID NO. 571214
  misc_feature: Encodes the peptide sequence at SEQ ID NO 32539
atggatgggggactcgcgggctcgtctcacgatgaggcagtcgctaccacagactcttcaacaaacggcatgctcatggctccgacctctccgtcatacgattcgatttctcagctttctaagcatttcggcgagcagttagctatttctgcagaacagagcaacctgacgacttggggccctttgccacccgaaatgtggctgatagtagtcggtaaactcgacaatatagacgacgcatttcggcttggacgtcttaataagtctttttccttgttaacgctcttggaccgagctaccatcgacgagatatgccggccccagtggaacatgagcatgttgaccatcgcgatacacaagaatatggacatcgaacacatcaaaacgattgcacgtggttaccaaaagggtagagaggcgcggccggatctctactggaaggatagacaccatccgagtcgatgggaggttgagagtctcgttatacaagaaccaccattacataccgcggcgcgatacggacgtatcgatgtcgtagaggagatggtgaagcacggcacgaatattcaccagacgtggcagcatttcgaagaattgagtttcggacgtccaagaccacaaccgggctgtgttccttttcaaaatgcactctgcgtctccagaaagtttcaggaggacctggaagaccaataa

SEQ ID NO: 32539 - protein, 230 aa, Muscodor strobelii
  misc_feature: SGI Peptide ID NO. 571214
MDGGLAGSSHDEAVATTDSSTNGMLMAPTSPSYDSISQLSKHFGEQLAISAEQSNLTTWGPLPPEMWLIVVGKLDNIDDAFRLGRLNKSFSLLTLLDRATIDEICRPQWNMSMLTIAIHKNMDIEHIKTIARGYQKGREARPDLYWKDRHHPSRWEVESLVIQEPPLHTAARYGRIDVVEEMVKHGTNIHQTWQHFEELSFGRPRPQPGCVPFQNALCVSRKFQEDLEDQ

SEQ ID NO: 32540 - DNA, 1287 bp, Muscodor strobelii
  misc_feature: SGI cDNA ID NO. 571215
  misc_feature: Encodes the peptide sequence at SEQ ID NO 32541
atggagacctctagtcctgtttttgggaaaaggctgcttcaacacttcgacttcgaccctgaatatcggaatctgaaccatgggtcttttggtactgcccctcgagagattaggaaatacatggaatattatgagggcctctcagaagccaacccagattgctacatccgctacgactttcccaccatcctagacgagtcgcgggctgcaatagcgaaactcatcaacacgcccttagattgcactgtgttcgttgcgaatgctactgtagctgccaacacagtcctcaggaatctctcctgggccgatgatagcaaagacgagatcctgtactttaacaccgtctatggcggctgtgggaaagccatcgactatgtcgttgacaccaggtatgggcgagtttcgtcccgcgcaatcgacctcaactatccgtgcgaggatgaagaagtcatcgagacatttcatgcagctctagctgaatgtaaagcggttggtaaacgtgccaaaatttgtttatttgacactgtctcgtcgctcccaggtattcgattccctttcgaggaaatgataaaagtctgtcgggaagcaggcgtcttgactctcgtcgatggtgcgcagggcgtgggaatgattgatcttgacgttggagcactagatcccgatttcttcttctcgaattgtcataagtggctatttacaccgaggagctgcgccgtgttctatgtgccaatgcgaaaccagcatttaatcgcatccaccatgccaacttctcacggctacgtgtcgaagactggatctcgacctaatccgcttcctgcttcgacgaaatctccgtttgtggcgaacttcgaatttgtgggctcggtgaatacgacagcgtatgcgtgcgttaagcatgccatcgaatggcgtgaacgagtacttggtggtgaggcgaagatcatgcaatatgttcaaaacttggctcaagagggaggtaaagcgatggcgaatatactgggtaccgaggttcttgacaacaactcacactcgatgacgcagtgcggaatgacgaacgtagctcttccgattgatgttgagctgatgacagttggtactcgggattggatgacgaagtacatgctgaagcattacaagactttcatccctctgtataccttccaaggtcgggcttgggcaagaatcagcgcgcaggtctatcttgacttggatgattttgagtgggctgggcgcatgcttctggagctttgtgagagagctaagcagggcggtagtagcaagttgtaa

SEQ ID NO: 32541 - protein, 428 aa, Muscodor strobelii
  misc_feature: SGI Peptide ID NO. 571215
  misc_feature (23)..(409): Pfam Id: PF00266 Pfam Desc: Aminotransferase class-V
  misc_feature (176)..(234): Pfam Id: PF00266 Pfam Desc: Aminotransferase class-V
  misc_feature (8)..(423): NCBI GI: 164424097 Blast Desc: NCU11365 [Neurospora crassa OR74A] gi|157070372|gb|EDO65040.1| conserved [Neurospora crassa OR74A]
  misc_feature (8)..(423): NCBI GI: 156059344 Blast Desc: SS1G_03684 [Sclerotinia sclerotiorum 1980] gi|154701471|gb|EDO01210.1| SS1G_03684 [Sclerotinia sclerotiorum 1980]
  misc_feature (4)..(427): NCBI GI: 171676652 Blast Desc: protein product [Podospora anserina] gi|170936393|emb|CAP61050.1| protein product [Podospora anserina]
  misc_feature (2)..(422): NCBI GI: 46111171 Blast Desc: FG02467.1 [Gibberella zeae PH-1]
  misc_feature (4)..(422): NCBI GI: 256726040 Blast Desc: NECHADRAFT_94344 [Nectria haematococca mpVI 77-13-4]
  misc_feature (4)..(423): NCBI GI: 116197210 Blast Desc: CHGG_05203 [Chaetomium globosum CBS 148.51] gi|88181116|gb|EAQ88584.1| CHGG_05203 [Chaetomium globosum CBS 148.51]
  misc_feature (28)..(423): NCBI GI: 154317238 Blast Desc: BC1G_03521 [Botryotinia fuckeliana B05.10] gi|150844938|gb|EDN20131.1| BC1G_03521 [Botryotinia fuckeliana B05.10]
  misc_feature (8)..(427): NCBI GI: 39960468 Blast Desc: MGG_09345 [Magnaporthe grisea 70-15] gi|145014293|gb|EDJ98861.1| MGG_09345 [Magnaporthe grisea 70-15]
  misc_feature (8)..(423): NCBI GI: 238846107 Blast Desc: lolT-1 [Microsporum canis CBS 113480]
  misc_feature (8)..(423): NCBI GI: 189198183 Blast Desc: PTRG_05096 [Pyrenophora tritici-repentis Pt-1C-BFP] gi|187981377|gb|EDU48003.1| PTRG_05096 [Pyrenophora tritici-repentis Pt-1C-BFP]
  misc_feature (18)..(356): SWISSPROT Homolog: EC 5.1.1.17 Isopenicillin-N epimerase
METSSPVFGKRLLQHFDFDPEYRNLNHGSFGTAPREIRKYMEYYEGLSEANPDCYIRYDFPTILDESRAAIAKLINTPLDCTVFVANATVAANTVLRNLSWADDSKDEILYFNTVYGGCGKAIDYVVDTRYGRVSSRAIDLNYPCEDEEVIETFHAALAECKAVGKRAKICLFDTVSSLPGIRFPFEEMIKVCREAGVLTLVDGAQGVGMIDLDVGALDPDFFFSNCHKWLFTPRSCAVFYVPMRNQHLIASTMPTSHGYVSKTGSRPNPLPASTKSPFVANFEFVGSVNTTAYACVKHAIEWRERVLGGEAKIMQYVQNLAQEGGKAMANILGTEVLDNNSHSMTQCGMTNVALPIDVELMTVGTRDWMTKYMLKHYKTFIPLYTFQGRAWARISAQVYLDLDDFEWAGRMLLELCERAKQGGSSKL

SEQ ID NO: 32542 - DNA, 318 bp, Muscodor strobelii
  misc_feature: SGI EST ID NO. CUFF.76931.0
  misc_feature: Variant of the nucleotide sequence at SEQ ID NO 32540
tattgaaaggcttaaaatggagacctctagtcctgtttttgggaaaaggctgcttcaacacttcgacttcgaccctgaatatcggaatctgaaccatgggtcttttggtactgcccctcgagagattaggaaatacatggaatattatgagggcctctcagaagccaacccagattgctacatccgctacgactttcccaccatcctagacgagtcgcgggctgcaatagcgaaactcatcaacacgcccttagattgcactgtgttcgttgcgaatgctactgtagctgccaacacagtcctcaggaatctctcctg

SEQ ID NO: 32543 - DNA, 2211 bp, Muscodor strobelii
  misc_feature: SGI cDNA ID NO. 571216
  misc_feature: Encodes the peptide sequence at SEQ ID NO 32544
atgaagattcaagttgtccctgcggttctgtccgctgctctagcggtacgagcagcaccgtctgagcaattcaagaccgacaacgcgccacgagcagcgactctggactgggctgcggcgtatacgaaggctaataccgccttggccaagctctctgcaaatgacaagattaacatcgtcactggcgtcggctggaacaagggaccatgtgtaggaaatacaccagctataggctcaattggctatccgcaactatgtcttcaggatgggcccctgggcgttcgctatgccaagagtgtcaatgcattcacacccggtatccaggctgcatctacttgggacaaggctctgattcgtgagcgcggccagttcatggcagaagaaacgaaaggtgttggtgtccatgtcttgctcgggcccgtcgccggccctctagggaagaacgcggctggtggacgcaactgggagggattcggcgcagacccctacctacaaggcatttcgatgtcagagactatccaaggaatgcagggcgttggcgtacaagcaacggcaaagcattacatactcaacgagcaagaactaggccgcgagacgatgagctcaagtgtggatgaccgaacaatgcatgagctctacctatggccattcgcagatgccgttcacgcaaatgttgcgtcagttatgtgctcatacaacaagatcaacggaacatgggcttgcgagaacgatggggtcatgaacaagttgctaaagcaagagctcggcttccaaggatacgtgatgacggactggaatgcacaacacacaacgcaacagtccgcaaacgcaggtctggacatgaccatgcctggttccgactacaacggcggcacggtactctggggttctaagttgagtcaagctgtcagcagcggacaagtccaacaatctcgagttgatgacatggtgcgccgtatccttgcatcttggtatcttctcggccaagactcgagctaccctagtgtgaacctcaatgcgaatgtccagggaacccacaagacgaacattcgatcgattgcacgagacggtatagtcctgctgaagaacgatgagaacactctgccgctcaaaaagcccaagaaaatcgctcttgtcgggtctgctgctgtcaacaatccggcgggcatcaacgcatgtgaagaccatggttgcaatacgggtgcattaggaatgggctggggttctggtacagcatcctacccgtatttcgtcgctcctgcagacgcaatccaggcccgcgcaaagacagacggcaccacagttacagtatcatcaactgatagcacatcgtcagtcagctcagccgtcagcggcgctgatgtggctgtggtgttcatcacagcggacagtggcgagggatacattacagtcgagaacaatgccggcgaccgcaataacctcgatccatggcacggcggcaacgacctcgtcaaagctgttgcaggtgcaagccagaacgtagtagttgtcgtacactcggttgggccgataatcctcgagacaattctggctctaccaagcgtcaaggctatcgtgtgggctggccttccatcgcaggagaacggaaacgcactcgttgatattctgtacggtgatactgcgccgtccggaaaattgccatatacgattgccaagtctgcgagcgactatggcactgctatcgtcaacggtgatgataattttaaggagggattgtacatcgattaccggcatttcgacaagagcgcaatcgcccctcgatacgagttcggctacgggttatcctacacaaacttcacatactccgacatattcgtcgacggacgacccgtctccggcgccgcgtctggtaccgtcatcccgggcggcaaagaagatctatgggacatcatcataaccgtaacggtaacagtagcaaacacaggcgcagtcaaaggcgcagaggtagcgcaactctacatcggcttccctgcatcagcaaatgctccccccaagcaactgcgtggattcgagaaggccgttctcgatgcaggcgccaagacaaacgtggccttcactgtccttcgccgcgatatcagcatctgggactcggcgaaacagaactgggttgtacctgcgggtgacttcacgttccaagtaggatccagtagtcgggacattcggcagaccggaaccctcacagttgtataa

SEQ ID NO: 32544 - protein, 736 aa, Muscodor strobelii
  misc_feature: SGI Peptide ID NO. 571216
  misc_feature (74)..(284): Pfam Id: PF00933 Pfam Desc: Glycosyl hydrolase family 3 N terminal domain
  misc_feature (358)..(583): Pfam Id: PF01915 Pfam Desc: Glycosyl hydrolase family 3 C terminal domain
  misc_feature (1)..(735): NCBI GI: 85092449 Blast Desc: NCU04952 [Neurospora crassa OR74A] gi|28920805|gb|EAA30164.1| NCU04952 [Neurospora crassa OR74A]
  misc_feature (48)..(734): NCBI GI: 116197188 Blast Desc: CHGG_05192 [Chaetomium globosum CBS 148.51] gi|88181105|gb|EAQ88573.1| CHGG_05192 [Chaetomium globosum CBS 148.51]
  misc_feature (48)..(734): NCBI GI: 171676730 Blast Desc: protein product [Podospora anserina] gi|170936432|emb|CAP61089.1| protein product [Podospora anserina]
  misc_feature (33)..(736): NCBI GI: 39960393 Blast Desc: MGG_09353 [Magnaporthe grisea 70-15] gi|145014301|gb|EDJ98869.1| MGG_09353 [Magnaporthe grisea 70-15]
  misc_feature (37)..(735): NCBI GI: 493580 Blast Desc: beta-D-glucoside glucohydrolase [Hypocrea jecorina] gi|242758965|gb|ACS93768.1| beta-D-glucoside glucohydrolase I [Trichoderma viride]
  misc_feature (37)..(735): NCBI GI: 227874 Blast Desc: beta-D-glucoside glucohydrolase [Hypocrea jecorina] gi|242758965|gb|ACS93768.1| beta-D-glucoside glucohydrolase I [Trichoderma viride]
  misc_feature (37)..(735): NCBI GI: 201066459 Blast Desc: glucosidase [Trichoderma sp. SSL]
  misc_feature (37)..(735): NCBI GI: 34582634 Blast Desc: beta-D-glucoside glucohydrolase [Trichoderma viride]
  misc_feature (36)..(735): NCBI GI: 119483068 Blast Desc: glycosyl hydrolase, [Neosartorya fischeri NRRL 181] gi|119409717|gb|EAW19665.1| glycosyl hydrolase, [Neosartorya fischeri NRRL 181]
  misc_feature (32)..(735): NCBI GI: 242808274 Blast Desc: beta-D-glucoside glucohydrolase [Talaromyces stipitatus ATCC 10500] gi|218715753|gb|EED15175.1| beta-D-glucoside glucohydrolase [Talaromyces stipitatus ATCC
  misc_feature (36)..(613): SWISSPROT Homolog: EC 3.2.1.21 Beta-glucosidase
MKIQVVPAVLSAALAVRAAPSEQFKTDNAPRAATLDWAAAYTKANTALAKLSANDKINIVTGVGWNKGPCVGNTPAIGSIGYPQLCLQDGPLGVRYAKSVNAFTPGIQAASTWDKALIRERGQFMAEETKGVGVHVLLGPVAGPLGKNAAGGRNWEGFGADPYLQGISMSETIQGMQGVGVQATAKHYILNEQELGRETMSSSVDDRTMHELYLWPFADAVHANVASVMCSYNKINGTWACENDGVMNKLLKQELGFQGYVMTDWNAQHTTQQSANAGLDMTMPGSDYNGGTVLWGSKLSQAVSSGQVQQSRVDDMVRRILASWYLLGQDSSYPSVNLNANVQGTHKTNIRSIARDGIVLLKNDENTLPLKKPKKIALVGSAAVNNPAGINACEDHGCNTGALGMGWGSGTASYPYFVAPADAIQARAKTDGTTVTVSSTDSTSSVSSAVSGADVAVVFITADSGEGYITVENNAGDRNNLDPWHGGNDLVKAVAGASQNVVVVVHSVGPIILETILALPSVKAIVWAGLPSQENGNALVDILYGDTAPSGKLPYTIAKSASDYGTAIVNGDDNFKEGLYIDYRHFDKSAIAPRYEFGYGLSYTNFTYSDIFVDGRPVSGAASGTVIPGGKEDLWDIIITVTVTVANTGAVKGAEVAQLYIGFPASANAPPKQLRGFEKAVLDAGAKTNVAFTVLRRDISIWDSAKQNWVVPAGDFTFQVGSSSRDIRQTGTLTVV

SEQ ID NO: 32545 - DNA, 3090 bp, Muscodor strobelii
  misc_feature: SGI EST ID NO. CUFF.76939.0
  misc_feature: Variant of the nucleotide sequence at SEQ ID NO 32543
cacgcatgacctatgcttggctacggcgaattcttgctggccccacgatttcatgaacgatgatgccgaggcttgctttaggcggcatggcgagctccataggtggctcaacccctgattgctcaaacccactcaacattaatctaaaggaaaggcggcccggaagcaggttccgagcctcatcagtacacgtttgagatgaccgaaacctgtccctttgacctgaaaagtccaattgaagatgtgatgtagtcatgaggttgcaagcgacagcatgagccgagcatttaccgtcagattggctgcgactaagcagccaatctattccaggcaaggccatgcctgcagggtttattcccttgctcttccgcgcattgcctcatctggttgatgcgcggaggacagctatatgacagcttggtggcactccgaaccgcgggacaatcttaagagcggcccgtagccaagatagtgtttccaggcttctgagaacaagatggccacttataagacgacgaagtatgcgggtgtgagaaatatctcgtccgagtctggagcacgcattgtcaagtacacaggtcttcaacgcccaagatgaagattcaagttgtccctgcggttctgtccgctgctctagcggtacgagcagcaccgtctgagcaattcaagaccgacaacgcgccacgagcagcgactctggactgggctgcggcgtatacgaaggctaataccgccttggccaagctctctgcaaatgacaagattaacatcgtcactggcgtcggctggaacaagggaccatgtgtaggaaatacaccagctataggctcaattggctatccgcaactatgtcttcaggatgggcccctgggcgttcgctatgccaagagtgtcaatgcattcacacccggtatccaggctgcatctacttgggacaaggctctgattcgtgagcgcggccagttcatggcagaagaaacgaaaggtgttggtgtccatgtcttgctcgggcccgtcgccggccctctagggaagaacgcggctggtggacgcaactgggagggattcggcgcagacccctacctacaaggcatttcgatgtcagagactatccaaggaatgcagggcgttggcgtacaagcaacggcaaagcattacatactcaacgagcaagaactaggccgcgagacgatgagctcaagtgtggatgaccgaacaatgcatgagctctacctatggccattcgcagatgccgttcacgcaaatgttgcgtcagttatgtgctcatacaacaagatcaacggaacatgggcttgcgagaacgatggggtcatgaacaagttgctaaagcaagagctcggcttccaaggatacgtgatgacggactggaatgcacaacacacaacgcaacagtccgcaaacgcaggtctggacatgaccatgcctggttccgactacaacggcggcacggtactctggggttctaagttgagtcaagctgtcagcagcggacaagtccaacaatctcgagttgatgacatggtgcgccgtatccttgcatcttggtatcttctcggccaagactcgagctaccctagtgtgaacctcaatgcgaatgtccagggaacccacaagacgaacattcgatcgattgcacgagacggtatagtcctgctgaagaacgatgagaacactctgccgctcaaaaagcccaagaaaatcgctcttgtcgggtctgctgctgtcaacaatccggcgggcatcaacgcatgtgaagaccatggttgcaatacgggtgcattaggaatgggctggggttctggtacagcatcctacccgtatttcgtcgctcctgcagacgcaatccaggcccgcgcaaagacagacggcaccacagttacagtatcatcaactgatagcacatcgtcagtcagctcagccgtcagcggcgctgatgtggctgtggtgttcatcacagcggacagtggcgagggatacattacagtcgagaacaatgccggcgaccgcaataacctcgatccatggcacggcggcaacgacctcgtcaaagctgttgcaggtgcaagccagaacgtagtagttgtcgtacactcggttgggccgataatcctcgagacaattctggctctaccaagcgtcaaggctatcgtgtgggctggccttccatcgcaggagaacggaaacgcactcgttgatattctgtacggtgatactgcgccgtccggaaaattgccatatacgattgccaagtctgcgagcgactatggcactgctatcgtcaacggtgatgataattttaaggagggattgtacatcgattaccggcatttcgacaagagcgcaatcgcccctcgatacgagttcggctacgggttatcctacacaaacttcacatactccgacatattcgtcgacggacgacccgtctccggcgccgcgtctggtaccgtcatcccgggcggcaaagaagatctatgggacatcatcataaccgtaacggtaacagtagcaaacacaggcgcagtcaaaggcgcagaggtagcgcaactctacatcggcttccctgcatcagcaaatgctccccccaagcaactgcgtggattcgagaaggccgttctcgatgcaggcgccaagacaaacgtggccttcactgtccttcgccgcgatatcagcatctgggactcggcgaaacagaactgggttgtacctgcgggtgacttcacgttccaagtaggatccagtagtcgggacattcggcagaccggaaccctcacagttgtataagggttgcggaggctcgaaacactggaataatgtagtcagcataaatcttggctcagaagcgaatagaagggacatttcattcaactactccaaatactaagtgaccatgccttagaacgctattgaaaatcatggttcagctcacgattgtctgttactccggcagtatcacgagattgaagtcttattgggacagagggagtaaatgtgaatatctggtattaatatggctcattcttgcgaactattgccattttatgcggagaggcaatgctcaaccgcgca

SEQ ID NO: 32546 - DNA, 1137 bp, Muscodor strobelii
  misc_feature: SGI cDNA ID NO. 571217
  misc_feature: Encodes the peptide sequence at SEQ ID NO 32547
atggagtccaacagcggaaactctaccgacaattcacgtccggctacccctgtcggcgtgatcgacatgaccagtgttgacgaccatgacatcgatcatcacaaccaggccttgggtcaagatggcactatcgatcaaggcactcgaggcggtcggggtggacgaggcagtcgcggtggtcgaggcagtcgtggtggacgtggccgtggcggccgcggtggtgccgccgtcctcaatacccccttccagtcccccgccggttcacctgctttcaacgtcggcgctggctcctcgcctggttctgttggcccttatgccgtcgccactcctgcctccgctccgcctaccacgcgtgattacattcgagagacccagggcgagtccaagttcaagcgccagcgtctcacccttcgcgagaagctcatcaagggcgatctcaccccggccaactcgggcatgcgcgcctacaaacagcgcaaggcccgcgaggaagctgagaaggcaaaagttgaagctcgtcaagccggccttaaggagggtcgtgctgcaggattggccgagatgcgcactggtcgagctggctccaccctcaccactcctggtcctcagcgccagcttgccagccccgagacggccaagggcaacctccatctctcggtaagctttgctcttgccttgaagaaggacgttgcgagttggtgctttcagcccaaccaagatggtctcacttacaccgtcacccacatcaacggcagcgagtacgataccgatgtgttcaccgacctgcgcgatgctgtccatacagctcttaactacctctttgagcacccccatctgttcgtcatgaagacggccgagaatggccgggaggagaccgtctctgtcgagaacgttgcacgcgaggtcgatactcttaagcccggctccgctgctggtcttagcaccaaggcaatcaagaatgagctcgacgacttttccgttgacggcgctatcgagaacgccctgtacgtcttctatggcgaatccagagtcaccagtcccggattcgagcttgaggcccggtgcatggacggtaccatcgtcgagatctgcgtccagcagaagaaagtaaacaagcgtcgccacgctgaggattaa

SEQ ID NO: 32547 - protein, 378 aa, Muscodor strobelii
  misc_feature: SGI Peptide ID NO. 571217
MESNSGNSTDNSRPATPVGVIDMTSVDDHDIDHHNQALGQDGTIDQGTRGGRGGRGSRGGRGSRGGRGRGGRGGAAVLNTPFQSPAGSPAFNVGAGSSPGSVGPYAVATPASAPPTTRDYIRETQGESKFKRQRLTLREKLIKGDLTPANSGMRAYKQRKAREEAEKAKVEARQAGLKEGRAAGLAEMRTGRAGSTLTTPGPQRQLASPETAKGNLHLSVSFALALKKDVASWCFQPNQDGLTYTVTHINGSEYDTDVFTDLRDAVHTALNYLFEHPHLFVMKTAENGREETVSVENVAREVDTLKPGSAAGLSTKAIKNELDDFSVDGAIENALYVFYGESRVTSPGFELEARCMDGTIVEICVQQKKVNKRRHAED

SEQ ID NO: 32548 - DNA, 1410 bp, Muscodor strobelii
  misc_feature: SGI cDNA ID NO. 571218
  misc_feature: Encodes the peptide sequence at SEQ ID NO 32549
atgggtaccccaatcgccaaagccttggccgctcttgccattaattacaagacacccttggatcctgactggatcttctttgcgtctacatacaattcccgtgtgcctgttgtgcctgagatcgtcattctgccggagaccatcgagcaggtctcccaatctatcatttccgcgtcagcacacggccttcgtgtgcaagcccgttctggtggtcactcttatgcatcacacagtagcggcggagcagacggcgctgccgtcatcgacctgcgaggactccaggatgtggagctaaaggacaacggcatcgcttccgtaggaggtggcgtgaggctcggtaagctggcactagtctgccaccaacacggcagagctcttgcccatggaacctgtccggcagtaggcattggcggacattttactcatggcgggtatggactctcctcacgagcgtggggtctggcgatggaccaaatcattgctctcgatgtggtgatggccgacggagctgttgtacatgcgtctgagagcgagaacccggacctgttcctggccatgcgcggtgctgccgactcgttcggaatcgcggtgaaattccacgtccgtacacaaccggagcctgaagtcgttatcaagttttctattgatcttcccgaagcgacacgaagcgttgaaagtgcaatgaaagcgttcctacacatccaagatttcacgagcgatacttccgtagacaggcgtctgggtctcattgtttttctcgcgcaccagcgattcagcctcgaaggcattttccatggatctcttgatacatttgcttgtcggatcttaccaaaactgcttgagggtcttcccgataatggagccatgaaggtcaaaatggagcagactgactggtttacctgtgtgcgactttggagcggtgacgttctcgacgttggggcggactatgcggagcaccacgtcttctacgccaagagcgcgactattgcgagcccaggacttacggagggggaattgaagaactattttgagtatatcttcgagaaaggagcaatggcacccgtcggttacttcatcagcgcccagctttatggtggaagggacagtcagatcactgcttgtacgaaccgagacgctttcgcacatcgagatgcaatgtgggtgtttcaacattacggatatgttgacgacaatgctgccttccctgaccaaggcatgtccttcattcaggagcttaatcaggcgcttgggggtcatcacggggcttacaacaactatgcggatccgtcccttgggtctgaacaggcactgaaattgtactacggcaagaaattgccgcatctgaaagaactcaagggacagttcgaccccaacaacgtttttgctcaccctcaatctgtgcaaaagtag

SEQ ID NO: 32549 - protein, 469 aa, Muscodor strobelii
  misc_feature: SGI Peptide ID NO. 571218
  misc_feature (422)..(468): Pfam Id: PF08031 Pfam Desc: Berberine and berberine like
  misc_feature (39)..(175): Pfam Id: PF01565 Pfam Desc: FAD binding domain
  misc_feature (5)..(467): NCBI GI: 116194680 Blast Desc: CHGG_03938 [Chaetomium globosum CBS 148.51] gi|88179851|gb|EAQ87319.1| CHGG_03938 [Chaetomium globosum CBS 148.51]
  misc_feature (5)..(467): NCBI GI: 156040367 Blast Desc: SS1G_12200 [Sclerotinia sclerotiorum 1980] gi|154696256|gb|EDN95994.1| SS1G_12200 [Sclerotinia sclerotiorum 1980]
  misc_feature (5)..(467): NCBI GI: 154320638 Blast Desc: BC1G_01791 [Botryotinia fuckeliana B05.10] gi|150853480|gb|EDN28672.1| BC1G_01791 [Botryotinia fuckeliana B05.10]
  misc_feature (3)..(467): NCBI GI: 189196020 Blast Desc: conserved [Pyrenophora tritici-repentis Pt-1C-BFP] gi|187980227|gb|EDU46853.1| conserved [Pyrenophora tritici-repentis Pt-1C-BFP]
  misc_feature (5)..(467): NCBI GI: 145608034 Blast Desc: MGG_09717 [Magnaporthe grisea 70-15] gi|145015502|gb|EDK00039.1| MGG_09717 [Magnaporthe grisea 70-15]
  misc_feature (5)..(467): NCBI GI: 260279111 Blast Desc: chitin binding 13 [Magnaporthe oryzae]
  misc_feature (23)..(467): NCBI GI: 169621592 Blast Desc: SNOG_14007 [Phaeosphaeria nodorum SN15] gi|111057512|gb|EAT78632.1| SNOG_14007 [Phaeosphaeria nodorum SN15]
  misc_feature (31)..(467): NCBI GI: 169597357 Blast Desc: SNOG_01464 [Phaeosphaeria nodorum SN15] gi|160707507|gb|EAT91113.2| SNOG_01464 [Phaeosphaeria nodorum SN15]
  misc_feature (5)..(468): NCBI GI: 116206074 Blast Desc: CHGG_02330 [Chaetomium globosum CBS 148.51] gi|88182927|gb|EAQ90395.1| CHGG_02330 [Chaetomium globosum CBS 148.51]
  misc_feature (1)..(467): NCBI GI: 145615041 Blast Desc: MGG_05337 [Magnaporthe grisea 70-15] gi|145021964|gb|EDK05984.1| MGG_05337 [Magnaporthe grisea 70-15]
  misc_feature (87)..(467): SWISSPROT Homolog: EC 1.21.3.3 Reticuline oxidase
MGTPIAKALAALAINYKTPLDPDWIFFASTYNSRVPVVPEIVILPETIEQVSQSIISASAHGLRVQARSGGHSYASHSSGGADGAAVIDLRGLQDVELKDNGIASVGGGVRLGKLALVCHQHGRALAHGTCPAVGIGGHFTHGGYGLSSRAWGLAMDQIIALDVVMADGAVVHASESENPDLFLAMRGAADSFGIAVKFHVRTQPEPEVVIKFSIDLPEATRSVESAMKAFLHIQDFTSDTSVDRRLGLIVFLAHQRFSLEGIFHGSLDTFACRILPKLLEGLPDNGAMKVKMEQTDWFTCVRLWSGDVLDVGADYAEHHVFYAKSATIASPGLTEGELKNYFEYIFEKGAMAPVGYFISAQLYGGRDSQITACTNRDAFAHRDAMWVFQHYGYVDDNAAFPDQGMSFIQELNQALGGHHGAYNNYADPSLGSEQALKLYYGKKLPHLKELKGQFDPNNVFAHPQSVQK

SEQ ID NO: 32550 - DNA, 540 bp, Muscodor strobelii
  misc_feature: SGI cDNA ID NO. 571219
  misc_feature: Encodes the peptide sequence at SEQ ID NO 32551
atgtacagcgccccctcccaatcgccgtatccgcaacaggcgtcttatacttcaccactgcctcctacacaaggctatctcaccccctatccccagcaacatgattatatgcgccctggttcagcccattctgacgcaggctacccgccaccaccttaccccgtagattctcactccgcaacgtcaccacttccgcgcccacattctgccgacccatacgctgcctctgagtatgatcgtgatccgaatcggcctgaaggggaacaagaggatggcgaacgcggtcttggtgcgacgctagtcggtggtggagccggtggttttatcggccacaagattggcaagggcaaattagctattacggaggacaagggcaccatggtcgacgagaacattctcgcgatcatcatcatgagcaccgtgatcacgaccatcatcatagacatcacgaccaccaccacgaccatcgccatgagcatcacggacgacaccatcgcgatcacgattcctactgaggagtcgattgagctttccacataa

SEQ ID NO: 32551 - protein, 179 aa, Muscodor strobelii
  misc_feature: SGI Peptide ID NO. 571219
MYSAPSQSPYPQQASYTSPLPPTQGYLTPYPQQHDYMRPGSAHSDAGYPPPPYPVDSHSATSPLPRPHSADPYAASEYDRDPNRPEGEQEDGERGLGATLVGGGAGGFIGHKIGKGKLAITEDKGTMVDENILAIIIMSTVITTIIIDITTTTTTIAMSITDDTIAITIPTEESIELST

SEQ ID NO: 32552 - DNA, 1017 bp, Muscodor strobelii
  misc_feature: SGI cDNA ID NO. 571220
  misc_feature: Elevated expression when VOC is produced
  misc_feature: Encodes the peptide sequence at SEQ ID NO 32553
atgtctgataataagctgccgctcaaagtgaaagtagggatacgcgattcatgggataaagaagatgcgccggtcaacaaagccattaccaatgtcaaggatactatcggggtcaatgtcagagtcgatcccgaatggcagatcctcgtctcagaactagacgccgcctaccctgacaaagggacatttgtgccatctatagcagcgacggtggatgcattttgttgcgccatcataacacttgcggacgacgaagcaaacgctgaatgggcagacaaattcctcacgaaaatctcgggaaccgttagaatatttttccaggtcgtaaagtcacgagatctagacttgacttggtcggaaccacgaaagagtttcttgataggtctgcctaagtctccggtgccaactccctcacatatgcaatctttattccgtggagcgcttctcagttgtttcgatgagaacgccaaagcctctactattctagaaactccgtcctcagcggtagatgactggtccgacgtattagtggacaacaggactggcaacgccgctgtaattgatctgccagcccgccaagctgcttctcaagccataccagagtttgatatcatgcctgatattgacaccttgtctcgacctgacgatttggccctcaagcccccgtatcacctagtcgtccatgatggcggcaagacacaggtcgaggtccagtgcagtcacagtccaaccttagaattcttgtccaagtacctgcagaggttttgcaggattaatcacaatgattcgagaaaaccaccaattgttgaaatcaagctacatcaatcggcattcggtcttgggcttgtgtacgatcgcctgacaatcacttctgaagccagatttaccatacaacatgtctcaccgatgatgatactctctttggtagagggagttctaggctacaagaatgttactgttgagagggggtcctggattttccgtagagatattgagtttaggggcggacgatattaa

SEQ ID NO: 32553 - protein, 338 aa, Muscodor strobelii
  misc_feature: SGI Peptide ID NO. 571220
  misc_feature (2)..(334): NCBI GI: 116181166 Blast Desc: CHGG_01211 [Chaetomium globosum CBS 148.51] gi|88185508|gb|EAQ92976.1| CHGG_01211 [Chaetomium globosum CBS 148.51]
  misc_feature (7)..(337): NCBI GI: 261357728 Blast Desc: conserved [Verticillium albo-atrum VaMs.102]
  misc_feature (6)..(334): NCBI GI: 256726133 Blast Desc: NECHADRAFT_81728 [Nectria haematococca mpVI 77-13-4]
  misc_feature (1)..(334): NCBI GI: 171695746 Blast Desc: protein product [Podospora anserina] gi|170948115|emb|CAP60279.1| protein product [Podospora anserina]
  misc_feature (25)..(333): NCBI GI: 85115771 Blast Desc: NCU00774 [Neurospora crassa OR74A] gi|28926728|gb|EAA35694.1| [Neurospora crassa OR74A] gi|38636406|emb|CAE81943.1| [Neurospora crassa]
  misc_feature: Useful for introducing or modulating the production of volatile compounds
MSDNKLPLKVKVGIRDSWDKEDAPVNKAITNVKDTIGVNVRVDPEWQILVSELDAAYPDKGTFVPSIAATVDAFCCAIITLADDEANAEWADKFLTKISGTVRIFFQVVKSRDLDLTWSEPRKSFLIGLPKSPVPTPSHMQSLFRGALLSCFDENAKASTILETPSSAVDDWSDVLVDNRTGNAAVIDLPARQAASQAIPEFDIMPDIDTLSRPDDLALKPPYHLVVHDGGKTQVEVQCSHSPTLEFLSKYLQRFCRINHNDSRKPPIVEIKLHQSAFGLGLVYDRLTITSEARFTIQHVSPMMILSLVEGVLGYKNVTVERGSWIFRRDIEFRGGRY

SEQ ID NO: 32554 - DNA, 3093 bp, Muscodor strobelii
  misc_feature: SGI EST ID NO. CUFF.76963.0
  misc_feature: Variant of the nucleotide sequence at SEQ ID NO 32552
ttcccaaaacccatgcttcgtcagcacacgcagattgaaaattaatacgcagtccatacggacctatacaagccaagacaatgattagatgcagagatacggaagagggtgtcgtgagatcaaggggtggccaggtgcttaaatctatcgatttccctcgccgtgatcaatcaaccctctgacctactactcattccaatcacttcaagcgacacatattttagcatataacacttgctgctcaacttgctacactggctacagcagcccgcagtcgatctcttaacgatacaccaacctgagtccatagcttatatctgtagcgcttagctacttgtctatcagcaacatcttcgagaggcatcgtagttcgcttattttccccgcccgtcataccatctacaaatcgctgtatccatgtcggccgccgactattacaagagtagcggggacgggggctattcgcagcaacctcaataccatcacagtccatctcactcgccatacccactccagccaatgtacagcgccccctcccaatcgccgtatccgcaacaggcgtcttatacttcaccactgcctcctacacaaggctatctcaccccctatccccagcaacatgattatatgcgccctggttcagcccattctgacgcaggctacccgccaccaccttaccccgtagattctcactccgcaacgtcaccacttccgcgcccacattctgccgacccatacgctgcctctgagtatgatcgtgatccgaatcggcctgaaggggaacaagaggatggcgaacgcggtcttggtgcgacgctagtcggtggtggagccggtggttttatcggccacaagattggcaagggcaaattaggtaccgtcctaggctctgcggtcggagctatcgcagcgaatatgatcgaacataaattggagggcaggcatgggcgacaacacggcggaaacccatatggccaccacagcagcggtcatagcggaggtttactgggaagcgcgaccagcttcctgagcggtggcagtcatcgcagtgagcatagctattacggaggacaagggcaccatggtcgacgagaacattctcgcgatcatcatcatgagcaccgtgatcacgaccatcatcatagacatcacgaccaccaccacgaccatcgccatgagcatcacggacgacaccatcgcgatcacgattcctactgaggagtcgattgagctttccacataatgtacgacgaattttttttttatgcttggaacggaggctatttgtgtcacagtactggatattaaagtcgagcgcaggtttgtgtccacgacatatacccgaatcaatggtttactgcaatgaatggcctgaaatccagcgattggcagacccgactatctgcaaaagacgagcatcattgcatttcctgtatataatttcttgtttacctcttaatgaaacatatgtctaatatcgatagttctttctcaagacgagcgtctctattcaatatgaggtcgaagccttacgttgcatgccatttatccagctcggtcattgtgaataggacatcaattgttcacgtcgtgactcaaaatatcgagctgatttgcaattctactttatgtaggactcagcgctgcttcatcaacatcggtgaccgtagcgcctagcacgctaagagacaccaaattcccgaactaacgccatgtttttcagctgaggcacaccactaggacaatggtgatggcaaaatgcctagctcagttcttgattaaccataccattacaattctctatttaactgattgtcccatctagaacttgcactaaattttggacattcttttcgaattctatatcccatcataatgtctgataataagctgccgctcaaagtgaaagtagggatacgcgattcatgggataaagaagatgcgccggtcaacaaagccattaccaatgtcaaggatactatcggggtcaatgtcagagtcgatcccgaatggcagatcctcgtctcagaactagacgccgcctaccctgacaaagggacatttgtgccatctatagcagcgacggtggatgcattttgttgcgccatcataacacttgcggacgacgaagcaaacgctgaatgggcagacaaattcctcacgaaaatctcgggaaccgttagaatatttttccaggtcgtaaagtcacgagatctagacttgacttggtcggaaccacgaaagagtttcttgataggtctgcctaagtctccggtgccaactccctcacatatgcaatctttattccgtggagcgcttctcagttgtttcgatgagaacgccaaagcctctactattctagaaactccgtcctcagcggtagatgactggtccgacgtattagtggacaacaggactggcaacgccgctgtaattgatctgccagcccgccaagctgcttctcaagccataccagagtttgatatcatgcctgatattgacaccttgtctcgacctgacgatttggccctcaagcccccgtatcacctagtcgtccatgatggcggcaagacacaggtcgaggtccagtgcagtcacagtccaaccttagaattcttgtccaagtacctgcagaggttttgcaggattaatcacaatgattcgagaaaaccaccaattgttgaaatcaagctacatcaatcggcattcggtcttgggcttgtgtacgatcgcctgacaatcacttctgaagccagatttaccatacaacatgtctcaccgatgatgatactctctttggtagagggagttctaggctacaagaatgttactgttgagagggggtcctggattttccgtagagatattgagtttaggggcggacgatattaatatgagttacctatcgccgtagattttgtaggcatagtatttcgttattttccgatggtctacaaaattcagggtcattcccagtgcagttaatgtgcaattccaatggtgagctactgcagcaataagtgcctgaacccattatggctcattgagagtgaatgacgggtaaatagtatggatatattggttgtcttcaag

SEQ ID NO: 32555 - DNA, 4878 bp, Muscodor strobelii
  misc_feature: SGI cDNA ID NO. 571221
  misc_feature: Encodes the peptide sequence at SEQ ID NO 32556
atgaaatcgacgcagctggagccgaccagctcggctattggggatgacaagtccttgacgcaagcttcaaggagcgagcaggatgccaaagatatctcccgtcaaatcttgcagatcgttttcgaatatgccctaaacaaaatcgatcattcagaggcaggattcgaacgtggagcgcaaaatttcgtgccagtcgtgagccgatttgttgtcaaaaacaaagctgtagaagcatgtcttccagctttcccgttcaaatcagcaaataagatatataaggttctagggaagcttcctgataaggctgaagagctggctctcgaacggctacatactatgtgcaagcgaattcaagccatctattctcccggtgcgcatatcacgatcatctcagatggtataacatacaatggtccgcactgccctagaccaatccacgtaactgaggccatgactgacagctttacattatatacttcagacctcttaagtattagcgatcaagacacttgggcgtatggagaggcactacgtgctatggcggctaagaagcagcttgacagtataagcttctcaaggatgaaggacattctcgatttatctttaccggaagaaatgcgagaaatcgtatatgttgctaattgtggtaactttcgccgtttgctcatgaacagatacggcgacccagacctcgatatcaatatggaaatttcaacgaatcccgacaccaagttgacgtatttggggtacaagagattcttagagtctgacttgaagtacatctttccacaagggtcaaatcgcacagcgaattcgtacaagcgagactgcaagtatcttgccaaacaaatgcttattaggggtcatgcttttgccggtgctgtaaaggctgcatttccaaaccatctacgactatccatccacgagtctatcggcgccgtgagaaagatctccatatccctgctaaacacgactactggttttaccactccatggcactgcagtgtggctcaactcgcaagtggagagtggattagcgctcctatgggagagttcaccaaagacgctaggatggagctggtgcatgtcaacggagttcctagccatttcatagagagacttgatggcaactccaacccaagtatcgtcgaatcgctgataaagtctaagacattatcgacgactgagtattttagccgagcttggactccttctacgactcggtccagctccgcttcacctagggaggcatctcttctacatagcgaagcggcaatatctggaaccgagcactcgcccagcattgacccaagcaatcgcgacagcgtatcagaagaaaatatctgcaatgtctcattgtccggatcctatgacctgcctcaggtgggaccatatggacgaagactgatacctcagattatggacgccttagctgtcaatgaacccgctcggaccgtattctcgctgactacaatttccggggagtctctgaatttcactcatatttcggcttgtagctttgctcaggctgtcgacaataccgcctggtggctacagagaaaggctggtcggtccagttccattcagcctatagcatacattggaccccatgatcttcggcaagttttgttgacatatgcctgcgtcaaggtcggctatgctgccctgttcctttcgccaaaaaatagcacggaaggtactttagcggtccttgaagcaacgaattgtagtgtatgggttaccgcggcagaagtagctccaatacctatggtaagagatgtcttggaaaaacgagccatgaaggtcttgaagctgcctctgcttgaaaaactgttagatgcttccaaggtcaagcatttcccgtatatcaaaacgtttgaagaagcaatcaatgacccattttgttatttgcacacatctggtaccacgggtgttcccaagcctattccttggtcccatggactcattggtacaatggatgcagtgagactcatgccgcccgttgctggagacgacgggttgctcccatggacagcggactggaagtctggagacacaatttattcatcattcccaatgagtcacggtgccggtattataatggatatcttgatgcctgcgctctacgacttgcactgcgtcttaggtccggtcagtaccatacctaacattaacctcataggcaatctagcagagtctaccaagattgacatttggagcatggtgccgtccctcgtggatgaactgggtgaaactccagaaattcttgagaaactccggccatccaagttcatctgtgcgtctggaggaccagttggtcgtgccagtgctggcaaggcgaatgaggttattcgtgtgctgaacttgacggggaccaccgagggtctttttatagggaatctcgtaccttctagagaagactggtactggttttgttttcatccttcttctggcttcgaattcaaacaacttgacgaggatacttatgaacactgggtccatcgcaacgatgaatggccgttgtttcagggaatttttcatacctttccggataaggactccgtcaatttcaaagatctttatatgagacatccaactaagccaaatctatgggcctttaagggaagaagtgatgatctggttgtcttgtctaacgggtataagatatctccgctggagacagaagcttacatcacaactcatcccgccgttgaaggctgtcttatcttcggaacaggcaagcctcaacctggtctccttattgagttgaaagatccgtcaaataaatcggaagagcttctcgaaagcatctggaaggttgttgaagaggcgaataaaatgtctcggcacaagaatcaacttttgaagaactttgtcacatttgcgcaagccgacaaaccattcttccgtacagataagcgcaccatcaaacggcctgcaacattggcgctgtacgctgactacatcgagcgtttctatagctcggtcagcgatcaggagccagttggcaccacccctgctatcgacacgagctctacagagtcaattcagagcggcgtcctcgaaatcattcgttcctcgcttcatggcgttgagggcgaaatggatctgaatggtaatctgtttcaacttggtcttgactctctgggcgtcatatccgctatcaagtcaattcggctcgccacagggcttacggaccaagtttcaccacgacatatttactctaatcccaccattgccaaactgtctaccgtcattttgagaatgataatgaagctgaaagaaactacaaaagcttcaattacgatgccttatgacaacaccaccgagaactttgaccgcatgattacacaatataaagcacatcagactttcaagttaaatgcatgggatcatggtttcggcaaatcatatttctccatggtgttctacataccactccgtggaggagtcagctttcaggagacattcagcactttgcaggccggtctcaaccgcacttttgatctgattccagctcttgctggtaaagttattgaccgttccgagcaggaggttgactactggaaaggagaacgcagcgtttcagtaccctcaccctcgatgttagcttcggtatctaatcgcctaaagtacaacgatctatccaccgtactcccatcattcgccgaattacgcgcgaagagctttgcaccatctatcatcagagacgagcttctcgtggatattgagccatttttccagctacccgcagatgtgatggctgcacaagcaaatttcgttgagggtggttgcatactcgcgactgagttcaatcattgctgtcttgatggtgtcggtgggttcgtggcatgcagggcctgggctgagaactgtagatatatccagggagatccgtcggctacgtgtgactggttccacccagaaagcttcaaccatagcttgcttgacatcgttcaagaacatgagggttgggcaaagccagtcagcgacatagatcctggaacctggagttttctacagtttcaccccgatgatgatcggaagccagccgcatcggaagcggtgcaaaagacatggactctaccgccccggccgaaatattctcctcctccatcgtggccagcctcccgagccgagagaagcccgagaataacgctcttccgtatttctgcgcaaaaactggcagagctgaaagatcacgtcttggcaaattcggagtcatcgggtttcacgccctccattagcgacttagttcaagcattttggtggagatccgcgctccgagcacgataccgcgtagcgacagagattcgaaagcagacttttgggcccgatgacctcgctattctcgagtcagttgttgatggccgcccttacttcagcgagctattgccgtctacgtatatgggcagtctcctgttattcaatcgcccgagcatgccaatcgagactttctgttccccatcgacgaccattgcccaggtagcacgcatgattcgcgatgcaagcgggcgtataacccctcaagtcgcccacgacgtcttttgcctgtaccaaaatattgaggaccgcagccggtttggcggggccggtgttggactcgaacacatgaataccctgatctctaatattatgatgttctcgacaaatgagctaggttttggaaatcgtttattcgacgacggcggcgttccattgaccatgcgacctctcctcgagcgtcatgttggacgtttccgcataattgtcattttccccataaccaaggacggctcagtcgagctggtgttaggcactcatcccgaggaactagagatgcttcaacaggatgatgaattcacgcgctatgcagatctgatcgatgtcggctactaa

SEQ ID NO: 32556 - protein, 1625 aa, Muscodor strobelii
  misc_feature: SGI Peptide ID NO. 571221
  misc_feature (503)..(909): Pfam Id: PF00501 Pfam Desc: AMP-binding enzyme
  misc_feature (65)..(365): Pfam Id: PF05141 Pfam Desc: Pyoverdine/dityrosine biosynthesis protein
  misc_feature (1091)..(1615): Pfam Id: PF02458 Pfam Desc: Transferase family
  misc_feature (529)..(794): Pfam Id: PF00501 Pfam Desc: AMP-binding enzyme
  misc_feature (873)..(909): Pfam Id: PF00501 Pfam Desc: AMP-binding enzyme
  misc_feature (66)..(133): Pfam Id: PF05141 Pfam Desc: Pyoverdine/dityrosine biosynthesis protein
  misc_feature (245)..(365): Pfam Id: PF05141 Pfam Desc: Pyoverdine/dityrosine biosynthesis protein
  misc_feature (3)..(1622): NCBI GI: 242798886 Blast Desc: transferase family protein [Talaromyces stipitatus ATCC 10500] gi|218716605|gb|EED16026.1| transferase family protein [Talaromyces stipitatus ATCC 10500]
  misc_feature (8)..(1620): NCBI GI: 212531757 Blast Desc: transferase family protein [Penicillium marneffei ATCC 18224] gi|210071399|gb|EEA25488.1| transferase family protein [Penicillium marneffei ATCC 18224]
  misc_feature (8)..(1623): NCBI GI: 238846197 Blast Desc: transferase family protein [Microsporum canis CBS 113480]
  misc_feature (26)..(1331): NCBI GI: 261354070 Blast Desc: transferase family protein [Verticillium albo-atrum VaMs.102]
  misc_feature (613)..(1622): NCBI GI: 119490811 Blast Desc: transferase family protein [Neosartorya fischeri NRRL 181] gi|119411262|gb|EAW21205.1| transferase family protein [Neosartorya fischeri NRRL 181]
  misc_feature (600)..(1622): NCBI GI: 70999065 Blast Desc: transferase family protein [Aspergillus fumigatus Af293] gi|66851891|gb|EAL92216.1| transferase family protein [Aspergillus fumigatus Af293]
  misc_feature (600)..(1622): NCBI GI: 159127271 Blast Desc: transferase family protein [Aspergillus fumigatus A1163]
  misc_feature (465)..(1616): NCBI GI: 46115788 Blast Desc: FG03736.1 [Gibberella zeae PH-1]
  misc_feature (463)..(1621): NCBI GI: 46127613 Blast Desc: FG08184.1 [Gibberella zeae PH-1]
  misc_feature (32)..(554): NCBI GI: 119490813 Blast Desc: pyoverdine/dityrosine biosynthesis family protein, [Neosartorya fischeri NRRL 181] gi|119411263|gb|EAW21206.1| pyoverdine/dityrosine biosynthesis family protein, [Neosartorya
MKSTQLEPTSSAIGDDKSLTQASRSEQDAKDISRQILQIVFEYALNKIDHSEAGFERGAQNFVPVVSRFVVKNKAVEACLPAFPFKSANKIYKVLGKLPDKAEELALERLHTMCKRIQAIYSPGAHITIISDGITYNGPHCPRPIHVTEAMTDSFTLYTSDLLSISDQDTWAYGEALRAMAAKKQLDSISFSRMKDILDLSLPEEMREIVYVANCGNFRRLLMNRYGDPDLDINMEISTNPDTKLTYLGYKRFLESDLKYIFPQGSNRTANSYKRDCKYLAKQMLIRGHAFAGAVKAAFPNHLRLSIHESIGAVRKISISLLNTTTGFTTPWHCSVAQLASGEWISAPMGEFTKDARMELVHVNGVPSHFIERLDGNSNPSIVESLIKSKTLSTTEYFSRAWTPSTTRSSSASPREASLLHSEAAISGTEHSPSIDPSNRDSVSEENICNVSLSGSYDLPQVGPYGRRLIPQIMDALAVNEPARTVFSLTTISGESLNFTHISACSFAQAVDNTAWWLQRKAGRSSSIQPIAYIGPHDLRQVLLTYACVKVGYAALFLSPKNSTEGTLAVLEATNCSVWVTAAEVAPIPMVRDVLEKRAMKVLKLPLLEKLLDASKVKHFPYIKTFEEAINDPFCYLHTSGTTGVPKPIPWSHGLIGTMDAVRLMPPVAGDDGLLPWTADWKSGDTIYSSFPMSHGAGIIMDILMPALYDLHCVLGPVSTIPNINLIGNLAESTKIDIWSMVPSLVDELGETPEILEKLRPSKFICASGGPVGRASAGKANEVIRVLNLTGTTEGLFIGNLVPSREDWYWFCFHPSSGFEFKQLDEDTYEHWVHRNDEWPLFQGIFHTFPDKDSVNFKDLYMRHPTKPNLWAFKGRSDDLVVLSNGYKISPLETEAYITTHPAVEGCLIFGTGKPQPGLLIELKDPSNKSEELLESIWKVVEEANKMSRHKNQLLKNFVTFAQADKPFFRTDKRTIKRPATLALYADYIERFYSSVSDQEPVGTTPAIDTSSTESIQSGVLEIIRSSLHGVEGEMDLNGNLFQLGLDSLGVISAIKSIRLATGLTDQVSPRHIYSNPTIAKLSTVILRMIMKLKETTKASITMPYDNTTENFDRMITQYKAHQTFKLNAWDHGFGKSYFSMVFYIPLRGGVSFQETFSTLQAGLNRTFDLIPALAGKVIDRSEQEVDYWKGERSVSVPSPSMLASVSNRLKYNDLSTVLPSFAELRAKSFAPSIIRDELLVDIEPFFQLPADVMAAQANFVEGGCILATEFNHCCLDGVGGFVACRAWAENCRYIQGDPSATCDWFHPESFNHSLLDIVQEHEGWAKPVSDIDPGTWSFLQFHPDDDRKPAASEAVQKTWTLPPRPKYSPPPSWPASRAERSPRITLFRISAQKLAELKDHVLANSESSGFTPSISDLVQAFWWRSALRARYRVATEIRKQTFGPDDLAILESVVDGRPYFSELLPSTYMGSLLLFNRPSMPIETFCSPSTTIAQVARMIRDASGRITPQVAHDVFCLYQNIEDRSRFGGAGVGLEHMNTLISNIMMFSTNELGFGNRLFDDGGVPLTMRPLLERHVGRFRIIVIFPITKDGSVELVLGTHPEELEMLQQDDEFTRYADLIDVGY

SEQ ID NO: 32557 - DNA, 396 bp, Muscodor strobelii
  misc_feature: SGI cDNA ID NO. 571222
  misc_feature: Encodes the peptide sequence at SEQ ID NO 32558
atgcctacccttgatattagcgagttgaatattgtaattgctgtgctaggtagctttgctgtagtttttggcctgttcgccgttaaaatcaagagtgtctggtatcttggcgaagccttaccagccgtaacacttggcgtcgccttgggtcctatctcagccaaattcttaagccctgaaagatgggggtcagcatcgccaggtcaagaagatgctgtcactttgggggtcatgcgggtgatgataggtattcaacttgtcattgcaggctatcaattgccggcacaatgtgagtattatgtgtttcgattcaaggcccaggcaaagacgggcggattcttgatcacaatgattcgactccagactacatcgaatcgaggacagacttacatgtga

SEQ ID NO: 32558 - protein, 131 aa, Muscodor strobelii
  misc_feature: SGI Peptide ID NO. 571222
  misc_feature (1)..(124): NCBI GI: 256722025 Blast Desc: NECHADRAFT_51230 [Nectria haematococca mpVI 77-13-4]
  misc_feature (1)..(108): NCBI GI: 189197899 Blast Desc: Na(+)/H(+) antiporter 1 [Pyrenophora tritici-repentis Pt-1C-BFP] gi|187981235|gb|EDU47861.1| Na(+)/H(+) antiporter 1 [Pyrenophora tritici-repentis Pt-1C-BFP]
  misc_feature (1)..(124): NCBI GI: 256721494 Blast Desc: NECHADRAFT_68891 [Nectria haematococca mpVI 77-13-4]
  misc_feature (1)..(123): NCBI GI: 240107296 Blast Desc: Sodium/hydrogen exchanger family protein [Coccidioides posadasii C735 delta SOWgp]
  misc_feature (1)..(105): NCBI GI: 256728989 Blast Desc: NECHADRAFT_69169 [Nectria haematococca mpVI 77-13-4]
  misc_feature (1)..(124): NCBI GI: 46126515 Blast Desc: FG07635.1 [Gibberella zeae PH-1]
  misc_feature (1)..(105): NCBI GI: 258565171 Blast Desc: conserved [Uncinocarpus reesii 1704] gi|237907031|gb|EEP81432.1| conserved [Uncinocarpus reesii 1704]
  misc_feature (1)..(124): NCBI GI: 46139147 Blast Desc: FG11088.1 [Gibberella zeae PH-1]
  misc_feature (1)..(123): NCBI GI: 171691016 Blast Desc: protein product [Podospora anserina] gi|170945456|emb|CAP71568.1| protein product [Podospora anserina]
  misc_feature (1)..(123): NCBI GI: 239607707 Blast Desc: plasma membrane antiporter [Ajellomyces dermatitidis ER-3]
MPTLDISELNIVIAVLGSFAVVFGLFAVKIKSVWYLGEALPAVTLGVALGPISAKFLSPERWGSASPGQEDAVTLGVMRVMIGIQLVIAGYQLPAQCEYYVFRFKAQAKTGGFLITMIRLQTTSNRGQTYM

SEQ ID NO: 32559 - DNA, 1281 bp, Muscodor strobelii
  misc_feature: SGI cDNA ID NO. 571223
  misc_feature: Encodes the peptide sequence at SEQ ID NO 32560
atgattttcatgtggctctcgacttcgttgtgtatcttcgccgcacttccacaccttccgttcgtagcgacactcgtgatcggtgcttgcgcaacatcgacagacccgatcctgtcacaagctgtcgcaaaaggcccatttgctgacaagtacgttgcacgtccattgagagagatcatgtccgcggaagcgggttccaacgatggattcgcctcacctttcttaatgcttgcggtgaacctcatgcgtctctcagccgggcaggtagagactcttatcgagcgaaacagaggtgttggcccacatactagtgacataggtatcgccttaagcaactgggcaatagaaacactcgtatatattgtactactggcgactgtctacggcgcagtaattggatcctgtgcgagatacggcgttgagttctctttgaggcgcaaatggatagacactgagtgttacctgcttttcccgacggcgttagggcttttcattattggcacatgtggcgctcttggaacaagcgacctgttggcgtgttttgttgcaggttgtgcattgaactgggatggccaattccttgccgagaccgaacgccgccacgatgaagtcaattcttgcattgatatcattctcaacttcgggggcttcatgtatgttggtactgccgtgccttggagcgaattcgatcaacccgccaatggcgttacctatccgcgattgattggcctaggagttctcgtcttactcttccgtcggataccggctcttctaataacctacaaagctatgccatctgtgatacagaattggagggaggctctcttcatgggttggtttggccccatcggagttggcgccgtctattacctcgagcatacgagactcctgttcgactcacataatgcagcagagaaggttgtcgtagatgctctttgtccagtggtttacttcctcgttttaacctcaatctttattcatggcttatctatcccaatcttgagcgcagcctatcgcttttatggggtagacacgatcacagatgacgccgtcgccatccgacgaagaagtatatacgcaccaacacctccgaatgccttcaggaacgaccaaaatacgttcatagcatataatcgtttcttccgcccgttgacgactttgagcatgttaccattggctcacacccttagtcgtgagacttatgatgacagtatgaaggccaggattgacgacaaggaggtaccgcctgaaactgctcatctccgaccagtcaactggtaa

SEQ ID NO: 32560 - protein, 426 aa, Muscodor strobelii
  misc_feature: SGI Peptide ID NO. 571223
  misc_feature (19)..(337): Pfam Id: PF00999 Pfam Desc: Sodium/hydrogen exchanger family
  misc_feature (1)..(391): NCBI GI: 256728989 Blast Desc: NECHADRAFT_69169 [Nectria haematococca mpVI 77-13-4]
  misc_feature (1)..(415): NCBI GI: 171679138 Blast Desc: protein product [Podospora anserina] gi|170937640|emb|CAP62299.1| protein product [Podospora anserina]
  misc_feature (1)..(383): NCBI GI: 256721494 Blast Desc: NECHADRAFT_68891 [Nectria haematococca mpVI 77-13-4]
  misc_feature (1)..(412): NCBI GI: 171691016 Blast Desc: protein product [Podospora anserina] gi|170945456|emb|CAP71568.1| protein product [Podospora anserina]
  misc_feature (1)..(390): NCBI GI: 46139147 Blast Desc: FG11088.1 [Gibberella zeae PH-1]
  misc_feature (1)..(397): NCBI GI: 256734904 Blast Desc: NECHADRAFT_31704 [Nectria haematococca mpVI 77-13-4]
  misc_feature (1)..(426): NCBI GI: 239607707 Blast Desc: plasma membrane antiporter [Ajellomyces dermatitidis ER-3]
  misc_feature (1)..(386): NCBI GI: 189197899 Blast Desc: Na(+)/H(+) antiporter 1 [Pyrenophora tritici-repentis Pt-1C-BFP] gi|187981235|gb|EDU47861.1| Na(+)/H(+) antiporter 1 [Pyrenophora tritici-repentis Pt-1C-BFP]
  misc_feature (1)..(404): NCBI GI: 46126515 Blast Desc: FG07635.1 [Gibberella zeae PH-1]
  misc_feature (1)..(382): NCBI GI: 67537730 Blast Desc: AN5035.2 [Aspergillus nidulans FGSC A4] gi|40741923|gb|EAA61113.1| AN5035.2 [Aspergillus nidulans FGSC A4] gi|259482089|tpe|CBF76235.1| TPA: sodium ion/proton exchanger
MIFMWLSTSLCIFAALPHLPFVATLVIGACATSTDPILSQAVAKGPFADKYVARPLREIMSAEAGSNDGFASPFLMLAVNLMRLSAGQVETLIERNRGVGPHTSDIGIALSNWAIETLVYIVLLATVYGAVIGSCARYGVEFSLRRKWIDTECYLLFPTALGLFIIGTCGALGTSDLLACFVAGCALNWDGQFLAETERRHDEVNSCIDIILNFGGFMYVGTAVPWSEFDQPANGVTYPRLIGLGVLVLLFRRIPALLITYKAMPSVIQNWREALFMGWFGPIGVGAVYYLEHTRLLFDSHNAAEKVVVDALCPVVYFLVLTSIFIHGLSIPILSAAYRFYGVDTITDDAVAIRRRSIYAPTPPNAFRNDQNTFIAYNRFFRPLTTLSMLPLAHTLSRETYDDSMKARIDDKEVPPETAHLRPVNW

SEQ ID NO: 32561 - DNA, 1221 bp, Muscodor strobelii
  misc_feature: SGI cDNA ID NO. 571224
  misc_feature: Encodes the peptide sequence at SEQ ID NO 32562
atggtctacgctgctaagctcgccctcatcggcgccctttttggtgctgcctcagctgccccttctccttcaaccaacaccttcaccgtcaaccaagtcgccaaccccaagttcagaggccaccatgacccgaagacttctgtagccagaacatatctgaaatacggcaagcctgttccccatgagcttgccaagagtcttgctgcggccaaggagaagcgtgccaacactggcagtgttaccactacttctatcgagggcgatgtcgaatggattactcctgtccagatcggaacgcccgcgcagaccttgaaccttgatttcgacagtggttcttctgatctctgggtgttctctagcgatacttcctctcgctacgtcaatggccagaccacctacaagccaggctcatcttctacctccaagaagctgtctggatatacgtggagcatcagctacggcgatggttctacttccaagggtatcgtctatgacgacaaagttaccattggtggtctaactgtagcctcccaggctgttgagtctgcccaaaccgtctcttcttccttcacggccgataccgactcggatggcctgttgggccttgcttttagctcgctcaacaccgtctcgcccacccagcagaagacctggttcgacaacatcaagagctcattggccagccccatctttgctgtcgacttcaaggccggcgcagctgggacatacgacttcggtttcatcgactccagcaagtacactggaagtatcacatatgctaccgtgagcacccgtcaaggcttctgggagttcacctcttctggctatgccgtcggctccggcgctttcaagtccactagcatcgatggcattgctgacactggtaccacccttgtataccttcccgcttcgatcatcagcgcctactatgctcaggtttccggcgccaagaacgacaactcggagggtggctacgttttcagctgcagcgctactctgcccaactttactttcggtgttggcagcgcccgcattgtcatccctggcaagtatgtcaacttcggccccgtttcggaaggttcatctacctgcttcggaggaattcagtccagcgcgggcatcggcattaacatctggggtgatgtcgctcttaagtctgcttacgtcgttttcgactcctcgactcctcgcattggctgggcttctaagactcttgcttaa

SEQ ID NO: 32562 - protein, 406 aa, Muscodor strobelii
  misc_feature: SGI Peptide ID NO. 571224
  misc_feature (90)..(403): Pfam Id: PF00026 Pfam Desc: Eukaryotic aspartyl protease
  misc_feature (18)..(403): NCBI GI: 416748 Blast Desc: CARP_CRYPA RecName: Full=Endothiapepsin; AltName: Full=Aspartate protease; Flags: Precursor gi|2629|emb|CAA44952.1| microbial aspartic proteinases; precursor endothiapepsin aspartic
  misc_feature (76)..(403): NCBI GI: 229897 Blast Desc: CARP_CRYPA RecName: Full=Endothiapepsin; AltName: Full=Aspartate protease; Flags: Precursor gi|2629|emb|CAA44952.1| microbial aspartic proteinases; precursor endothiapepsin aspartic
  misc_feature (8)..(405): NCBI GI: 46126795 Blast Desc: FG07775.1 [Gibberella zeae PH-1]
  misc_feature (17)..(405): NCBI GI: 18448713 Blast Desc: AF462062_1 aspartic protease [Fusarium venenatum]
  misc_feature (21)..(405): NCBI GI: 29788116 Blast Desc: aspartyl protease [Sordaria macrospora]
  misc_feature (76)..(403): NCBI GI: 256599461 Blast Desc: aspartyl protease [Sordaria macrospora]
  misc_feature (76)..(403): NCBI GI: 22218665 Blast Desc: aspartyl protease [Sordaria macrospora]
  misc_feature (76)..(403): NCBI GI: 169404775 Blast Desc: aspartyl protease [Sordaria macrospora]
  misc_feature (77)..(402): NCBI GI: 157877818 Blast Desc: aspartyl protease [Sordaria macrospora]
  misc_feature (5)..(406): NCBI GI: 1469396 Blast Desc: secreted aspartic proteinase precursor [Glomerella cingulata]
  misc_feature (28)..(403): SWISSPROT Homolog: EC 3.4.23.22 Endothiapepsin
MVYAAKLALIGALFGAASAAPSPSTNTFTVNQVANPKFRGHHDPKTSVARTYLKYGKPVPHELAKSLAAAKEKRANTGSVTTTSIEGDVEWITPVQIGTPAQTLNLDFDSGSSDLWVFSSDTSSRYVNGQTTYKPGSSSTSKKLSGYTWSISYGDGSTSKGIVYDDKVTIGGLTVASQAVESAQTVSSSFTADTDSDGLLGLAFSSLNTVSPTQQKTWFDNIKSSLASPIFAVDFKAGAAGTYDFGFIDSSKYTGSITYATVSTRQGFWEFTSSGYAVGSGAFKSTSIDGIADTGTTLVYLPASIISAYYAQVSGAKNDNSEGGYVFSCSATLPNFTFGVGSARIVIPGKYVNFGPVSEGSSTCFGGIQSSAGIGINIWGDVALKSAYVVFDSSTPRIGWASKTLA

SEQ ID NO: 32563 - DNA, 1981 bp, Muscodor strobelii
  misc_feature: SGI EST ID NO. CUFF.77004.0
  misc_feature: Variant of the nucleotide sequence at SEQ ID NO 32561
cgacatcatataaccatcagcaggccatcgatgtcgccatcatttccgctctaatctatgatttgccgggcagtgtctcttccaatcgactcctctttggctcgtcttctcgtacccttgagagccttaccgcagtcgaggagttgatcatggtccatagcagcccccaattggtggagagcaactttcgtcagttcgccgctcgctagacccatctttgttgactgccgttcccgttcttttgtcaacctctgccaaataatatgctatcagtatttgtccgagggtgttcgagcgccgctgatcctcgccattcgtccatcccgagggatcttagtcgatctcctgcctcattgagagcaacagctttatagtcgagtgctcaactgcagaaagaggcaatgtgattgttgtgcacacattagatatgtaggaccactatctatatataaagcttggagtttgcccttcgttggcgatgatcttggctatcctcatcaacccagcatctcctagctcttctctcgttacctctgaccttcaaaatggtctacgctgctaagctcgccctcatcggcgccctttttggtgctgcctcagctgccccttctccttcaaccaacaccttcaccgtcaaccaagtcgccaaccccaagttcagaggccaccatgacccgaagacttctgtagccagaacatatctgaaatacggcaagcctgttccccatgagcttgccaagagtcttgctgcggccaaggagaagcgtgccaacactggcagtgttaccactacttctatcgagggcgatgtcgaatggattactcctgtccagatcggaacgcccgcgcagaccttgaaccttgatttcgacagtggttcttctgatctctgggtgttctctagcgatacttcctctcgctacgtcaatggccagaccacctacaagccaggctcatcttctacctccaagaagctgtctggatatacgtggagcatcagctacggcgatggttctacttccaagggtatcgtctatgacgacaaagttaccattggtggtctaactgtagcctcccaggctgttgagtctgcccaaaccgtctcttcttccttcacggccgataccgactcggatggcctgttgggccttgcttttagctcgctcaacaccgtctcgcccacccagcagaagacctggttcgacaacatcaagagctcattggccagccccatctttgctgtcgacttcaaggccggcgcagctgggacatacgacttcggtttcatcgactccagcaagtacactggaagtatcacatatgctaccgtgagcacccgtcaaggcttctgggagttcacctcttctggctatgccgtcggctccggcgctttcaagtccactagcatcgatggcattgctgacactggtaccacccttgtataccttcccgcttcgatcatcagcgcctactatgctcaggtttccggcgccaagaacgacaactcggagggtggctacgttttcagctgcagcgctactctgcccaactttactttcggtgttggcagcgcccgcattgtcatccctggcaagtatgtcaacttcggccccgtttcggaaggttcatctacctgcttcggaggaattcagtccagcgcgggcatcggcattaacatctggggtgatgtcgctcttaagtctgcttacgtcgttttcgactcctcgactcctcgcattggctgggcttctaagactcttgcttaagctgctgaataccacgtgcaaggacatcgggacttgaggatatagagagaacatgctgggttgatcttattcctgggtcttatattgaatagaaacacaagggatctatggctgtagcgaatagattatgacgaattgatgaagggaaaaaaatcccatttttgaaatacgtcttctcctagatacattaatgacttaatgtgacggtttcgtgc

SEQ ID NO: 32564 - DNA, 960 bp, Muscodor strobelii
  misc_feature: SGI cDNA ID NO. 571225
  misc_feature: Encodes the peptide sequence at SEQ ID NO 32565
atgtttgacggacaaacgacaagcgaagaggtcatcgagacattcaagtccgagatcaagggcaaaacctttgtcctagtcggcgcgggatatccaagtataggaagccagatggctacctatttggcaactggatcaccggcacatattctcatcgcgtcgagaacggccagtaaggtcgagcctgtcctgaagactatcaaggagaccaatgactccatcaagacaacatatgtgcacgtcgatacaaccgatcatgaatcagtgagaggggcagcgaagaagattctagaagcagcaccctctatcgatgtccttgttcatagcgctggtgccatggcaactaaggagtataccctcgacaaacaaggaatcgaatttcagctctccgcgaatcatgtgggctgtttcttgttggtgaatttgctagttcccgcgatgttagctgcgggtagcgcgcggttcgtcaacctaacgagttcggggtataagctatcgccgtttcgatttgaggactggaacttctccgggggaaagaagtacgagccttggacaggatacggtcaagctaaaactgcgaacatcctctttgcatatggcttaggcaaacgacttgggccatccgacttgacggcagtagccgtacatccaggatataatggggatacgaagttgggagaacatcttacgtgggatgattacggcaagatcgccgatgtctatcgtcgccaaagaggagaagagtgggctttcgaagaaccccggttcaagaccttctcacaaattgccgccacgcctctgattgcggcactggatccggatctgcgatcagctaggttcagcgcatacatgcagaatggccaggtgcatgaagccgatgcgtatgcaactgactctgagaatatagaaagattatggaagctcagcgaagagttggttgggcaggagttcacatattga

SEQ ID NO: 32565 - protein, 319 aa, Muscodor strobelii
  misc_feature: SGI Peptide ID NO. 571225
  misc_feature (22)..(206): Pfam Id: PF00106 Pfam Desc: short chain dehydrogenase
  misc_feature (34)..(112): Pfam Id: PF00106 Pfam Desc: short chain dehydrogenase
  misc_feature (1)..(319): NCBI GI: 145247610 Blast Desc: An12g10060 [Aspergillus niger] gi|134080793|emb|CAL00907.1| protein product [Aspergillus niger]
  misc_feature (1)..(319): NCBI GI: 171681670 Blast Desc: protein product [Podospora anserina] gi|170940794|emb|CAP66443.1| protein product [Podospora anserina]
  misc_feature (2)..(319): NCBI GI: 116205537 Blast Desc: CHGG_10652 [Chaetomium globosum CBS 148.51] gi|88176780|gb|EAQ84248.1| CHGG_10652 [Chaetomium globosum CBS 148.51]
  misc_feature (2)..(317): NCBI GI: 39946214 Blast Desc: MGG_08405 [Magnaporthe grisea 70-15] gi|145019935|gb|EDK04163.1| MGG_08405 [Magnaporthe grisea 70-15]
  misc_feature (2)..(317): NCBI GI: 238496683 Blast Desc: short-chain dehydrogenase, [Aspergillus flavus NRRL3357] gi|220694457|gb|EED50801.1| short-chain dehydrogenase, [Aspergillus flavus NRRL3357]
  misc_feature (2)..(317): NCBI GI: 154317021 Blast Desc: BC1G_03928 [Botryotinia fuckeliana B05.10] gi|150845540|gb|EDN20733.1| BC1G_03928 [Botryotinia fuckeliana B05.10]
  misc_feature (23)..(317): NCBI GI: 169774723 Blast Desc: [Aspergillus oryzae RIB40] gi|83769692|dbj|BAE59827.1| protein product [Aspergillus oryzae]
  misc_feature (2)..(319): NCBI GI: 119483786 Blast Desc: short-chain dehydrogenase [Neosartorya fischeri NRRL 181] gi|119409952|gb|EAW19899.1| short-chain dehydrogenase [Neosartorya fischeri NRRL 181]
  misc_feature (2)..(318): NCBI GI: 115443522 Blast Desc: [Aspergillus terreus NIH2624] gi|114188437|gb|EAU30137.1| [Aspergillus terreus NIH2624]
  misc_feature (2)..(317): NCBI GI: 226291192 Blast Desc: retinol dehydrogenase [Paracoccidioides brasiliensis Pb18]
  misc_feature (23)..(314): SWISSPROT Homolog: EC 1.3.1.33 Protochlorophyllide reductase
MFDGQTTSEEVIETFKSEIKGKTFVLVGAGYPSIGSQMATYLATGSPAHILIASRTASKVEPVLKTIKETNDSIKTTYVHVDTTDHESVRGAAKKILEAAPSIDVLVHSAGAMATKEYTLDKQGIEFQLSANHVGCFLLVNLLVPAMLAAGSARFVNLTSSGYKLSPFRFEDWNFSGGKKYEPWTGYGQAKTANILFAYGLGKRLGPSDLTAVAVHPGYNGDTKLGEHLTWDDYGKIADVYRRQRGEEWAFEEPRFKTFSQIAATPLIAALDPDLRSARFSAYMQNGQVHEADAYATDSENIERLWKLSEELVGQEFTY

SEQ ID NO: 32566 - DNA, 1897 bp, Muscodor strobelii
  misc_feature: SGI EST ID NO. CUFF.76988.0
  misc_feature: Variant of the nucleotide sequence at SEQ ID NO 32564
gttcattcagtcgggcaacacggcaaattcttgggagacggagtattccacgcggaaaattgttacgccaaggctagactgtcctcacggaatatagtaaaatcgctgatatcgacttagatccgcctaaatccagaaataatcatggactttgtgaactttcggtgttttgacgcaggctacgctacgcgattgtagagatattcgctgcctagaggaggcttattggtaatggcggcggccgccaaactggggtcgtgacatatcgagctctgctctcattgagaataaaaaaaggcttaagccgctctcaagatgttgcagtcactctcgcaacacatacctttaagtttactcctgctttccaagtggtactatcaatatcggaaatgtttgacggacaaacgacaagcgaagaggtcatcgagacattcaagtccgagatcaagggcaaaacctttgtcctagtcggcgcgggatatccaagtataggaagccagatggctacctatttggcaactggatcaccggcacatattctcatcgcgtcgagaacggccagtaaggtcgagcctgtcctgaagactatcaaggagaccaatgactccatcaagacaacatatgtgcacgtcgatacaaccgatcatgaatcagtgagaggggcagcgaagaagattctagaagcagcaccctctatcgatgtccttgttcatagcgctggtgccatggcaactaaggagtataccctcgacaaacaaggaatcgaatttcagctctccgcgaatcatgtgggctgtttcttgttggtgaatttgctagttcccgcgatgttagctgcgggtagcgcgcggttcgtcaacctaacgagttcggggtataagctatcgccgtttcgatttgaggactggaacttctccgggggaaagaagtacgagccttggacaggatacggtcaagctaaaactgcgaacatcctctttgcatatggcttaggcaaacgacttgggccatccgacttgacggcagtagccgtacatccaggatataatggggatacgaagttgggagaacatcttacgtgggatgattacggcaagatcgccgatgtctatcgtcgccaaagaggagaagagtgggctttcgaagaaccccggttcaagaccttctcacaaattgccgccacgcctctgattgcggcactggatccggatctgcgatcagctaggttcagcgcatacatgcagaatggccaggtgcatgaagccgatgcgtatgcaactgactctgagaatatagaaagattatggaagctcagcgaagagttggttgggcaggagttcacatattgaatgcctgcatgtagctcagggtcatcagccggggcgcgccgctggccgacttgtgtgctaccgtaaatatctaagtactccgcagcctgcgatgaaagcaacctcttctgtaacgagaatgaataacaagagctagtttatttcgacgactctcgaaacaggtaaacaggtcggcgatgacactcgtgacgctgattggtgtgtgagtgagatgaggttgtgcctgagctgagtttagtaagagcacgatgaaacgtgatgttgcaacgacgcaaagatccatgagttttcatcgcgagcctggatgggaggcttgtctgaggccgttgatgaagccatcacgaagttgtcgtgatgccgaatacctgccgtttcaggtctagctgtgcctacttgggaaagtgatctgtccgcatcgccaccgaagccaaaggtccggtcattgcggggggaggcaatagctctagtcgcttatgcaggaaataacatctggaatatggtgcttgaaggagaaggtgatgatactcaactgtcaatggtggcttgtg

SEQ ID NO: 32567 - DNA, 360 bp, Muscodor strobelii
  misc_feature: SGI cDNA ID NO. 571226
  misc_feature: Encodes the peptide sequence at SEQ ID NO 32568
atgccgcaggacatgccccccgtcgggggctacggccccgtccagtacaagcgcaacctaccagcagccggcttacgccccggaacctggctgatcgctatgggcgtcgtcatgacctacggtttctacaaactcggagtcggtatcaaggagcagaaggaactcgcccgtgagaagatgtggtcccgcatccacctcgtgcccgtcctgcaagccgaagaagaccgcgatctcgtccgtagacacttggctgatcaggctcgcgagaaggagttgctgggtgagaatattaaggtctataactctgatagatacgtgagaccgacgtacgctgtcacgccttcgcaagtcacgaaataa

SEQ ID NO: 32568 - protein, 119 aa, Muscodor strobelii
  misc_feature: SGI Peptide ID NO. 571226
  misc_feature (1)..(116): Pfam Id: PF06212 Pfam Desc: GRIM-19 protein
  misc_feature (3)..(80): Pfam Id: PF06212 Pfam Desc: GRIM-19 protein
  misc_feature (1)..(119): NCBI GI: 39942812 Blast Desc: MGG_03486 [Magnaporthe grisea 70-15] gi|145009961|gb|EDJ94617.1| MGG_03486 [Magnaporthe grisea 70-15]
  misc_feature (1)..(119): NCBI GI: 116789904 Blast Desc: [Picea sitchensis]
  misc_feature (1)..(119): NCBI GI: 156050787 Blast Desc: SS1G_07981 [Sclerotinia sclerotiorum 1980] gi|154692381|gb|EDN92119.1| SS1G_07981 [Sclerotinia sclerotiorum 1980]
  misc_feature (1)..(119): NCBI GI: 171680432 Blast Desc: protein product [Podospora anserina] gi|170939843|emb|CAP65068.1| protein product [Podospora anserina]
  misc_feature (1)..(119): NCBI GI: 169624949 Blast Desc: SNOG_15741 [Phaeosphaeria nodorum SN15] gi|111055716|gb|EAT76836.1| SNOG_15741 [Phaeosphaeria nodorum SN15]
  misc_feature (1)..(119): NCBI GI: 261205182 Blast Desc: NADH-ubiquinone oxidoreductase subunit GRIM-19 [Ajellomyces dermatitidis SLH14081] gi|239592387|gb|EEQ74968.1| NADH-ubiquinone oxidoreductase subunit GRIM-19 [Ajellomyces ER-3]
  misc_feature (1)..(119): NCBI GI: 189194363 Blast Desc: conserved [Pyrenophora tritici-repentis Pt-1C-BFP] gi|187979084|gb|EDU45710.1| conserved [Pyrenophora tritici-repentis Pt-1C-BFP]
  misc_feature (1)..(119): NCBI GI: 226283059 Blast Desc: conserved [Paracoccidioides brasiliensis Pb01]
  misc_feature (1)..(119): NCBI GI: 225680608 Blast Desc: conserved [Paracoccidioides brasiliensis Pb03] gi|226292744|gb|EEH48164.1| conserved [Paracoccidioides brasiliensis Pb18]
  misc_feature (1)..(119): NCBI GI: 169767694 Blast Desc: [Aspergillus oryzae RIB40] gi|238484607|ref|XP_002373542.1| NADH-ubiquinone oxidoreductase subunit GRIM-19, [Aspergillus flavus NRRL3357] protein product
MPQDMPPVGGYGPVQYKRNLPAAGLRPGTWLIAMGVVMTYGFYKLGVGIKEQKELAREKMWSRIHLVPVLQAEEDRDLVRRHLADQAREKELLGENIKVYNSDRYVRPTYAVTPSQVTK

SEQ ID NO: 32569 - DNA, 811 bp, Muscodor strobelii
  misc_feature: SGI EST ID NO. CUFF.77001.0
  misc_feature: Variant of the nucleotide sequence at SEQ ID NO 32567
tgcgacctgcaatcttcaattaccaaggtgtcttgaccaattggcaccgccaacgacaagcctgcatgatctacacactaccatcgaacgagcggacatacaattgaccttcgaggcttgcactacaccgattgcccaccatgccgcaggacatgccccccgtcgggggctacggccccgtccagtacaagcgcaacctaccagcagccggcttacgccccggaacctggctgatcgctatgggcgtcgtcatgacctacggtttctacaaactcggagtcggtatcaaggagcagaaggaactcgcccgtgagaagatgtggtcccgcatccacctcgtgcccgtcctgcaagccgaagaagaccgcgatctcgtccgtagacacttggctgatcaggctcgcgagaaggagttgctgggtgagaatattaaggtctataactctgatagatacgtgagaccgacgtacgctgtcacgccttcgcaagtcacgaaataaatcaacaaggacgcggtggtttcgatgaagttgattgggcttcccgagcggaatatcaaagtctttgcgataggggaggaaggataccagacgaggagcgcatgagggtgacaaggccgtgagggcattgtacatatactagaatacctagacacctgcgaaaaggacaattttctttgacacataaaattagggatgccgttttgcggaataggtcatgcactcactcaacccgcgtgccatttcactcgaggaagtggcattggtctttctcattccatgtactaattgcttatctagactcatgttcc

SEQ ID NO: 32570 - DNA, 2475 bp, Muscodor strobelii
  misc_feature: SGI cDNA ID NO. 571227
  misc_feature: Reduced expression when VOC is produced
  misc_feature: Encodes the peptide sequence at SEQ ID NO 32571
atggcaaagaccctcaagctcgggcagcgcctccgctaccccataactatttccaaagtctttaagaaggctggcgacagcgtcgtcaagcagcaggccatcctgcagtacaccttcaaattcgagcgccaggtcggagatccaaccctcaacgaggaacgcaccatcgtcgagaatggcattgccgactgggactgccccaccgaaggaaagatcaaacaatggcgcatcagagaaggagatatcatcaatgcagaccaagagtttgtcgtcgtcgaagagacctgcagccacgaggtccaatacgctggcctgtgcgcaatctgcggcaaggacatgaaagagcagaactgggccaccgagtccctcgataccgaacgcgccaccgtctcgatggtccatgataacgtggccctcaccgtcagccacagccaggctgagcgtgccgaatcgcagctccagcgacgattgctcaaagaacggaaactcagtcttgtggttgatcttgaccagaccatcattcatgcttgcatagaacccaccgtcggagagtggcagcaggatcccacaaaccccaattacgagtccgtcaaggatgtccgcagcttccagcttgatgatgggcctcgcgggttggctagtggttgttggtactatatcaagatgcgccccggcttagccgagttccttgacaacattgccgagcttttcgagctccatgtctacactatgggtactcgggcatatgctctgaacattgccaagatcgtagatcctacccagaagctgtttggcaacagagtcatcagccgcgatgagaacggcagcatgactgccaagagcctccaacgtcttttccccgtcagcacgaacatggttgttgtcatcgatgatcgggcagatgtgtggccgcggaaccgatccaatctcatcaaagtcacaccatacgatttctttaagggaattggcgatatcaactcaagcttcctgcccaagcgggatgacatcatcgctgccgccccagctccagatccgaaaccacatactactcaacccaatggcaacgcgccaagtaaaaatcctagcgaggaaaacacagacgagaatgccttattacaattgcaagctgaggaacaagaacgcacgttggagaagcagctgaaagaccggcccttgctgcatctgcaagaagagctcgacagagaagacgaggaggccgagaagctgcaagccgaaaagcaagaagctgaaaagcagtctaaccaagccaatgacaatcccgaagctgagcccgccatacattcagatacaccgtctcaccagcgacacaacattctccgcgacgatgaccaagagcttgtccacctcgagcaacatcttaccgctttacatcattcattctacgaacaatacgacgctcgtactgctaacggaaatcaagaagatcttgcacctggcatcgtacccgatattggctcgacgctcgactctctgaagtctcgagtgcttaaggggacgaaaatcttactatcaggcctcgtcccgttgggtgtcgacgtgcgcaagtctgagatagggatgcaagtagcaagcttcggcgcggagataagaacccgtgtcagcaaggacgtgacgcatcttgtcactcacagtatccgtccaaggactcaaaaggtccgccaggcagcacgtataccctcaatcatgattgtgaatcagaattggttagcagattcgctggcgcagtggaggatgctagatgctacgccgtatctggttgagattcacccagacgaccgcgcatcacaagattcgcaaggatcacaagactctccgaagctactgaagcccacacttcccacactcgcggttgatgcgacgaaagggagttcacagcgtccggtgggatctccagacgatttcatggccgatgatgcggacgagtcggacgaggacgaagacgaagaggatgaagaggatgaggatgccgatctatatgacgagatgccagatgagattcctgacggagagcgcagcccaatagagaatctgaatgctatgggctgggacgacgttgacgaggaactcaaagagttcatgggatctgacgcggaatccgacatggacagcgtcatgggagcagacacagacacggaaaccgacgaacccaagagcatgaagcgcaagctcggagacctaggagaggcgtctgagctcgacggggccggcagtgtcttgtctaagaaacagcgtatggcaagagctagaaccactgcactgcgcaacgttagaaacattggtgatgaagatggtgaaggcagcggattaccaacaccgatgggaacaggcgacgaggaagatgggagagcggaagctaaggcaggcgcagatcatgttgacgaggaagacgaggaggaagacttcgatcttgaggctgaactagaagccgagttggaggccgatggacaaggctaa

SEQ ID NO: 32571 - protein, 824 aa, Muscodor strobelii
  misc_feature: SGI Peptide ID NO. 571227
  misc_feature (154)..(395): Pfam Id: PF03031 Pfam Desc: NLI interacting factor-like phosphatase
  misc_feature (154)..(316): Pfam Id: PF03031 Pfam Desc: NLI interacting factor-like phosphatase
  misc_feature (1)..(700): NCBI GI: 164429292 Blast Desc: NCU11408 [Neurospora crassa OR74A] gi|157073422|gb|EAA29210.2| conserved [Neurospora crassa OR74A]
  misc_feature (3)..(785): NCBI GI: 46126951 Blast Desc: FG07853.1 [Gibberella zeae PH-1]
  misc_feature (1)..(820): NCBI GI: 156050785 Blast Desc: SS1G_07980 [Sclerotinia sclerotiorum 1980] gi|154692380|gb|EDN92118.1| SS1G_07980 [Sclerotinia sclerotiorum 1980]
  misc_feature (1)..(519): NCBI GI: 261361273 Blast Desc: RNA polymerase II subunit A C-terminal domain phosphatase [Verticillium albo-atrum VaMs.102]
  misc_feature (4)..(821): NCBI GI: 39942810 Blast Desc: MGG_03485 [Magnaporthe grisea 70-15] gi|145009962|gb|EDJ94618.1| MGG_03485 [Magnaporthe grisea 70-15]
  misc_feature (5)..(763): NCBI GI: 115396432 Blast Desc: conserved [Aspergillus terreus NIH2624] gi|114193424|gb|EAU35124.1| conserved [Aspergillus terreus NIH2624]
  misc_feature (5)..(785): NCBI GI: 240108250 Blast Desc: NLI interacting factor-like phosphatase family protein [Coccidioides posadasii C735 delta SOWgp]
  misc_feature (5)..(770): NCBI GI: 169770749 Blast Desc: [Aspergillus oryzae RIB40] gi|83767703|dbj|BAE57842.1| protein product [Aspergillus oryzae]
  misc_feature (5)..(763): NCBI GI: 121705758 Blast Desc: RNA Polymerase II CTD phosphatase Fcp1, [Aspergillus clavatus NRRL 1] gi|119399288|gb|EAW09716.1| RNA Polymerase II CTD phosphatase Fcp1, [Aspergillus clavatus NRRL 1]
  misc_feature (5)..(610): NCBI GI: 70999518 Blast Desc: RNA Polymerase II CTD phosphatase Fcp1 [Aspergillus fumigatus Af293] gi|66852115|gb|EAL92440.1| RNA Polymerase II CTD phosphatase Fcp1, [Aspergillus fumigatus Af293]
  misc_feature (5)..(593): SWISSPROT Homolog: EC 3.1.3.16 Phosphoprotein phosphatase
  misc_feature: Useful for introducing or modulating the production of volatile compounds
MAKTLKLGQRLRYPITISKVFKKAGDSVVKQQAILQYTFKFERQVGDPTLNEERTIVENGIADWDCPTEGKIKQWRIREGDIINADQEFVVVEETCSHEVQYAGLCAICGKDMKEQNWATESLDTERATVSMVHDNVALTVSHSQAERAESQLQRRLLKERKLSLVVDLDQTIIHACIEPTVGEWQQDPTNPNYESVKDVRSFQLDDGPRGLASGCWYYIKMRPGLAEFLDNIAELFELHVYTMGTRAYALNIAKIVDPTQKLFGNRVISRDENGSMTAKSLQRLFPVSTNMVVVIDDRADVWPRNRSNLIKVTPYDFFKGIGDINSSFLPKRDDIIAAAPAPDPKPHTTQPNGNAPSKNPSEENTDENALLQLQAEEQERTLEKQLKDRPLLHLQEELDREDEEAEKLQAEKQEAEKQSNQANDNPEAEPAIHSDTPSHQRHNILRDDDQELVHLEQHLTALHHSFYEQYDARTANGNQEDLAPGIVPDIGSTLDSLKSRVLKGTKILLSGLVPLGVDVRKSEIGMQVASFGAEIRTRVSKDVTHLVTHSIRPRTQKVRQAARIPSIMIVNQNWLADSLAQWRMLDATPYLVEIHPDDRASQDSQGSQDSPKLLKPTLPTLAVDATKGSSQRPVGSPDDFMADDADESDEDEDEEDEEDEDADLYDEMPDEIPDGERSPIENLNAMGWDDVDEELKEFMGSDAESDMDSVMGADTDTETDEPKSMKRKLGDLGEASELDGAGSVLSKKQRMARARTTALRNVRNIGDEDGEGSGLPTPMGTGDEEDGRAEAKAGADHVDEEDEEEDFDLEAELEAELEADGQG

SEQ ID NO: 32572 - DNA, 3800 bp, Muscodor strobelii
  misc_feature: SGI EST ID NO. CUFF.77234.1
  misc_feature: Variant of the nucleotide sequence at SEQ ID NO 32570
taaaaggccccgtctcccccaaaagccgtaggctgggtttggggctctcgcttgcccacctgcagcgcttaacctggaatgatgggcaattgattgacaaccagacagacaagagaaagatgaaagaacaagaaggctaagcagtgccctgtttggcattacctgcactattctcatctgcctccatctggtctccaacgacactctagctcagatttccaatcatccgatcattcaattctccacttccattgttctttgtaaaaccttcacgccgattcaattaccagcagtggtccaattcttgcgggctgtttgttggtggacacactaccccgaatagttctgagctttggggtccgggcgtgttacgccacccacatacacccgactctcgcctacccaccaacataccacccggcttcgtcgttcgcatccggcaaacgtcccactagcagtcattcttgactcaataaggacgaggcacattgtgacttacctattcatcgctgctccctgtcataaatcacccattgtgctgccttgcattgtccgtaccattggcatcttaccatatattgtgaacatcaggcagctgttgagtgctgcatgaccgtttgtgaagttacctattaaggtattgccaactttaggtacataagttcaactctgcctacaacaacctactaactaccgctctgctactgcagcatccacacaagcactgtgacttgcctccttcctacatatttcagaccatcgcggtcgattgcatctgtatagcttccttctcctcctgcctccaacacacgagaaaccatcgacgcagacatcgccatcgagagcaaacatacctttctcctacaagcccatccgttaccggccactacaaccaacacagaagcctaccttcattgttgcactcccatttgcatccaatctcaccaagccacaacccattcaccgctttcgacctcccccttgaccccggcctctgccccgatttgcgacaagacgcgcctcgtgtgccatgagcaccattgcgcaagcccatcgccacctaccatggcaaagaccctcaagctcgggcagcgcctccgctaccccataactatttccaaagtctttaagaaggctggcgacagcgtcgtcaagcagcaggccatcctgcagtacaccttcaaattcgagcgccaggtcggagatccaaccctcaacgaggaacgcaccatcgtcgagaatggcattgccgactgggactgccccaccgaaggaaagatcaaacaatggcgcatcagagaaggagatatcatcaatgcagaccaagagtttgtcgtcgtcgaagagacctgcagccacgaggtccaatacgctggcctgtgcgcaatctgcggcaaggacatgaaagagcagaactgggccaccgagtccctcgataccgaacgcgccaccgtctcgatggtccatgataacgtggccctcaccgtcagccacagccaggctgagcgtgccgaatcgcagctccagcgacgattgctcaaagaacggaaactcagtcttgtggttgatcttgaccagaccatcattcatgcttgcatagaacccaccgtcggagagtggcagcaggatcccacaaaccccaattacgagtccgtcaaggatgtccgcagcttccagcttgatgatgggcctcgcgggttggctagtggttgttggtactatatcaagatgcgccccggcttagccgagttccttgacaacattgccgagcttttcgagctccatgtctacactatgggtactcgggcatatgctctgaacattgccaagatcgtagatcctacccagaagctgtttggcaacagagtcatcagccgcgatgagaacggcagcatgactgccaagagcctccaacgtcttttccccgtcagcacgaacatggttgttgtcatcgatgatcgggcagatgtgtggccgcggaaccgatccaatctcatcaaagtcacaccatacgatttctttaagggaattggcgatatcaactcaagcttcctgcccaagcgggatgacatcatcgctgccgccccagctccagatccgaaaccacatactactcaacccaatggcaacgcgccaagtaaaaatcctagcgaggaaaacacagacgagaatgccttattacaattgcaagctgaggaacaagaacgcacgttggagaagcagctgaaagaccggcccttgctgcatctgcaagaagagctcgacagagaagacgaggaggccgagaagctgcaagccgaaaagcaagaagctgaaaagcagtctaaccaagccaatgacaatcccgaagctgagcccgccatacattcagatacaccgtctcaccagcgacacaacattctccgcgacgatgaccaagagcttgtccacctcgagcaacatcttaccgctttacatcattcattctacgaacaatacgacgctcgtactgctaacggaaatcaagaagatcttgcacctggcatcgtacccgatattggctcgacgctcgactctctgaagtctcgagtgcttaaggggacgaaaatcttactatcaggcctcgtcccgttgggtgtcgacgtgcgcaagtctgagatagggatgcaagtagcaagcttcggcgcggagataagaacccgtgtcagcaaggacgtgacgcatcttgtcactcacagtatccgtccaaggactcaaaaggtccgccaggcagcacgtataccctcaatcatgattgtgaatcagaattggttagcagattcgctggcgcagtggaggatgctagatgctacgccgtatctggttgagattcacccagacgaccgcgcatcacaagattcgcaaggatcacaagactctccgaagctactgaagcccacacttcccacactcgcggttgatgcgacgaaagggagttcacagcgtccggtgggatctccagacgatttcatggccgatgatgcggacgagtcggacgaggacgaagacgaagaggatgaagaggatgaggatgccgatctatatgacgagatgccagatgagattcctgacggagagcgcagcccaatagagaatctgaatgctatgggctgggacgacgttgacgaggaactcaaagagttcatgggatctgacgcggaatccgacatggacagcgtcatgggagcagacacagacacggaaaccgacgaacccaagagcatgaagcgcaagctcggagacctaggagaggcgtctgagctcgacggggccggcagtgtcttgtctaagaaacagcgtatggcaagagctagaaccactgcactgcgcaacgttagaaacattggtgatgaagatggtgaaggcagcggattaccaacaccgatgggaacaggcgacgaggaagatgggagagcggaagctaaggcaggcgcagatcatgttgacgaggaagacgaggaggaagacttcgatcttgaggctgaactagaagccgagttggaggccgatggacaaggctaagggagagtactgagactctccagattgtggcagtgtaaagatatctatgtcacggcggctcacctgttctttcggcatttccggcgttcaacaatcacaaacacatggaagcatgatgggtttatggtctaggattcgggtaccactgcatagcgactgtctggcgtactactgttgtctatggatcaatttcaatgtaattgtgtgtaaatggtcatttgtgttccatctttaactaagcaaaattgtaccgtgaagca

SEQ ID NO: 32573 - DNA, 2595 bp, Muscodor strobelii
  misc_feature: SGI cDNA ID NO. 571228
  misc_feature: Encodes the peptide sequence at SEQ ID NO 32574
atggacaacacaacactcgatgaagcacgtgatttccaccacccttacgcaccatatgcagtccaggaacagtttatgaacacggtgttcaacgtgttggagaaaggagaagggcacgttggtattcttgaaagcccaactggaactggcaaatcactatcactcatctgcgcagcattaacatggctgcggcatcacaaacggaaggcttattcggcctcgatcgaaaatgctgcggaattctttcaaaatgagccagattgggtcatagagcaacttctcaaaaggaagcgtgctgagctcgttgatcaatgggaggagcgagaggcgaagctcaaagagattcgagcaaaagaaaagattcttgaagaaagaggtgcaaagagaaggaaattgcaagattctaagaaagacaacgatgtcgtgaacgacgaggatgagtggctgttagatgagctggatgaactggacgcgtcaagtaaggaaaaaggtgagatgataaagaaacttgagatgggccccttctatgagcagcatgagagggacagcagcaatgatgaccatgaaatcaagatttactacacttcgagaacccattcccagttgtcacaatttatagaagaactacgtcggccgctcttcccattgtcgatcccagatgatcttctcatgagtaaggcagaccgcgactcagaagcagtcaagcacgtacccttagcatctcgccaacgactatgcatcaatcccaaagtgtccaggctgggatcagtatcagccatcaacgaccgttgcactgagctgcagcagtccaagtccaaagagaaatgtgaatacataccaagtgcggaaaagcttgcgcaaactcatcaatttcgcgacaatgctctggctactctaccagacatcgaagatctctataacacagggaagaaacttcaggtatgtccgtactacgcttcaaggacagcaattccaggagcggagatcatcacacttccgtatcccctattactgcagaaaaccgccagggatgcgctgggtatcaagcttgagggaaacattgtgattgttgacgaggcacacaatattatggacgcaattgcgaatgtctatgcctccgagatctctttgaatggtctttctcggacaaggcagatgctcggtatatatgtgaaacgatttggcaagaagcttaaaggggataatcgagtcatgatcggccagattgcaagggttgtagatggcttgcgtgagtggatggaaaatgcgactaatgtcaagggtgaacaaggcatcgttgaccccgttgctctgatgaagtgcaaaggaatcgaccaaatcaacatgttcaagctcatcgaatatactcaaacatcaaagctgccttacaagattgagggttatgcggcatatgctgaggatcaggacggccgccaatcggttaaggcagcatcctcaacaccacttttacacggattgatgtcctttcttgtctcattaaccgatctgagctctgaagggcgtatattctaccacaaaataagtgacaaagagcagcacgacatcaagctgtcgtatctcctactctctcctagccacgcattttcaccgatcgcacatgatgctcgagcagtgattcttgctggtggtaccatgtcgcccttcgaggattacactgctcacttgtttccaaacctcgcgcgggagaaaataactactctgagctgtggccacgtaattccagcctcgaacttgtgtgtttggacactatcatcacctcaacccaagggggcgccaaaccgggtagatttcgaatttagttttcagaagcgaggtgacaagtccatcatacgagaccttggaattgccattctgaacgcgtgtaccgctgtcccagatggtgtcgtcgtctttttccccagttacggctatctagaggaagtggcgcgcgtctggcaagagggtagcagctctcaatcatcgaccatctggaccaaactgctcagcaaaaaggccattttcaaagagacaaagggctgctcgagtgatgaagtcctggaacagtacagccaagccatattggcggacacaacagttttgggagcagcaaagcccccagaggccgtgaaatctcgtggtgcattacttctgagcgtcgttggcggcaaaatgagcgaaggcatcaatttctcagaccgcctgggtcggtgtgtcatcatcgtgggactcccgtatcctaacattcactcgcctgattggaaagcgagaatcgagtacatcgaatcaaccacggcccagcgattgactcatgtgcctcgagaacaagccctagtgacagcaaaacaggcagcaagggacttctacgagaacgcgtgcatgagagccgtaaaccaaagcatcgggcgggctatcaggcatcgtaatgactatgctgcgatcattttactcgatagacggtttagtacggataggatcaagggaaagctgcctggatggatacagaatggcctggttgagggcagtgagaatggaggactgggtcagatgatggggaaactaaatggctttttcagaggcaagcaacagactacgtag

SEQ ID NO: 32574 - protein, 864 aa, Muscodor strobelii
  misc_feature: SGI Peptide ID NO. 571228
  misc_feature (194)..(380): Pfam Id: PF06733 Pfam Desc: DEAD_2
  misc_feature (1)..(861): NCBI GI: 46126959 Blast Desc: FG07857.1 [Gibberella zeae PH-1]
  misc_feature (8)..(861): NCBI GI: 256724544 Blast Desc: [Nectria haematococca mpVI 77-13-4]
  misc_feature (33)..(858): NCBI GI: 164429296 Blast Desc: NCU11409 [Neurospora crassa OR74A] gi|206557740|sp|A7UXD4.1|CHL1_NEUCR RecName: Full=ATP-dependent RNA helicase chl-1; AltName: Full=Chromosome loss protein 1
  misc_feature (202)..(839): NCBI GI: 116179420 Blast Desc: CHGG_00338 [Chaetomium globosum CBS 148.51] gi|88184635|gb|EAQ92103.1| CHGG_00338 [Chaetomium globosum CBS 148.51]
  misc_feature (9)..(861): NCBI GI: 242814468 Blast Desc: DNA helicase, [Talaromyces stipitatus ATCC 10500] gi|218714714|gb|EED14137.1| DNA helicase, [Talaromyces stipitatus ATCC 10500]
  misc_feature (8)..(860): NCBI GI: 119493390 Blast Desc: DEAD_2 domain protein [Neosartorya fischeri NRRL 181] gi|206558089|sp|A1D8E4.1|CHL1_NEOFI RecName: Full=ATP-dependent RNA helicase chl1; AltName: Full=Chromosome loss protein 1 DEAD_2
  misc_feature (11)..(860): NCBI GI: 145245587 Blast Desc: An11g11040 [Aspergillus niger] gi|206558115|sp|A2QY22.1|CHL1_ASPNC RecName: Full=ATP-dependent RNA helicase chl1; AltName: Full=Chromosome loss protein 1 niger]
  misc_feature (10)..(863): NCBI GI: 156050655 Blast Desc: SS1G_07915 [Sclerotinia sclerotiorum 1980] gi|206557752|sp|A7ERG1.1|CHL1_SCLS1 RecName: Full=ATP-dependent RNA helicase CHL1; AltName: Full=Chromosome loss protein 1 1980]
  misc_feature (6)..(861): NCBI GI: 212545032 Blast Desc: DNA helicase, [Penicillium marneffei ATCC 18224] gi|210065639|gb|EEA19733.1| DNA helicase, [Penicillium marneffei ATCC 18224]
  misc_feature (7)..(860): NCBI GI: 169625336 Blast Desc: SNOG_15940 [Phaeosphaeria nodorum SN15] gi|160705637|gb|EAT76778.2| SNOG_15940 [Phaeosphaeria nodorum SN15]
MDNTTLDEARDFHHPYAPYAVQEQFMNTVFNVLEKGEGHVGILESPTGTGKSLSLICAALTWLRHHKRKAYSASIENAAEFFQNEPDWVIEQLLKRKRAELVDQWEEREAKLKEIRAKEKILEERGAKRRKLQDSKKDNDVVNDEDEWLLDELDELDASSKEKGEMIKKLEMGPFYEQHERDSSNDDHEIKIYYTSRTHSQLSQFIEELRRPLFPLSIPDDLLMSKADRDSEAVKHVPLASRQRLCINPKVSRLGSVSAINDRCTELQQSKSKEKCEYIPSAEKLAQTHQFRDNALATLPDIEDLYNTGKKLQVCPYYASRTAIPGAEIITLPYPLLLQKTARDALGIKLEGNIVIVDEAHNIMDAIANVYASEISLNGLSRTRQMLGIYVKRFGKKLKGDNRVMIGQIARVVDGLREWMENATNVKGEQGIVDPVALMKCKGIDQINMFKLIEYTQTSKLPYKIEGYAAYAEDQDGRQSVKAASSTPLLHGLMSFLVSLTDLSSEGRIFYHKISDKEQHDIKLSYLLLSPSHAFSPIAHDARAVILAGGTMSPFEDYTAHLFPNLAREKITTLSCGHVIPASNLCVWTLSSPQPKGAPNRVDFEFSFQKRGDKSIIRDLGIAILNACTAVPDGVVVFFPSYGYLEEVARVWQEGSSSQSSTIWTKLLSKKAIFKETKGCSSDEVLEQYSQAILADTTVLGAAKPPEAVKSRGALLLSVVGGKMSEGINFSDRLGRCVIIVGLPYPNIHSPDWKARIEYIESTTAQRLTHVPREQALVTAKQAARDFYENACMRAVNQSIGRAIRHRNDYAAIILLDRRFSTDRIKGKLPGWIQNGLVEGSENGGLGQMMGKLNGFFRGKQQTT

SEQ ID NO: 32575 - DNA, 3724 bp, Muscodor strobelii
  misc_feature: SGI EST ID NO. CUFF.77006.0
  misc_feature: Variant of the nucleotide sequence at SEQ ID NO 32573
atttaatgaacaagagaattggatcgaaaatctggaattagatagatttgaattctctcggtttctgacccttttgcaattgcagggctgaatagcaagccgtgggacgtccatggaacctaaatgattgccagagaggttccctctttgcaaagtaaatctcgagtagatccgccgtcctcacatctgtacgcccaatgtgcctatatgatatgagtcatgttggatgtcatctagatcataatgaatataatggatatgagagagatttcagcaggtaacatgtgagaaattatcagtgttccctactgtacatagtgccaggatcacacctgacagcagccgggcccacagtttcaaggcgagcattacgagtacgagcgttcacaagagcccagggccagcccagatcaacgcgatcagttcctctccttctgtcatactaaatcaagtgctcagatttgcttgtccattataaaatgtatcccttaattcagatagatagtatgattctgtattcctggattgcgtattcatattgcagcgagaattcgtgtgtcatgcctgcacaatgcatgggatacggaagtctagtagtactaggccacaaaagtgcttgtctcttaggacactgggttgccaggtaggctttgcaaagctcaacatcacatccagatgttgttgatgtgattattatcactgtgtttgcctcattatcaatccgtgcaaaagtcgcacctcttcaaaatacgcctgattgggaaatagcgtttaatgaactgtttattaaaatgttatgcggcactttttggttgatccatggctgtgcctgacgtatgactgacaaaaactcgtgtcttttggcgcagtgaaatccgcgtgagggtgcagagcgactaaaatggacaacacaacactcgatgaagcacgtgatttccaccacccttacgcaccatatgcagtccaggaacagtttatgaacacggtgttcaacgtgttggagaaaggagaagggcacgttggtattcttgaaagcccaactggaactggcaaatcactatcactcatctgcgcagcattaacatggctgcggcatcacaaacggaaggcttattcggcctcgatcgaaaatgctgcggaattctttcaaaatgagccagattgggtcatagagcaacttctcaaaaggaagcgtgctgagctcgttgatcaatgggaggagcgagaggcgaagctcaaagagattcgagcaaaagaaaagattcttgaagaaagaggtgcaaagagaaggaaattgcaagattctaagaaagacaacgatgtcgtgaacgacgaggatgagtggctgttagatgagctggatgaactggacgcgtcaagtaaggaaaaaggtgagatgataaagaaacttgagatgggccccttctatgagcagcatgagagggacagcagcaatgatgaccatgaaatcaagatttactacacttcgagaacccattcccagttgtcacaatttatagaagaactacgtcggccgctcttcccattgtcgatcccagatgatcttctcatgagtaaggcagaccgcgactcagaagcagtcaagcacgtacccttagcatctcgccaacgactatgcatcaatcccaaagtgtccaggctgggatcagtatcagccatcaacgaccgttgcactgagctgcagcagtccaagtccaaagagaaatgtgaatacataccaagtgcggaaaagcttgcgcaaactcatcaatttcgcgacaatgctctggctactctaccagacatcgaagatctctataacacagggaagaaacttcaggtatgtccgtactacgcttcaaggacagcaattccaggagcggagatcatcacacttccgtatcccctattactgcagaaaaccgccagggatgcgctgggtatcaagcttgagggaaacattgtgattgttgacgaggcacacaatattatggacgcaattgcgaatgtctatgcctccgagatctctttgaatggtctttctcggacaaggcagatgctcggtatatatgtgaaacgatttggcaagaagcttaaaggggataatcgagtcatgatcggccagattgcaagggttgtagatggcttgcgtgagtggatggaaaatgcgactaatgtcaagggtgaacaaggcatcgttgaccccgttgctctgatgaagtgcaaaggaatcgaccaaatcaacatgttcaagctcatcgaatatactcaaacatcaaagctgccttacaagattgagggttatgcggcatatgctgaggatcaggacggccgccaatcggttaaggcagcatcctcaacaccacttttacacggattgatgtcctttcttgtctcattaaccgatctgagctctgaagggcgtatattctaccacaaaataagtgacaaagagcagcacgacatcaagctgtcgtatctcctactctctcctagccacgcattttcaccgatcgcacatgatgctcgagcagtgattcttgctggtggtaccatgtcgcccttcgaggattacactgctcacttgtttccaaacctcgcgcgggagaaaataactactctgagctgtggccacgtaattccagcctcgaacttgtgtgtttggacactatcatcacctcaacccaagggggcgccaaaccgggtagatttcgaatttagttttcagaagcgaggtgacaagtccatcatacgagaccttggaattgccattctgaacgcgtgtaccgctgtcccagatggtgtcgtcgtctttttccccagttacggctatctagaggaagtggcgcgcgtctggcaagagggtagcagctctcaatcatcgaccatctggaccaaactgctcagcaaaaaggccattttcaaagagacaaagggctgctcgagtgatgaagtcctggaacagtacagccaagccatattggcggacacaacagttttgggagcagcaaagcccccagaggccgtgaaatctcgtggtgcattacttctgagcgtcgttggcggcaaaatgagcgaaggcatcaatttctcagaccgcctgggtcggtgtgtcatcatcgtgggactcccgtatcctaacattcactcgcctgattggaaagcgagaatcgagtacatcgaatcaaccacggcccagcgattgactcatgtgcctcgagaacaagccctagtgacagcaaaacaggcagcaagggacttctacgagaacgcgtgcatgagagccgtaaaccaaagcatcgggcgggctatcaggcatcgtaatgactatgctgcgatcattttactcgatagacggtttagtacggataggatcaagggaaagctgcctggatggatacagaatggcctggttgagggcagtgagaatggaggactgggtcagatgatggggaaactaaatggctttttcagaggcaagcaacagactacgtagcttgaagccagtatcaagaaaacgcaattcattgcgtctactgatctactttccatctctcttggagcatgagtcaaggagactttgggtgccagttctcctagagttgagtggcctgcatgacattgcttagaatagcgtgattcgattggccagctgtgtggcgtgtttgaagcgagagttcagatctcagccacattccaagcaaactgagaggaagattcaagg

SEQ ID NO: 32576 - DNA, 4272 bp, Muscodor strobelii
  misc_feature: SGI cDNA ID NO. 571229
  misc_feature: Encodes the peptide sequence at SEQ ID NO 32577
atggctacaaaaccagaagaggatgctacacggcggcgtgtcgctaagagaatagtcaagtctcgcggagaggagcatcatgcaaccctagattttcccgatcgcttcaaacacctgcgggacgatgacgacgaagaagttcgacctcccacccatggcccgcatatgttcatgaacgcgaaccagtccgtgttcggtctgattgcagctgcgagctcgaacgtcgacttccatgaccgtttcgagggccaatccagcgacgaggacgaaggcggccgtatcagcaagaagggcaaagagcgcgagcagatagcgaagacgactattctgcagagagactcatctagcaaagagaaggaacagaaaggcaagaaacatagacagaaactgtcagatcagcttctgcgatcgctgcctcagttgcctcgcatcactagacgctcttcaagcaaacactcctctggttcaagtcgcactcagactcccacagtgtcggagcccaaggattcacaaccagtcatccatgaggaaataacaagctcgccctcagctggacttcagacactcttggatgcgcctgaaagtgacgacgaagagaggccagctacggttatgggccgcatgttggaagccagggcagagatgtcctctcggcccagtttcgatattgagggtcagtcagaggatcaaaatgccgaaggcgatgatcttgggcccactgtccttgctcgccgattaaaggagattttcaacttcgaccatgcagaggaagtgatagaggaatatccttgttggctactgcaaagtgtcctccttcaaggctatctttacatcaccgcaaagcatatctgcttttacgcatacttgccgaagaaagctcaagaagtagcaaagtcagggtatctcaacaagactggcaagcgaaacccacagtatactcgattctggtttcgattgaagggcgatgttctagcgtatttccatgacacttcaaacctatatttcccacatggacagattgatctgcgctatgcgatttcggccagcgtcacagacaaagaaaaggacggcactcacttcgtagtagtcacccacaacaggacttaccattttcgagccgacagcgcacctagtgccaaagaatgggtcaagagcctgcagcgtgtcatatttcgatcacataatgacggtgatagtgtcaaaattgcgcttccgattgattgtgtcatggacattgaagacagtcagatgatcgaatttgccgatacgtgtaaaatacgagtacttgatgaggaatcatactcgattgacgagtattttttttcgttcttcagtttcggcaaggaggccatcaatgttatcaagattctcgtggaagatgcttctcagcataaacagaagtcaccgaccctcagtggcgatccagatacgttaggggcaagagaaagctctgcacgcagcatgcacactcatgagaaggtgaaaacaacgttgattgcagctacgcctcatgatgctcatggcccgagtccgcgggccagtggtgatgagagccttaatatctcgcgacacacaggccgccgtagtttcgacacacgagatggttcaccacggcgaagtttgagcacaaccaggtcgcgcagcaagactcgtcgtcaagacagtcctgcacatcacgagaaacgggaatccacagattcatttgttcagtctttagaggaccctagctcgtcaggtttaatgtcatcaatggaggacccatctggcagccaaatcttgagaggtagcgaagtttttcatagacctatggttcgccaatctcgatctgggacccggggggctgacggtgtaaagtcgccgggcaagtctctgcgcgaggagacgagtggcatgtctcgacgtacacatcacgccgaatcaactgggcatgtacttgatactggcgttggccaacgacctgatcgggagccaacaccgacattgcagaacctcgctaagatgagtgcctatcctctacagagagctggtctattcgcgaagtatctggatcagcagggccgtcggatgagcaatttattggcaacggaatcaatgggatatgctgaaaaggtagcggggatgtggaaaggcggtcagaaacactaccaggagtctccaggcttgaaggttgatgacgatctgagtggcatggaagacgacatggaaggacaaaacgccacagagatggaacgtttccgcacccatttcgccctcccagaaacagaaaccctccaagcgaccttttttgggttcctcaaccgtgttcttccgctttacggcaaaatttacatcagcgaccggaacttttgtttccggagccttctacctggcactcgcacaaagctcatactcccgctgaaagatatcgagactgccgataaagtgaacggctttcgcatacgttattctggtttggtcgtggtaatccgtggtcatgaagaactgttcttcgagttcagccaagtcaaggtcagggatgactgcgctgtaactctactccacagcatcgaaaccatgcgctatctacgagacaccgggatgttggaagaatcagagcacaacgaagaggatgaagcgcttagggagaacaatgcacttcgcgaggcacgcctccatgaagccggcgaacatgaactcgagatgcctcgagactgcttgaacatggctgattctgcccctaccattttatttgatgaccctaaagcctcatttcttaacttcaaacctgccaagtccatgaaaatcacctgcttaaccatcggctcccggggcgatgtgcagccttacattgcgctatgtaaaggtttactggctgacggtcatcaaccccggatagcgacacatggtgaatttaagggatgggttgaaagtcacggcattggattcgcgccagttgctggtgacccaggcgagctcatgcggctctgcattgaaaatggcacctttacgtgggctttcttgaaagaggcaaattcaacattccggatatggctggatgagttactggctagcgcctacaatgcgtgccagggttcagacttgctcattgaaagtccaagtgccatggctggcatccatatcgccgaggcgttgtccattccctattttagggcctttaccatgccgtggacccgtactcgcgcgtatcctcatgcctttattgtgcctgatcacaagatgggaggagcttataattacatgacttatatgatgtttgaaaacgtcttctggaaagcaactgcttaccaaatcaaccgttggaggaatagagtactgcgcctacccaataccagccttgagaaaatgaaggtcaacaaggtaccttttctctacaatttctcacccgctgttgtggcccctcctttggattttagcgattggattcgagtgacaggctattggttcttggatgaagggcatgactggacccccccggatgacctcagagatttcattaagaaggctcgtgctgacaagaaaaaaatcgtttatgtcggatttggctccatcatcgtccccgatcccgccaagatgacccaagaggtcatcgacgctgtgctcaaagctgatgtgcgatgcattctatccaaaggctggtcgactcgcaacaagaaaggccctggcggtggaacggaacaatctctcccaccagagatcttacgtatcaagagtgcgcctcacgattggttattcagtcaaatagatgcggccgtccaccatggaggatctggtaccactggtgcaagtctacgtgcaggcattcccaccatcattcgaccattctttggagatcagttcttctttgggtctcgcgtggaagatctaggtgttggcatttatctgaagagatggggcgccgccacctttgcgaaagctttatgggaggcaacgaacagtgataggatgatcgtcagagctagggttcttggcgagacgatacgcaaggaaaatggcgtcaacacggcaatacagtccatttatcgagacctcgaatatgcgacaaccctgattcaatcaaagacaggcaagtacgcggctacagacaatgacaaggatgggggattaagcggagacgaatcagaagaggaagagagctggacttttgttgacaatcacaatgattcggagttgtcaagtaggaaagatgcacctacagattctgaaacggatcttgcgacggagcttgaggaaggtagtaggatgtccagaacaagaagcaagcctacctcctag

SEQ ID NO: 32577 - protein, 1423 aa, Muscodor strobelii
  misc_feature: SGI Peptide ID NO. 571229
  misc_feature (296)..(391): Pfam Id: PF00169 Pfam Desc: PH domain
  misc_feature (928)..(1063): Pfam Id: PF03033 Pfam Desc: Glycosyltransferase family 28 N-terminal domain
  misc_feature (743)..(809): Pfam Id: PF02893 Pfam Desc: GRAM domain
  misc_feature (244)..(291): Pfam Id: PF02893 Pfam Desc: GRAM domain
  misc_feature (7)..(1394): NCBI GI: 238550094 Blast Desc: autophagy-related protein 26 [Colletotrichum lagenarium]
  misc_feature (7)..(1382): NCBI GI: 256724549 Blast Desc: NECHADRAFT_54810 [Nectria haematococca mpVI 77-13-4]
  misc_feature (50)..(1382): NCBI GI: 46126945 Blast Desc: FG07850.1 [Gibberella zeae PH-1]
  misc_feature (5)..(1356): NCBI GI: 261361269 Blast Desc: conserved [Verticillium albo-atrum VaMs.102]
  misc_feature (13)..(1404): NCBI GI: 73619414 Blast Desc: conserved [Verticillium albo-atrum VaMs.102]
  misc_feature (7)..(1392): NCBI GI: 171680436 Blast Desc: protein product [Podospora anserina] gi|170939845|emb|CAP65070.1| protein product [Podospora anserina]
  misc_feature (7)..(1393): NCBI GI: 156050783 Blast Desc: SS1G_07979 [Sclerotinia sclerotiorum 1980] gi|166990605|sp|A7ERM5.1|ATG26_SCLS1 RecName: Full=Sterol 3-beta-glucosyltransferase; AltName: Full=Autophagy-related 26
  misc_feature (32)..(1360): NCBI GI: 261203999 Blast Desc: UDP-glucose:sterol glycosyltransferase [Ajellomyces dermatitidis SLH14081] gi|239586998|gb|EEQ69641.1| UDP-glucose:sterol glycosyltransferase [Ajellomyces dermatitidis
  misc_feature (4)..(1407): NCBI GI: 166990672 Blast Desc: UDP-glucose:sterol glycosyltransferase [Ajellomyces dermatitidis SLH14081] gi|239586998|gb|EEQ69641.1| UDP-glucose:sterol glycosyltransferase [Ajellomyces dermatitidis
  misc_feature (32)..(1407): NCBI GI: 169783326 Blast Desc: [Aspergillus oryzae RIB40] gi|83774869|dbj|BAE64992.1| protein product [Aspergillus oryzae]
  misc_feature (202)..(1362): SWISSPROT Homolog: EC 2.4.1.173 Sterol 3-beta-glucosyltransferase
MATKPEEDATRRRVAKRIVKSRGEEHHATLDFPDRFKHLRDDDDEEVRPPTHGPHMFMNANQSVFGLIAAASSNVDFHDRFEGQSSDEDEGGRISKKGKEREQIAKTTILQRDSSSKEKEQKGKKHRQKLSDQLLRSLPQLPRITRRSSSKHSSGSSRTQTPTVSEPKDSQPVIHEEITSSPSAGLQTLLDAPESDDEERPATVMGRMLEARAEMSSRPSFDIEGQSEDQNAEGDDLGPTVLARRLKEIFNFDHAEEVIEEYPCWLLQSVLLQGYLYITAKHICFYAYLPKKAQEVAKSGYLNKTGKRNPQYTRFWFRLKGDVLAYFHDTSNLYFPHGQIDLRYAISASVTDKEKDGTHFVVVTHNRTYHFRADSAPSAKEWVKSLQRVIFRSHNDGDSVKIALPIDCVMDIEDSQMIEFADTCKIRVLDEESYSIDEYFFSFFSFGKEAINVIKILVEDASQHKQKSPTLSGDPDTLGARESSARSMHTHEKVKTTLIAATPHDAHGPSPRASGDESLNISRHTGRRSFDTRDGSPRRSLSTTRSRSKTRRQDSPAHHEKRESTDSFVQSLEDPSSSGLMSSMEDPSGSQILRGSEVFHRPMVRQSRSGTRGADGVKSPGKSLREETSGMSRRTHHAESTGHVLDTGVGQRPDREPTPTLQNLAKMSAYPLQRAGLFAKYLDQQGRRMSNLLATESMGYAEKVAGMWKGGQKHYQESPGLKVDDDLSGMEDDMEGQNATEMERFRTHFALPETETLQATFFGFLNRVLPLYGKIYISDRNFCFRSLLPGTRTKLILPLKDIETADKVNGFRIRYSGLVVVIRGHEELFFEFSQVKVRDDCAVTLLHSIETMRYLRDTGMLEESEHNEEDEALRENNALREARLHEAGEHELEMPRDCLNMADSAPTILFDDPKASFLNFKPAKSMKITCLTIGSRGDVQPYIALCKGLLADGHQPRIATHGEFKGWVESHGIGFAPVAGDPGELMRLCIENGTFTWAFLKEANSTFRIWLDELLASAYNACQGSDLLIESPSAMAGIHIAEALSIPYFRAFTMPWTRTRAYPHAFIVPDHKMGGAYNYMTYMMFENVFWKATAYQINRWRNRVLRLPNTSLEKMKVNKVPFLYNFSPAVVAPPLDFSDWIRVTGYWFLDEGHDWTPPDDLRDFIKKARADKKKIVYVGFGSIIVPDPAKMTQEVIDAVLKADVRCILSKGWSTRNKKGPGGGTEQSLPPEILRIKSAPHDWLFSQIDAAVHHGGSGTTGASLRAGIPTIIRPFFGDQFFFGSRVEDLGVGIYLKRWGAATFAKALWEATNSDRMIVRARVLGETIRKENGVNTAIQSIYRDLEYATTLIQSKTGKYAATDNDKDGGLSGDESEEEESWTFVDNHNDSELSSRKDAPTDSETDLATELEEGSRMSRTRSKPTS

SEQ ID NO: 32578 - DNA, 6620 bp, Muscodor strobelii
  misc_feature: SGI EST ID NO. CUFF.77018.0
  misc_feature: Variant of the nucleotide sequence at SEQ ID NO 32576
ctctgctgtacatgtgacgtgggccgatggcaagtgcagctgatggacggtggattccgcgcatgacttaggagaaacgggactgcagctcgtgcagccaaaagtgctcaacaatagcttatcgattagttagccgccgatctgggtgcagatgagtgacgtgaatgacggaatctcgcaacggcagcaggcagataaggcgacgatacggagactgagtcgcccaatcctggtcacatcacgggcacccttgcgccgcatgctgcctattcacggcagcagttcaccattcaacatcctctccgacactacggacgctcgctcttcttttgtgcattgtatgaatcctgccattctcccattcggttccctcattagtctctggccttggagagtggataagcacaatgtcggagcatctactgcgctgagcggctcaccccagcttcccaggcaaagcccgaggccggttgccccattgtctgccttcaatacctctcccagagctccttcggacgtgggatacaaagcaaaatattgtcctcatcgaggctcatcttcactgaatctcttcgatgtgcacacggcccgcttcttgtcacactgatgccactgccccttgcacgcacgagagcagcatccaatcaccctaaccatcctccatctgtccgccactacgttcaagctcttccaccatcccataccgtcagcctcaggcgtcctcaactgccaaccatagtgtgcctgggccgatcataacttgtctctctgcccattttcttctttgcactctgatttacaagttattgtcttcattgttgttctatagtcgagtcacgaccacttaggtcgtctcccattattggccattttatcatttaacttcaactagactctgttcctggcttgccctgtcttttgtgacgctactatcaaccttaaccagtgctaaattaattctgaaaactatattttcgttatatcgcccacagcgagcaatagttggtgaagactctgaactctcccttataatcgatacctgtcgacccaacgaactctgctgcagcaattcgagcttgctagctactcgctcagccgtccgtcgccatggctacaaaaccagaagaggatgctacacggcggcgtgtcgctaagagaatagtcaagtctcgcggagaggagcatcatgcaaccctagattttcccgatcgcttcaaacacctgcgggacgatgacgacgaagaagttcgacctcccacccatggcccgcatatgttcatgaacgcgaaccagtccgtgttcggtctgattgcagctgcgagctcgaacgtcgacttccatgaccgtttcgagggccaatccagcgacgaggacgaaggcggccgtatcagcaagaagggcaaagagcgcgagcagatagcgaagacgactattctgcagagagactcatctagcaaagagaaggaacagaaaggcaagaaacatagacagaaactgtcagatcagcttctgcgatcgctgcctcagttgcctcgcatcactagacgctcttcaagcaaacactcctctggttcaagtcgcactcagactcccacagtgtcggagcccaaggattcacaaccagtcatccatgaggaaataacaagctcgccctcagctggacttcagacactcttggatgcgcctgaaagtgacgacgaagagaggccagctacggttatgggccgcatgttggaagccagggcagagatgtcctctcggcccagtttcgatattgagggtcagtcagaggatcaaaatgccgaaggcgatgatcttgggcccactgtccttgctcgccgattaaaggagattttcaacttcgaccatgcagaggaagtgatagaggaatatccttgttggctactgcaaagtgtcctccttcaaggctatctttacatcaccgcaaagcatatctgcttttacgcatacttgccgaagaaagctcaagaagtagcaaagtcagggtatctcaacaagactggcaagcgaaacccacagtatactcgattctggtttcgattgaagggcgatgttctagcgtatttccatgacacttcaaacctatatttcccacatggacagattgatctgcgctatgcgatttcggccagcgtcacagacaaagaaaaggacggcactcacttcgtagtagtcacccacaacaggacttaccattttcgagccgacagcgcacctagtgccaaagaatgggtcaagagcctgcagcgtgtcatatttcgatcacataatgacggtgatagtgtcaaaattgcgcttccgattgattgtgtcatggacattgaagacagtcagatgatcgaatttgccgatacgtgtaaaatacgagtacttgatgaggaatcatactcgattgacgagtattttttttcgttcttcagtttcggcaaggaggccatcaatgttatcaagattctcgtggaagatgcttctcagcataaacagaagtcaccgaccctcagtggcgatccagatacgttaggggcaagagaaagctctgcacgcagcatgcacactcatgagaaggtgaaaacaacgttgattgcagctacgcctcatgatgctcatggcccgagtccgcgggccagtggtgatgagagccttaatatctcgcgacacacaggccgccgtagtttcgacacacgagatggttcaccacggcgaagtttgagcacaaccaggtcgcgcagcaagactcgtcgtcaagacagtcctgcacatcacgagaaacgggaatccacagattcatttgttcagtctttagaggaccctagctcgtcaggtttaatgtcatcaatggaggacccatctggcagccaaatcttgagaggtagcgaagtttttcatagacctatggttcgccaatctcgatctgggacccggggggctgacggtgtaaagtcgccgggcaagtctctgcgcgaggagacgagtggcatgtctcgacgtacacatcacgccgaatcaactgggcatgtacttgatactggcgttggccaacgacctgatcgggagccaacaccgacattgcagaacctcgctaagatgagtgcctatcctctacagagagctggtctattcgcgaagtatctggatcagcagggccgtcggatgagcaatttattggcaacggaatcaatgggatatgctgaaaaggtagcggggatgtggaaaggcggtcagaaacactaccaggagtctccaggcttgaaggttgatgacgatctgagtggcatggaagacgacatggaaggacaaaacgccacagagatggaacgtttccgcacccatttcgccctcccagaaacagaaaccctccaagcgaccttttttgggttcctcaaccgtgttcttccgctttacggcaaaatttacatcagcgaccggaacttttgtttccggagccttctacctggcactcgcacaaagctcatactcccgctgaaagatatcgagactgccgataaagtgaacggctttcgcatacgttattctggtttggtcgtggtaatccgtggtcatgaagaactgttcttcgagttcagccaagtcaaggtcagggatgactgcgctgtaactctactccacagcatcgaaaccatgcgctatctacgagacaccgggatgttggaagaatcagagcacaacgaagaggatgaagcgcttagggagaacaatgcacttcgcgaggcacgcctccatgaagccggcgaacatgaactcgagatgcctcgagactgcttgaacatggctgattctgcccctaccattttatttgatgaccctaaagcctcatttcttaacttcaaacctgccaagtccatgaaaatcacctgcttaaccatcggctcccggggcgatgtgcagccttacattgcgctatgtaaaggtttactggctgacggtcatcaaccccggatagcgacacatggtgaatttaagggatgggttgaaagtcacggcattggattcgcgccagttgctggtgacccaggcgagctcatgcggctctgcattgaaaatggcacctttacgtgggctttcttgaaagaggcaaattcaacattccggatatggctggatgagttactggctagcgcctacaatgcgtgccagggttcagacttgctcattgaaagtccaagtgccatggctggcatccatatcgccgaggcgttgtccattccctattttagggcctttaccatgccgtggacccgtactcgcgcgtatcctcatgcctttattgtgcctgatcacaagatgggaggagcttataattacatgacttatatgatgtttgaaaacgtcttctggaaagcaactgcttaccaaatcaaccgttggaggaatagagtactgcgcctacccaataccagccttgagaaaatgaaggtcaacaaggtaccttttctctacaatttctcacccgctgttgtggcccctcctttggattttagcgattggattcgagtgacaggctattggttcttggatgaagggcatgactggacccccccggatgacctcagagatttcattaagaaggctcgtgctgacaagaaaaaaatcgtttatgtcggatttggctccatcatcgtccccgatcccgccaagatgacccaagaggtcatcgacgctgtgctcaaagctgatgtgcgatgcattctatccaaaggctggtcgactcgcaacaagaaaggccctggcggtggaacggaacaatctctcccaccagagatcttacgtatcaagagtgcgcctcacgattggttattcagtcaaatagatgcggccgtccaccatggaggatctggtaccactggtgcaagtctacgtgcaggcattcccaccatcattcgaccattctttggagatcagttcttctttgggtctcgcgtggaagatctaggtgttggcatttatctgaagagatggggcgccgccacctttgcgaaagctttatgggaggcaacgaacagtgataggatgatcgtcagagctagggttcttggcgagacgatacgcaaggaaaatggcgtcaacacggcaatacagtccatttatcgagacctcgaatatgcgacaaccctgattcaatcaaagacaggcaagtacgcggctacagacaatgacaaggatgggggattaagcggagacgaatcagaagaggaagagagctggacttttgttgacaatcacaatgattcggagttgtcaagtaggaaagatgcacctacagattctgaaacggatcttgcgacggagcttgaggaaggtagtaggatgtccagaacaagaagcaagcctacctcctaggaggagcagtcttgcgctgtcgcgtagtgtcgacgtttttgggatcgtacaaggttgctttggtcatgtttaaatcattgccgtatagtctgctccgttcggcgacgtgttttgttctgcatacatctgttttcattgctggcgaaacggcgctttgtattgggcattcccattagactgttttacatgcatcagcaatggcgttacggctgatggtcaacctttttgatcggctaattttcggggtcgttggccgagagtagaagctagacaagaaccaccgaatgacttgcttccgcatgactccaagtttattaaaacggtcttccgtatacactgtgtgtctgatatatcgacatatctagatggatatgaatacgagagattgttattcatgtcgattatgcagtgccttaggtgctcgacgagtttgattggttgcttgttatggcattttctcgttcatcgagctgttgaaagacaccacttcgccgcctcaaaaccacaagcatttcgtactcatctattccgacgcaatctagaatctctacgtcgaagtcgggagtcgaatcgaatactccggcatagtcggacaggtaatcgatccgaggacctatccagatgacaagctggaccttgttcgccttttcattcggttctcttaagcgcatgtatttctctacatactgagcgactaaatcgctttcgcgcgggtacacgaataagaggactttagcgtcatttgcccgtgggtgcagggcccatgtccctcgcaccgtgttgatgcggtcttctgggagatatttgttcacggagggtagctctacgccttcacaacgccatgaatgagactgtgcgtcggtgatttggttttgggttaaatgggcgtggagaagttcttctaagagtcctgtgccgctgcctattgagagtattaagggattggtttcgtttgtgtgggttgattttgtgagggacagttgagcgacaatggtggctaggagtgtggtcgagaggcttagacagcagactggatagcgtttgggttctaaggttaggattgggaggtcgggcatgattggggtgttgttttgtaggagtttgatgctggtgaggataaaatggtggtgagaatggtgagtatgcggagtggtggggtttccgcgagctacaaggtgatccacccactcgtctactaaatgatagacgataatagaagtctctcactccagatatgtctg

SEQ ID NO: 32579 - DNA, 759 bp, Muscodor strobelii
  misc_feature: SGI cDNA ID NO. 571230
  misc_feature: Elevated expression when VOC is produced
  misc_feature: Encodes the peptide sequence at SEQ ID NO 32580
atggccccgcaaccgcgcctagagggaaaagtggcaatcgtcacaggaggtgcatcgggatttggcaagggaattgcaaccaagttcgtcgcagagggagccaaggtcctcatcgcggacctttcgaatgaagccggtgaagcggtagcgcaggagttaggatgtgcattctcggtaggagacgtcaccaaacgtgaggattgggagcgattgttcaaagagagtatcggtcagttcggcaagctcgatataatcgtcaacaacgctggagccgcatacacgaacaaggccaccgaggaagtgaccgatgcagagttcgacatggtcatgaacgtcaatgtcaaatcgatatacctatcgacgaatgttattcttccatacttcttagagaataaaatacccgggaacttcattcagattgcatctacagcaggagtgcgaccgcgtccgagactgacatggtacaatgcctctaaagcggcagccatcaatgccaccaagaccatggctgttgagtacggtccccagcagattcgattcaattccgtgagtcccgtagttggagacacgggaatgacacatctcttcattggcaaacctaatacaccggataatcgaaaggcatttgaatcagttattccgctcggaagatgctcttctgccaccgatgtcgccaacgcatgttgttaccttgctagtgatgaagctgcattcatcacaggggtcaatattgaagtcgacggaggtcgctgtgtctga

SEQ ID NO: 32580 - protein, 252 aa, Muscodor strobelii
  misc_feature: SGI Peptide ID NO. 571230
  misc_feature (10)..(174): Pfam Id: PF00106 Pfam Desc: short chain dehydrogenase
  misc_feature (12)..(247): Pfam Id: PF01370 Pfam Desc: NAD dependent epimerase/dehydratase family
  misc_feature (6)..(252): NCBI GI: 261361486 Blast Desc: 3-oxoacyl-[acyl-carrier-protein] reductase [Verticillium albo-atrum VaMs.102]
  misc_feature (5)..(252): NCBI GI: 212543883 Blast Desc: oxidoreductase, short-chain dehydrogenase/reductase family [Penicillium marneffei ATCC 18224] gi|210067003|gb|EEA21096.1| oxidoreductase, short-chain family
  misc_feature (6)..(252): NCBI GI: 242788025 Blast Desc: oxidoreductase, short-chain dehydrogenase/reductase family [Talaromyces stipitatus ATCC 10500] gi|218721285|gb|EED20704.1| oxidoreductase, short-chain family
  misc_feature (6)..(252): NCBI GI: 119470361 Blast Desc: oxidoreductase, short-chain dehydrogenase/reductase family [Neosartorya fischeri NRRL 181] gi|119406183|gb|EAW16134.1| oxidoreductase, short-chain family
  misc_feature (6)..(252): NCBI GI: 121699553 Blast Desc: oxidoreductase, short-chain dehydrogenase/reductase family [Aspergillus clavatus NRRL 1] gi|119396199|gb|EAW06631.1| oxidoreductase, short-chain dehydrogenase/reductase family NRRL
  misc_feature (6)..(252): NCBI GI: 70991907 Blast Desc: oxidoreductase, short-chain dehydrogenase/reductase family [Aspergillus fumigatus Af293] gi|66848435|gb|EAL88764.1| oxidoreductase, short-chain dehydrogenase/reductase family Af293]
  misc_feature (6)..(252): NCBI GI: 67522613 Blast Desc: AN1763.2 [Aspergillus nidulans FGSC A4] gi|40744893|gb|EAA64049.1| AN1763.2 [Aspergillus nidulans FGSC A4] gi|259487107|tpe|CBF85516.1| TPA: oxidoreductase, short-chain
  misc_feature (6)..(252): NCBI GI: 169769258 Blast Desc: [Aspergillus oryzae RIB40] gi|83766957|dbj|BAE57097.1| protein product [Aspergillus oryzae]
  misc_feature (6)..(252): NCBI GI: 238501710 Blast Desc: oxidoreductase, short-chain dehydrogenase/reductase family [Aspergillus flavus NRRL3357] gi|220692326|gb|EED48673.1| oxidoreductase, short-chain dehydrogenase/reductase family flavus
  misc_feature (6)..(252): NCBI GI: 46138315 Blast Desc: FG10672.1 [Gibberella zeae PH-1]
  misc_feature (5)..(249): SWISSPROT Homolog: EC 1.1.1.47 Glucose 1-dehydrogenase
  misc_feature: Useful for introducing or modulating the production of volatile compounds
MAPQPRLEGKVAIVTGGASGFGKGIATKFVAEGAKVLIADLSNEAGEAVAQELGCAFSVGDVTKREDWERLFKESIGQFGKLDIIVNNAGAAYTNKATEEVTDAEFDMVMNVNVKSIYLSTNVILPYFLENKIPGNFIQIASTAGVRPRPRLTWYNASKAAAINATKTMAVEYGPQQIRFNSVSPVVGDTGMTHLFIGKPNTPDNRKAFESVIPLGRCSSATDVANACCYLASDEAAFITGVNIEVDGGRCV

SEQ ID NO: 32581 - DNA, 1453 bp, Muscodor strobelii
  misc_feature: SGI EST ID NO. CUFF.77010.0
  misc_feature: Variant of the nucleotide sequence at SEQ ID NO 32579
tggaaattaagcttgtataatgactctgttagtattgaggacataaacggagagttacatgtatgatcaatcgttattccctgcattgaaacctaatggtagggccgattttcacccctcctggcattcttgaactgtctcctttacgacgctcttccttgactgattacctagtagtgatcacttttccaaaacgaaggcgttgccggccccgaatgtataaaggaagttacggtgcgaggtccttggtccgaggtcattgatcggctgggtggcttccccgcactccgcaaatgtcaccacaccataaatgtctacgttcacacaagagccgcttataccgtcgtcatagaatcaatacattattgtgatatgttgaaatctgatcgacctcggacgttagcatccagaactcacctcgtgctgaagcatatcatcaatcgattacacaggctttaaagcttaacaattccacccacaaaactgcacttcgtcatccgtggacgacataacacattctatcatggccccgcaaccgcgcctagagggaaaagtggcaatcgtcacaggaggtgcatcgggatttggcaagggaattgcaaccaagttcgtcgcagagggagccaaggtcctcatcgcggacctttcgaatgaagccggtgaagcggtagcgcaggagttaggatgtgcattctcggtaggagacgtcaccaaacgtgaggattgggagcgattgttcaaagagagtatcggtcagttcggcaagctcgatataatcgtcaacaacgctggagccgcatacacgaacaaggccaccgaggaagtgaccgatgcagagttcgacatggtcatgaacgtcaatgtcaaatcgatatacctatcgacgaatgttattcttccatacttcttagagaataaaatacccgggaacttcattcagattgcatctacagcaggagtgcgaccgcgtccgagactgacatggtacaatgcctctaaagcggcagccatcaatgccaccaagaccatggctgttgagtacggtccccagcagattcgattcaattccgtgagtcccgtagttggagacacgggaatgacacatctcttcattggcaaacctaatacaccggataatcgaaaggcatttgaatcagttattccgctcggaagatgctcttctgccaccgatgtcgccaacgcatgttgttaccttgctagtgatgaagctgcattcatcacaggggtcaatattgaagtcgacggaggtcgctgtgtctgataaaatggttataattattggtctcgatcggtcattctccatttgtatactctgcaaccgagggtgttgtgccaacatagttaaagtggtacaggcaatcagctatttatgtgtcgagattagtatatggtacctagaatatgatcattccgcccttccccccaaaaagta

SEQ ID NO: 32582 - DNA, 397 bp, Muscodor strobelii
  misc_feature: SGI cDNA ID NO. 571231
  misc_feature: Reduced expression when VOC is produced
  misc_feature: Encodes the peptide sequence at SEQ ID NO 32583
atgtattctaattcgaattccttcctcggggggaacagcaatctgcggccgggctcccagcagcaaccgcagcagtatggcgcccctttcggccagcaacaagctcagcagccctcgccgtttgctccccagcccacaggcttcggccagcagcccctaaaccagcagtataccggctttcccggccagaacaacccgcagcagcagcagcagcagcagaatgctcagcaacagttcccccagggcttgcaggcccagtacactggctttccgcaacagcagggcctccagagtgcgccgcccgtcccgcagatcccccagcagttccagcagcagttctcgcagccgcccacccagaactccttctccgccccgagccaaccgccgcccaccgccg

SEQ ID NO: 32583 - protein, 132 aa, Muscodor strobelii
  misc_feature: SGI Peptide ID NO. 571231
  misc_feature (1)..(92): NCBI GI: 171686466 Blast Desc: protein product [Podospora anserina] gi|205829278|sp|B2AWS3.1|PAN1_PODAN RecName: Full=Actin cytoskeleton-regulatory complex protein PAN1 protein product
  misc_feature (1)..(62): NCBI GI: 261358335 Blast Desc: conserved [Verticillium albo-atrum VaMs.102]
  misc_feature (1)..(61): NCBI GI: 46125135 Blast Desc: FG06945.1 [Gibberella zeae PH-1]
  misc_feature (1)..(63): NCBI GI: 256733152 Blast Desc: NECHADRAFT_100132 [Nectria haematococca mpVI 77-13-4]
  misc_feature (14)..(105): NCBI GI: 145608724 Blast Desc: MGG_12839 [Magnaporthe grisea 70-15] gi|205829276|sp|A4R8N4.1|PAN1_MAGGR RecName: Full=Actin cytoskeleton-regulatory complex protein PAN1 MGG_12839 grisea
  misc_feature (1)..(52): NCBI GI: 85109092 Blast Desc: NCU06171 [Neurospora crassa OR74A] gi|74696566|sp|Q7SAT8.1|PAN1_NEUCR RecName: Full=Actin cytoskeleton-regulatory complex protein pan-1 [Neurospora crassa
  misc_feature (1)..(106): NCBI GI: 116207978 Blast Desc: CHGG_03282 [Chaetomium globosum CBS 148.51] gi|121932717|sp|Q2H922.1|PAN1_CHAGB RecName: Full=Actin cytoskeleton-regulatory complex protein PAN1 CHGG_03282 globosum
  misc_feature: Useful for introducing or modulating the production of volatile compounds
MYSNSNSFLGGNSNLRPGSQQQPQQYGAPFGQQQAQQPSPFAPQPTGFGQQPLNQQYTGFPGQNNPQQQQQQQNAQQQFPQGLQAQYTGFPQQQGLQSAPPVPQIPQQFQQQFSQPPTQNSFSAPSQPPPTA

SEQ ID NO: 32584 - DNA, 543 bp, Muscodor strobelii
  misc_feature: SGI EST ID NO. CUFF.77012.0
  misc_feature: Variant of the nucleotide sequence at SEQ ID NO 32582
cgtcattcctccaactactcgatgcatttcttgccgacatccatcttacatcccgcgacagcatcttgacgaccgttttcatccccacgagcgagcctcccgcgcttcttgctctccatctgcatcctatgacgcggccgctctatcatgtattctaattcgaattccttcctcggggggaacagcaatctgcggccgggctcccagcagcaaccgcagcagtatggcgcccctttcggccagcaacaagctcagcagccctcgccgtttgctccccagcccacaggcttcggccagcagcccctaaaccagcagtataccggctttcccggccagaacaacccgcagcagcagcagcagcagcagaatgctcagcaacagttcccccagggcttgcaggcccagtacactggctttccgcaacagcagggcctccagagtgcgccgcccgtcccgcagatcccccagcagttccagcagcagttctcgcagccgcccacccagaactccttctccgccccgagccaaccgccgcccaccgcc

SEQ ID NO: 32585 - DNA, 1581 bp, Muscodor strobelii
  misc_feature: SGI cDNA ID NO. 571232
  misc_feature: Encodes the peptide sequence at SEQ ID NO 32586
atgtccaagcctcaaagcgtcaatgggagcgaatctgagttcgagttcatcgagactcccaaagcccccacgcccacttttgagaaattcgaagaatgcggcgtacgaaccacatcgtatccagcgataaaaaatgcacctctccctgctgattccgccggctcggacagcttctccaacctcctcctattctccctgctaggtggcatccccctatggctgtcttggaaggtcggcggaggcttgaagaccaccatcttctttgccgtcgtcctcttcatccccatacttggttccttctggttgaccgtctccgccgtcagcccccgaaagaacgagaaagccaagtaccctggccgccctgttgagcactacctcactttcaagaagcagtctgacaagctgaaatatcatggcaaaaacaagatccccatggaaaccttctatgagatgtacttcgatggcgatgttgacttcaacggtgatgccctcgaggttcttgaatacagacatgactgggctagtttccggtttaccatcggcctgtgccgctactttgtcaccggcatgatccccgaggttatcatgcactcacgcagccaagacgaggaacaagttcgtgaccactatgaccgtggtgatgatttttacggctggttcctgggacctcgcatgatctacacttcgggtgtcattggcgacatcaacacggaagaatccctcgagcagttgcaggacaacaagttggctgtcgtttgcgagaagattgatatgaaggagggcgaaacactgctagacatcggttgcggctggggcactctcgcccgctttgccagcgtcaactacggcgcgcacgctacgggtatcacacttggtcgcaaccagactgtctggggtaacaaggctctccgcaacgtcggcattcccgaggaccagagccgaattctctgcatggactatcgagacattccagttcatggagctggctataagaagatcacgtgtctggagatggctgaacatgtgggtatccgcaagcttggctccttcttcaagcaggtacacgatatgctcgacgacgacggtgtcttcttcctgcaaattgctgggctccgtaagtcatggcaatacgaggatctgatctggggtctgtttatgaacaagtacgtcttccccggcgccgatgcttcgactccgctgggcatagtggtcgacaagctggagggcgccgggttcgaggtgaaggatatcgacacgattggtgtccactactcggccactctgtggcgctggtataggaactggatggccaaccgtgacaaggttgaggctaaatatggaaagcgatggttccgtatctgggaatattttttggccgcgtcgaccatcgcttcccgccaaggtactgctacgtgctggcaaatcgtacttgtcaagaacatcaactcatcgcaccgtgtcgagggcatcccgacgcagtatggcctaagcggcgccctccggtctgcagtgaagaaagtcgacttcagggcttgggccaagaagaatgcagatcaattccccactgctgccgttcagtag

SEQ ID NO: 32586 - protein, 526 aa, Muscodor strobelii
  misc_feature: SGI Peptide ID NO. 571232
  misc_feature (197)..(479): Pfam Id: PF02353 Pfam Desc: Cyclopropane-fatty-acyl-phospholipid synthase
  misc_feature (1)..(526): NCBI GI: 116191679 Blast Desc: CHGG_05557 [Chaetomium globosum CBS 148.51] gi|88181470|gb|EAQ88938.1| CHGG_05557 [Chaetomium globosum CBS 148.51]
  misc_feature (2)..(517): NCBI GI: 156054276 Blast Desc: SS1G_05986 [Sclerotinia sclerotiorum 1980] gi|154703766|gb|EDO03505.1| SS1G_05986 [Sclerotinia sclerotiorum 1980]
  misc_feature (2)..(517): NCBI GI: 154303333 Blast Desc: BC1G_09415 [Botryotinia fuckeliana B05.10] gi|150854978|gb|EDN30170.1| BC1G_09415 [Botryotinia fuckeliana B05.10]
  misc_feature (1)..(521): NCBI GI: 171687112 Blast Desc: protein product [Podospora anserina] gi|170943517|emb|CAP69170.1| protein product [Podospora anserina]
  misc_feature (1)..(522): NCBI GI: 85109853 Blast Desc: NCU07859 [Neurospora crassa OR74A] gi|28924772|gb|EAA33884.1| NCU07859 [Neurospora crassa OR74A]
  misc_feature (1)..(521): NCBI GI: 256729665 Blast Desc: [Nectria haematococca mpVI 77-13-4]
  misc_feature (10)..(507): NCBI GI: 212532397 Blast Desc: cyclopropane-fatty-acyl-phospholipid synthase, [Penicillium marneffei ATCC 18224] gi|210071719|gb|EEA25808.1| cyclopropane-fatty-acyl-phospholipid synthase, [Penicillium ATCC
  misc_feature (1)..(522): NCBI GI: 46122431 Blast Desc: FG05593.1 [Gibberella zeae PH-1]
  misc_feature (2)..(507): NCBI GI: 238844889 Blast Desc: cyclopropane-fatty-acyl-phospholipid synthase [Microsporum canis CBS 113480]
  misc_feature (10)..(507): NCBI GI: 154275854 Blast Desc: HCAG_06377 [Ajellomyces capsulatus NAm1] gi|150413845|gb|EDN09210.1| HCAG_06377 [Ajellomyces capsulatus NAm1]
  misc_feature (207)..(487): SWISSPROT Homolog: EC 2.1.1.79 Cyclopropane-fatty-acyl-phospholipid synthase
MSKPQSVNGSESEFEFIETPKAPTPTFEKFEECGVRTTSYPAIKNAPLPADSAGSDSFSNLLLFSLLGGIPLWLSWKVGGGLKTTIFFAVVLFIPILGSFWLTVSAVSPRKNEKAKYPGRPVEHYLTFKKQSDKLKYHGKNKIPMETFYEMYFDGDVDFNGDALEVLEYRHDWASFRFTIGLCRYFVTGMIPEVIMHSRSQDEEQVRDHYDRGDDFYGWFLGPRMIYTSGVIGDINTEESLEQLQDNKLAVVCEKIDMKEGETLLDIGCGWGTLARFASVNYGAHATGITLGRNQTVWGNKALRNVGIPEDQSRILCMDYRDIPVHGAGYKKITCLEMAEHVGIRKLGSFFKQVHDMLDDDGVFFLQIAGLRKSWQYEDLIWGLFMNKYVFPGADASTPLGIVVDKLEGAGFEVKDIDTIGVHYSATLWRWYRNWMANRDKVEAKYGKRWFRIWEYFLAASTIASRQGTATCWQIVLVKNINSSHRVEGIPTQYGLSGALRSAVKKVDFRAWAKKNADQFPTAAVQ

SEQ ID NO: 32587 - DNA, 2270 bp, Muscodor strobelii
  misc_feature: SGI EST ID NO. CUFF.77016.0
  misc_feature: Variant of the nucleotide sequence at SEQ ID NO 32585
ccaagcccaccgacatcacccaccaaccagtgcaggcagcgaggggaaggcggtctgaagtttcccaaatctcccacgagtccacgacgggcataattggattgggctaccagaattgccctcggtcgtcttctctccctcctccctctctaccctttccaccatcccgagagcttcgtgacagtcggcctgcagccgattacgccaccatgtccaagcctcaaagcgtcaatgggagcgaatctgagttcgagttcatcgagactcccaaagcccccacgcccacttttgagaaattcgaagaatgcggcgtacgaaccacatcgtatccagcgataaaaaatgcacctctccctgctgattccgccggctcggacagcttctccaacctcctcctattctccctgctaggtggcatccccctatggctgtcttggaaggtcggcggaggcttgaagaccaccatcttctttgccgtcgtcctcttcatccccatacttggttccttctggttgaccgtctccgccgtcagcccccgaaagaacgagaaagccaagtaccctggccgccctgttgagcactacctcactttcaagaagcagtctgacaagctgaaatatcatggcaaaaacaagatccccatggaaaccttctatgagatgtacttcgatggcgatgttgacttcaacggtgatgccctcgaggttcttgaatacagacatgactgggctagtttccggtttaccatcggcctgtgccgctactttgtcaccggcatgatccccgaggttatcatgcactcacgcagccaagacgaggaacaagttcgtgaccactatgaccgtggtgatgatttttacggctggttcctgggacctcgcatgatctacacttcgggtgtcattggcgacatcaacacggaagaatccctcgagcagttgcaggacaacaagttggctgtcgtttgcgagaagattgatatgaaggagggcgaaacactgctagacatcggttgcggctggggcactctcgcccgctttgccagcgtcaactacggcgcgcacgctacgggtatcacacttggtcgcaaccagactgtctggggtaacaaggctctccgcaacgtcggcattcccgaggaccagagccgaattctctgcatggactatcgagacattccagttcatggagctggctataagaagatcacgtgtctggagatggctgaacatgtgggtatccgcaagcttggctccttcttcaagcaggtacacgatatgctcgacgacgacggtgtcttcttcctgcaaattgctgggctccgtaagtcatggcaatacgaggatctgatctggggtctgtttatgaacaagtacgtcttccccggcgccgatgcttcgactccgctgggcatagtggtcgacaagctggagggcgccgggttcgaggtgaaggatatcgacacgattggtgtccactactcggccactctgtggcgctggtataggaactggatggccaaccgtgacaaggttgaggctaaatatggaaagcgatggttccgtatctgggaatattttttggccgcgtcgaccatcgcttcccgccaaggtactgctacgtgctggcaaatcgtacttgtcaagaacatcaactcatcgcaccgtgtcgagggcatcccgacgcagtatggcctaagcggcgccctccggtctgcagtgaagaaagtcgacttcagggcttgggccaagaagaatgcagatcaattccccactgctgccgttcagtagagaggtacttgaagtggtagaagaagcgggaagggtatgatgagctcctgggcggctaacgaagacattttctccaaaatgacaggcacagcagcttcagggtacatttgggcagtctactcgccggagacagaggaacgggttatagagacgggcgagaaaatcgactgcagctcagtgggttgtaattaacgattgatactagggaacgaacggatggacaaagggttaaaggggtgactaatatgatagatctaatggacgtattggcccgcgaccgaaagacgcatgttgataaatcacctataccactattatagacacctaggtattcatggagagttggtagaaccaggaagcatataagcatgagcaacgcagttctatttgtgacttgtattgtgcactgggtatcctgtcgctttgggttgctgcgtacatgctgggtatgatatatttacttagagttggtcaggttaa

SEQ ID NO: 32588 - DNA, 1083 bp, Muscodor strobelii
  misc_feature: SGI cDNA ID NO. 571233
  misc_feature: Reduced expression when VOC is produced
  misc_feature: Encodes the peptide sequence at SEQ ID NO 32589
atgcccgagtccacatccgagtcgagagcacctcggattgcgatcaagttcggcgcgccgtcttcgtcgacatcgcggcccgctagcaatgggacaaagccgccttctcattcccatgcaacggctctgggcaagcgtcagcggcccagtgctctccacgatgactccgactccgccgacgatgacgatgacgatggtctgggtaagcacgttgccgtcacaacctttggcgccgacgcccgcaatgaaacaaagaagcacaagtcacgggaggggcaaaagacgaatcagggcttcgtcatcagcagtgagcgcaatcgcgattggaaaggggatctcaaggcaaaaagaaacaaagctccgcgctacgacggaaaccagactgagatagaaccggccgaccaggacaaggacatcaaatgggggttgacatttgccaagaagtctgcgcaagattcatccaacgcgggagacaccaacgacccgcgaacgcaggccgaccaggcaggaccgacgacaccgtcccaaagtcggggaagtaaactcgatgtctcgcaagatgaagataaagacgccatggatgcccttctggggaagcgcaagcaaaagcaagagttcgtcatcgacggcccccagatccgtcccaatcagcctagagtttcggaacaagacagcttgcaagaaacaatgcaagaagcaggggaagtttctacgcttgaggagtacgaaaacattcctgaaggggaatttggggcagcaatactgcgaggactgggctggaacggagatacggttggctcgaaatcaaacaacgttattcgtcgatcacaccttatgggtctcggttctaaagaggacgaggagatcaagcatgccgagttggccaagaaacacggatatcgcgaacgacggccccgactagacgagtacaagagagaccgagccagggataaagaagacagagaaaggcgccacaaggacagatcgtacagatcgggacgcgagtctgagcagcgtggtcatggagaccgtcatcgagacggcgacagtcacagccatcgctcgaggcatcatcggtcgtga

SEQ ID NO: 32589 - protein, 360 aa, Muscodor strobelii
  misc_feature: SGI Peptide ID NO. 571233
  misc_feature (10)..(331): NCBI GI: 46122271 Blast Desc: FG05513.1 [Gibberella zeae PH-1]
  misc_feature (12)..(338): NCBI GI: 256729896 Blast Desc: NECHADRAFT_6115 [Nectria haematococca mpVI 77-13-4]
  misc_feature (12)..(338): NCBI GI: 145608706 Blast Desc: MGG_06433 [Magnaporthe grisea 70-15] gi|148887435|sp|Q52E73.2|SPP2_MAGGR RecName: Full=Pre-mRNA-splicing factor SPP2 gi|145016151|gb|EDK00641.1|
  misc_feature (1)..(321): NCBI GI: 261358318 Blast Desc: pre-mRNA-splicing factor SPP2 [Verticillium albo-atrum VaMs.102]
  misc_feature (8)..(358): NCBI GI: 154303345 Blast Desc: BC1G_09421 [Botryotinia fuckeliana B05.10] gi|150854984|gb|EDN30176.1| BC1G_09421 [Botryotinia fuckeliana B05.10]
  misc_feature (8)..(293): NCBI GI: 156054266 Blast Desc: SS1G_05981 [Sclerotinia sclerotiorum 1980] gi|154703761|gb|EDO03500.1| SS1G_05981 [Sclerotinia sclerotiorum 1980]
  misc_feature (42)..(331): NCBI GI: 116191683 Blast Desc: CHGG_05559 [Chaetomium globosum CBS 148.51] gi|88181472|gb|EAQ88940.1| CHGG_05559 [Chaetomium globosum CBS 148.51]
  misc_feature (139)..(289): NCBI GI: 189193703 Blast Desc: pre-mRNA-splicing factor spp2 [Pyrenophora tritici-repentis Pt-1C-BFP] gi|187978754|gb|EDU45380.1| pre-mRNA-splicing factor spp2 [Pyrenophora tritici-repentis
  misc_feature (100)..(286): NCBI GI: 169601594 Blast Desc: SNOG_03665 [Phaeosphaeria nodorum SN15] gi|160705972|gb|EAT88870.2| SNOG_03665 [Phaeosphaeria nodorum SN15]
  misc_feature (22)..(293): NCBI GI: 70994586 Blast Desc: G-patch domain protein (Spp2) [Aspergillus fumigatus Af293] gi|74671249|sp|Q4WP02.1|SPP2_ASPFU RecName: Full=Pre-mRNA-splicing factor spp2 gi|66849704|gb|EAL90032.1|
  misc_feature: Useful for introducing or modulating the production of volatile compounds
MPESTSESRAPRIAIKFGAPSSSTSRPASNGTKPPSHSHATALGKRQRPSALHDDSDSADDDDDDGLGKHVAVTTFGADARNETKKHKSREGQKTNQGFVISSERNRDWKGDLKAKRNKAPRYDGNQTEIEPADQDKDIKWGLTFAKKSAQDSSNAGDTNDPRTQADQAGPTTPSQSRGSKLDVSQDEDKDAMDALLGKRKQKQEFVIDGPQIRPNQPRVSEQDSLQETMQEAGEVSTLEEYENIPEGEFGAAILRGLGWNGDTVGSKSNNVIRRSHLMGLGSKEDEEIKHAELAKKHGYRERRPRLDEYKRDRARDKEDRERRHKDRSYRSGRESEQRGHGDRHRDGDSHSHRSRHHRS

SEQ ID NO: 32590 - DNA, 15223 bp, Muscodor strobelii
  misc_feature: SGI EST ID NO. CUFF.78746.3
  misc_feature: Variant of the nucleotide sequence at SEQ ID NO 32588
ctcgaacccgaactaatggtgacaaaagggaggttgaagtcactcatatttgctccccaaatctgttaaacttggggaaacaatagcgattcaaaccctacctaaaatagccatatgaagaagacgctatacgtctcaagtacgttatggtgcgcatgcgaagcttaggttcactcacgccagaaagcggtgagctaccagacagaggaagaagggacgtatgtaggggccgccgtaggtttgtaatcctatatggatgtgtatgccttgacctgggatctagtcgatcgtcgccaagacgagaaacgacaccgttgcctatggcttgcagcaattccgagctagaacacggaatctatgaatcccacagggcgaaaacaaagagaaaagaccactgacgccgttgcgcccgctgcggctgaggttcttgcccatgatcttgcagccccagaacggagtattcggtcgcgaaatccggcttagcgccattcaaacatgcaagctgtcgtcgtcttctatattttcaccttgcgtccggccgccccatcgtgcttttagcgagcgacatcgagaaacaagagacaagatcgagtgtatgacaggctatttagtggaattcctaaagagctttacgctgaactacatagtgctttttgacagcttctaaactttctgtctgctgattcagcacgtcatccagtctcaaaagtatccctgcaagaaaacagcatgtttcaaactttcagcccccgaatgcggtgtccgtaaagggtgacatctggtaaatatgggacgttgagagcccttattgtaaagtacagaattagtgaaatacatagagggatatatacatgacaagatgagcatgaaaaggctaatgcttcgtgtcattggtatcctctccttcccgttgcttccgatgaaccacccatatgccaatgcctatacgccgttcctttttcaaaccctatgacgctatgagatggatgcggcgacgggaccaattccgtcttgttcgtaatcaagcctccagcctaatgctcaaaaacaaattgatagggtttataaccttggttgaaacttcatgagtcgttgaattcgtggtgaaagaattgataacgtgccggggcagccggaccagggagcttttgacatttgcttgatcctttcccctagcatcagacattacgtgtccctatccagtggatcttagcacaatgccggtagccgcactttggcttctttattgcgtcttagcattgattttgcggctgagtgcgagccaacgaccaatgttgccgaagcacacgcagcagcaaaataggacattgagagtccaaatgccagtagcgatggtttcttggctcgccagaccacccagaaccatagtcgagggtaggtctgcataagcagaagaattatagcgacctcctagtgaaggcatggtcggcactggaaccatagctggctgtaagttggtaagaactgcggatcctgcaattgccacagccgaagatacggccagcccgggaaaggaccgatcaatgaggaaccataggagcgcgtttgcaagtgcaagcgtcaatgagacttgtattgttgaatcccactgtaatttgcgctgtgaaattcataattagcctccatttttagtgtcgccttctctggcacttccggacagcacactcgggatttgagctgggtttgaagcaaaatggacagactcacgattgcgaaggcgatcccaatgaacatgccaatgcctctaactggaagcgtccagtccgtgtcggcaagagaccccttgttagcatcactggagactggcttctgctcgtctgcttcgctttcactactttcttgttgtaaagcactgtcccacagaccgtcgaaccacggaagtagactaccaaggataagacctgcagcgccccagaatgccatgtactcccagctgcagttggaggccctcaccaaatgctctacgcgaagggtcgtcgacgagcgactatctttcacagtggccaccataatgccatacaacatgccgaggccagagagcaagagggcactgacaccgacatatactgcagagacagttgtagaaagaggttgtggtcgtggtaacgaagttgcagagtgcctccgcgcaggctgtgctcgttcttttaggatttcatagtctggctcatatgtacccaaatactttgcgggcgtctctgcaccagtgccccaaggcgtatttaggtcgtctccagccccgtacttaccgtaggtcgtaggcgagtagatgcccataagtgtggacgatgtgaggttcatggccgactgggcacggcttatgctggttgagtctgaccgtctaccccgcgtagctagcagcttggagtttatgtgatcgaggtttaagaagggttcgttcagaggggtctgcgggagcgaatcctcttcgggcggtgttggttctcggaaattgagggcaaacggccgcaagggcacaggccgaaagagcggtgggccatcgggagagtcggtcatcgtagctactgcgtggtgatatggacggcgaagaaaattccttcacgattcgttcggttgacagtgttgcgttgtcaaatacaaaacggcaatgaaagccgtgagacacgcgcgagtgagtcaagtgccaggctttgtcgagaaggccctgaagccctggctctctctgtcaatgatcacggatcctcaaagagtaaggcgagaactctatccaatgttcgggcgaatcaacggaagtcgagtgaatcaaggtttgttggtcgcccgctaggagaaggttcgatcgtactcgacggcctacgcagtagctgatccttgcaaccgtgaaatcagagggcgatgatatatagacgtcgaatcgttgggatgaaatgtagagtcagctgagaagtgaggctgacgagcagatatatacagtattcggaggcaggatgacagcaggatgagggaggaatgtggatgggaatgatgcgatgttaggaggaatcggttaagtttggacaggacaaggttgcaagccgcatgaatgagaggaccttatggcttggctgccggaggacagtgagagcggcagttcagacaagtcaagaggtggaccaatacgcgggggagcgaatgaatgaatatcaaatcgtcgatctacacgacagggcgggtgtattgaccataaaagccggtggaaaatattcaaatcaaagtgtttccaatgggtgaagagcatcgaccgattctccgcacacggaaaggcacagagccacccgaacccaccagcgacgctactctcccagcaaatgcatacaaatgcatgccagtgcgcatgacaacgcgcgccgtacgccgattttcttttcggccaagagagccgagaccccagcaagtcgaaccggagcaaaagccaatggtacgccaaccattcaccacttgacagttgtgcaagacatgggcagacatgggcatcgcctgtcttggttctttgttacgattccgaaacgaaacaggcggcagaggtctgaaatgtgagatgagccaatcctttaacgatgcaccgccgcctgtttgcatcgacagtcagtggtgagtgtcgagactcgagtccagactgtctattttcatgcgtttccccgtctccgcgtctcgtgtgtgttggtgcgatgcgctcgacttgcaagccacacgtcaagaaaattaacctctgcctgcatgtcaatacccactaacaacagttcggctcttctccaacaaccccagcagaatgccccatacaggtaggtcaataaaccaggtacgaggtcgcgagctttcgcttcgagtacgatccatgcatatcagctccctctcacgcccgcagggaactcgaacgggaatcggtttgcatgcaccatgacggctctctcctcgcttccggtctctcgactcttgaacaccttttaagaacgtggagagacacctcgaaacgtctggccggggaatagctcgtcgaataaaccttgtaagctcttcgagtcaagtgacgttagtcctgggcaattccaattgcacttgctgatccaggcatgtccaggccgctaggtcccagctcagcgggttgggcggcgtcaagcggcgtcggctgtccacataaccttgctaggcttccataccatcggcccaacacccaaaagggaacaactccaccagcaatctccatcgagggcgtacctacaagtgttgtgtgtgtgtgtgtatgcatatgtgcgttcgagtgactcgtctgactgtcgttcgtagatcgtatcacactcaggcggcatctgggcgtaagcatcgttgtgccgtaagagcgcgtcaatctgcgaaaagctcaacgcaccgttccgcgggcgcccgcgggagatcacatcatctatatgaatcgattcacatgcgcttgtgacctaggccgccttgacagcgtacgagacgtacaggggtgtggcgtcggaaccaggcgttttaacagggcttcccgcccagctgcttctcgttgattcgctgttaccccacacgcaagttcaggccagagtcgatcatcgtcgtcccattgctcgtctgccacctacctgattgctccaattcggcatgacggtcagttgcagcctctcgaccttggtgccctgctttcaaatttatcgtaggaggaagcggcacagcagcacgtaatttgcacgccattgctctggtaccgacgatgttgcgtgtgctgatgaacgcaaaccattatcatcagatgttgaattcacaggggaacagctatttcgaaactggtaggctagcagacgcgggtaagcgcgggatctgcggccttcatttacagttctcgaaaacacaagaccatatgcatgcagcatatcacaggtcgtcccgtcggatatatcgtcgccggaatttcacaatgcaacccattgttgcgtggtcttagaattgactttgactcacaatgcttcttactgtacgatctatgcacactattatgtcttctgtgagacagagtaggtagaacgcaggtggattattctgcatcttcctcatcttcactgtcactattcgacagttcatcaaccaactcatcctcgctatcctccactccttccggccggggtatcatcttaaatgcgctcatacaagtaactcggttctgtgtatcgtatgtaccgaggagggcaccaactttttgtaatgtcttggccttttgcgcgtcgaccaattcgtcgacggtcaatttgaaaagtcgtactttgccgtcgctacttccagcaggaataaacagctcgtccttgcccttgcgcttggctttgcacaccgagaagtctttgatgcgaccagtaacaccggcctccttgcctccaagtattgccacaggtttagcgacgggaagcatgtcggttttgtcgttctggcctgaagcagtagtctgtagatctgcagcgcgcgttgagaagaatagtatccttccgtcctcagttgagactgcaagcaatttggactccgatgcggagtctgtggctacatagcagaattgatgtatcttcttctttggttcaggcatgacagtgcaccttggcgtgctgtccatgccgaagacaatgagatcgcggtcgaagccaacacaaaactcatcgcctccatctgtctcgccccagattacttttctggcctcgcctgacgagtacttgctctcgccagcattttgcaacatgtcacggctgaaattcaggactccagctttcttagccgtcatcaggttccaaagacgcatgcacctctcactcttgctgacgctgatcatgaccttgtcactcggatggacggcaaagctgttaacgccggcgggtgttccgccgagagcagccgtgtcgccgctcggtcgactctgaggcttcggtattggcactttgatgctcgacagcaaggaccaatctctagtgcgggtgacggcaatggtggagtcttcggcggcggagatgagctttgatctggaagggaaagagagctgcgttatggaagattcgtggtgcaagagagtgccgagctccctgtttttggggttctcgaggattttgcggggcgcgatagaggacaaggcgtctttctccatgcgtttgggcggatgagctgagatgctgtacacattgatcctctcgtcgctgctgccagaggccagcatgaccttctggcccttgccaggctcgggagcagagaagggggagacggcgagacagcgtatggcggagctgtgggcattgaagagaaaggtgtcggcgaagtcaaccttgtcgtcggacgacacggtagcagtcaaaccgtgtaagacgcggtcgtaagaaccagtgacgatctggaaagttacggatggtgtctcgtccacatcttctgcgggtttagatttcttggatggggtctgttcacgggcagcggcgctgcttggaacctcatgtctcttccgcttccccatttccgaatgtgcaagatgtggcagccgcttcgaaggcgaataattggattgtgggcaggcaattgctgtgtgttggctccgtaacaactcaccagcatggaaatgagaattagctaggcgacgaggaggttcagtgcgaaggtgagcgagacggaaaaaaataaagtggaccggcatctatcaatgggcgcatgcgaagtggggtctgcctataccttcaacgctagtactgcaggcacttacataagctgctggaatgatactgggcattgtgcggtctgcttttaatcctactattagacatattgcatcgctttcacagcggtggacgagcattgatgctgccggttgagtgtgggagatatatgtagaccgtgaactcttgtttggttcaattctcattagtgtctataaaatagggtatcatccactcaatgcattcgtatggcacgagactgtgccttgtaaggttgacttcctcgtcaacatgatcaaaccatatacttctgttgcgccatatacacctgcccctggttgattatgtcgtcgtactacaccacacggcgaagcatgccctcatatcgatatcatcccatagctagctttcctacgagagtcgcggtgggccccagtcaatctttcgagctgatgccctgccgctatcaagctccacgaccgtcgctaacgggcaaaacaacatcaaaacaatcattattatttgcagcctttgtcaacccaactgaccgatcttgcatatcattcaagcgcacgcacaacttactattttgaaaccgtcgcagcagctggcgtcggtgttgcgctcccgctcgagtttcgctggtgttgcgcgtttgactggctcattcgtgcttgcggtaccggtgcgtgaattggtgtctgcacctggacttgtccttggccctgcccctgtgcttgctgcaccgttgctgtctgcccctgcgtctggctgtgagcttgtgcctgggcctgagtctgcgtcttcgctgctgctgccgcggccgcagcctgttgctgttgctgaatgcgcagcatctgggcgtagtggtgcggactgctagttgcctgtgcgtggccgggacttccggcagcagcgttcatggccgatcgttgcatttggtcgtgcctctgttgtagcaagtgcttcgccatctctctgatcttgtcctggggctggtctggatatgactgtctaatagagttctcaatggcttgtagctgggatacgtaggtctgaggatgtgacgagatcatgccattagggcgaggcgatcctgactgaccagtcgccatgttgaaaccggaggccggaggcgttgagagacccgacccgttgacaccattataggacgccatggcagcctgcgcctgggcattggccaagaaatttctctgattcataccgttgatcgcctgggctcgcatggctggaggtgagttctgtagggcattgttgacctggtgattggtgttaagttgttgctgatgatgttgttgctgctgctggtgttgctgctgttgttgctgctgatgcatatgttgctgcaactgctgctgagctagctgttggtgttgttgtaattgggcctgcgttggctgtgactgatgttgttgctgttgctggcgctgtcgcatctgtatttgtcgttgctgttcagatgctcgctgagcttggagtagtaaggacatgttcgctgccgaagtgggcattgacatctgggcttggccattgaccaccggcatctgtatttgcggagagccgttcatctgcacgggtggaacaagtgcgccattcatatgatttgaatgttcacttccggttggagttgagggcatgggcatggccatacgtgcacggttctgcccgttgaccgcgatctgatttggggcattgggacgagccatggcagcaacttgagcatgtgcggccatctgtgggttcccctgctgaagctgattgccattctgcgctgcggcggccagttgagcgatttggttctgctgttgaactctctggatcgcggctgcctgtgactggacgttagcgttatgtggcgcattgttcatggcagcccgtactctgcgctgtgcctcgtgttgacgctgttggtgtgccatcttctccgccactttctctgccaaggcttggtcccgttcgtagcgcataatactgtactctcttggtgttttgataggacccttaggctgtgggacctcgttcggttttctcgcggcagctacttgagcctgttgttgtgctttctgcagggtagtctctcgtttcttggcaacctttctcatagcatcaaccattgtcaggtgtttcccgttgcgccgccgttctaccttgacaggaagcgtataccgacgtcgaggcagtggagtactgggggcattcgccattccttgcgatggcggctgtcctggctgttgttgtgcttgattttgagcctgctgctgagcctgttgttgggcttgctgcattgcggcatggttctgctggcggaggtgttgttgagcagcctcaatcctggcctgccacaatttgaaatattgcgtcttttgcatatcatgtggaagcccttcgagcataacccatcgctcgaaacattcccatggcgaacgacgttctgcggccgacccaaatatcgatttggcagacagaaggttagatatcaagctccaattgtaagagtattcacgaacttgactcttaagctcgtcgtcttctgattgggtccattgtgaggggcttcgcgattcataaaaggcttggaagggcatgttatgctcgctgggtggacggaactgatggcctgcgtgaagtctgtctctgatactcttattctcatttctgaacagtgcgacgtcagggctttgcggcggaagctgggcaacatcactattgtcttgaccaaatatgacctcttcgtcttcttcatcctcctgcatgtgttgaaagcggcctctttttgtgggaggctcacttgcactaagctccatctgaccttcggcaaacttgctaatcgggagagctggtcgtctccaagatgcgtcagggtcaaagtctgatgcgcctgggccagtcttgaaggttcccaaaggagccccatacatcgggagttcctcgagtaaccgatgcgttgcagcggacggttgcaaagagaagacaaattcatcatctggaagtgcaaatattgcagaaggggcgacagtattgaagatctcatggtcaagctcttcatcaatatccagaggcgagtccgaacttccagagggaatgaggtcaggagtcggatgactttcgggctcttgcgcagactcttcatcaatcatcatggcgtcttctgcatcattcgttttaacaggtgggatgaaggcatcgacctggagcagtttccgctcttcctctgatgcgccaacccattcggcacatgcttcagctagactgcgagcagctgccatcttccactttcgctcttcacgaaagtctgtcctcatccatttcacctcttgcaacaaagtatcccactggcagacttgacgggtgggttccggacaacgtttgtgctggcgaagcgaccatttgtcgtgatgctggagatgatagacccggcgtaacactttacaggcttggttgtcttgaatctgagtgtaggaatcggaggttgaaacggttttatgtgcttggtacaacagctggtcgagtggcttcatccattttgagccgttcgcgaagccatgaacaaataatgcattgaaatagtcgtcgtttacaatctgatcggactttagagggtgggggatcagagatcgcgaggtcttgggcgcccggtgcccttgcttgccgaaaaccacactggacagcttgctcttgtctttggctcggttcttgctgatgagacttcgtggtcgtgcttttgaggactgcgagactggtgttatgggcatggactgagaagactgtgactcgttctgtggcagcacttccgttggtgaatccaggcgttctcccagtatctcggatactggcttttgaagggcaacgtcggtaacgcttgccaggctcacctgttcctgctcttgctcttggctcgcaacctcttgggatgcagattccttctcggcagcctcctgcaccgcattgggcgcattgggagagacatcccctttcgtcgacaactgactgttcctgctctgctcctgactgctctcctgcctaacggatgtcacactctcagtggctgctggaatcgaggcagtatgttgcggttcgggctgaacgatatctcggactgcagggctcgcaagggcggtaggatgttcggaaacaccgttctcgctgggaacttctggcttattcttatctggtttcggctcgacaggacctgtcgaaggcaatggtgcagtttttgctaccccattcttctgtgcgatgttaacagtagaagctgtgtcatctctcggcacagccgcggcagccgcggagtcttgaatcaattgggcctccagctgtgcacccacgctctggcttgaggattgctcatctgacacagtcgccgacgaggctgttgtaggaggaacttccggcttagtcttcgtagaaatatcaagagcttgcgtgttgtttgcactgtcgttatgtccattggtcagaggaagtggtttgttgttctcggtcccgtccgtgatcgaggtatcgcgcgcacttggaacagctggcacagttgacggcaatgtggtagatgttgctgagctcggggctgctgggagaggactcgactctcgaccagacggcttgggtgtagattgtttttctgcaaatgcctcgtcgggtttgggtatgactgctgcaggcggtgggacagcatcctgcgcagtcttcgaacgggtggcttccgggaccaaggacggcttctgctgggctttctcaaccttttgcggtgtggccagtgccggcaagttgccggaggttgaagctggagacttcttctttccttcgccattcgtctgcacttgctgcacgtttttgtctgcttgtggtcggcccgcatcggcatctggtttggtagtggttggcggcacatcggttttcgcagcaatggtctcggggggcttgatagtatcaacaggaatgcgtgtcttcgaaacggctggcggtttagcctcgatgatatgttgtgaaggtactttgctgacgtctgaagatggtgtagactggactttcgcagacgcgtcgacaatcttcgctacgctcttgctcggggctggcgttggaggcggtattacagcggtttgcggaggggacttcgtcacggcgggtgtcgtggatacgacatatcccggttggggtgctgccggcgtgggaacattgattgcattcagcctacggcctctgcgcggtggtttagcacgaatccaatgcgaggcagaagtcaacgcgacaggaaggggacgactttgcgcgcaagagcgagacagagtggaggggagagagacagggcggcgatggcatgtagagagcacgtactgtaagatgtcgcatccatcgaggaactgtgcttcggcaagggatggtgtgaaggcgacttggttggcgaagctgcgcttggggacatcgccagggttggcggagacctcgtagaggatgcacagtttccttttgcgcgaccgtgcaattgcactgcaacgcgtcagcaccccgaacgcaagagtttcggtgtcggaaaagcgcgctctatcgtttggcactggtttcggaggcatcgcgacgggagactcacctgcattctgcccgctttgattgcagaaggctcgtacggtcggcgggcacgacctcaatcatggcatcggcagcgaccacatccgttttgcgtgaaacggatgcagcatgaagctcaggtcggctcgatgcggcagacactgtcctgagtgatggaaaggcgcgcgttggtgttgtcttgattgattgaatggtcgtccggatgtgtagtggcagacggcggtattgaatttttcacgagagatgccgtacctaacgctctggaatgaacggcggatttccctggtttccaggtgggttacaggcgtcgaacttggagtgctagcaggtgctggcgctgtttcccagtgtcattggcgctttgttcaggacctctaggcatctacccaggtcactttgttgtgccagtgcctgcctaagtaagtcaaggcttggtggcggtagtggcagatggaaggaggggattaatggcgattatctatatttaccctggaattgcggtgtcttcggcgctatcggagaaagcatttctccattgaactctcttcattaagacaggttgatgaatgagcaaaggcctattaaagacgacacttcaagactaaaatctctgcacaaagcttacaataaagattgacaaagactccctcgcaagctctgtcccaaatcgttcgtcgaatacccaatctgcatagtttcctagacgctatggaaccgaggtatcttatctaagccacaaaggaaacaacgagccacaattctgtcacgagctgagcggtctagcaccgtggctgctagtggcgcctttcttacgtaggtagaggcttagaatggaagtgccacctacctcagcgttctcagtcttccgatactcatgcaccaaacctctatccagtagggagcgatactctagggtttttgggcaaccatcaaaagtccagtgaccaccagcagctatcggcccatttcatgcttctttgacatacgaacacacacagaaagactaacgacggggcggatatcgggccgcagaatactcgctgggagctgctcatccaccatgcccgagtccacatccgagtcgagagcacctcggattgcgatcaagttcggcgcgccgtcttcgtcgacatcgcggcccgctagcaatgggacaaagccgccttctcattcccatgcaacggctctgggcaagcgtcagcggcccagtgctctccacgatgactccgactccgccgacgatgacgatgacgatggtctgggtaagcacgttgccgtcacaacctttggcgccgacgcccgcaatgaaacaaagaagcacaagtcacgggaggggcaaaagacgaatcagggcttcgtcatcagcagtgagcgcaatcgcgattggaaaggggatctcaaggcaaaaagaaacaaagctccgcgctacgacggaaaccagactgagatagaaccggccgaccaggacaaggacatcaaatgggggttgacatttgccaagaagtctgcgcaagattcatccaacgcgggagacaccaacgacccgcgaacgcaggccgaccaggcaggaccgacgacaccgtcccaaagtcggggaagtaaactcgatgtctcgcaagatgaagataaagacgccatggatgcccttctggggaagcgcaagcaaaagcaagagttcgtcatcgacggcccccagatccgtcccaatcagcctagagtttcggaacaagacagcttgcaagaaacaatgcaagaagcaggggaagtttctacgcttgaggagtacgaaaacattcctgaaggggaatttggggcagcaatactgcgaggactgggctggaacggagatacggttggctcgaaatcaaacaacgttattcgtcgatcacaccttatgggtctcggttctaaagaggacgaggagatcaagcatgccgagttggccaagaaacacggatatcgcgaacgacggccccgactagacgagtacaagagagaccgagccagggataaagaagacagagaaaggcgccacaaggacagatcgtacagatcgggacgcgagtctgagcagcgtggtcatggagaccgtcatcgagacggcgacagtcacagccatcgctcgaggcatcatcggtcgtgaagattacttccctgaggtattctgacgtggagggtttgttgactccgttgtgtgcaatccgaattgtggatgttatccgtgaaccgcccaaactcaataccacagagcagcctagctgaatggagctatggcacatacgatctgagaggttcaggttcagctccgtaactagagtcctattacaatgaccgctccgtactaacatcaatgaggcaatactttcacacactaagcgtattcaatgtcagcgatgatgcgatctgggcactccttcctcgaaaatcgtcattgcacctcgaaagtgttctcgtcccttgttgggatctaaattgtatggtatctacctgaaccaacaagcccaatgctctatccttccatttgataccagcagaaacacgaaatcccattcgacttatcgacttatcgcgaataagtaatgtctgaggtcggacgccttacagcgacttcactgacaaaaacaaacgaacatgtagttttgacacctgttccacgggtttaacgtacttgcctggcataggcgcttagattaagcgttttgtacttggcgctataactagctagttacctcaaggtaaagtagacagcagccgaggcaggtcgaaatcagacccatggctagcatttagagaaaaagagtaacgactatttgcagcaaagcctggaccaaacatctcttaagggtgtctcttagttaatgtagaaaccccatctctgataccgaagatctatagagaaaaaacgtaacgaccca

SEQ ID NO: 32591 - DNA, 4848 bp, Muscodor strobelii
  misc_feature: SGI cDNA ID NO. 571234
  misc_feature: Encodes the peptide sequence at SEQ ID NO 32592
atgattgaggtcgtgcccgccgaccgtacgagccttctgcaatcaaagcgggcagaatgcagtgcaattgcacggtcgcgcaaaaggaaactgtgcatcctctacgaggtctccgccaaccctggcgatgtccccaagcgcagcttcgccaaccaagtcgccttcacaccatcccttgccgaagcacagttcctcgatggatgcgacatcttacaaggccgtaggctgaatgcaatcaatgttcccacgccggcagcaccccaaccgggatatgtcgtatccacgacacccgccgtgacgaagtcccctccgcaaaccgctgtaataccgcctccaacgccagccccgagcaagagcgtagcgaagattgtcgacgcgtctgcgaaagtccagtctacaccatcttcagacgtcagcaaagtaccttcacaacatatcatcgaggctaaaccgccagccgtttcgaagacacgcattcctgttgatactatcaagccccccgagaccattgctgcgaaaaccgatgtgccgccaaccactaccaaaccagatgccgatgcgggccgaccacaagcagacaaaaacgtgcagcaagtgcagacgaatggcgaaggaaagaagaagtctccagcttcaacctccggcaacttgccggcactggccacaccgcaaaaggttgagaaagcccagcagaagccgtccttggtcccggaagccacccgttcgaagactgcgcaggatgctgtcccaccgcctgcagcagtcatacccaaacccgacgaggcatttgcagaaaaacaatctacacccaagccgtctggtcgagagtcgagtcctctcccagcagccccgagctcagcaacatctaccacattgccgtcaactgtgccagctgttccaagtgcgcgcgatacctcgatcacggacgggaccgagaacaacaaaccacttcctctgaccaatggacataacgacagtgcaaacaacacgcaagctcttgatatttctacgaagactaagccggaagttcctcctacaacagcctcgtcggcgactgtgtcagatgagcaatcctcaagccagagcgtgggtgcacagctggaggcccaattgattcaagactccgcggctgccgcggctgtgccgagagatgacacagcttctactgttaacatcgcacagaagaatggggtagcaaaaactgcaccattgccttcgacaggtcctgtcgagccgaaaccagataagaataagccagaagttcccagcgagaacggtgtttccgaacatcctaccgcccttgcgagccctgcagtccgagatatcgttcagcccgaaccgcaacatactgcctcgattccagcagccactgagagtgtgacatccgttaggcaggagagcagtcaggagcagagcaggaacagtcagttgtcgacgaaaggggatgtctctcccaatgcgcccaatgcggtgcaggaggctgccgagaaggaatctgcatcccaagaggttgcgagccaagagcaagagcaggaacaggtgagcctggcaagcgttaccgacgttgcccttcaaaagccagtatccgagatactgggagaacgcctggattcaccaacggaagtgctgccacagaacgagtcacagtcttctcagtccatgcccataacaccagtctcgcagtcctcaaaagcacgaccacgaagtctcatcagcaagaaccgagccaaagacaagagcaagctgtccagtgtggttttcggcaagcaagggcaccgggcgcccaagacctcgcgatctctgatcccccaccctctaaagtccgatcagattgtaaacgacgactatttcaatgcattatttgttcatggcttcgcgaacggctcaaaatggatgaagccactcgaccagctgttgtaccaagcacataaaaccgtttcaacctccgattcctacactcagattcaagacaaccaagcctgtaaagtgttacgccgggtctatcatctccagcatcacgacaaatggtcgcttcgccagcacaaacgttgtccggaacccacccgtcaagtctgccagtgggatactttgttgcaagaggtgaaatggatgaggacagactttcgtgaagagcgaaagtggaagatggcagctgctcgcagtctagctgaagcatgtgccgaatgggttggcgcatcagaggaagagcggaaactgctccaggtcgatgccttcatcccacctgttaaaacgaatgatgcagaagacgccatgatgattgatgaagagtctgcgcaagagcccgaaagtcatccgactcctgacctcattccctctggaagttcggactcgcctctggatattgatgaagagcttgaccatgagatcttcaatactgtcgccccttctgcaatatttgcacttccagatgatgaatttgtcttctctttgcaaccgtccgctgcaacgcatcggttactcgaggaactcccgatgtatggggctcctttgggaaccttcaagactggcccaggcgcatcagactttgaccctgacgcatcttggagacgaccagctctcccgattagcaagtttgccgaaggtcagatggagcttagtgcaagtgagcctcccacaaaaagaggccgctttcaacacatgcaggaggatgaagaagacgaagaggtcatatttggtcaagacaatagtgatgttgcccagcttccgccgcaaagccctgacgtcgcactgttcagaaatgagaataagagtatcagagacagacttcacgcaggccatcagttccgtccacccagcgagcataacatgcccttccaagccttttatgaatcgcgaagcccctcacaatggacccaatcagaagacgacgagcttaagagtcaagttcgtgaatactcttacaattggagcttgatatctaaccttctgtctgccaaatcgatatttgggtcggccgcagaacgtcgttcgccatgggaatgtttcgagcgatgggttatgctcgaagggcttccacatgatatgcaaaagacgcaatatttcaaattgtggcaggccaggattgaggctgctcaacaacacctccgccagcagaaccatgccgcaatgcagcaagcccaacaacaggctcagcagcaggctcaaaatcaagcacaacaacagccaggacagccgccatcgcaaggaatggcgaatgcccccagtactccactgcctcgacgtcggtatacgcttcctgtcaaggtagaacggcggcgcaacgggaaacacctgacaatggttgatgctatgagaaaggttgccaagaaacgagagactaccctgcagaaagcacaacaacaggctcaagtagctgccgcgagaaaaccgaacgaggtcccacagcctaagggtcctatcaaaacaccaagagagtacagtattatgcgctacgaacgggaccaagccttggcagagaaagtggcggagaagatggcacaccaacagcgtcaacacgaggcacagcgcagagtacgggctgccatgaacaatgcgccacataacgctaacgtccagtcacaggcagccgcgatccagagagttcaacagcagaaccaaatcgctcaactggccgccgcagcgcagaatggcaatcagcttcagcaggggaacccacagatggccgcacatgctcaagttgctgccatggctcgtcccaatgccccaaatcagatcgcggtcaacgggcagaaccgtgcacgtatggccatgcccatgccctcaactccaaccggaagtgaacattcaaatcatatgaatggcgcacttgttccacccgtgcagatgaacggctctccgcaaatacagatgccggtggtcaatggccaagcccagatgtcaatgcccacttcggcagcgaacatgtccttactactccaagctcagcgagcatctgaacagcaacgacaaatacagatgcgacagcgccagcaacagcaacaacatcagtcacagccaacgcaggcccaattacaacaacaccaacagctagctcagcagcagttgcagcaacatatgcatcagcagcaacaacagcagcaacaccagcagcagcaacaacatcatcagcaacaacttaacaccaatcaccaggtcaacaatgccctacagaactcacctccagccatgcgagcccaggcgatcaacggtatgaatcagagaaatttcttggccaatgcccaggcgcaggctgccatggcgtcctataatggtgtcaacgggtcgggtctctcaacgcctccggcctccggtttcaacatggcgactggtcagtcaggatcgcctcgccctaatggcatgatctcgtcacatcctcagacctacgtatcccagctacaagccattgagaactctattagacagtcatatccagaccagccccaggacaagatcagagagatggcgaagcacttgctacaacagaggcacgaccaaatgcaacgatcggccatgaacgctgctgccggaagtcccggccacgcacaggcaactagcagtccgcaccactacgcccagatgctgcgcattcagcaacagcaacaggctgcggccgcggcagcagcagcgaagacgcagactcaggcccaggcacaagctcacagccagacgcaggggcagacagcaacggtgcagcaagcacaggggcagggccaaggacaagtccaggtgcagacaccaattcacgcaccggtaccgcaagcacgaatgagccagtcaaacgcgcaacaccagcgaaactcgagcgggagcgcaacaccgacgccagctgctgcgacggtttcaaaatag

SEQ ID NO: 32592 - protein, 1615 aa, Muscodor strobelii
  misc_feature: SGI Peptide ID NO. 571234
  misc_feature (682)..(744): Pfam Id: PF07529 Pfam Desc: HSA
  misc_feature (682)..(719): Pfam Id: PF07529 Pfam Desc: HSA
  misc_feature (526)..(1523): NCBI GI: 256729701 Blast Desc: NECHADRAFT_95544 [Nectria haematococca mpVI 77-13-4]
  misc_feature (526)..(1523): NCBI GI: 46122269 Blast Desc: FG05512.1 [Gibberella zeae PH-1] gi|84029610|sp|Q4IB96.1|VID21_GIBZE RecName: Full=Chromatin modification-related protein VID21
  misc_feature (520)..(1322): NCBI GI: 261358325 Blast Desc: MYB and HSA domain-containing protein [Verticillium albo-atrum VaMs.102]
  misc_feature (260)..(1168): NCBI GI: 171687106 Blast Desc: protein product [Podospora anserina] gi|170943514|emb|CAP69167.1| protein product [Podospora anserina]
  misc_feature (522)..(1324): NCBI GI: 85109861 Blast Desc: NCU07863 [Neurospora crassa OR74A] gi|74662716|sp|Q7SBU6.1|VID21_NEUCR RecName: Full=Chromatin modification-related protein vid-21 gi|28924776|gb|EAA33888.1|
  misc_feature (526)..(1290): NCBI GI: 156054268 Blast Desc: SS1G_05982 [Sclerotinia sclerotiorum 1980] gi|154703762|gb|EDO03501.1| SS1G_05982 [Sclerotinia sclerotiorum 1980]
  misc_feature (525)..(1290): NCBI GI: 154303343 Blast Desc: BC1G_09420 [Botryotinia fuckeliana B05.10] gi|150854983|gb|EDN30175.1| BC1G_09420 [Botryotinia fuckeliana B05.10]
  misc_feature (584)..(1177): NCBI GI: 116191685 Blast Desc: CHGG_05560 [Chaetomium globosum CBS 148.51] gi|88181473|gb|EAQ88941.1| CHGG_05560 [Chaetomium globosum CBS 148.51]
  misc_feature (526)..(1526): NCBI GI: 145256916 Blast Desc: An04g01920 [Aspergillus niger] gi|134058470|emb|CAL00679.1| protein product [Aspergillus niger]
  misc_feature (442)..(1327): NCBI GI: 119501022 Blast Desc: MYB and HSA domain protein [Neosartorya fischeri NRRL 181] gi|119415433|gb|EAW25371.1| MYB and HSA domain protein [Neosartorya fischeri NRRL 181]
MIEVVPADRTSLLQSKRAECSAIARSRKRKLCILYEVSANPGDVPKRSFANQVAFTPSLAEAQFLDGCDILQGRRLNAINVPTPAAPQPGYVVSTTPAVTKSPPQTAVIPPPTPAPSKSVAKIVDASAKVQSTPSSDVSKVPSQHIIEAKPPAVSKTRIPVDTIKPPETIAAKTDVPPTTTKPDADAGRPQADKNVQQVQTNGEGKKKSPASTSGNLPALATPQKVEKAQQKPSLVPEATRSKTAQDAVPPPAAVIPKPDEAFAEKQSTPKPSGRESSPLPAAPSSATSTTLPSTVPAVPSARDTSITDGTENNKPLPLTNGHNDSANNTQALDISTKTKPEVPPTTASSATVSDEQSSSQSVGAQLEAQLIQDSAAAAAVPRDDTASTVNIAQKNGVAKTAPLPSTGPVEPKPDKNKPEVPSENGVSEHPTALASPAVRDIVQPEPQHTASIPAATESVTSVRQESSQEQSRNSQLSTKGDVSPNAPNAVQEAAEKESASQEVASQEQEQEQVSLASVTDVALQKPVSEILGERLDSPTEVLPQNESQSSQSMPITPVSQSSKARPRSLISKNRAKDKSKLSSVVFGKQGHRAPKTSRSLIPHPLKSDQIVNDDYFNALFVHGFANGSKWMKPLDQLLYQAHKTVSTSDSYTQIQDNQACKVLRRVYHLQHHDKWSLRQHKRCPEPTRQVCQWDTLLQEVKWMRTDFREERKWKMAAARSLAEACAEWVGASEEERKLLQVDAFIPPVKTNDAEDAMMIDEESAQEPESHPTPDLIPSGSSDSPLDIDEELDHEIFNTVAPSAIFALPDDEFVFSLQPSAATHRLLEELPMYGAPLGTFKTGPGASDFDPDASWRRPALPISKFAEGQMELSASEPPTKRGRFQHMQEDEEDEEVIFGQDNSDVAQLPPQSPDVALFRNENKSIRDRLHAGHQFRPPSEHNMPFQAFYESRSPSQWTQSEDDELKSQVREYSYNWSLISNLLSAKSIFGSAAERRSPWECFERWVMLEGLPHDMQKTQYFKLWQARIEAAQQHLRQQNHAAMQQAQQQAQQQAQNQAQQQPGQPPSQGMANAPSTPLPRRRYTLPVKVERRRNGKHLTMVDAMRKVAKKRETTLQKAQQQAQVAAARKPNEVPQPKGPIKTPREYSIMRYERDQALAEKVAEKMAHQQRQHEAQRRVRAAMNNAPHNANVQSQAAAIQRVQQQNQIAQLAAAAQNGNQLQQGNPQMAAHAQVAAMARPNAPNQIAVNGQNRARMAMPMPSTPTGSEHSNHMNGALVPPVQMNGSPQIQMPVVNGQAQMSMPTSAANMSLLLQAQRASEQQRQIQMRQRQQQQQHQSQPTQAQLQQHQQLAQQQLQQHMHQQQQQQQHQQQQQHHQQQLNTNHQVNNALQNSPPAMRAQAINGMNQRNFLANAQAQAAMASYNGVNGSGLSTPPASGFNMATGQSGSPRPNGMISSHPQTYVSQLQAIENSIRQSYPDQPQDKIREMAKHLLQQRHDQMQRSAMNAAAGSPGHAQATSSPHHYAQMLRIQQQQQAAAAAAAAKTQTQAQAQAHSQTQGQTATVQQAQGQGQGQVQVQTPIHAPVPQARMSQSNAQHQRNSSGSATPTPAAATVSK

SEQ ID NO: 32593 - DNA, 15157 bp, Muscodor strobelii
  misc_feature: SGI EST ID NO. CUFF.78745.1
  misc_feature: Variant of the nucleotide sequence at SEQ ID NO 32591
tgggtcgttacgttttttctctatagatcttcggtatcagagatggggtttctacattaactaagagacacccttaagagatgtttggtccaggctttgctgcaaatagtcgttactctttttctctaaatgctagccatgggtctgatttcgacctgcctcggctgctgtctactttaccttgaggtaactagctagttatagcgccaagtacaaaacgcttaatctaagcgcctatgccaggcaagtacgttaaacccgtggaacaggtgtcaaaactacatgttcgtttgtttttgtcagtgaagtcgctgtaaggcgtccgacctcagacattacttattcgcgataagtcgataagtcgaatgggatttcgtgtttctgctggtatcaaatggaaggatagagcattgggcttgttggttcaggtagataccatacaatttagatcccaacaaggctgagttcaatgagcaaagctgatgcgggcccttgggaacgaaggtgacgtacgacgagaacactttcgaggtgcaatgacgattttcgaggaaggagtgcccagatcgcatcatcgctgacattgaatacgcttagtgtgtgaaagtattgcctcattgatgttagtacggagcggtcattgtaataggactctagttacggagctgaacctgaacctctcagatcgtatgtgccatagctccattcagctaggctgctctgtggtattgagtttgggcggttcacggataacatccacaattcggattgcacacaacggagtcaacaaaccctccacgtcagaatacctcagggaagtaatcttcacgaccgatgatgcctcgagcgatggctgtgactgtcgccgtctcgatgacggtctccatgaccacgctgctcagactcgcgtcccgatctgtacgatctgtccttgtggcgcctttctctgtcttctttatccctggctcggtctctcttgtactcgtctagtcggggccgtcgttcgcgatatccgtgtttcttggccaactcggcatgcttgatctcctcgtcctctttagaaccgagacccataaggtgtgatcgacgaataacgttgtttgatttcgagccaaccgtatctccgttccagcccagtcctcgcagtattgctgccccaaattccccttcaggaatgttttcgtactcctcaagcgtagaaacttcccctgcttcttgcattgtttcttgcaagctgtcttgttccgaaactctaggctgattgggacggatctgggggccgtcgatgacgaactcttgcttttgcttgcgcttccccagaagggcatccatggcgtctttatcttcatcttgcgagacatcgagtttacttccccgactttgggacggtgtcgtcggtcctgcctggtcggcctgcgttcgcgggtcgttggtgtctcccgcgttggatgaatcttgcgcagacttcttggcaaatgtcaacccccatttgatgtccttgtcctggtcggccggttctatctcagtctggtttccgtcgtagcgcggagctttgtttctttttgccttgagatcccctttccaatcgcgattgcgctcactgctgatgacgaagccctgattcgtcttttgcccctcccgtgacttgtgcttctttgtttcattgcgggcgtcggcgccaaaggttgtgacggcaacgtgcttacccagaccatcgtcatcgtcatcgtcggcggagtcggagtcatcgtggagagcactgggccgctgacgcttgcccagagccgttgcatgggaatgagaaggcggctttgtcccattgctagcgggccgcgatgtcgacgaagacggcgcgccgaacttgatcgcaatccgaggtgctctcgactcggatgtggactcgggcatggtggatgagcagctcccagcgagtattctgcggcccgatatccgccccgtcgttagtctttctgtgtgtgttcgtatgtcaaagaagcatgaaatgggccgatagctgctggtggtcactggacttttgatggttgcccaaaaaccctagagtatcgctccctactggatagaggtttggtgcatgagtatcggaagactgagaacgctgaggtaggtggcacttccattctaagcctctacctacgtaagaaaggcgccactagcagccacggtgctagaccgctcagctcgtgacagaattgtggctcgttgtttcctttgtggcttagataagatacctcggttccatagcgtctaggaaactatgcagattgggtattcgacgaacgatttgggacagagcttgcgagggagtctttgtcaatctttattgtaagctttgtgcagagattttagtcttgaagtgtcgtctttaataggcctttgctcattcatcaacctgtcttaatgaagagagttcaatggagaaatgctttctccgatagcgccgaagacaccgcaattccagggtaaatatagataatcgccattaatcccctccttccatctgccactaccgccaccaagccttgacttacttaggcaggcactggcacaacaaagtgacctgggtagatgcctagaggtcctgaacaaagcgccaatgacactgggaaacagcgccagcacctgctagcactccaagttcgacgcctgtaacccacctggaaaccagggaaatccgccgttcattccagagcgttaggtacggcatctctcgtgaaaaattcaataccgccgtctgccactacacatccggacgaccattcaatcaatcaagacaacaccaacgcgcgcctttccatcactcaggacagtgtctgccgcatcgagccgacctgagcttcatgctgcatccgtttcacgcaaaacggatgtggtcgctgccgatgccatgattgaggtcgtgcccgccgaccgtacgagccttctgcaatcaaagcgggcagaatgcagtgcaattgcacggtcgcgcaaaaggaaactgtgcatcctctacgaggtctccgccaaccctggcgatgtccccaagcgcagcttcgccaaccaagtcgccttcacaccatcccttgccgaagcacagttcctcgatggatgcgacatcttacaaggccgtaggctgaatgcaatcaatgttcccacgccggcagcaccccaaccgggatatgtcgtatccacgacacccgccgtgacgaagtcccctccgcaaaccgctgtaataccgcctccaacgccagccccgagcaagagcgtagcgaagattgtcgacgcgtctgcgaaagtccagtctacaccatcttcagacgtcagcaaagtaccttcacaacatatcatcgaggctaaaccgccagccgtttcgaagacacgcattcctgttgatactatcaagccccccgagaccattgctgcgaaaaccgatgtgccgccaaccactaccaaaccagatgccgatgcgggccgaccacaagcagacaaaaacgtgcagcaagtgcagacgaatggcgaaggaaagaagaagtctccagcttcaacctccggcaacttgccggcactggccacaccgcaaaaggttgagaaagcccagcagaagccgtccttggtcccggaagccacccgttcgaagactgcgcaggatgctgtcccaccgcctgcagcagtcatacccaaacccgacgaggcatttgcagaaaaacaatctacacccaagccgtctggtcgagagtcgagtcctctcccagcagccccgagctcagcaacatctaccacattgccgtcaactgtgccagctgttccaagtgcgcgcgatacctcgatcacggacgggaccgagaacaacaaaccacttcctctgaccaatggacataacgacagtgcaaacaacacgcaagctcttgatatttctacgaagactaagccggaagttcctcctacaacagcctcgtcggcgactgtgtcagatgagcaatcctcaagccagagcgtgggtgcacagctggaggcccaattgattcaagactccgcggctgccgcggctgtgccgagagatgacacagcttctactgttaacatcgcacagaagaatggggtagcaaaaactgcaccattgccttcgacaggtcctgtcgagccgaaaccagataagaataagccagaagttcccagcgagaacggtgtttccgaacatcctaccgcccttgcgagccctgcagtccgagatatcgttcagcccgaaccgcaacatactgcctcgattccagcagccactgagagtgtgacatccgttaggcaggagagcagtcaggagcagagcaggaacagtcagttgtcgacgaaaggggatgtctctcccaatgcgcccaatgcggtgcaggaggctgccgagaaggaatctgcatcccaagaggttgcgagccaagagcaagagcaggaacaggtgagcctggcaagcgttaccgacgttgcccttcaaaagccagtatccgagatactgggagaacgcctggattcaccaacggaagtgctgccacagaacgagtcacagtcttctcagtccatgcccataacaccagtctcgcagtcctcaaaagcacgaccacgaagtctcatcagcaagaaccgagccaaagacaagagcaagctgtccagtgtggttttcggcaagcaagggcaccgggcgcccaagacctcgcgatctctgatcccccaccctctaaagtccgatcagattgtaaacgacgactatttcaatgcattatttgttcatggcttcgcgaacggctcaaaatggatgaagccactcgaccagctgttgtaccaagcacataaaaccgtttcaacctccgattcctacactcagattcaagacaaccaagcctgtaaagtgttacgccgggtctatcatctccagcatcacgacaaatggtcgcttcgccagcacaaacgttgtccggaacccacccgtcaagtctgccagtgggatactttgttgcaagaggtgaaatggatgaggacagactttcgtgaagagcgaaagtggaagatggcagctgctcgcagtctagctgaagcatgtgccgaatgggttggcgcatcagaggaagagcggaaactgctccaggtcgatgccttcatcccacctgttaaaacgaatgatgcagaagacgccatgatgattgatgaagagtctgcgcaagagcccgaaagtcatccgactcctgacctcattccctctggaagttcggactcgcctctggatattgatgaagagcttgaccatgagatcttcaatactgtcgccccttctgcaatatttgcacttccagatgatgaatttgtcttctctttgcaaccgtccgctgcaacgcatcggttactcgaggaactcccgatgtatggggctcctttgggaaccttcaagactggcccaggcgcatcagactttgaccctgacgcatcttggagacgaccagctctcccgattagcaagtttgccgaaggtcagatggagcttagtgcaagtgagcctcccacaaaaagaggccgctttcaacacatgcaggaggatgaagaagacgaagaggtcatatttggtcaagacaatagtgatgttgcccagcttccgccgcaaagccctgacgtcgcactgttcagaaatgagaataagagtatcagagacagacttcacgcaggccatcagttccgtccacccagcgagcataacatgcccttccaagccttttatgaatcgcgaagcccctcacaatggacccaatcagaagacgacgagcttaagagtcaagttcgtgaatactcttacaattggagcttgatatctaaccttctgtctgccaaatcgatatttgggtcggccgcagaacgtcgttcgccatgggaatgtttcgagcgatgggttatgctcgaagggcttccacatgatatgcaaaagacgcaatatttcaaattgtggcaggccaggattgaggctgctcaacaacacctccgccagcagaaccatgccgcaatgcagcaagcccaacaacaggctcagcagcaggctcaaaatcaagcacaacaacagccaggacagccgccatcgcaaggaatggcgaatgcccccagtactccactgcctcgacgtcggtatacgcttcctgtcaaggtagaacggcggcgcaacgggaaacacctgacaatggttgatgctatgagaaaggttgccaagaaacgagagactaccctgcagaaagcacaacaacaggctcaagtagctgccgcgagaaaaccgaacgaggtcccacagcctaagggtcctatcaaaacaccaagagagtacagtattatgcgctacgaacgggaccaagccttggcagagaaagtggcggagaagatggcacaccaacagcgtcaacacgaggcacagcgcagagcagccgcgatccagagagttcaacagcagaaccaaatcgctcaactggccgccgcagcgcagaatggcaatcagcttcagcaggggaacccacagatggccgcacatgctcaagttgctgccatggctcgtcccaatgccccaaatcagatcgcggtcaacgggcagaaccgtgcacgtatggccatgcccatgccctcaactccaaccggaagtgaacattcaaatcatatgaatggcgcacttgttccacccgtgcagatgaacggctctccgcaaatacagatgccggtggtcaatggccaagcccagatgtcaatgcccacttcggcagcgaacatgtccttactactccaagctcagcgagcatctgaacagcaacgacaaatacagatgcgacagcgccagcaacagcaacaacatcagtcacagccaacgcaggcccaattacaacaacaccaacagctagctcagcagcagttgcagcaacatatgcatcagcagcaacaacagcagcaacaccagcagcagcaacaacatcatcagcaacaacttaacaccaatcaccaggtcaacaatgccctacagaactcacctccagccatgcgagcccaggcgatcaacggtatgaatcagagaaatttcttggccaatgcccaggcgcaggctgccatggcgtcctataatggtgtcaacgggtcgggtctctcaacgcctccggcctccggtttcaacatggcgactggtcagtcaggatcgcctcgccctaatggcatgatctcgtcacatcctcagacctacgtatcccagctacaagccattgagaactctattagacagtcatatccagaccagccccaggacaagatcagagagatggcgaagcacttgctacaacagaggcacgaccaaatgcaacgatcggccatgaacgctgctgccggaagtcccggccacgcacaggcaactagcagtccgcaccactacgcccagatgctgcgcattcagcaacagcaacaggctgcggccgcggcagcagcagcgaagacgcagactcaggcccaggcacaagctcacagccagacgcaggggcagacagcaacggtgcagcaagcacaggggcagggccaaggacaagtccaggtgcagacaccaattcacgcaccggtaccgcaagcacgaatgagccagtcaaacgcgcaacaccagcgaaactcgagcgggagcgcaacaccgacgccagctgctgcgacggtttcaaaatagtaagttgtgcgtgcgcttgaatgatatgcaagatcggtcagttgggttgacaaaggctgcaaataataatgattgttttgatgttgttttgcccgttagcgacggtcgtggagcttgatagcggcagggcatcagctcgaaagattgactggggcccaccgcgactctcgtaggaaagctagctatgggatgatatcgatatgagggcatgcttcgccgtgtggtgtagtacgacgacataatcaaccaggggcaggtgtatatggcgcaacagaagtatatggtttgatcatgttgacgaggaagtcaaccttacaaggcacagtctcgtgccatacgaatgcattgagtggatgataccctattttatagacactaatgagaattgaaccaaacaagagttcacggtctacatatatctcccacactcaaccggcagcatcaatgctcgtccaccgctgtgaaagcgatgcaatatgtctaatagtaggattaaaagcagaccgcacaatgcccagtatcattccagcagcttatgtaagtgcctgcagtactagcgttgaaggtataggcagaccccacttcgcatgcgcccattgatagatgccggtccactttatttttttccgtctcgctcaccttcgcactgaacctcctcgtcgcctagctaattctcatttccatgctggtgagttgttacggagccaacacacagcaattgcctgcccacaatccaattattcgccttcgaagcggctgccacatcttgcacattcggaaatggggaagcggaagagacatgaggttccaagcagcgccgctgcccgtgaacagaccccatccaagaaatctaaacccgcagaagatgtggacgagacaccatccgtaactttccagatcgtcactggttcttacgaccgcgtcttacacggtttgactgctaccgtgtcgtccgacgacaaggttgacttcgccgacacctttctcttcaatgcccacagctccgccatacgctgtctcgccgtctcccccttctctgctcccgagcctggcaagggccagaaggtcatgctggcctctggcagcagcgacgagaggatcaatgtgtacagcatctcagctcatccgcccaaacgcatggagaaagacgccttgtcctctatcgcgccccgcaaaatcctcgagaaccccaaaaacagggagctcggcactctcttgcaccacgaatcttccataacgcagctctctttcccttccagatcaaagctcatctccgccgccgaagactccaccattgccgtcacccgcactagagattggtccttgctgtcgagcatcaaagtgccaataccgaagcctcagagtcgaccgagcggcgacacggctgctctcggcggaacacccgccggcgttaacagctttgccgtccatccgagtgacaaggtcatgatcagcgtcagcaagagtgagaggtgcatgcgtctttggaacctgatgacggctaagaaagctggagtcctgaatttcagccgtgacatgttgcaaaatgctggcgagagcaagtactcgtcaggcgaggccagaaaagtaatctggggcgagacagatggaggcgatgagttttgtgttggcttcgaccgcgatctcattgtcttcggcatggacagcacgccaaggtgcactgtcatgcctgaaccaaagaagaagatacatcaattctgctatgtagccacagactccgcatcggagtccaaattgcttgcagtctcaactgaggacggaaggatactattcttctcaacgcgcgctgcagatctacagactactgcttcaggccagaacgacaaaaccgacatgcttcccgtcgctaaacctgtggcaatacttggaggcaaggaggccggtgttactggtcgcatcaaagacttctcggtgtgcaaagccaagcgcaagggcaaggacgagctgtttattcctgctggaagtagcgacggcaaagtacgacttttcaaattgaccgtcgacgaattggtcgacgcgcaaaaggccaagacattacaaaaagttggtgccctcctcggtacatacgatacacagaaccgagttacttgtatgagcgcatttaagatgataccccggccggaaggagtggaggatagcgaggatgagttggttgatgaactgtcgaatagtgacagtgaagatgaggaagatgcagaataatccacctgcgttctacctactctgtctcacagaagacataatagtgtgcatagatcgtacagtaagaagcattgtgagtcaaagtcaattctaagaccacgcaacaatgggttgcattgtgaaattccggcgacgatatatccgacgggacgacctgtgatatgctgcatgcatatggtcttgtgttttcgagaactgtaaatgaaggccgcagatcccgcgcttacccgcgtctgctagcctaccagtttcgaaatagctgttcccctgtgaattcaacatctgatgataatggtttgcgttcatcagcacacgcaacatcgtcggtaccagagcaatggcgtgcaaattacgtgctgctgtgccgcttcctcctacgataaatttgaaagcagggcaccaaggtcgagaggctgcaactgaccgtcatgccgaattggagcaatcaggtaggtggcagacgagcaatgggacgacgatgatcgactctggcctgaacttgcgtgtggggtaacagcgaatcaacgagaagcagctgggcgggaagccctgttaaaacgcctggttccgacgccacacccctgtacgtctcgtacgctgtcaaggcggcctaggtcacaagcgcatgtgaatcgattcatatagatgatgtgatctcccgcgggcgcccgcggaacggtgcgttgagcttttcgcagattgacgcgctcttacggcacaacgatgcttacgcccagatgccgcctgagtgtgatacgatctacgaacgacagtcagacgagtcactcgaacgcacatatgcatacacacacacacacaacacttagcttacaaggtttattcgacgagctattccccggccagacgtttcgaggtgtctctccacgttcttaaaaggtgttcaagagtcgagagaccggaagcgaggagagagccgtcatggtgcatgcaaaccgattcccgttcgagttccctgcgggcgtgagagggagctgatatgcatggatcgtactcgaagcgaaagctcgcgacctcgtacctggtttattgacctacctgtatggggcattctgctggggttgttggagaagagccgaactgttgttagtgggtattgacatgcaggcagaggttaattttcttgacgtgtggcttgcaagtcgagcgcatcgcaccaacacacacgagacgcggagacggggaaacgcatgaaaatagacagtctggactcgagtctcgacactcaccactgactgtcgatgcaaacaggcggcggtgcatcgttaaaggattggctcatctcacatttcagacctctgccgcctgtttcgtttcggaatcgtaacaaagaaccaagacaggcgatgcccatgtctgcccatgtcttgcacaactgtcaagtggtgaatggttggcgtaccattggcttttgctccggttcgacttgctggggtctcggctctcttggccgaaaagaaaatcggcgtacggcgcgcgttgtcatgcgcactggcatgcatttgtatgcatttgctgggagagtagcgtcgctggtgggttcgggtggctctgtgcctttccgtgtgcggagaatcggtcgatgctcttcacccattggaaacactttgatttgaatattttccaccggcttttatggtcaatacacccgccctgtcgtgtagatcgacgatttgatattcattcattcgctcccccgcgtattggtccacctcttgacttgtctgaactgccgctctcactgtcctccggcagccaagccataaggtcctctcattcatgcggcttgcaaccttgtcctgtccaaacttaaccgattcctcctaacatcgcatcattcccatccacattcctccctcatcctgctgtcatcctgcctccgaatactgtatatatctgctcgtcagcctcacttctcagctgactctacatttcatcccaacgattcgacgtctatatatcatcgccctctgatttcacggttgcaaggatcagctactgcgtaggccgtcgagtacgatcgaaccttctcctagcgggcgaccaacaaaccttgattcactcgacttccgttgattcgcccgaacattggatagagttctcgccttactctttgaggatccgtgatcattgacagagagagccagggcttcagggccttctcgacaaagcctggcacttgactcactcgcgcgtgtctcacggctttcattgccgttttgtatttgacaacgcaacactgtcaaccgaacgaatcgtgaaggaattttcttcgccgtccatatcaccacgcagtagctacgatgaccgactctcccgatggcccaccgctctttcggcctgtgcccttgcggccgtttgccctcaatttccgagaaccaacaccgcccgaagaggattcgctcccgcagacccctctgaacgaacccttcttaaacctcgatcacataaactccaagctgctagctacgcggggtagacggtcagactcaaccagcataagccgtgcccagtcggccatgaacctcacatcgtccacacttatgggcatctactcgcctacgacctacggtaagtacggggctggagacgacctaaatacgccttggggcactggtgcagagacgcccgcaaagtatttgggtacatatgagccagactatgaaatcctaaaagaacgagcacagcctgcgcggaggcactctgcaacttcgttaccacgaccacaacctctttctacaactgtctctgcagtatatgtcggtgtcagtgccctcttgctctctggcctcggcatgttgtatggcattatggtggccactgtgaaagatagtcgctcgtcgacgacccttcgcgtagagcatttggtgagggcctccaactgcagctgggagtacatggcattctggggcgctgcaggtcttatccttggtagtctacttccgtggttcgacggtctgtgggacagtgctttacaacaagaaagtagtgaaagcgaagcagacgagcagaagccagtctccagtgatgctaacaaggggtctcttgccgacacggactggacgcttccagttagaggcattggcatgttcattgggatcgccttcgcaatccgcaaattacagtgggattcaacaatacaagtctcattgacgcttgcacttgcaaacgcgctcctatggttcctcattgatcggtcctttcccgggctggccgtatcttcggctgtggcaattgcaggatccgcagttcttaccaacttacagccagctatggttccagtgccgaccatgccttcactaggaggtcgctataattcttctgcttatgcagacctaccctcgactatggttctgggtggtctggcgagccaagaaaccatcgctactggcatttggactctcaatgtcctattttgctgctgcgtgtgcttcggcaacattggtcgttggctcgcactcagccgcaaaatcaatgctaagacgcaataaagaagccaaagtgcggctaccggcattgtgctaagatccactggatagggacacgtaatgtctgatgctaggggaaaggatcaagcaaatgtcaaaagctccctggtccggctgccccggcacgttatcaattctttcaccacgaattcaacgactcatgaagtttcaaccaaggttataaaccctatcaatttgtttttgagcattaggctggaggcttgattacgaacaagacggaattggtcccgtcgccgcatccatctcatagcgtcatagggtttgaaaaaggaacggcgtataggcattggcatatgggtggttcatcggaagcaacgggaaggagaggataccaatgacacgaagcattagccttttcatgctcatcttgtcatgtatatatccctctatgtatttcactaattctgtactttacaataagggctctcaacgtcccatatttaccagatgtcaccctttacggacaccgcattcgggggctgaaagtttgaaacatgctgttttcttgcagggatacttttgagactggatgacgtgctgaatcagcagacagaaagtttagaagctgtcaaaaagcactatgtagttcagcgtaaagctctttaggaattccactaaatagcctgtcatacactcgatcttgtctcttgtttctcgatgtcgctcgctaaaagcacgatggggcggccggacgcaaggtgaaaatatagaagacgacgacagcttgcatgtttgaatggcgctaagccggatttcgcgaccgaatactccgttctggggctgcaagatcatgggcaagaacctcagccgcagcgggcgcaacggcgtcagtggtcttttctctttgttttcgccctgtgggattcatagattccgtgttctagctcggaattgctgcaagccataggcaacggtgtcgtttctcgtcttggcgacgatcgactagatcccaggtcaaggcatacacatccatataggattacaaacctacggcggcccctacatacgtcccttcttcctctgtctggtagctcaccgctttctggcgtgagtgaacctaagcttcgcatgcgcaccataacgtacttgagacgtatagcgtcttcttcatatggctattttaggtagggtttgaatcgctattgtttccccaagtttaacagatttggggagcaaatatgagtgacttcaacctcccttttgtcaccattagttcgggttcgaggaatcctatcgacgaaagtggctttagtagtggagattccgcctacggctctagtcttggggacaagacaacttcgcctgctactcatgatataagtcgtgttaactaccatgtaaagcacttatcggaatttgctagagctctagaagattcggcctcgcgtgcatttcccaaccgcggtggttcacagcgctataaggcagttcacgcgctgctactacattgggactctgacgacctattcgtgctaccggagctccaagatctagaatcatgtctgcagcaagacttcaacttcgagacggaacggttcaagatcccgtcggacaatgcacatctcgatttgatgctgaagattggtgctatgatcaaagagcatgagtctagtgacacattattcatcgtgtactatggtggtcatgctagaatcgacgatgctcgtcaaagtacctggtgcgcaactaggaacccaaactctcc

SEQ ID NO: 32594 - DNA, 1443 bp, Muscodor strobelii
  misc_feature: SGI cDNA ID NO. 571235
  misc_feature: Reduced expression when VOC is produced
  misc_feature: Encodes the peptide sequence at SEQ ID NO 32595
atggggaagcggaagagacatgaggttccaagcagcgccgctgcccgtgaacagaccccatccaagaaatctaaacccgcagaagatgtggacgagacaccatccgtaactttccagatcgtcactggttcttacgaccgcgtcttacacggtttgactgctaccgtgtcgtccgacgacaaggttgacttcgccgacacctttctcttcaatgcccacagctccgccatacgctgtctcgccgtctcccccttctctgctcccgagcctggcaagggccagaaggtcatgctggcctctggcagcagcgacgagaggatcaatgtgtacagcatctcagctcatccgcccaaacgcatggagaaagacgccttgtcctctatcgcgccccgcaaaatcctcgagaaccccaaaaacagggagctcggcactctcttgcaccacgaatcttccataacgcagctctctttcccttccagatcaaagctcatctccgccgccgaagactccaccattgccgtcacccgcactagagattggtccttgctgtcgagcatcaaagtgccaataccgaagcctcagagtcgaccgagcggcgacacggctgctctcggcggaacacccgccggcgttaacagctttgccgtccatccgagtgacaaggtcatgatcagcgtcagcaagagtgagaggtgcatgcgtctttggaacctgatgacggctaagaaagctggagtcctgaatttcagccgtgacatgttgcaaaatgctggcgagagcaagtactcgtcaggcgaggccagaaaagtaatctggggcgagacagatggaggcgatgagttttgtgttggcttcgaccgcgatctcattgtcttcggcatggacagcacgccaaggtgcactgtcatgcctgaaccaaagaagaagatacatcaattctgctatgtagccacagactccgcatcggagtccaaattgcttgcagtctcaactgaggacggaaggatactattcttctcaacgcgcgctgcagatctacagactactgcttcaggccagaacgacaaaaccgacatgcttcccgtcgctaaacctgtggcaatacttggaggcaaggaggccggtgttactggtcgcatcaaagacttctcggtgtgcaaagccaagcgcaagggcaaggacgagctgtttattcctgctggaagtagcgacggcaaagtacgacttttcaaattgaccgtcgacgaattggtcgacgcgcaaaaggccaagacattacaaaaagttggtgccctcctcggtacatacgatacacagaaccgagttacttgtatgagcgcatttaagatgataccccggccggaaggagtggaggatagcgaggatgagttggttgatgaactgtcgaatagtgacagtgaagatgaggaagatgcagaataa

SEQ ID NO: 32595 - protein, 480 aa, Muscodor strobelii
  misc_feature: SGI Peptide ID NO. 571235
  misc_feature (64)..(111): Pfam Id: PF00400 Pfam Desc: WD domain, G-beta repeat
  misc_feature (1)..(464): NCBI GI: 256729671 Blast Desc: NECHADRAFT_47038 [Nectria haematococca mpVI 77-13-4]
  misc_feature (1)..(457): NCBI GI: 46122415 Blast Desc: FG05585.1 [Gibberella zeae PH-1]
  misc_feature (1)..(456): NCBI GI: 154303337 Blast Desc: BC1G_09417 [Botryotinia fuckeliana B05.10] gi|150854980|gb|EDN30172.1| BC1G_09417 [Botryotinia fuckeliana B05.10]
  misc_feature (1)..(479): NCBI GI: 261358478 Blast Desc: MAK11 [Verticillium albo-atrum VaMs.102]
  misc_feature (1)..(457): NCBI GI: 156054274 Blast Desc: SS1G_05985 [Sclerotinia sclerotiorum 1980] gi|154703765|gb|EDO03504.1| SS1G_05985 [Sclerotinia sclerotiorum 1980]
  misc_feature (1)..(454): NCBI GI: 39977053 Blast Desc: MGG_06429 [Magnaporthe grisea 70-15] gi|145016156|gb|EDK00646.1| MGG_06429 [Magnaporthe grisea 70-15]
  misc_feature (1)..(464): NCBI GI: 116191687 Blast Desc: CHGG_05561 [Chaetomium globosum CBS 148.51] gi|88181474|gb|EAQ88942.1| CHGG_05561 [Chaetomium globosum CBS 148.51]
  misc_feature (3)..(464): NCBI GI: 85109863 Blast Desc: NCU07864 [Neurospora crassa OR74A] gi|28924777|gb|EAA33889.1| conserved [Neurospora crassa OR74A]
  misc_feature (36)..(456): NCBI GI: 171687104 Blast Desc: protein product [Podospora anserina] gi|170943513|emb|CAP69166.1| protein product [Podospora anserina]
  misc_feature (1)..(476): NCBI GI: 255950066 Blast Desc: Pc22g18970 [Penicillium chrysogenum Wisconsin 54-1255] gi|211592817|emb|CAP99185.1| Pc22g18970 [Penicillium chrysogenum Wisconsin 54-1255]
  misc_feature: Useful for introducing or modulating the production of volatile compounds
MGKRKRHEVPSSAAAREQTPSKKSKPAEDVDETPSVTFQIVTGSYDRVLHGLTATVSSDDKVDFADTFLFNAHSSAIRCLAVSPFSAPEPGKGQKVMLASGSSDERINVYSISAHPPKRMEKDALSSIAPRKILENPKNRELGTLLHHESSITQLSFPSRSKLISAAEDSTIAVTRTRDWSLLSSIKVPIPKPQSRPSGDTAALGGTPAGVNSFAVHPSDKVMISVSKSERCMRLWNLMTAKKAGVLNFSRDMLQNAGESKYSSGEARKVIWGETDGGDEFCVGFDRDLIVFGMDSTPRCTVMPEPKKKIHQFCYVATDSASESKLLAVSTEDGRILFFSTRAADLQTTASGQNDKTDMLPVAKPVAILGGKEAGVTGRIKDFSVCKAKRKGKDELFIPAGSSDGKVRLFKLTVDELVDAQKAKTLQKVGALLGTYDTQNRVTCMSAFKMIPRPEGVEDSEDELVDELSNSDSEDEEDAE

SEQ ID NO: 32596 - DNA, 15157 bp, Muscodor strobelii; identical to SEQ ID NO: 32593
  misc_feature: SGI EST ID NO. CUFF.78745.1
  misc_feature: Variant of the nucleotide sequence at SEQ ID NO 32594

SEQ ID NO: 32597 - DNA, 564 bp, Muscodor strobelii
  misc_feature: SGI cDNA ID NO. 571236
  misc_feature: Encodes the peptide sequence at SEQ ID NO 32598
atggacagcacgccaaggtgcactgtcatgcctgaaccaaagaagaagatacatcaattctgctatgtagccacagactccgcatcggagtccaaattgcttgcagtctcaactgaggacggaaggatactattcttctcaacgcgcgctgcagatctacagactactgcttcaggccagaacgacaaaaccgacatgcttcccgtcgctaaacctgtggcaatacttggaggcaaggaggccggtgttactggtcgcatcaaagacttctcggtgtgcaaagccaagcgcaagggcaaggacgagctgtttattcctgctggaagtagcgacggcaaagtacgacttttcaaattgaccgtcgacgaattggtcgacgcgcaaaaggccaagacattacaaaaagttggtgccctcctcggtacatacgatacacagaaccgagttacttgtatgagcgcatttaagatgataccccggccggaaggagtggaggatagcgaggatgagttggttgatgaactgtcgaatagtgacagtgaagatgaggaagatgcagaataa

SEQ ID NO: 32598 - protein, 187 aa, Muscodor strobelii
  misc_feature: SGI Peptide ID NO. 571236
  misc_feature (1)..(186): NCBI GI: 261358478 Blast Desc: MAK11 [Verticillium albo-atrum VaMs.102]
  misc_feature (1)..(164): NCBI GI: 46122415 Blast Desc: FG05585.1 [Gibberella zeae PH-1]
  misc_feature (1)..(171): NCBI GI: 256729671 Blast Desc: NECHADRAFT_47038 [Nectria haematococca mpVI 77-13-4]
  misc_feature (1)..(171): NCBI GI: 116191687 Blast Desc: CHGG_05561 [Chaetomium globosum CBS 148.51] gi|88181474|gb|EAQ88942.1| CHGG_05561 [Chaetomium globosum CBS 148.51]
  misc_feature (1)..(163): NCBI GI: 154303337 Blast Desc: BC1G_09417 [Botryotinia fuckeliana B05.10] gi|150854980|gb|EDN30172.1| BC1G_09417 [Botryotinia fuckeliana B05.10]
  misc_feature (1)..(164): NCBI GI: 156054274 Blast Desc: SS1G_05985 [Sclerotinia sclerotiorum 1980] gi|154703765|gb|EDO03504.1| SS1G_05985 [Sclerotinia sclerotiorum 1980]
  misc_feature (1)..(161): NCBI GI: 39977053 Blast Desc: MGG_06429 [Magnaporthe grisea 70-15] gi|145016156|gb|EDK00646.1| MGG_06429 [Magnaporthe grisea 70-15]
  misc_feature (1)..(171): NCBI GI: 85109863 Blast Desc: NCU07864 [Neurospora crassa OR74A] gi|28924777|gb|EAA33889.1| conserved [Neurospora crassa OR74A]
  misc_feature (1)..(183): NCBI GI: 255950066 Blast Desc: Pc22g18970 [Penicillium chrysogenum Wisconsin 54-1255] gi|211592817|emb|CAP99185.1| Pc22g18970 [Penicillium chrysogenum Wisconsin 54-1255]
  misc_feature (1)..(163): NCBI GI: 171687104 Blast Desc: protein product [Podospora anserina] gi|170943513|emb|CAP69166.1| protein product [Podospora anserina]
MDSTPRCTVMPEPKKKIHQFCYVATDSASESKLLAVSTEDGRILFFSTRAADLQTTASGQNDKTDMLPVAKPVAILGGKEAGVTGRIKDFSVCKAKRKGKDELFIPAGSSDGKVRLFKLTVDELVDAQKAKTLQKVGALLGTYDTQNRVTCMSAFKMIPRPEGVEDSEDELVDELSNSDSEDEEDAE

SEQ ID NO: 32599 - DNA, 15157 bp, Muscodor strobelii; identical to SEQ ID NO: 32593
  misc_feature: SGI EST ID NO. CUFF.78745.1
  misc_feature: Variant of the nucleotide sequence at SEQ ID NO 32597

SEQ ID NO: 32600 - DNA, 1188 bp, Muscodor strobelii
  misc_feature: SGI cDNA ID NO. 571237
  misc_feature: Reduced expression when VOC is produced
  misc_feature: Encodes the peptide sequence at SEQ ID NO 32601
atgaccgactctcccgatggcccaccgctctttcggcctgtgcccttgcggccgtttgccctcaatttccgagaaccaacaccgcccgaagaggattcgctcccgcagacccctctgaacgaacccttcttaaacctcgatcacataaactccaagctgctagctacgcggggtagacggtcagactcaaccagcataagccgtgcccagtcggccatgaacctcacatcgtccacacttatgggcatctactcgcctacgacctacggtaagtacggggctggagacgacctaaatacgccttggggcactggtgcagagacgcccgcaaagtatttgggtacatatgagccagactatgaaatcctaaaagaacgagcacagcctgcgcggaggcactctgcaacttcgttaccacgaccacaacctctttctacaactgtctctgcagtatatgtcggtgtcagtgccctcttgctctctggcctcggcatgttgtatggcattatggtggccactgtgaaagatagtcgctcgtcgacgacccttcgcgtagagcatttggtgagggcctccaactgcagctgggagtacatggcattctggggcgctgcaggtcttatccttggtagtctacttccgtggttcgacggtctgtgggacagtgctttacaacaagaaagtagtgaaagcgaagcagacgagcagaagccagtctccagtgatgctaacaaggggtctcttgccgacacggactggacgcttccagttagaggcattggcatgttcattgggatcgccttcgcaatccgcaaattacagtgggattcaacaatacaagtctcattgacgcttgcacttgcaaacgcgctcctatggttcctcattgatcggtcctttcccgggctggccgtatcttcggctgtggcaattgcaggatccgcagttcttaccaacttacagccagctatggttccagtgccgaccatgccttcactaggaggtcgctataattcttctgcttatgcagacctaccctcgactatggttctgggtggtctggcgagccaagaaaccatcgctactggcatttggactctcaatgtcctattttgctgctgcgtgtgcttcggcaacattggtcgttggctcgcactcagccgcaaaatcaatgctaagacgcaataa

SEQ ID NO: 32601 - protein, 395 aa, Muscodor strobelii
  misc_feature: SGI Peptide ID NO. 571237
  misc_feature (6)..(393): NCBI GI: 46122413 Blast Desc: FG05584.1 [Gibberella zeae PH-1]
  misc_feature (6)..(395): NCBI GI: 256729672 Blast Desc: NECHADRAFT_83729 [Nectria haematococca mpVI 77-13-4]
  misc_feature (7)..(387): NCBI GI: 116191689 Blast Desc: CHGG_05562 [Chaetomium globosum CBS 148.51] gi|88181475|gb|EAQ88943.1| CHGG_05562 [Chaetomium globosum CBS 148.51]
  misc_feature (1)..(393): NCBI GI: 171687102 Blast Desc: protein product [Podospora anserina] gi|170943512|emb|CAP69165.1| protein product [Podospora anserina]
  misc_feature (17)..(386): NCBI GI: 226282245 Blast Desc: INSIG domain-containing protein [Paracoccidioides brasiliensis Pb01]
  misc_feature (31)..(390): NCBI GI: 255950090 Blast Desc: Pc22g19090 [Penicillium chrysogenum Wisconsin 54-1255] gi|211592829|emb|CAP99197.1| Pc22g19090 [Penicillium chrysogenum Wisconsin 54-1255]
  misc_feature (8)..(386): NCBI GI: 226292594 Blast Desc: INSIG domain-containing protein [Paracoccidioides brasiliensis Pb18]
  misc_feature (8)..(387): NCBI GI: 156054270 Blast Desc: SS1G_05983 [Sclerotinia sclerotiorum 1980] gi|154703763|gb|EDO03502.1| SS1G_05983 [Sclerotinia sclerotiorum 1980]
  misc_feature (6)..(386): NCBI GI: 145256958 Blast Desc: An04g02050 [Aspergillus niger] gi|134058483|emb|CAL00692.1| protein product [Aspergillus niger]
  misc_feature (6)..(386): NCBI GI: 121706884 Blast Desc: INSIG domain protein [Aspergillus clavatus NRRL 1] gi|119399809|gb|EAW10235.1| INSIG domain protein [Aspergillus clavatus NRRL 1]
  misc_feature: Useful for introducing or modulating the production of volatile compounds
MTDSPDGPPLFRPVPLRPFALNFREPTPPEEDSLPQTPLNEPFLNLDHINSKLLATRGRRSDSTSISRAQSAMNLTSSTLMGIYSPTTYGKYGAGDDLNTPWGTGAETPAKYLGTYEPDYEILKERAQPARRHSATSLPRPQPLSTTVSAVYVGVSALLLSGLGMLYGIMVATVKDSRSSTTLRVEHLVRASNCSWEYMAFWGAAGLILGSLLPWFDGLWDSALQQESSESEADEQKPVSSDANKGSLADTDWTLPVRGIGMFIGIAFAIRKLQWDSTIQVSLTLALANALLWFLIDRSFPGLAVSSAVAIAGSAVLTNLQPAMVPVPTMPSLGGRYNSSAYADLPSTMVLGGLASQETIATGIWTLNVLFCCCVCFGNIGRWLALSRKINAKTQ

SEQ ID NO: 32602 - DNA, 15157 bp, Muscodor strobelii; identical to SEQ ID NO: 32593
  misc_feature: SGI EST ID NO. CUFF.78745.1
  misc_feature: Variant of the nucleotide sequence at SEQ ID NO 32600

SEQ ID NO: 32603 - DNA, 2850 bp, Muscodor strobelii
  misc_feature: SGI cDNA ID NO. 571238
  misc_feature: Encodes the peptide sequence at SEQ ID NO 32604
atgagtgacttcaacctcccttttgtcaccattagttcgggttcgaggaatcctatcgacgaaagtggctttagtagtggagattccgcctacggctctagtcttggggacaagacaacttcgcctgctactcatgatataagtcgtgttaactaccatgtaaagcacttatcggaatttgctagagctctagaagattcggcctcgcgtgcatttcccaaccgcggtggttcacagcgctataaggcagttcacgcgctgctactacattgggactctgacgacctattcgtgctaccggagctccaagatctagaatcatgtctgcagcaagacttcaacttcgagacggaacggttcaagatcccgtcggacaatgcacatctcgatttgatgctgaagattggtgctatgatcaaagagcatgagtctagtgacacattattcatcgtgtactatggtggtcatgctagaatcgacgatgctcgtcaaagtacctggtgcgcatggtcggctattcaaacgcttttggagagaagtctgagcgatactctgatcttacttgattgttgctctggggctgctagcgctgcgtttcctaacgggaatagtattacggaaactatatccgcgtcgagctgggatgccattgcaccggagcctggaaggttctcatttacgtcaacgcttatcgaagtgctccaggaatggaccaggaaaacattctctgctgccatgctacacgctgagatcctcgcacgtctcaagcatccccggcccgagaggcgcaatgggagcaacgttgaagccagaacgacaccagtacacttcatgatgacagccaatcacagagccccatctatcgagctctgcaaaatagcccctgcgtatacatcgccgtccctcccattttttcctacagaccctggacaaaccggaactgcagaaggacgctctagttcccaagacatcgtcggctccgagccaactcaagacactccccatgtcatgatttctcttgcgctggaaggagatcagaacttgaaccttgatgaatgggagcgctggcttgctaatacaccgggtatagccaagtatgtccaagttcaaggaattttcaagagtcattcgactcttttactgctatccctgccagtgatggtatgggatatgctcccagatgacatggcctgtaactttatagcattcattcgatcaaacaatctggcgtcagaagcaaattggaagctgccactaagttctgttgatacttcgttaggtactacggacctagagtcagatcgagagtcggtgtacaccgagtattcagggacaactgctttcacaactgaacatctagaaccattatctgtttcgaattggtctactatggacccaatccaagaatatacacaaaagccaccagccaagcattggccgcccatgccagctgatcactcagagccaacgcgaccccagggagacaggaacgtggacaaatgggtcggttcgccctctcctttatctgacacgacggactttgcttcgaaacctggccttgaaagaagaatgtcaaatttagatttatttttgcggccaccggatcttgcagctcgtactcgctcttcacgaccgctgtccattggatcaagcgataaggccacgaaacgacgatctcttccccctcatgttcagaaacgtttggaagagttgtttctcagtaacccgttccccacagtatccgttacagagtttctcgcatcaaccttcaacattgagactgcagatatcaataactggtttcgacaacgtcgcgaacagcaggaggtatccaataagctgcaaagcttgcgaatggatgaccagagccgcacgtctcccgcaaatgatggtgcccgtatgatcttggctggacacctcaacaagctacttgagatgtttcccacaggtcaaatcgtgatcatcgacctacgctcacgaggcgattaccaacggtcacatattcacggcgcaatcaactttcgagctccagcatcctttgtctcgagggcgtcgctagagatgattgagaaggcattacttgatgatgctagtcgcagctcttttaataaatggtacacgagcaagtgtgttgttttctacgacaagtgcgtcgaatatccctgggaagctcctgtggccgaggctttcttccagaaattcaagagtaaagattggacaggtcattgttttgtattaaagggacactatcgcgaattctcacagtcttttgacaagtacattgtaggcaccgctactacagataacgccacggaatacctagccagcctacaggacgtgtcatgggagaagagtaaagatgaccatcaacggtatgactcatggctcgcgctcttggatggcgaagatagagtgcacaccaccgaactagcaccagcagtgaaaactgagcgcttgcaagccacagtcgcccagcagaaatcactagaggccgaatttgagcgttcattcccataccttgctagggaagctatgaatcgcaagccagacaataactggtctgtcaaagcgcctatgattgcgcacctcgagcgcggattagcaaagatgcagcatgaaatcgtacagtcacgcgccgggggcgagaaatatgatacacagcccgagaagctgaagaattacgataattggaaaagagtcgcgctttcttcagcaccggcacatgagcgctcccttacagcatactgtccacaaatcctcgtcgaattcgacattaaaggcatcggacgacttgcctccaagctcggtacccctggaccgaagagggaggtcctcgtccagcggtggtaa

SEQ ID NO: 32604 - protein, 949 aa, Muscodor strobelii
  misc_feature: SGI Peptide ID NO. 571238
  misc_feature (8)..(849): NCBI GI: 116208088 Blast Desc: CHGG_03337 [Chaetomium globosum CBS 148.51] gi|88183934|gb|EAQ91402.1| CHGG_03337 [Chaetomium globosum CBS 148.51]
  misc_feature (67)..(901): NCBI GI: 46122199 Blast Desc: FG05477.1 [Gibberella zeae PH-1]
  misc_feature (67)..(871): NCBI GI: 256729718 Blast Desc: [Nectria haematococca mpVI 77-13-4]
  misc_feature (31)..(375): NCBI GI: 171686520 Blast Desc: protein product [Podospora anserina] gi|170943221|emb|CAP68874.1| protein product [Podospora anserina]
  misc_feature (93)..(409): NCBI GI: 145608892 Blast Desc: MGG_06285 [Magnaporthe grisea 70-15] gi|145016318|gb|EDK00808.1| MGG_06285 [Magnaporthe grisea 70-15]
  misc_feature (24)..(365): NCBI GI: 164428836 Blast Desc: NCU00100 [Neurospora crassa OR74A] gi|157072302|gb|EAA27988.2| conserved [Neurospora crassa OR74A]
  misc_feature (43)..(411): NCBI GI: 46109974 Blast Desc: FG01869.1 [Gibberella zeae PH-1]
  misc_feature (41)..(410): NCBI GI: 256728495 Blast Desc: NECHADRAFT_50976 [Nectria haematococca mpVI 77-13-4]
  misc_feature (563)..(873): NCBI GI: 145608892 Blast Desc: MGG_06285 [Magnaporthe grisea 70-15] gi|145016318|gb|EDK00808.1| MGG_06285 [Magnaporthe grisea 70-15]
  misc_feature (578)..(845): NCBI GI: 171686518 Blast Desc: protein product [Podospora anserina] gi|170943220|emb|CAP68873.1| protein product [Podospora anserina]
MSDFNLPFVTISSGSRNPIDESGFSSGDSAYGSSLGDKTTSPATHDISRVNYHVKHLSEFARALEDSASRAFPNRGGSQRYKAVHALLLHWDSDDLFVLPELQDLESCLQQDFNFETERFKIPSDNAHLDLMLKIGAMIKEHESSDTLFIVYYGGHARIDDARQSTWCAWSAIQTLLERSLSDTLILLDCCSGAASAAFPNGNSITETISASSWDAIAPEPGRFSFTSTLIEVLQEWTRKTFSAAMLHAEILARLKHPRPERRNGSNVEARTTPVHFMMTANHRAPSIELCKIAPAYTSPSLPFFPTDPGQTGTAEGRSSSQDIVGSEPTQDTPHVMISLALEGDQNLNLDEWERWLANTPGIAKYVQVQGIFKSHSTLLLLSLPVMVWDMLPDDMACNFIAFIRSNNLASEANWKLPLSSVDTSLGTTDLESDRESVYTEYSGTTAFTTEHLEPLSVSNWSTMDPIQEYTQKPPAKHWPPMPADHSEPTRPQGDRNVDKWVGSPSPLSDTTDFASKPGLERRMSNLDLFLRPPDLAARTRSSRPLSIGSSDKATKRRSLPPHVQKRLEELFLSNPFPTVSVTEFLASTFNIETADINNWFRQRREQQEVSNKLQSLRMDDQSRTSPANDGARMILAGHLNKLLEMFPTGQIVIIDLRSRGDYQRSHIHGAINFRAPASFVSRASLEMIEKALLDDASRSSFNKWYTSKCVVFYDKCVEYPWEAPVAEAFFQKFKSKDWTGHCFVLKGHYREFSQSFDKYIVGTATTDNATEYLASLQDVSWEKSKDDHQRYDSWLALLDGEDRVHTTELAPAVKTERLQATVAQQKSLEAEFERSFPYLAREAMNRKPDNNWSVKAPMIAHLERGLAKMQHEIVQSRAGGEKYDTQPEKLKNYDNWKRVALSSAPAHERSLTAYCPQILVEFDIKGIGRLASKLGTPGPKREVLVQRW

SEQ ID NO: 32605 - DNA, 3323 bp, Muscodor strobelii
  misc_feature: SGI EST ID NO. CUFF.78770.0
  misc_feature: Variant of the nucleotide sequence at SEQ ID NO 32603
tttaaacataacagatggtcggctattcaaacgcttttggagagaagtctgagcgatactctgatcttacttgattgttgctctggggctgctagcgctgcgtttcctaacgggaatagtattacggaaactatatccgcgtcgagctgggatgccattgcaccggagcctggaaggttctcatttacgtcaacgcttatcgaagtgctccaggaatggaccaggaaaacattctctgctgccatgctacacgctgagatcctcgcacgtctcaagcatccccggcccgagaggcgcaatgggagcaacgttgaagccagaacgacaccagtacacttcatgatgacagccaatcacagagccccatctatcgagctctgcaaaatagcccctgcgtatacatcgccgtccctcccattttttcctacagaccctggacaaaccggaactgcagaaggacgctctagttcccaagacatcgtcggctccgagccaactcaagacactccccatgtcatgatttctcttgcgctggaaggagatcagaacttgaaccttgatgaatgggagcgctggcttgctaatacaccgggtatagccaagtatgtccaagttcaaggaattttcaagagtcattcgactcttttactgctatccctgccagtgatggtatgggatatgctcccagatgacatggcctgtaactttatagcattcattcgatcaaacaatctggcgtcagaagcaaattggaagctgccactaagttctgttgatacttcgttaggtactacggacctagagtcagatcgagagtcggtgtacaccgagtattcagggacaactgctttcacaactgaacatctagaaccattatctgtttcgaattggtctactatggacccaatccaagaatatacacaaaagccaccagccaagcattggccgcccatgccagctgatcactcagagccaacgcgaccccagggagacaggaacgtggacaaatgggtcggttcgccctctcctttatctgacacgacggactttgcttcgaaacctggccttgaaagaagaatgtcaaatttagatttatttttgcggccaccggatcttgcagctcgtactcgctcttcacgaccgctgtccattggatcaagcgataaggccacgaaacgacgatctcttccccctcatgttcagaaacgtttggaagagttgtttctcagtaacccgttccccacagtatccgttacagagtttctcgcatcaaccttcaacattgagactgcagatatcaataactggtttcgacaacgtcgcgaacagcaggaggtatccaataagctgcaaagcttgcgaatggatgaccagagccgcacgtctcccgcaaatgatggtgcccgtatgatcttggctggacacctcaacaagctacttgagatgtttcccacaggtcaaatcgtgatcatcgacctacgctcacgaggcgattaccaacggtcacatattcacggcgcaatcaactttcgagctccagcatcctttgtctcgagggcgtcgctagagatgattgagaaggcattacttgatgatgctagtcgcagctcttttaataaatggtacacgagcaagtgtgttgttttctacgacaagtgcgtcgaatatccctgggaagctcctgtggccgaggctttcttccagaaattcaagagtaaagattggacaggtcattgttttgtattaaagggacactatcgcgaattctcacagtcttttgacaagtacattgtaggcaccgctactacagataacgccacggaatacctagccagcctacaggacgtgtcatgggagaagagtaaagatgaccatcaacggtatgactcatggctcgcgctcttggatggcgaagatagagtgcacaccaccgaactagcaccagcagtgaaaactgagcgcttgcaagccacagtcgcccagcagaaatcactagaggccgaatttgagcgttcattcccataccttgctagggaagctatgaatcgcaagccagacaataactggtctgtcaaagcgcctatgattgcgcacctcgagcgcggattagcaaagatgcagcatgaaatcgtacagtcacgcgccgggggcgagaaatatgatacacagcccgagaagctgaagaattacgataattggaagtcagttgaccataagcaatacccctttcccgagatagagaaagatataagattcgctccaacttcaccagaagagtcgcgctttcttcagcaccggcacatgagcgctcccttacagcatactgtccacaaatcctcgtcgaattcgacattaaaggcatcggacgacttgcctccaagctcggtacccctggaccgaagagggaggtcctcgtccagcggtggtaaaaacttgttcacgcggatcatacgaagtggacgagctgatgggcctggatagtttgtatgatatgtcgccctactagatctagcatacgaggcacagactccagagagcgcgtatacattttctagcgccaagacttatgatggaatgatttgtctacgaaagttcatgcatgatctactctatgggcggaaaagaaatgtgaagaagacctcaatctggtagaacgggacaagtaggattcatcctcagctacggaaaggagcaatcaagtaatgacgtcggaatctctgtcttttgaatagaggaatagaacggatacgaatagctctttgagtcacgatcttcacaacagtacggtcttccttttctctggggattttcttctctgcccattgaaactacctaaacaataagaaaactacatttcctatttttacgacatggaagagcaaacaatagaaacgatacaacaaaacccttgattttacacatgacattaacattttctatcttgcgctggcgttaacatttgtgtttactgtcgacggcccgagtttccgagttctacgttccgagtatcgtagtttacccaggatcagtcgtcatgaatcagatactgtgcaaagtagattcgacctaagctacgaagtcctaatgacccaactggaacttgacatttctgtaattaaggaatattgagcgagcttgcttttagttagactgaagcattgccatcattgcactaaacgcgtaaggacaacaactagcgtgtaccttgcgtgctcgtcgcatcaccgggtgctagccgcggagctaatggtgacaacttacccgtcataagacttagccttgttcaagcgtctatctcttacattaaatgccgccgatgtctt

SEQ ID NO: 32606 - DNA, 1248 bp, Muscodor strobelii
  misc_feature: SGI cDNA ID NO. 571239
  misc_feature: Reduced expression when VOC is produced
  misc_feature: Encodes the peptide sequence at SEQ ID NO 32607
atgtctatcctaaccatgtctccttaccaccaccatcaacgacaccccgaatttcgtcaagagcttccatggctggatcaccgccctgagcccgtgctccgacttcgaaacgaaccagaaaggattgctctcccttctattcgacaagcttttccagaacttcagctcgatgttcagagagatgctacggcaagaacgccaccctccgcggtgtcgccagcgggagggcagtttcacaaggcccttacgtctccagattatgttcattctcctggccagaggaagcgccgccgctcatctctagatcaggacgaagaaccaaatagaatcaaccaaatcccgagactttgcgcaagtccacaacgaagtgttatgtctcaaccgcaatctccagctcggccaacctcatctgccttcacgtcttggtccagctcgaagcgcacaagcccctatttggggcatggcatacttccatctatgagctctcccatggacctcgaaacgcacgaacgagtagaagctcgacccagactcccaagcctcctactgaatctagagcaccatactagtgactcacgtcgtgtccatacccaggcagcagaggagtacttccccgagccagccagacgagtagagctaggtcccaatggccataatgggcctgatgctactataccagggcaccgagcagtaaacctcgcctacacctatcaccatccaaaccgcatgcaatcgctctcagttgggtccgtccatccgcttgatcggaccccgttttcgtctaatccgtatggttcccaagctcatgacacctttatgcgcgtcggcgaatttgggatcgggatgaatggagatggcaagcaacggaagcggcgtggcaatctgcccaaagagactacagacaaacttcgtacctggtttgtagctcacctacatcatccatatccgacggaggatgagaagcaggaactcatgagacaaacaggcttgcagatgaaccaaatctcgaattggttcattaatgctaggagacggcagttgcctaccatgatcaacaatgcgcgtgctgaatcgaatgcaatgaatggtcggacaggggagaagctccttccttcaccgccggacgaaatcgacttcgaacatgagagaaaacagcggagtgatagtgaagggagcagctgcgacgaagtggaaagtcaatcaactaggttacgccgaccgaccaacttcaaacgcggcagcatctga

SEQ ID NO: 32607 - protein, 415 aa, Muscodor strobelii
  misc_feature: SGI Peptide ID NO. 571239
  misc_feature (289)..(348): Pfam Id: PF00046 Pfam Desc: Homeobox domain
  misc_feature (1)..(415): NCBI GI: 256729719 Blast Desc: NECHADRAFT_47076 [Nectria haematococca mpVI 77-13-4]
  misc_feature (3)..(415): NCBI GI: 46122195 Blast Desc: FG05475.1 [Gibberella zeae PH-1]
  misc_feature (51)..(415): NCBI GI: 171686576 Blast Desc: protein product [Podospora anserina] gi|170943249|emb|CAP68902.1| protein product [Podospora anserina]
  misc_feature (15)..(415): NCBI GI: 67005921 Blast Desc: Pth12p [Magnaporthe grisea]
  misc_feature (15)..(415): NCBI GI: 189086522 Blast Desc: Apf2p [Magnaporthe grisea]
  misc_feature (14)..(306): NCBI GI: 261358257 Blast Desc: Pth12p [Verticillium albo-atrum VaMs.102]
  misc_feature (284)..(360): NCBI GI: 154289869 Blast Desc: BC1G_15930 [Botryotinia fuckeliana B05.10] gi|150848738|gb|EDN23931.1| BC1G_15930 [Botryotinia fuckeliana B05.10]
  misc_feature (285)..(360): NCBI GI: 156047900 Blast Desc: SS1G_08681 [Sclerotinia sclerotiorum 1980] gi|154693078|gb|EDN92816.1| SS1G_08681 [Sclerotinia sclerotiorum 1980]
  misc_feature (285)..(371): NCBI GI: 240273850 Blast Desc: conserved [Ajellomyces capsulatus H143]
  misc_feature (265)..(356): NCBI GI: 258569963 Blast Desc: [Uncinocarpus reesii 1704] gi|237904055|gb|EEP78456.1| [Uncinocarpus reesii 1704]
  misc_feature: Useful for introducing or modulating the production of volatile compounds
MSILTMSPYHHHQRHPEFRQELPWLDHRPEPVLRLRNEPERIALPSIRQAFPELQLDVQRDATARTPPSAVSPAGGQFHKALTSPDYVHSPGQRKRRRSSLDQDEEPNRINQIPRLCASPQRSVMSQPQSPARPTSSAFTSWSSSKRTSPYLGHGILPSMSSPMDLETHERVEARPRLPSLLLNLEHHTSDSRRVHTQAAEEYFPEPARRVELGPNGHNGPDATIPGHRAVNLAYTYHHPNRMQSLSVGSVHPLDRTPFSSNPYGSQAHDTFMRVGEFGIGMNGDGKQRKRRGNLPKETTDKLRTWFVAHLHHPYPTEDEKQELMRQTGLQMNQISNWFINARRRQLPTMINNARAESNAMNGRTGEKLLPSPPDEIDFEHERKQRSDSEGSSCDEVESQSTRLRRPTNFKRGSI

SEQ ID NO: 32608 - DNA, 2659 bp, Muscodor strobelii
  misc_feature: SGI EST ID NO. CUFF.77054.0
  misc_feature: Variant of the nucleotide sequence at SEQ ID NO 32606
gtctgagtccatcgaaaccgtctctccacaccttgaaaggcagtcttaataacctcaacattgaaaagcggtccctagccatctttaactatactaggtgtcactctatctagagaacgctttgtcttcttttcatttttgtaaatacttcgaaaaaatacgaccttttcacccgcgatttcttaatcgaacggttgaaaatcactgttcctcaacttgaacctcctcgagcatacatcctcgttttgaaggctatcgctcaactacaacgttgcccttcacatacccactggcatttgggatcaacacagccacttgtggtcttttacttcgtttcttcttgggccattcctttctgtgtttcgatatcgttctcgtcagcctcgggagactattcttgtcgtcaaggctgcgttggtccaaagcaatacaaaaatcgcaaccagctgttcttatccgctttaggctctgccaaatttgaaagggaaagattactgtgttgccttctgaatattgttgaaattgtgagactcaagattcaagaacgatacagggaccgacctctactctcgttgaaccccttttgttttgcggaatcactccgttagcgctttcgaatctatcaaaatagccacctttagcgttgtctccccacggtacggtgcggcaaacgtactctacgcataaggatatctttgttggtcaagtcaactacttgttgatacgctccaggatcaaccttgaattactctccatccatatccggagagtggacgtcaaagaatttcattttgacatgctatgaaagtcgatctctttgcaacccacggcagagacatctcggagtaacaattaagaaaaaactaccaagatgtctatcctaaccatgtctccttaccaccaccatcaacgacaccccgaatttcgtcaagagcttccatggctggatcaccgccctgagcccgtgctccgacttcgaaacgaaccagaaaggattgctctcccttctattcgacaagcttttccagaacttcagctcgatgttcagagagatgctacggcaagaacgccaccctccgcggtgtcgccagcgggagggcagtttcacaaggcccttacgtctccagattatgttcattctcctggccagaggaagcgccgccgctcatctctagatcaggacgaagaaccaaatagaatcaaccaaatcccgagactttgcgcaagtccacaacgaagtgttatgtctcaaccgcaatctccagctcggccaacctcatctgccttcacgtcttggtccagctcgaagcgcacaagcccctatttggggcatggcatacttccatctatgagctctcccatggacctcgaaacgcacgaacgagtagaagctcgacccagactcccaagcctcctactgaatctagagcaccatactagtgactcacgtcgtgtccatacccaggcagcagaggagtacttccccgagccagccagacgagtagagctaggtcccaatggccataatgggcctgatgctactataccagggcaccgagcagtaaacctcgcctacacctatcaccatccaaaccgcatgcaatcgctctcagttgggtccgtccatccgcttgatcggaccccgttttcgtctaatccgtatggttcccaagctcatgacacctttatgcgcgtcggcgaatttgggatcgggatgaatggagatggcaagcaacggaagcggcgtggcaatctgcccaaagagactacagacaaacttcgtacctggtttgtagctcacctacatcatccatatccgacggaggatgagaagcaggaactcatgagacaaacaggcttgcagatgaaccaaatctcgaattggttcattaatgctaggagacggcagttgcctaccatgatcaacaatgcgcgtgctgaatcgaatgcaatgaatggtcggacaggggagaagctccttccttcaccgccggacgaaatcgacttcgaacatgagagaaaacagcggagtgatagtgaagggagcagctgcgacgaagtggaaagtcaatcaactaggttacgccgaccgaccaacttcaaacgcggcagcatctgacaatccaaaaagcgggttttccggactatggttttacgacattgaaatttctagcgatttgttatttgatgaaaagaatatggtatgattatgtgggctacatctggcctacgacaaaggccaaagactggcatgaacatcaattcgatatctaacttgggcgatgtcgcgaatgtatctgccttcgagcatttttagtagctgtttgcctgacgggctagcccctaaattttgggtgaggccgtggtattgtgcacctcccatgccaggtgtgtcaaatctagagcggcgaccactagaagatgagttgttactactagcagaattattcttgtacattactaccttaggtacccgaaatattacagctgcgaagctgcacaatgggcccccatgattccttggctcaaaattgtgtgccactctggcatagtttgcccccagctcctcaagtctgagactatggatcagttcgattgcaactaaacatacgttaggttctactttgggaataatagagaccatgcacgaaatgagttc

SEQ ID NO: 32609 - DNA, 2361 bp, Muscodor strobelii
  misc_feature: SGI cDNA ID NO. 571240
  misc_feature: Encodes the peptide sequence at SEQ ID NO 32610
atgcctggagatgaggccaccatagaggatggttcttccacttcgagcgctcatcccggaactggagaatcattatcttgtgtatcctgccgcgcccgaaagcttaaatgtgatcgagttaaaccgatctgcacgcgttgtgctaaggcagatggcgactgtatctaccctgagtcacgaaggaaaccggccttcaaacgaaggaacgtcaaagaactagaagagcgcttagctcaggtcgaagttcttctccagcgaggcggcgaaagcatgcctgccactcgcaatgccccccttgagaccgaggagaatattatgaggacagctatcgactttgatataccggtgtcagaaactgtcttcttccaggggattgactatggcacaaatatgctcgaaactgacacatttcctttccacccagacatgacagaagagttaccgcaactatctactggccaacctgcacctgacccaatgggtactgcgttcagtaaagaactaatggatcttggcggaattacagaatctcttccgcctttcgaagtcatggaggatcttaatcgtctttttttccaaagacagcagcaatttgcacccatcatccaccctgccagatatcttcactctttctattcggctcctcatatgaaacccccgatgtgtgtggaaggaaaaggagctgacgccaagcgctatcctcttccagatttcatcacggttgcccacgcacaagcatggttttgtatcgccacagacgaagccagatcgatgctcttcacgcgagctgcgatgagctgtgctcgagcggtgagacttgtacagatgatgggcctacaccaactcgatagccctccaacggagtccagtccgactttagcgccgccaagggattgggtcgaactcgaagagcgtcgaagaatcttttggggtatattctgcattgatagccattgttcgatctcgacaggatggccgcatttgattgatgccgccaatgttacaacacatcttccctctagcgaatctgcatttcacaacggagagccaatggagacatgcaccatacatgacgtattcaatggacattcctatacttcgtttgcaggagctgctatcatttgtcacttgttcaacatgatcctaaagcatgttcaccgaccgaagccaggcgataatcctgaaaattatgaatacggcgagtactggaaactacgttattgttcagccgcccgagccgagaatattatgcttgaagtgctgatccccttatttggatcattagtcatcagtgcggccctcgaaaagattgagactcataatctacccgagtccgctaagaagagttgtcaggaccgactgatctccgctgctcaggaaatcatcaatatcatgaagctcacgagtcacgtcggtgctcatccaaaaactccactggctgcattgtctctgtattgtaaagagagtcaggcgccaagctacgtggacaaccttaatttcatcctgtctgctatggcggccatcggtcgaacgcacaatctcactcgctcattcttacgccaagccctcctggatgttgaattcaatgatctccgaagcactatctcgattagtcaatggagcatcgacgctaactttgcacagtatgtgagccctattactcaatggaacgtggcgcatcgaatgagaagaatccaaactcgaaatgcgaagacttatgctcaccggtcagatgacaaaaccttaaaagacctaggatcaggtctttcccatactattcctctattggcgagaagtcgagttaccagacattctggggctcagcctcccttacccggacgcttacctttaggcaaaccaattggcaatatcattccagacgaaccgccgaaatcaacagctcattggagcttcgttccaacacataatccgaaaccctcacctgctactggtagcgatttacacttgaacaagcgaagacgcggtgaaaccgaaaccacgggaagctacactcgatacgatccttccttgtgggattcctctgcaactcattcgtcacattcgcctcagcaagatgatccgaatttttcaacccgtgagaccggcagcagtattgagcccaatcttcttggtaatgggggcccaaaatctttcccagcagtcaccagaggaccagtcccgcattcgcttcgaaaggaagtaatggcaagctggaatcttgccggcgtaggcatgggtgcacctgcgcagggtcagagccaccacgaatcgtttggagagttcggatttgctagtccagatgatcctaacattgactggtcttcttttgagcctcctggaaatggagacagtggagattga

SEQ ID NO: 32610 - protein, 786 aa, Muscodor strobelii
  misc_feature: SGI Peptide ID NO. 571240
  misc_feature (25)..(63): Pfam Id: PF00172 Pfam Desc: Fungal Zn(2)-Cys(6) binuclear cluster domain
  misc_feature (240)..(342): Pfam Id: PF04082 Pfam Desc: Fungal specific transcription factor domain
  misc_feature (267)..(342): Pfam Id: PF04082 Pfam Desc: Fungal specific transcription factor domain
  misc_feature (23)..(619): NCBI GI: 261358259 Blast Desc: binuclear zinc transcription factor [Verticillium albo-atrum VaMs.102]
  misc_feature (1)..(605): NCBI GI: 256729720 Blast Desc: NECHADRAFT_71135 [Nectria haematococca mpVI 77-13-4]
  misc_feature (23)..(637): NCBI GI: 164428941 Blast Desc: NCU00217 [Neurospora crassa OR74A] gi|157072344|gb|EAA27366.2| [Neurospora crassa OR74A]
  misc_feature (11)..(622): NCBI GI: 145608900 Blast Desc: MGG_06279 [Magnaporthe grisea 70-15] gi|145016323|gb|EDK00813.1| MGG_06279 [Magnaporthe grisea 70-15]
  misc_feature (167)..(625): NCBI GI: 116208112 Blast Desc: CHGG_03349 [Chaetomium globosum CBS 148.51] gi|88183946|gb|EAQ91414.1| CHGG_03349 [Chaetomium globosum CBS 148.51]
  misc_feature (163)..(537): NCBI GI: 46122191 Blast Desc: FG05473.1 [Gibberella zeae PH-1]
  misc_feature (9)..(544): NCBI GI: 255947600 Blast Desc: Pc22g05320 [Penicillium chrysogenum Wisconsin 54-1255] gi|211591584|emb|CAP97820.1| Pc22g05320 [Penicillium chrysogenum Wisconsin 54-1255]
  misc_feature (23)..(532): NCBI GI: 256735034 Blast Desc: [Nectria haematococca mpVI 77-13-4]
  misc_feature (3)..(532): NCBI GI: 116206928 Blast Desc: CHGG_02757 [Chaetomium globosum CBS 148.51] gi|88183354|gb|EAQ90822.1| CHGG_02757 [Chaetomium globosum CBS 148.51]
  misc_feature (12)..(532): NCBI GI: 115391047 Blast Desc: conserved [Aspergillus terreus NIH2624] gi|114193952|gb|EAU35652.1| conserved [Aspergillus terreus NIH2624]
MPGDEATIEDGSSTSSAHPGTGESLSCVSCRARKLKCDRVKPICTRCAKADGDCIYPESRRKPAFKRRNVKELEERLAQVEVLLQRGGESMPATRNAPLETEENIMRTAIDFDIPVSETVFFQGIDYGTNMLETDTFPFHPDMTEELPQLSTGQPAPDPMGTAFSKELMDLGGITESLPPFEVMEDLNRLFFQRQQQFAPIIHPARYLHSFYSAPHMKPPMCVEGKGADAKRYPLPDFITVAHAQAWFCIATDEARSMLFTRAAMSCARAVRLVQMMGLHQLDSPPTESSPTLAPPRDWVELEERRRIFWGIFCIDSHCSISTGWPHLIDAANVTTHLPSSESAFHNGEPMETCTIHDVFNGHSYTSFAGAAIICHLFNMILKHVHRPKPGDNPENYEYGEYWKLRYCSAARAENIMLEVLIPLFGSLVISAALEKIETHNLPESAKKSCQDRLISAAQEIINIMKLTSHVGAHPKTPLAALSLYCKESQAPSYVDNLNFILSAMAAIGRTHNLTRSFLRQALLDVEFNDLRSTISISQWSIDANFAQYVSPITQWNVAHRMRRIQTRNAKTYAHRSDDKTLKDLGSGLSHTIPLLARSRVTRHSGAQPPLPGRLPLGKPIGNIIPDEPPKSTAHWSFVPTHNPKPSPATGSDLHLNKRRRGETETTGSYTRYDPSLWDSSATHSSHSPQQDDPNFSTRETGSSIEPNLLGNGGPKSFPAVTRGPVPHSLRKEVMASWNLAGVGMGAPAQGQSHHESFGEFGFASPDDPNIDWSSFEPPGNGDSGD

SEQ ID NO: 32611 - DNA, 3257 bp, Muscodor strobelii
  misc_feature: SGI EST ID NO. CUFF.77089.0
  misc_feature: Variant of the nucleotide sequence at SEQ ID NO 32609
gcagtctgggcattaagctcaaatggcgaaccaaaatatcagctatatcacgacgtcttctaccaaagagctcggaaatatgctgaatcagatgagatgaaggtatgaacagaaagcacaacacatacaacgaatgagatggatattttctggtcagcgctaattgaatagggctacggagagcggtaagcttcatcatccttttctttgagacatttatgattgtggtatatgggagcctgaccctcttacagtatgtgaagtatattagcatcacaaattgccatcgccagtggaaggaaaaggagctgacgccaagcgctatcctcttccagatttcatcacggttgcccacgcacaagcatggttttgtatcgccacagacgaagccagatcgatgctcttcacgcgagctgcgatgagctgtgctcgagcggtgagacttgtacagatgatgggcctacaccaactcgatagccctccaacggagtccagtccgactttagcgccgccaagggattgggtcgaactcgaagagcgtcgaagaatcttttggggtatattctgcattgatagccattgttcgatctcgacaggatggccgcatttgattgatgccgccaatgttacaacacatcttccctctagcgaatctgcatttcacaacggagagccaatggagacatgcaccatacatgacgtattcaatggacattcctatacttcgtttgcaggagctgctatcatttgtcacttgttcaacatgatcctaaagcatgttcaccgaccgaagccaggcgataatcctgaaaattatgaatacggcgagtactggaaacgtcaccgcgatatagacaacacattatccagcgctttcatgtttcttcctgaatcgtttcagatacccgaatgctatcgagacccgacggctgtccatactaatttgaaccttcacgcgtctgtaatttgtctgtacgttattgttcagccgcccgagccgagaatattatgcttgaagtgctgatccccttatttggatcattagtcatcagtcagtatacatgcagctgggcccccttgaggaaaacaaaccaagtgcctccctagaagtatatttgattgaaatatggcttgcctaacattgtgtgctcattatcatagtgcggccctcgaaaagattgagactcataatctacccgagtccgctaagaagagttgtcaggaccgactgatctccgctgctcaggaaatcatcaatatcatgaagctcacgagtcacgtcggtgctcatccaaaaactccactggctgcattgtctctgtattgtgctgcatccgtctatatctatttctggtatgtacagacatttcgattctactttcaagttcgccattttctagagaaattttgctcacgcttgtcatagtgagtcattctttcatcccgagtgaatgatccgggggcgagtttccaaacgaagcacaccagttcgatggaccggctgatagctttcgatacaacaggtaaagagagtcaggcgccaagctacgtggacaaccttaatttcatcctgtctgctatggcggccatcggtcgaacgcacaatctcactcgctcattcttacgccaagccctcctggatgttgaattcaatgatctccgaagcactatctcgattagtcaatgtatgtgagccctattactcaatggaacgtggcgcatcgaatgagaagaatccaaactcgaaatgcgaagacttatgctcaccggtcagatgacaaaaccttaaaagacctaggatcaggtctttcccatactattcctctattggcgagaagtcgagttaccagacattctggggctcagcctcccttacccggacgcttacctttaggcaaaccaattggcaatatcattccagacgaaccgccgaaatcaacagctcattggagcttcgttccaacacataatccgaaaccctcacctgctactggtagcgatttacacttgaacaagcgaagacgcggtgaaaccgaaaccacgggaagctacactcgatacgatccttccttgtgggattcctctgcaactcattcgtcacattcgcctcagcaagatgatccgaatttttcaacccgtgagaccggcagcagtattgagcccaatcttcttggtaatgggggcccaaaatctttcccagcagtcaccagaggaccagtcccgcattcgcttcgaaaggaagtaatggcaagctggaatcttgccggcgtaggcatgggtgcacctgcgcagggtcagagccaccacgaatcgtttggagagttcggatttgctagtccagatgatcctaacattgactggtcttcttttgagcctcctggaaatggagacagtggagattgaatatgactgtgaggagtggaagacacatctgtggactaagtatatagaaatgatggtggattgcgaagtccgaaaactcaggggttgtatctggcttatgatgtagaattgaattacgcacgcatctcaactccaaagaatgattggtctatcacttgtttacttgataagcaaggtaagttttggtattgtctgcgaacgctaaatttggaaagtcgcaccttgatgccacatcaaggcgatcggtagctagttacggtacatatgtagagatgtggcggttacaaaggctcccacaacgcagctcattcgctgagaacgaaacaaacagcctgtatccctcactctgagagcaaatgctgtgcagaagcaggaacgtaacactcccatctcccaaagctttatggagccatgccatgccacagtaatacaggcggatccattcccgcagtagtccagttgaagttgaaatcgtccactacagattcaggggtcagttcgagctatgcaaaatcatcgaaggagctatggtacccctataactaaaaatcgaaataaagagtacttcaaacacgaagaatttaagtgcttactgaagctccagtcaatgagagacacgtctggtactgcagacgctaacataggatctacacactctcctgacttatttgcagttgagcacaatggtacttgctgctgctgcttcagttgttgctcaaataaagtgcgtagagctccttcttttttccagccaacaaagcagtcgaaggtgacacttgcggcaagtctatgagggaaactcgtggcaactggctggtcttcatgccaaggaggattcgcattgggacgagtaa

SEQ ID NO: 32612 - DNA, 2430 bp, Muscodor strobelii
  misc_feature: SGI cDNA ID NO. 571241
  misc_feature: Encodes the peptide sequence at SEQ ID NO 32613
atgcctggagatgaggccaccatagaggatggttcttccacttcgagcgctcatcccggaactggagaatcattatcttgtgtatcctgccgcgcccgaaagcttaaatgtgatcgagttaaaccgatctgcacgcgttgtgctaaggcagatggcgactgtatctaccctgagtcacgaaggaaaccggccttcaaacgaaggaacgtcaaagaactagaagagcgcttagctcaggtcgaagttcttctccagcgaggcggcgaaagcatgcctgccactcgcaatgccccccttgagaccgaggagaatattatgaggacagctatcgactttgatataccggtgtcagaaactgtcttcttccaggggattgactatggcacaaatatgctcgaaactgacacatttcctttccacccagacatgacagaagagttaccgcaactatctactggccaacctgcacctgacccaatgggtactgcgttcagtaaagaactaatggatcttggcggaattacagaatctcttccgcctttcgaagtcatggaggatcttaatcgtctttttttccaaagacagcagcaatttgcacccatcatccaccctgccagatatcttcactctttctattcggctcctcatatgaaacccccgatgtgtgtggaaggaaaaggagctgacgccaagcgctatcctcttccagatttcatcacggttgcccacgcacaagcatggttttgtatcgccacagacgaagccagatcgatgctcttcacgcgagctgcgatgagctgtgctcgagcggtgagacttgtacagatgatgggcctacaccaactcgatagccctccaacggagtccagtccgactttagcgccgccaagggattgggtcgaactcgaagagcgtcgaagaatcttttggggtatattctgcattgatagccattgttcgatctcgacaggatggccgcatttgattgatgccgccaatgttacaacacatcttccctctagcgaatctgcatttcacaacggagagccaatggagacatgcaccatacatgacgtattcaatggacattcctatacttcgtttgcaggagctgctatcatttgtcacttgttcaacatgatcctaaagcatgttcaccgaccgaagccaggcgataatcctgaaaattatgaatacggcgagtactggaaacgtcaccgcgatatagacaacacattatccagcgctttcatgtttcttcctgaatcgtttcagatacccgaatgctatcgagacccgacggctgtccatactaatttgaaccttcacgcgtctgtaatttgtctggtacatgcttctaacgctaatactgtctctcccctcatcatcagtgcggccctcgaaaagattgagactcataatctacccgagtccgctaagaagagttgtcaggaccgactgatctccgctgctcaggaaatcatcaatatcatgaagctcacgagtcacgtcggtgctcatccaaaaactccactggctgcattgtctctgtattgtaaagagagtcaggcgccaagctacgtggacaaccttaatttcatcctgtctgctatggcggccatcggtcgaacgcacaatctcactcgctcattcttacgccaagccctcctggatgttgaattcaatgatctccgaagcactatctcgattagtcaatggtatgaagtgtcaattctcgtcattcttcatctccaataccagtctttaagtcggctaggagcatcgacgctaactttgcacaatgacaaaaccttaaaagacctaggatcaggtctttcccatactattcctctattggcgagaagtcgagttaccagacattctggggctcagcctcccttacccggacgcttacctttaggcaaaccaattggcaatatcattccagacgaaccgccgaaatcaacagctcattggagcttcgttccaacacataatccgaaaccctcacctgctactggtagcgatttacacttgaacaagcgaagacgcggtgaaaccgaaaccacgggaagctacactcgatacgatccttccttgtgggattcctctgcaactcattcgtcacattcgcctcagcaagatgatccgaatttttcaacccgtgagaccggcagcagtattgagcccaatcttcttggtaatgggggcccaaaatctttcccagcagtcaccagaggaccagtcccgcattcgcttcgaaaggaagtaatggcaagctggaatcttgccggcgtaggcatgggtgcacctgcgcagggtcagagccaccacgaatcgtttggagagttcggatttgctagtccagatgatcctaacattgactggtcttcttttgagcctcctggaaatggagacagtggagattga

SEQ ID NO: 32613 - protein, 809 aa, Muscodor strobelii
  misc_feature: SGI Peptide ID NO. 571241
  misc_feature (25)..(63): Pfam Id: PF00172 Pfam Desc: Fungal Zn(2)-Cys(6) binuclear cluster domain
  misc_feature (240)..(342): Pfam Id: PF04082 Pfam Desc: Fungal specific transcription factor domain
  misc_feature (267)..(342): Pfam Id: PF04082 Pfam Desc: Fungal specific transcription factor domain
  misc_feature (23)..(642): NCBI GI: 261358259 Blast Desc: binuclear zinc transcription factor [Verticillium albo-atrum VaMs.102]
  misc_feature (1)..(628): NCBI GI: 256729720 Blast Desc: NECHADRAFT_71135 [Nectria haematococca mpVI 77-13-4]
  misc_feature (11)..(646): NCBI GI: 145608900 Blast Desc: MGG_06279 [Magnaporthe grisea 70-15] gi|145016323|gb|EDK00813.1| MGG_06279 [Magnaporthe grisea 70-15]
  misc_feature (167)..(648): NCBI GI: 116208112 Blast Desc: CHGG_03349 [Chaetomium globosum CBS 148.51] gi|88183946|gb|EAQ91414.1| CHGG_03349 [Chaetomium globosum CBS 148.51]
  misc_feature (23)..(660): NCBI GI: 164428941 Blast Desc: NCU00217 [Neurospora crassa OR74A] gi|157072344|gb|EAA27366.2| [Neurospora crassa OR74A]
  misc_feature (163)..(632): NCBI GI: 46122191 Blast Desc: FG05473.1 [Gibberella zeae PH-1]
  misc_feature (238)..(571): NCBI GI: 171685636 Blast Desc: protein product [Podospora anserina] gi|170942779|emb|CAP68432.1| protein product [Podospora anserina]
  misc_feature (23)..(565): NCBI GI: 256735034 Blast Desc: [Nectria haematococca mpVI 77-13-4]
  misc_feature (9)..(566): NCBI GI: 255947600 Blast Desc: Pc22g05320 [Penicillium chrysogenum Wisconsin 54-1255] gi|211591584|emb|CAP97820.1| Pc22g05320 [Penicillium chrysogenum Wisconsin 54-1255]
  misc_feature (25)..(569): NCBI GI: 261361081 Blast Desc: binuclear zinc transcription factor [Verticillium albo-atrum VaMs.102]
MPGDEATIEDGSSTSSAHPGTGESLSCVSCRARKLKCDRVKPICTRCAKADGDCIYPESRRKPAFKRRNVKELEERLAQVEVLLQRGGESMPATRNAPLETEENIMRTAIDFDIPVSETVFFQGIDYGTNMLETDTFPFHPDMTEELPQLSTGQPAPDPMGTAFSKELMDLGGITESLPPFEVMEDLNRLFFQRQQQFAPIIHPARYLHSFYSAPHMKPPMCVEGKGADAKRYPLPDFITVAHAQAWFCIATDEARSMLFTRAAMSCARAVRLVQMMGLHQLDSPPTESSPTLAPPRDWVELEERRRIFWGIFCIDSHCSISTGWPHLIDAANVTTHLPSSESAFHNGEPMETCTIHDVFNGHSYTSFAGAAIICHLFNMILKHVHRPKPGDNPENYEYGEYWKRHRDIDNTLSSAFMFLPESFQIPECYRDPTAVHTNLNLHASVICLVHASNANTVSPLIISAALEKIETHNLPESAKKSCQDRLISAAQEIINIMKLTSHVGAHPKTPLAALSLYCKESQAPSYVDNLNFILSAMAAIGRTHNLTRSFLRQALLDVEFNDLRSTISISQWYEVSILVILHLQYQSLSRLGASTLTLHNDKTLKDLGSGLSHTIPLLARSRVTRHSGAQPPLPGRLPLGKPIGNIIPDEPPKSTAHWSFVPTHNPKPSPATGSDLHLNKRRRGETETTGSYTRYDPSLWDSSATHSSHSPQQDDPNFSTRETGSSIEPNLLGNGGPKSFPAVTRGPVPHSLRKEVMASWNLAGVGMGAPAQGQSHHESFGEFGFASPDDPNIDWSSFEPPGNGDSGD

SEQ ID NO: 32614 - DNA, 3257 bp, Muscodor strobelii; identical to SEQ ID NO: 32611
  misc_feature: SGI EST ID NO. CUFF.77089.0
  misc_feature: Variant of the nucleotide sequence at SEQ ID NO 32612

SEQ ID NO: 32615 - DNA, 471 bp, Muscodor strobelii
  misc_feature: SGI cDNA ID NO. 571242
  misc_feature: Encodes the peptide sequence at SEQ ID NO 32616
atgcagttcttagaccggaaattaatcggggaaaccgccgcaactgatgcaatcactgtgtgccaacgcgccatagtcaccgaaggggatcttcctgcgcgtctgtctaccctcttgggtgccttattcgagtttactcgtcccaatgcgaatcctccttggcatgaagaccagccagttgccacgagtttccctcatagacttgccgcaagtgtcaccttcgactgctttgttggctggaaaaaagaaggagctctacgcactttatttgagcaacaactgaagcagcagcagcaagtaccattgtgctcaactgcaaataagtcaggagagtgtgtagatcctatgttagcgtctgcagtaccagacgtgtctctcattgactggagcttcatggacgatttcaacttcaactggactactgcgggaatggatccgcctgtattactgtggcatggcatggctccataa

SEQ ID NO: 32616 - protein, 156 aa, Muscodor strobelii
  misc_feature: SGI Peptide ID NO. 571242
MQFLDRKLIGETAATDAITVCQRAIVTEGDLPARLSTLLGALFEFTRPNANPPWHEDQPVATSFPHRLAASVTFDCFVGWKKEGALRTLFEQQLKQQQQVPLCSTANKSGECVDPMLASAVPDVSLIDWSFMDDFNFNWTTAGMDPPVLLWHGMAP

SEQ ID NO: 32617 - DNA, 2069 bp, Muscodor strobelii
  misc_feature: SGI EST ID NO. CUFF.77090.1
  misc_feature: Variant of the nucleotide sequence at SEQ ID NO 32615
caggggattatctgttccgagcgagcagctgatctagataaattcaatgccctactggtccaactcgaaattcagatgttctacttgatgcctcctgcagggcacgatccacaagctttaaaacagcatgtcctacgtacctatcacactgctgcttcagtgttccgagacgcactagagctagataaaaagatcggcttcttatcacatctcacacacccgcaggttcgctcgatagcgacggcaagctgtgtaatattcaagacccttcgtctttcaaatatgcagttcttagaccggaaattaatcggggaaaccgccgcaactgatgcaatcactgtgtgccaacgcgccatagtcaccgaaggggatcttcctgcgcgtctgtctaccctcttgggtgccttattcgagtttactcgtcccaatgcgaatcctccttggcatgaagaccagccagttgccacgagtttccctcatagacttgccgcaagtgtcaccttcgactgctttgttggctggaaaaaagaaggagctctacgcactttatttgagcaacaactgaagcagcagcagcaagtaccattgtgctcaactgcaaataagtcaggagagtgtgtagatcctatgttagcgtctgcagtaccagacgtgtctctcattgactggagcttcatggacgatttcaacttcaactggactactgcgggaatggatccgcctgtattactgtggcatggcatggctccataaagctttgggagatgggagtgttacgttcctgcttctgcacagcatttgctctcagagtgagggatacaggctgtttgtttcgttctcagcgaatgagctgcgttgtgggagcctttgtaaccgccacatctctacatatgtaccgtaactagctaccgatcgccttgatgtggcatcaaggtgcgactttccaaatttagcgttcgcagacaataccaaaacttaccttgcttatcaagtaaacaagtgatagaccaatcattctttggagttgagatgcgtgcgtaattcaattctacatcataagccagatacaacccctgagttttcggacttcgcaatccaccatcatttctatatacttagtccacagatgtgtcttccactcctcacagtcatattcaatctccactgtctccatttccaggaggctcaaaagaagaccagtcaatgttaggatcatctggactagcaaatccgaactctccaaacgattcgtggtggctctgaccctgcgcaggtgcacccatgcctacgccggcaagattccagcttgccattacttcctttcgaagcgaatgcgggactggtcctctggtgactgctgggaaagattttgggcccccattaccaagctgtgtcgttgtgaagttagtcaccactcgcttgaacctgtttggcagaactgcgactatttatacattgatagaagagtttttgaatgccgaaaatagcctagatactcacaagattgggctcaatactgctgccggtctcacgggttgaaaaattcggatcatcttgctgaggcgaatgtgacgaatgagttgcagaggaatcccacaaggaaggatcgtatcgagtgtagcttcccgtggtttcggtttcaccgcgtcttcgcttgttcaagtgtaaatcgctaccagtagcaggtgagggtttcggattatgtgttggaacgaagctccaatgagctgttgatttcggcggttcgtctggaatgatattgccaattggtttgcctaaaggtaagcgtccgggtaagggaggctgagccccagaatgtctggtaactcgacttctcgccaatagaggaatagctgattattaggaacaagacgcgtcaatatcccgtctctacgttactggccagatgacatggaacatgtcgtatgtgggagatgaacatactatgggaaagacctgatcctaggtcttttaaggttttgtcatctgaccggtgagcataagtcttcgcatttcgagtttggattcttctcattcgatgcgccacgttccattgagtaatagggctc

SEQ ID NO: 32618 - DNA, 780 bp, Muscodor strobelii
  misc_feature: SGI cDNA ID NO. 571243
  misc_feature: Encodes the peptide sequence at SEQ ID NO 32619
atgggcagctggtggtggcaacagccggtcgaagaggcaaccatcgtatcaatccctccgtcacccacacacccataccatcctctcggcgtccatatcccgtcatatgccgaaaatgaagcaccggtccccgtgctgctcgccgcgcttggcggtacactcggtttcaccgttctgagcgccgcaatcgtggcccggaaatataacccagggctccgggtctcagggcttgctgtattctgctggttcgtgatgaacgcatgcctgcactgcgttttcgaaggctattttgttcttaaccacacatctgtcgcttcgtcacagtcactcctcgctcaattgtggaaagaatacgcgctctctgactcgcggtatctcacatctgatatattcatgttgagtgtggaaagcatcactgtgttcatctggggaccactatgtctagcaaacgccatagccatcgcaaaagggagtcccttgcagcacgcgctacggattatagcttgcatggcgcatctctacggcgtagcactatactataccaccagccagtgcgagttctacttcacgggccgttcgcacagccgtccagaattcgtctatttctgggtttattatgtcggattcaacctaccttgggtgattgtccctgctatcctcttacttgacagcatgaaaatggtgacacgcgcgatgcgagcacttgaccaggcagaggcgactctgaacaggcatcgtgtaagcgaaggaagtattgccgagccaaagaagacgaaataa

SEQ ID NO: 32619 - protein, 259 aa, Muscodor strobelii
  misc_feature: SGI Peptide ID NO. 571243
  misc_feature (34)..(239): Pfam Id: PF05241 Pfam Desc: Emopamil binding protein
  misc_feature (79)..(239): Pfam Id: PF05241 Pfam Desc: Emopamil binding protein
  misc_feature (21)..(259): NCBI GI: 261358265 Blast Desc: EBDP2 [Verticillium albo-atrum VaMs.102]
  misc_feature (24)..(256): NCBI GI: 138248514 Blast Desc: EBDP2 [Magnaporthe grisea]
  misc_feature (23)..(245): NCBI GI: 212533397 Blast Desc: EBP domain protein, [Penicillium marneffei ATCC 18224] gi|210072219|gb|EEA26308.1| EBP domain protein, [Penicillium marneffei ATCC 18224]
  misc_feature (24)..(244): NCBI GI: 116207382 Blast Desc: CHGG_02984 [Chaetomium globosum CBS 148.51] gi|88183581|gb|EAQ91049.1| CHGG_02984 [Chaetomium globosum CBS 148.51]
  misc_feature (24)..(239): NCBI GI: 85087052 Blast Desc: NCU00346 [Neurospora crassa OR74A] gi|28918912|gb|EAA28581.1| conserved [Neurospora crassa OR74A]
  misc_feature (23)..(240): NCBI GI: 119494896 Blast Desc: EBP domain protein, [Neosartorya fischeri NRRL 181] gi|119412410|gb|EAW22351.1| EBP domain protein, [Neosartorya fischeri NRRL 181]
  misc_feature (21)..(237): NCBI GI: 145230926 Blast Desc: An01g13260 [Aspergillus niger] gi|134055851|emb|CAK96196.1| protein product [Aspergillus niger]
  misc_feature (17)..(238): NCBI GI: 261201033 Blast Desc: EBP domain-containing protein [Ajellomyces dermatitidis SLH14081] gi|239593989|gb|EEQ76570.1| EBP domain-containing protein [Ajellomyces dermatitidis SLH14081] EBP
  misc_feature (21)..(240): NCBI GI: 121700961 Blast Desc: EBP domain protein, [Aspergillus clavatus NRRL 1] gi|119396888|gb|EAW07319.1| EBP domain protein, [Aspergillus clavatus NRRL 1]
  misc_feature (23)..(246): NCBI GI: 242778015 Blast Desc: EBP domain protein, [Talaromyces stipitatus ATCC 10500] gi|218722769|gb|EED22187.1| EBP domain protein, [Talaromyces stipitatus ATCC 10500]
  misc_feature (22)..(236): SWISSPROT Homolog: EC 5.3.3.5 Cholestenol Delta-isomerase
MGSWWWQQPVEEATIVSIPPSPTHPYHPLGVHIPSYAENEAPVPVLLAALGGTLGFTVLSAAIVARKYNPGLRVSGLAVFCWFVMNACLHCVFEGYFVLNHTSVASSQSLLAQLWKEYALSDSRYLTSDIFMLSVESITVFIWGPLCLANAIAIAKGSPLQHALRIIACMAHLYGVALYYTTSQCEFYFTGRSHSRPEFVYFWVYYVGFNLPWVIVPAILLLDSMKMVTRAMRALDQAEATLNRHRVSEGSIAEPKKTK

SEQ ID NO: 32620 - DNA, 1229 bp, Muscodor strobelii
  misc_feature: SGI EST ID NO. CUFF.77191.1
  misc_feature: Variant of the nucleotide sequence at SEQ ID NO 32618
tctatccaataggggtaaatgcatctaggtaatgcgacaatcttatagacaacctcataaagaattggtcacgacacacgttactatcatcgaaaaatgggcagctggtggtggcaacagccggtcgaagaggcaaccatcgtatcaatccctccgtcacccacacacccataccatcctctcggcgtccatatcccgtcatatgccgaaaatgaagcaccggtccccgtgctgctcgccgcgcttggcggtacactcggtttcaccgttctgagcgccgcaatcgtggcccggaaatataacccagggctccgggtctcagggcttgctgtattctgctggttcgtgatgaacgcatgcctgcactgcgttttcgaaggctattttgttcttaaccacacatctgtcgcttcgtcacagtcactcctcgctcaattgtggaaagaatacgcgctctctgactcgcggtatctcacatctgatatattcatgttgagtgtggaaagcatcactgtgttcatctggggaccactatgtctagcaaacgccatagccatcgcaaaagggagtcccttgcagcacgcgctacggattatagcttgcatggcgcatctctacggcgtagcactatactataccaccagccagtgcgagttctacttcacgggccgttcgcacagccgtccagaattcgtctatttctgggtttattatgtcggattcaacctaccttgggtgattgtccctgctatcctcttacttgacagcatgaaaatggtgacacgcgcgatgcgagcacttgaccaggcagaggcgactctgaacaggcatcgtgtaagcgaaggaagtattgccgagccaaagaagacgaaataagcaatgatagcccctggagagttgattcatatggaatcccactctctgttgcttaagacggtgtgatgagattgtgatttagtagtggctgtatatactatcaacttgtaatctcgcaaatgttcacgtgtacaagactgtactctacagatttggcttgaggagcagagctatgcacgtatattacaatactaacaagcatgcgttttctgtagtctagcggaacttcatcacgtcgttagttcactttatagaatcggctggtagatggtttatctcatactgtcccgagtgtaggttttaattccggctgggttggcgcggggtgcggagtgaagatggactaacatcgg

SEQ ID NO: 32621 - DNA, 402 bp, Muscodor strobelii
  misc_feature: SGI cDNA ID NO. 571244
  misc_feature: Encodes the peptide sequence at SEQ ID NO 32622
atggcagacaagagtacgagcccaaataaaacgctgatgagcgtagctttcatcaagcgcaggcccgcactcaccgttgagcagttctacgatcactgggcgaatgtccacgggccgctcgttaagccatgggctgaaagattcggtctgataggttatacacaggtccatctcaagcctgagttgaacactgccgcgcccatcggcccagagtccaaagaggagtcgcctttggcaggttatgatggatgtgccataatggagattactagcttcgaccagtttgcggaggcttttcgagatccttattatgtcaacgaaattgcagctgacgaggccaagtttatcgacaagaaggttggcgttgtgagggctcgcggtgaagtgaataagatcatataa

SEQ ID NO: 32622 - protein, 133 aa, Muscodor strobelii
  misc_feature: SGI Peptide ID NO. 571244
  misc_feature (56)..(133): NCBI GI: 261358204 Blast Desc: 6-phosphogluconate dehydrogenase [Verticillium albo-atrum VaMs.102]
  misc_feature (15)..(118): NCBI GI: 256729588 Blast Desc: NECHADRAFT_95367 [Nectria haematococca mpVI 77-13-4]
  misc_feature (10)..(117): NCBI GI: 261356520 Blast Desc: [Verticillium albo-atrum VaMs.102]
  misc_feature (5)..(119): NCBI GI: 46115242 Blast Desc: FG03463.1 [Gibberella zeae PH-1]
  misc_feature (7)..(117): NCBI GI: 242821235 Blast Desc: conserved [Talaromyces stipitatus ATCC 10500] gi|218712560|gb|EED11985.1| conserved [Talaromyces stipitatus ATCC 10500]
  misc_feature (17)..(117): NCBI GI: 261361301 Blast Desc: conserved [Verticillium albo-atrum VaMs.102]
  misc_feature (7)..(118): NCBI GI: 212542755 Blast Desc: conserved [Penicillium marneffei ATCC 18224] gi|210066439|gb|EEA20532.1| conserved [Penicillium marneffei ATCC 18224]
  misc_feature (1)..(123): NCBI GI: 238582837 Blast Desc: MPER_10734 [Moniliophthora perniciosa FA553] gi|215453015|gb|EEB90985.1| MPER_10734 [Moniliophthora perniciosa FA553]
  misc_feature (14)..(119): NCBI GI: 238491204 Blast Desc: conserved [Aspergillus flavus NRRL3357] gi|220697252|gb|EED53593.1| conserved [Aspergillus flavus NRRL3357]
  misc_feature (14)..(119): NCBI GI: 169773243 Blast Desc: [Aspergillus oryzae RIB40] gi|83768951|dbj|BAE59088.1| protein product [Aspergillus oryzae]
MADKSTSPNKTLMSVAFIKRRPALTVEQFYDHWANVHGPLVKPWAERFGLIGYTQVHLKPELNTAAPIGPESKEESPLAGYDGCAIMEITSFDQFAEAFRDPYYVNEIAADEAKFIDKKVGVVRARGEVNKII

SEQ ID NO: 32623 - DNA, 714 bp, Muscodor strobelii
  misc_feature: SGI cDNA ID NO. 571245
  misc_feature: Reduced expression when VOC is produced
  misc_feature: Encodes the peptide sequence at SEQ ID NO 32624
atgactaccgcacatagaccgaccttcgatccggcacgtggcaaggaagccctgcgcggtccagcgtaccatcagaggctccagcctgcccatacccagctcaagttcagacagcctggccagggaggagatgccgatgaggttcgcgatctccgctctgagcttctcgctgccgaggccgcacacttcgccaaacaaaaccccggcgcgctacccgacgttgatgacaccgacggcaacccagccgtaaatcaagcaaagcgacctcaccagctgacctccgctgacgcagaagaggacccggacgcgaaacgccggcggatattagaggagtctcgggatatcgatgcagattcagaagactccgaagagaacagcgatgatggcagtagtgatgatgactcagaggacgatgaggatgagcagctgaaaagggagctggagaagatcaagcgagaccgcgcggagaaaagggagaaggaggaacgtgagaaggccgctgcagaggaggaagaacgtgaacgtgatattgccctcggcaacccactgctgaaccccagacagaacttcgatatgaagagaagatgggacgatgacgttgtcttcaagaaccaggccaggggtacagaggagaaaggcaagaagaaggagttcattaatgacctcctgagatccgactttcacaagcgctttatgagcaagtatgtcagatga

SEQ ID NO: 32624 - protein, 237 aa, Muscodor strobelii
  misc_feature: SGI Peptide ID NO. 571245
  misc_feature (1)..(237): Pfam Id: PF04889 Pfam Desc: Cwf15/Cwc15 cell cycle control protein
  misc_feature (1)..(237): NCBI GI: 154301509 Blast Desc: BC1G_10424 [Botryotinia fuckeliana B05.10] gi|150856164|gb|EDN31356.1| BC1G_10424 [Botryotinia fuckeliana B05.10]
  misc_feature (1)..(237): NCBI GI: 240282301 Blast Desc: Cwf15/Cwc15 cell cycle control [Ajellomyces capsulatus H143]
  misc_feature (1)..(237): NCBI GI: 225559370 Blast Desc: Cwf15/Cwc15 cell cycle control family protein [Ajellomyces capsulatus G186AR]
  misc_feature (1)..(237): NCBI GI: 226281982 Blast Desc: pre-mRNA-splicing factor cwc15 [Paracoccidioides brasiliensis Pb01]
  misc_feature (1)..(237): NCBI GI: 261190046 Blast Desc: Cwf15/Cwc15 cell cycle control family protein [Ajellomyces dermatitidis SLH14081] gi|239591261|gb|EEQ73842.1| Cwf15/Cwc15 cell cycle control family protein [Ajellomyces
  misc_feature (1)..(237): NCBI GI: 226293849 Blast Desc: pre-mRNA-splicing factor cwc15 [Paracoccidioides brasiliensis Pb18]
  misc_feature (12)..(237): NCBI GI: 156032963 Blast Desc: SS1G_13557 [Sclerotinia sclerotiorum 1980] gi|154698960|gb|EDN98698.1| SS1G_13557 [Sclerotinia sclerotiorum 1980]
  misc_feature (1)..(237): NCBI GI: 119192858 Blast Desc: CIMG_00806 [Coccidioides immitis RS]
  misc_feature (1)..(237): NCBI GI: 238841932 Blast Desc: Cwf15/Cwc15 cell cycle control family protein [Microsporum canis CBS 113480]
  misc_feature (1)..(237): NCBI GI: 67539880 Blast Desc: AN6110.2 [Aspergillus nidulans FGSC A4] gi|74594644|sp|Q5B020.1|CWC15_EMENI RecName: Full=Pre-mRNA-splicing factor cwc15 gi|40738895|gb|EAA58085.1|
  misc_feature: Useful for introducing or modulating the production of volatile compounds
MTTAHRPTFDPARGKEALRGPAYHQRLQPAHTQLKFRQPGQGGDADEVRDLRSELLAAEAAHFAKQNPGALPDVDDTDGNPAVNQAKRPHQLTSADAEEDPDAKRRRILEESRDIDADSEDSEENSDDGSSDDDSEDDEDEQLKRELEKIKRDRAEKREKEEREKAAAEEEERERDIALGNPLLNPRQNFDMKRRWDDDVVFKNQARGTEEKGKKKEFINDLLRSDFHKRFMSKYVR

SEQ ID NO: 32625 - DNA, 3829 bp, Muscodor strobelii
  misc_feature: SGI EST ID NO. CUFF.77390.1
  misc_feature: Variant of the nucleotide sequence at SEQ ID NO 32623
gtcctaagggtaagaatccaatggcattgagaagttcgtacaattgtggccggttatcatagctttctgcttcgtgaattagtatcaattcgaagtcctgtctgactgactaacatcggggataatgctgatgagttggacacttaaccccggcgggtcgtgtcctagtagagaacgagcattgcaacgtctccaagctcaattcagctccccaacccgccttatcgttcgacgcttaccgcatagatggtatttgccatcgcctcgcctacagacctggttccaagaaaactaagaaaatgtaccatctagccaaaggcttataccgcctcgcgacgagtaaagaggaatactcagtgatcctcctcggtctcgacaacgcaggcaaaacgaccttccacgaacaaaccaaatccctcttcctccccgagcaccctgatccaaaactcaagaccgtacccaccgtcgggcagaatgtctcgaccctcacacttcccgacatgtacctgaaaatctgggacgtaggcggccagctatcgctccggcggctttggcagagctactacgcatcgtgtcacgctatcgtcttcatcatcgacagcacggatatcggagacggaaacctcgagcatgactcctcgggcaggttagaagaatgccggcttgtgctagaagatgtcctgcagcactccgagacggagggcgtcccgctccttattttggcgaataaacaggatagagaggactgtgttgaggttgtgaggataaaagagggtctcgtgaagaaggtgtttgagggcgagaaggcgagcagtataagggactcgagggtgcttcccgtgagtgcgttgacggggcatggtgtgagggaggcggtggattgggttaggagtcgggtgaaatggagtaaagagagtagaccgccggtcatgaggtagatggagacttaggatagagagagccagagctggaattgatacccgagggagatgtgacgtagcattggggcgaggcgtttcaaaggctttgtgtacggtcacagggcggccggcttttacttgcgggttttgggttcatatatattttcatgggtatcttgtttgtttgagtctcgtcatcttgcgacgacggttatctactatctctcattctcggcagagagctctgctagcagtcctcccttatctcttctcttggcgtcatcgaccagtttctggtccaccaaggttgagaactccttcactttcgtgagagcggcgcttgcgcattggaccaagagtatagcgtcgacggctgcaccacccagcttggcgacttggcagatctcgccgtgcttgttgaggctgacagtgcagctggtcacgcgcagttgctcttcgaggagattggcgtctgcgagcatgatctcgccgttgtcgccgtagaagctgaatgtgacgcagtagggcgaatgcagccaactaagcggcacaggctctcgctcagcgggtgtatagacagtgacgttgtctccctcggtgctgacgtctggttttctgaagtggcggagtgcggcgacaacggctatgcaagaagcgtcgatgagattgccgtcgtgtgagaggacgtggaggtcgacgcggacggaccagcacttctggccggcgatgagacagagggattcgagctcgagggcgttagagcggcggacggtcttctcgatgagtctggacaagaggacctcggtctcggtcggccggttcacctcgaaggcgggcgaggccatggggctgagctcggtggtgatggtgaagatgccatcgaaggggcggtcggtgtagggagtggtcacttcggccgagacattggcgaggactctgagagtgcatcatgagttgaggttcatacggttgaggtggggtggtgcatcgtatgcatcatacctcgtcttgcctaaggtgacgtctgcgactccatactggtcaccgaactggaggtcaagcttgcggaattggtcgagagcgcggccgtcgatgcggtgaccctcctgcagggcggtcttaacaaagctacgctcattgatggaaggctcggcctcgcgtggcatggtcaatcgtcgggaggaaagcgagactgagccgcaatctgcatgtccgctggcgtcgtctgctcgtttgatgtgttttttttgggaagcggcaagctagagacgggcagtcggcaagtgggatgtcgtggtggggctgctagagctgcaccctgaagtttgaaccaaaagactgagtgagaacttgagaatggaaacagaaaaaaagagtggggaactggacccagctaagataccctacaacatcggtgccccagcctcaaacatgccgatgctagtcttcaattgcccatccaactccagtccggcttcatccagcatcaaaacttccctatcgacaaaccctgtcagcgcctttctcttcgtcttttcacagccggccgttttcacgaaccacccaacatcatgactaccgcacatagaccgaccttcgatccggcacgtggcaaggaagccctgcgcggtccagcgtaccatcagaggctccagcctgcccatacccagctcaagttcagacagcctggccagggaggagatgccgatgaggttcgcgatctccgctctgagcttctcgctgccgaggccgcacacttcgccaaacaaaaccccggcgcgctacccgacgttgatgacaccgacggcaacccagccgtaaatcaagcaaagcgacctcaccagctgacctccgctgacgcagaagaggacccggacgcgaaacgccggcggatattagaggagtctcgggatatcgatgcagattcagaagactccgaagagaacagcgatgatggcagtagtgatgatgactcagaggacgatgaggatgagcagctgaaaagggagctggagaagatcaagcgagaccgcgcggagaaaagggagaaggaggaacgtgagaaggccgctgcagaggaggaagaacgtgaacgtgatattgccctcggcaacccactgctgaaccccagacagaacttcgatatgaagagaagatgggacgatgacgttgtcttcaagaaccaggccaggggtacagaggagaaaggcaagaagaaggagttcattaatgacctcctgagatccgactttcacaagcgctttatgagcaagtatgtcagatgaggattgatccaactaccacaagatacgtctgagagggaccgttatcacgtcgacaacatctgctcccggagagccgcagatcggcagaagcacactgcgttatatgatcttattcacttcaccgcgagccctcacaacgccaaccttcttgtcgataaacttggcctcgtcagctgcaatttcgttgacataataaggatctcgaaaagcctccgcaaactggtcgaagctagtaatctccattatggcacatccatcataacctgccaaaggcgactcctctttggactctgggccgatgggcgcggcagtgttcaactcaggcttgagatggacctaaagcccaacccatcagttattatcgtcaaaagtcatgaatcaacatcggggagctgcacctgtgtataacctatcagaccgaatctttcagcccatggcttaacgagcggcccgtggacattcgcccagtgatcgtagaactgctcaacggtgagtgcgggcctgcgcttgatgaaagctacgctcatcagcgttttatttgggctcgtactcttgtctgccattttcggaatggggtgttctgataagatagtattctcacgaatcaaaaaacagatatgatca

SEQ ID NO: 32626 - DNA, 882 bp, Muscodor strobelii
  misc_feature: SGI cDNA ID NO. 571246
  misc_feature: Reduced expression when VOC is produced
  misc_feature: Encodes the peptide sequence at SEQ ID NO 32627
atgccacgcgaggccgagccttccatcaatgagcgtagctttgttaagaccgccctgcaggagggtcaccgcatcgacggccgcgctctcgaccaattccgcaagcttgacctccagttcggtgaccagtatggagtcgcagacgtcaccttaggcaagacgagagtcctcgccaatgtctcggccgaagtgaccactccctacaccgaccgccccttcgatggcatcttcaccatcaccaccgagctcagccccatggcctcgcccgccttcgaggtgaaccggccgaccgagaccgaggtcctcttgtccagactcatcgagaagaccgtccgccgctctaacgccctcgagctcgaatccctctgtctcatcgccggccagaagtgctggtccgtccgcgtcgacctccacgtcctctcacacgacggcaatctcatcgacgcttcttgcatagccgttgtcgccgcactccgccacttcagaaaaccagacgtcagcaccgagggagacaacgtcactgtctatacacccgctgagcgagagcctgtgccgcttagttggctgcattcgccctactgcgtcacattcagcttctacggcgacaacggcgagatcatgctcgcagacgccaatctcctcgaagagcaactgcgcgtgaccagctgcactgtcagcctcaacaagcacggcgagatctgccaagtcgccaagctgggtggtgcagccgtcgacgctatactcttggtccaatgcgcaagcgccgctctcacgaaagtgaaggagttctcaaccttggtggaccagaaactggtcgatgacgccaagagaagagataagggaggactgctagcagagctctctgccgagaatgagagatag

SEQ ID NO: 32627 - protein, 293 aa, Muscodor strobelii
  misc_feature: SGI Peptide ID NO. 571246
  misc_feature (32)..(164): Pfam Id: PF01138 Pfam Desc: 3' exoribonuclease family, domain 1
  misc_feature (49)..(164): Pfam Id: PF01138 Pfam Desc: 3' exoribonuclease family, domain 1
  misc_feature (1)..(293): NCBI GI: 171685834 Blast Desc: protein product [Podospora anserina] gi|170942878|emb|CAP68531.1| protein product [Podospora anserina]
  misc_feature (1)..(293): NCBI GI: 46122263 Blast Desc: FG05509.1 [Gibberella zeae PH-1]
  misc_feature (1)..(293): NCBI GI: 85087002 Blast Desc: NCU00334 [Neurospora crassa OR74A] gi|28918900|gb|EAA28569.1| conserved [Neurospora crassa OR74A]
  misc_feature (1)..(293): NCBI GI: 256729898 Blast Desc: [Nectria haematococca mpVI 77-13-4]
  misc_feature (1)..(293): NCBI GI: 169621181 Blast Desc: SNOG_13798 [Phaeosphaeria nodorum SN15] gi|160704198|gb|EAT78822.2| SNOG_13798 [Phaeosphaeria nodorum SN15]
  misc_feature (1)..(293): NCBI GI: 189206730 Blast Desc: 3' exoribonuclease [Pyrenophora tritici-repentis Pt-1C-BFP] gi|187975792|gb|EDU42418.1| 3' exoribonuclease [Pyrenophora tritici-repentis Pt-1C-BFP]
  misc_feature (1)..(239): NCBI GI: 116207378 Blast Desc: CHGG_02982 [Chaetomium globosum CBS 148.51] gi|88183579|gb|EAQ91047.1| CHGG_02982 [Chaetomium globosum CBS 148.51]
  misc_feature (56)..(293): NCBI GI: 154301511 Blast Desc: BC1G_10425 [Botryotinia fuckeliana B05.10] gi|150856165|gb|EDN31357.1| BC1G_10425 [Botryotinia fuckeliana B05.10]
  misc_feature (1)..(293): NCBI GI: 19075183 Blast Desc: exosome subunit Rrp45 () [Schizosaccharomyces pombe 972h-] gi|21759396|sp|O74918.1|RRP45_SCHPO RecName: Full=Exosome complex component rrp45; AltName: Full=Ribosomal RNA-processing
  misc_feature (86)..(293): NCBI GI: 156032965 Blast Desc: SS1G_13558 [Sclerotinia sclerotiorum 1980] gi|154698961|gb|EDN98699.1| SS1G_13558 [Sclerotinia sclerotiorum 1980]
  misc_feature: Useful for introducing or modulating the production of volatile compounds
MPREAEPSINERSFVKTALQEGHRIDGRALDQFRKLDLQFGDQYGVADVTLGKTRVLANVSAEVTTPYTDRPFDGIFTITTELSPMASPAFEVNRPTETEVLLSRLIEKTVRRSNALELESLCLIAGQKCWSVRVDLHVLSHDGNLIDASCIAVVAALRHFRKPDVSTEGDNVTVYTPAEREPVPLSWLHSPYCVTFSFYGDNGEIMLADANLLEEQLRVTSCTVSLNKHGEICQVAKLGGAAVDAILLVQCASAALTKVKEFSTLVDQKLVDDAKRRDKGGLLAELSAENER

SEQ ID NO: 32628 - DNA, 3836 bp, Muscodor strobelii
  misc_feature: SGI EST ID NO. CUFF.77389.0
  misc_feature: Variant of the nucleotide sequence at SEQ ID NO 32626
tgatcatatctgttttttgattcgtgagaatactatcttatcagaacaccccattccgaaaatggcagacaagagtacgagcccaaataaaacgctgatgagcgtagctttcatcaagcgcaggcccgcactcaccgttgagcagttctacgatcactgggcgaatgtccacgggccgctcgttaagccatgggctgaaagattcggtctgataggttatacacaggtgcagctccccgatgttgattcatgacttttgacgataataactgatgggttgggctttaggtccatctcaagcctgagttgaacactgccgcgcccatcggcccagagtccaaagaggagtcgcctttggcaggttatgatggatgtgccataatggagattactagcttcgaccagtttgcggaggcttttcgagatccttattatgtcaacgaaattgcagctgacgaggccaagtttatcgacaagaaggttggcgttgtgagggctcgcggtgaagtgaataagatcatataacgcagtgtgcttctgccgatctgcggctctccgggagcagatgttgtcgacgtgataacggtccctctcagacgtatcttgtggtagttggatcaatcctcatctgacatacttgctcataaagcgcttgtgaaagtcggatctcaggaggtcctgcaaatgagttagcaatgctgttaaacatggaactatgaacataacaagagtaactcacattaatgaactccttcttcttgcctttctcctctgtacccctggcctggttcttgaagacaacgtcatcgtcccatcttctcttcatatcgaagttctgtctggggttcagcagtgggttgccgagggcaatatcacgttcacgttcttcctcctctgcagcggccttctcacgttcctccttctcccttttctccgcgcggtctcgcttgatcttctccagctcccttttcagctgctcatcctcatcgtcctctgagtcatcatcactactgccatcatcgctgttctcttcggagtcttctgaatctgcatcgatatcccgagactcctctaatatccgccggcgtttcgcgtccgggtcctcttctgcgtcagcggaggtcagctggtgaggtcgctttgcttgatttacggctgggttgccgtcggtgtcatcaacgtcgggtagcgcgccggggttttgtttggcgaagtgtgcggcctcggcagcgagaagctcagagcggagatcgcgaacctcatcggcatctcctccctggccaggctgtctgaacttgagctgggtatgggcaggctggagcctctgatggtacgctggaccgcgcagggcttccttgccacgtgccggatcgaaggtcggtctatgtgcggtagtcatgatgttgggtggttcgtgaaaacggccggctgtgaaaagacgaagagaaaggcgctgacagggtttgtcgatagggaagttttgatgctggatgaagccggactggagttggatgggcaattgaagactagcatcggcatgtttgaggctggggcaccgatgttgtagggtatcttagctgggtccagttccccactctttttttctgtttccattctcaagttctcactcagtcttttggttcaaacttcagggtgcagctctagcagccccaccacgacatcccacttgccgactgcccgtctctagcttgccgcttcccaaaaaaaacacatcaaacgagcagacgacgccagcggacatgcagattgcggctcagtctcgctttcctcccgacgattgaccatgccacgcgaggccgagccttccatcaatgagcgtagctttgttaagaccgccctgcaggagggtcaccgcatcgacggccgcgctctcgaccaattccgcaagcttgacctccagttcggtgaccagtatggagtcgcagacgtcaccttaggcaagacgagagtcctcgccaatgtctcggccgaagtgaccactccctacaccgaccgccccttcgatggcatcttcaccatcaccaccgagctcagccccatggcctcgcccgccttcgaggtgaaccggccgaccgagaccgaggtcctcttgtccagactcatcgagaagaccgtccgccgctctaacgccctcgagctcgaatccctctgtctcatcgccggccagaagtgctggtccgtccgcgtcgacctccacgtcctctcacacgacggcaatctcatcgacgcttcttgcatagccgttgtcgccgcactccgccacttcagaaaaccagacgtcagcaccgagggagacaacgtcactgtctatacacccgctgagcgagagcctgtgccgcttagttggctgcattcgccctactgcgtcacattcagcttctacggcgacaacggcgagatcatgctcgcagacgccaatctcctcgaagagcaactgcgcgtgaccagctgcactgtcagcctcaacaagcacggcgagatctgccaagtcgccaagctgggtggtgcagccgtcgacgctatactcttggtccaatgcgcaagcgccgctctcacgaaagtgaaggagttctcaaccttggtggaccagaaactggtcgatgacgccaagagaagagataagggaggactgctagcagagctctctgccgagaatgagagatagtagataaccgtcgtcgcaagatgacgagactcaaacaaacaagatacccatgaaaatatatatgaacccaaaacccgcaagtaaaagccggccgccctgtgaccgtacacaaagcctttgaaacgcctcgccccaatgctacgtcacatctccctcgggtatcaattccagctctggctctctctatcctaagtctccatctacctcatgaccggcggtctactctctttactccatttcacccgactcctaacccaatccaccgcctccctcacaccatgccccgtcaacgcactcacgggaagcaccctcgagtcccttatactgctcgccttctcgccctcaaacaccttcttcacgagaccctcttttatcctcacaacctcaacacagtcctctctatcctgtttattcgccaaaataaggagcgggacgccctccgtctcggagtgctgcaggacatcttctagcacaagccggcattcttctaacctgcccgaggagtcatgctcgaggtttccgtctccgatatccgtgctgtcgatgatgaagacgatagcgtgacacgatgcgtagtagctctgccaaagccgccggagcgatagctggccgcctacgtcccagattttcaggtacatgtcgggaagtgtgagggtcgagacattctgcccgacggtgggtacggtcttgagttttggatcagggtgctcggggaggaagagggatttggtttgttcgtggaaggtcgttttgcctgcgttgtcgagaccgaggaggatcactgagtattctagataacgagttaggaggtgggaacagaagcacgtgttgtgatttggagatttgttgctgccgactgaccctctttactcgtcgcgaggcggtataagcctttggctagatggtacattttcttagttttcttggaaccaggtctgtaggcgaggcgatggcaaataccatctatgcggtaagcgtcgaacgataaggcgggttggggagctgaattgagcttggagacgttgcaatgctcgttctctactaggacacgacccgccggggttaagtgtccaactcatcagcattatccccgatgttagtcagtcagacaggacttcgaattgatactaattcacgaagcagaaagcta

SEQ ID NO: 32629 - DNA, 639 bp, Muscodor strobelii
  misc_feature: SGI cDNA ID NO. 571247
  misc_feature: Reduced expression when VOC is produced
  misc_feature: Encodes the peptide sequence at SEQ ID NO 32630
atgtaccatctagccaaaggcttataccgcctcgcgacgagtaaagaggaatactcagtgatcctcctcggtctcgacaacgcaggcaaaacgaccttccacgaacaaaccaaatccctcttcctccccgagcaccctgatccaaaactcaagaccgtacccaccgtcgggcagaatgtctcgaccctcacacttcccgacatgtacctgaaaatctgggacgtaggcggccagctatcgctccggcggctttggcagagctactacgcatcgtgtcacgctatcgtcttcatcatcgacagcacggatatcggagacggaaacctcgagcatgactcctcgggcaggttagaagaatgccggcttgtgctagaagatgtcctgcagcactccgagacggagggcgtcccgctccttattttggcgaataaacaggatagagaggactgtgttgaggttgtgaggataaaagagggtctcgtgaagaaggtgtttgagggcgagaaggcgagcagtataagggactcgagggtgcttcccgtgagtgcgttgacggggcatggtgtgagggaggcggtggattgggttaggagtcgggtgaaatggagtaaagagagtagaccgccggtcatgaggtag

SEQ ID NO: 32630 - protein, 212 aa, Muscodor strobelii
  misc_feature: SGI Peptide ID NO. 571247
  misc_feature (4)..(200): Pfam Id: PF00025 Pfam Desc: ADP-ribosylation factor family
  misc_feature (19)..(202): Pfam Id: PF00071 Pfam Desc: Ras family
  misc_feature (52)..(200): Pfam Id: PF00025 Pfam Desc: ADP-ribosylation factor family
  misc_feature (1)..(212): NCBI GI: 85086998 Blast Desc: NCU00333 [Neurospora crassa OR74A] gi|28918899|gb|EAA28568.1| NCU00333 [Neurospora crassa OR74A]
  misc_feature (1)..(212): NCBI GI: 171685836 Blast Desc: protein product [Podospora anserina] gi|170942879|emb|CAP68532.1| protein product [Podospora anserina]
  misc_feature (1)..(212): NCBI GI: 256729702 Blast Desc: [Nectria haematococca mpVI 77-13-4]
  misc_feature (1)..(212): NCBI GI: 46122265 Blast Desc: FG05510.1 [Gibberella zeae PH-1]
  misc_feature (1)..(212): NCBI GI: 156052052 Blast Desc: SS1G_07434 [Sclerotinia sclerotiorum 1980] gi|154705211|gb|EDO04950.1| SS1G_07434 [Sclerotinia sclerotiorum 1980]
  misc_feature (1)..(212): NCBI GI: 154309778 Blast Desc: BC1G_07359 [Botryotinia fuckeliana B05.10] gi|150851820|gb|EDN27013.1| BC1G_07359 [Botryotinia fuckeliana B05.10]
  misc_feature (1)..(212): NCBI GI: 212533803 Blast Desc: ADP-ribosylation factor family protein [Penicillium marneffei ATCC 18224] gi|210072422|gb|EEA26511.1| ADP-ribosylation factor family protein [Penicillium marneffei
  misc_feature (1)..(212): NCBI GI: 225561304 Blast Desc: ADP-ribosylation factor [Ajellomyces capsulatus G186AR]
  misc_feature (1)..(212): NCBI GI: 119494331 Blast Desc: ADP-ribosylation factor family protein [Neosartorya fischeri NRRL 181] gi|119412223|gb|EAW22164.1| ADP-ribosylation factor family protein [Neosartorya fischeri NRRL 181]
  misc_feature (1)..(212): NCBI GI: 238838921 Blast Desc: ADP-ribosylation factor 6 [Microsporum canis CBS 113480]
  misc_feature: Useful for introducing or modulating the production of volatile compounds
MYHLAKGLYRLATSKEEYSVILLGLDNAGKTTFHEQTKSLFLPEHPDPKLKTVPTVGQNVSTLTLPDMYLKIWDVGGQLSLRRLWQSYYASCHAIVFIIDSTDIGDGNLEHDSSGRLEECRLVLEDVLQHSETEGVPLLILANKQDREDCVEVVRIKEGLVKKVFEGEKASSIRDSRVLPVSALTGHGVREAVDWVRSRVKWSKESRPPVMR

SEQ ID NO: 32631 - DNA, 3829 bp, Muscodor strobelii; identical to SEQ ID NO: 32625
  misc_feature: SGI EST ID NO. CUFF.77390.1
  misc_feature: Variant of the nucleotide sequence at SEQ ID NO 32629

SEQ ID NO: 32632 - DNA, 2460 bp, Muscodor strobelii
  misc_feature: SGI cDNA ID NO. 571248
  misc_feature: Reduced expression when VOC is produced
  misc_feature: Encodes the peptide sequence at SEQ ID NO 32633
atgacacaactccggagactcgctgcctcgtggcatccccttagcagcgctacctactcgacgcttttcctcctcctgctctggaccacctgccagaaattcatagccggtcgtgacgatccgacgcggtgtcgcgcattacttaacgaagggacgtgggcgcccgcaacctccagccagcatgatgcacaaaagtgggaaccgagcgggtgtcgcatggtcgagtactcgagcgatgccatacatgactgcctcgccggtcgcaagcttgttctggccggagattccacaatacggcagatcttctgggctgccgcccgaaagctcgatccagtcctggcagcagcagagctcagagaaatcgtcgctgcagacgagaaacacagcgatctttcattcgaggccgagggggtctctctgcaattcatctgggatccctggctaaacaccacgtcgttacagaataccttgaacgccttccatgaactcccgagctctccacgagcaggtatcctaagcaagaaagaggaggattctgcggccctcatagtcctgggctccccgggcttgtgggccgcccgctatggcggtgaagattacatgaaccttttcaaaagtggaatcaagactatatcgacgtatttatcgtcgaatttagcctcaaacactctaataccagcggcagacacgagccaaagctacgactctgcgcctaatcaaatcctgctaacccccgttcaagaaccagcctacagcggactctcgaatcggcggaccgaaaccattactcctgaacgcattaatgagatgaacgattacctagtacacctgccttcgaaccagacatcgcacgtggtctgggccttcaatcggatgacggacgatccggacgcttctttcgaggatgatggtctccatgtagaagacaatattgccgaccacaagatcgacatagtactcaactcccactgcaacaatccagctatattgcaggatcggtctttcaaggggacttgctgtgtcgagcaatctggaaactaccttttcaatcttgcactgctgggcctctgcgctgctatgttatatataccaagagcgcagtctatgcccaaattcatgcgacgtttctcagcagcacccgagcttttgacggccgccagagacatattcgttacgctagcgtggtgctggatctgtgatggtacgctacagttcagcaaagaagagcgccattaccgacagggagctttcatcgccatctgccttttctggctggttggtggcttctcagtactacacagcattggtcggcaggcaagcgaaacatcttggtcagccgtcaagcactcgaagaaagagcacgtcagtacagaggagcacctattcctgtctcgacaacagaccgatgagatcaagggactgatgcaaggactaatcctactctaccactacaactatgcctcccagacgttgtgggtatataagatagtgcgcgtacttatctcgatatacttcttcctttccgcctatggccacactctttacctattgagaactggggactactcgctgaagcgcgttgcggttgtcctattccgtactaatgcgttaagcgctcttctgccgtatattatgggcacgaactacagctcatactattttgccccgtcggttaccttttggtatctggtaatctatgcaatgctcaggactttcagggcaagcaactccgatccctggccacttgcaatgaaggtgctggtaactgggagtttcgtcagcatgtttatcactacgccaggatatctcgaaagggctgccgacattctgcacatgatcttccacatgtctatagatgcacaagaactgcgatttcgcctgacactggaccgatatatcgttttcgtcggtgtcatggtcgccagccttgtgtacacggccaccatcaatgacgcacgagaggttttcactaccaaaggatcaccacgtctgttcgactctggtcgtgcccgcttctgggtcgtttgtacagcaagcttggccttgtttacttacgtcacacagacgggtttgtccgacaagcactcgtacaatgcctcgcatccatacatctcctggattcctgtcctaactatcatcacgctgcgcaacctgtatatacccgcacagaaggtgttcctggctgtacctgccgcgttaggacggatctcgctcgagacgtacattttgcagtaccatatctggctcgggggtgacgcgacggctcgcttaacgctcagcgggttcgaaaatgcgtcgttccccatcttcctggtggagaaggccctgatcaccgtgttattcatcggcatggcagcgctcacgcatcgcgccacgcgagccttcactgctacactctcggaactcggattcctggtgtttctggcggcattgtgggccggcaatctcgtttacgcgtaa

SEQ ID NO: 32633 - protein, 819 aa, Muscodor strobelii
  misc_feature: SGI Peptide ID NO. 571248
  misc_feature (395)..(641): Pfam Id: PF07779 Pfam Desc: Cas1p-like protein
  misc_feature (448)..(641): Pfam Id: PF07779 Pfam Desc: Cas1p-like protein
  misc_feature (6)..(797): NCBI GI: 154316245 Blast Desc: BC1G_03708 [Botryotinia fuckeliana B05.10] gi|150846494|gb|EDN21687.1| BC1G_03708 [Botryotinia fuckeliana B05.10]
  misc_feature (40)..(792): NCBI GI: 156037568 Blast Desc: SS1G_12498 [Sclerotinia sclerotiorum 1980] gi|154697906|gb|EDN97644.1| SS1G_12498 [Sclerotinia sclerotiorum 1980]
  misc_feature (73)..(782): NCBI GI: 39940512 Blast Desc: MGG_04984 [Magnaporthe grisea 70-15] gi|145010778|gb|EDJ95434.1| MGG_04984 [Magnaporthe grisea 70-15]
  misc_feature (9)..(766): NCBI GI: 261360701 Blast Desc: CAS1 domain-containing protein [Verticillium albo-atrum VaMs.102]
  misc_feature (39)..(764): NCBI GI: 46114564 Blast Desc: FG03124.1 [Gibberella zeae PH-1]
  misc_feature (24)..(764): NCBI GI: 256724384 Blast Desc: NECHADRAFT_88136 [Nectria haematococca mpVI 77-13-4]
  misc_feature (39)..(764): NCBI GI: 256723727 Blast Desc: NECHADRAFT_86689 [Nectria haematococca mpVI 77-13-4]
  misc_feature (39)..(764): NCBI GI: 46127017 Blast Desc: FG07886.1 [Gibberella zeae PH-1]
  misc_feature (40)..(796): NCBI GI: 50547609 Blast Desc: YALI0C00187p [Yarrowia lipolytica] gi|49647141|emb|CAG81569.1| YALI0C00187p [Yarrowia lipolytica]
  misc_feature (6)..(762): NCBI GI: 46103822 Blast Desc: FG00106.1 [Gibberella zeae PH-1]
  misc_feature: Useful for introducing or modulating the production of volatile compounds
MTQLRRLAASWHPLSSATYSTLFLLLLWTTCQKFIAGRDDPTRCRALLNEGTWAPATSSQHDAQKWEPSGCRMVEYSSDAIHDCLAGRKLVLAGDSTIRQIFWAAARKLDPVLAAAELREIVAADEKHSDLSFEAEGVSLQFIWDPWLNTTSLQNTLNAFHELPSSPRAGILSKKEEDSAALIVLGSPGLWAARYGGEDYMNLFKSGIKTISTYLSSNLASNTLIPAADTSQSYDSAPNQILLTPVQEPAYSGLSNRRTETITPERINEMNDYLVHLPSNQTSHVVWAFNRMTDDPDASFEDDGLHVEDNIADHKIDIVLNSHCNNPAILQDRSFKGTCCVEQSGNYLFNLALLGLCAAMLYIPRAQSMPKFMRRFSAAPELLTAARDIFVTLAWCWICDGTLQFSKEERHYRQGAFIAICLFWLVGGFSVLHSIGRQASETSWSAVKHSKKEHVSTEEHLFLSRQQTDEIKGLMQGLILLYHYNYASQTLWVYKIVRVLISIYFFLSAYGHTLYLLRTGDYSLKRVAVVLFRTNALSALLPYIMGTNYSSYYFAPSVTFWYLVIYAMLRTFRASNSDPWPLAMKVLVTGSFVSMFITTPGYLERAADILHMIFHMSIDAQELRFRLTLDRYIVFVGVMVASLVYTATINDAREVFTTKGSPRLFDSGRARFWVVCTASLALFTYVTQTGLSDKHSYNASHPYISWIPVLTIITLRNLYIPAQKVFLAVPAALGRISLETYILQYHIWLGGDATARLTLSGFENASFPIFLVEKALITVLFIGMAALTHRATRAFTATLSELGFLVFLAALWAGNLVYA

SEQ ID NO: 32634 - DNA, 3335 bp, Muscodor strobelii
  misc_feature: SGI EST ID NO. CUFF.77094.0
  misc_feature: Variant of the nucleotide sequence at SEQ ID NO 32632
cgccccccccgtcagacgcttatctctctactacctaactcttcaatttttcccctttccctttccagcgtccaatcagtcctgattcttgtcgaggccgtcccgaagttgctgtcgacggtcactcctctgcagactgcacaccgccgaagcctcaatcgtgtccctctcgccgctctgtcgcccacgccctctcagatgaagctgatcaagccgccctgtcctcccgatcttctccttcatgacacaactccggagactcgctgcctcgtggcatccccttagcagcgctacctactcgacgcttttcctcctcctgctctggaccacctgccagaaattcatagccggtcgtgacgatccgacgcggtgtcgcgcattacttaacgaagggacgtgggcgcccgcaacctccagccagcatgatgcacaaaagtgggaaccgagcgggtgtcgcatggtcgagtactcgagcgatgccatacatgactgcctcgccggtcgcaagcttgttctggccggagattccacaatacggcagatcttctgggctgccgcccgaaagctcgatccagtcctggcagcagcagagctcagagaaatcgtcgctgcagacgagaaacacagcgatctttcattcgaggccgagggggtctctctgcaattcatctgggatccctggctaaacaccacgtcgttacagaataccttgaacgccttccatgaactcccgagctctccacgagcaggtatcctaagcaagaaagaggaggattctgcggccctcatagtcctgggctccccgggcttgtgggccgcccgctatggcggtgaagattacatgaaccttttcaaaagtggaatcaagactatatcgacgtatttatcgtcgaatttagcctcaaacactctaataccagcggcagacacgagccaaagctacgactctgcgcctaatcaaatcctgctaacccccgttcaagaaccagcctacagcggactctcgaatcggcggaccgaaaccattactcctgaacgcattaatgagatgaacgattacctagtacacctgccttcgaaccagacatcgcacgtggtctgggccttcaatcggatgacggacgatccggacgcttctttcgaggatgatggtctccatgtagaagacaatattgccgaccacaagatcgacatagtactcaactcccactgcaacaatccagctatattgcaggatcggtctttcaaggggacttgctgtgtcgagcaatctggaaactaccttttcaatcttgcactgctgggcctctgcgctgctatgttatatataccaagagcgcagtctatgcccaaattcatgcgacgtttctcagcagcacccgagcttttgacggccgccagagacatattcgttacgctagcgtggtgctggatctgtgatggtacgctacagttcagcaaagaagagcgccattaccgacagggagctttcatcgccatctgccttttctggctggttggtggcttctcagtactacacagcattggtcggcaggcaagcgaaacatcttggtcagccgtcaagcactcgaagaaagagcacgtcagtacagaggagcacctattcctgtctcgacaacagaccgatgagatcaagggactgatgcaaggactaatcctactctaccactacaactatgcctcccagacgttgtgggtatataagatagtgcgcgtacttatctcgatatacttcttcctttccgcctatggccacactctttacctattgagaactggggactactcgctgaagcgcgttgcggttgtcctattccgtactaatgcgttaagcgctcttctgccgtatattatgggcacgaactacagctcatactattttgccccgtcggttaccttttggtatctggtaatctatgcaatgctcaggactttcagggcaagcaactccgatccctggccacttgcaatgaaggtgctggtaactgggagtttcgtcagcatgtttatcactacgccaggatatctcgaaagggctgccgacattctgcacatgatcttccacatgtctatagatgcacaagaactgcgatttcgcctgacactggaccgatatatcgttttcgtcggtgtcatggtcgccagccttgtgtacacggccaccatcaatgacgcacgagaggttttcactaccaaaggatcaccacgtctgttcgactctggtcgtgcccgcttctgggtcgtttgtacagcaagcttggccttgtttacttacgtcacacagacgggtttgtccgacaagcactcgtacaatgcctcgcatccatacatctcctggattcctgtcctaactatcatcacgctgcgcaacctgtatatacccgcacagaaggtgttcctggctgtacctgccgcgttaggacggatctcgctcgagacgtacattttgcagtaccatatctggctcgggggtgacgcgacggctcgcttaacgctcagcgggttcgaaaatgcgtcgttccccatcttcctggtggagaaggccctgatcaccgtgttattcatcggcatggcagcgctcacgcatcgcgccacgcgagccttcactgctacactctcggaactcggattcctggtgtttctggcggcattgtgggccggcaatctcgtttacgcgtaaagcatagcatagcgtgtgtgggtttctaatgcataaagataatggactttggttttattttcacgcggggttattcaaacaacaaacggacggcatggggttcaaccgactgtgggaattccagtcaggttcacacgagagacatagaatatgcaaccatatggcattgcgttgcgtgcatcagcaactatttgggctcagagccaagaaggcatgagttgaaattttaatgacgaagaccagttctcgaaaatgagagcatgccgaggggaagatggacctgtgggcaaagcagagccatctgggtggccgctgcagacgaactggacgcgtctggctggctacgtgatgggatcgaatgcacaggcaatatggtaatgcgtttcggcatgactggctacatctacactgctcttaatacggccacggtcgctggcttggccggcttgcaccttggtcagatataatgttaatcaattagaagaaatgagacaaaagatctacctcttacacacctctgtctctcaaaactgattcataatgggccaatgacgtctcaatctgaacagctctcacctctaaggagaggttggcaagcgcctcattgtgttgcttactctagatttcagacccg

SEQ ID NO: 32635 - DNA, 546 bp, Muscodor strobelii
  misc_feature: SGI cDNA ID NO. 571249
  misc_feature: Reduced expression when VOC is produced
  misc_feature: Encodes the peptide sequence at SEQ ID NO 32636
atggtcgccagccttgtgtacacggccaccatcaatgacgcacgagaggttttcactaccaaaggatcaccacgtctgttcgactctggtcgtgcccgcttctgggtcgtttgtacagcaagcttggccttgtttacttacgtcacacagacgggtttgtccgacaagcactcgtacaatgcctcgcatccatacatctcctggattcctgtcctaactatcatcacgctgcgcaacctgtatatacccgcacagaaggtgttcctggctgtacctgccgcgttaggacggatctcgctcgagacgtacattttgcagtaccatatctggctcgggggtgacgcgacggctcgcttaacgctcagcgggttcgaaaatgcgtcgttccccatcttcctggtggagaaggccctgatcaccgtgttattcatcggcatggcagcgctcacgcatcgcgccacgcgagccttcactgctacactctcggaactcggattcctggtgtttctggcggcattgtgggccggcaatctcgtttacgcgtaa

SEQ ID NO: 32636 - protein, 181 aa, Muscodor strobelii
  misc_feature: SGI Peptide ID NO. 571249
  misc_feature (42)..(128): NCBI GI: 261360701 Blast Desc: CAS1 domain-containing protein [Verticillium albo-atrum VaMs.102]
  misc_feature (55)..(163): NCBI GI: 255556462 Blast Desc: conserved [Ricinus communis] gi|223541580|gb|EEF43129.1| conserved [Ricinus communis]
  misc_feature (53)..(115): NCBI GI: 115722945 Blast Desc: : similar to Os01g0631100 [Strongylocentrotus purpuratus] gi|115929621|ref|XP_001181476.1| : similar to Os01g0631100 [Strongylocentrotus purpuratus]
  misc_feature (32)..(161): NCBI GI: 260827535 Blast Desc: BRAFLDRAFT_73941 [Branchiostoma floridae] gi|229294072|gb|EEN64730.1| BRAFLDRAFT_73941 [Branchiostoma floridae]
  misc_feature (33)..(128): NCBI GI: 168025452 Blast Desc: [Physcomitrella patens subsp. patens] gi|162683567|gb|EDQ69976.1| [Physcomitrella patens subsp. patens]
  misc_feature (55)..(163): NCBI GI: 145331988 Blast Desc: [Arabidopsis thaliana]
  misc_feature (55)..(163): NCBI GI: 42562402 Blast Desc: acetyltransferase-related [Arabidopsis thaliana]
  misc_feature (55)..(163): NCBI GI: 145338189 Blast Desc: [Arabidopsis thaliana] gi|110741438|dbj|BAE98681.1| [Arabidopsis thaliana]
  misc_feature (55)..(163): NCBI GI: 79318876 Blast Desc: acetyltransferase-related [Arabidopsis thaliana]
  misc_feature (55)..(163): NCBI GI: 186509847 Blast Desc: [Arabidopsis thaliana] gi|51970928|dbj|BAD44156.1| [Arabidopsis thaliana]
  misc_feature: Useful for introducing or modulating the production of volatile compounds
MVASLVYTATINDAREVFTTKGSPRLFDSGRARFWVVCTASLALFTYVTQTGLSDKHSYNASHPYISWIPVLTIITLRNLYIPAQKVFLAVPAALGRISLETYILQYHIWLGGDATARLTLSGFENASFPIFLVEKALITVLFIGMAALTHRATRAFTATLSELGFLVFLAALWAGNLVYA

SEQ ID NO: 32637 - DNA, 3335 bp, Muscodor strobelii; identical to SEQ ID NO: 32634
  misc_feature: SGI EST ID NO. CUFF.77094.0
  misc_feature: Variant of the nucleotide sequence at SEQ ID NO 32635

SEQ ID NO: 32638 - DNA, 1383 bp, Muscodor strobelii
  misc_feature: SGI cDNA ID NO. 571250
  misc_feature: Reduced expression when VOC is produced
  misc_feature: Encodes the peptide sequence at SEQ ID NO 32639
atgttatatataccaagagcgcagtctatgcccaaattcatgcgacgtttctcagcagcacccgagcttttgacggccgccagagacatattcgttacgctagcgtggtgctggatctgtgatggtacgctacagttcagcaaagaagagcgccattaccgacagggagctttcatcgccatctgccttttctggctggttggtggcttctcagtactacacagcattggtcggcaggcaagcgaaacatcttggtcagccgtcaagcactcgaagaaagagcacgtcagtacagaggagcacctattcctgtctcgacaacagaccgatgagatcaagggactgatgcaaggactaatcctactctaccactacaactatgcctcccagacgttgtgggtatataagatagtgcgcgtacttatctcgatatacttcttcctttccgcctatggccacactctttacctattgagaactggggactactcgctgaagcgcgttgcggttgtcctattccgtactaatgcgttaagcgctcttctgccgtatattatgggcacgaactacagctcatactattttgccccgtcggttaccttttggtatctggtaatctatgcaatgctcaggactttcagggcaagcaactccgatccctggccacttgcaatgaaggtgctggtaactgggagtttcgtcagcatgtttatcactacgccaggatatctcgaaagggctgccgacattctgcacatgatcttccacatgtctatagatgcacaagaactgcgatttcgcctgacactggaccgatatatcgttttcgtcggtgtcatggtcgccagccttgtgtacacggccaccatcaatgacgcacgagaggttttcactaccaaaggatcaccacgtctgttcgactctggtcgtgcccgcttctgggtcgtttgtacagcaagcttggccttgtttacttacgtcacacagacgggtttgtccgacaagcactcgtacaatgcctcgcatccatacatctcctggattcctgtcctaactatcatcacgctgcgcaacctgtatatacccgcacagaaggtgttcctggctgtacctgccgcgttaggacggatctcgctcgagacgtacattttgcagtaccatatctggctcgggggtgacgcgacggctcgcttaacgctcagcgggttcgaaaatgcgtcgttccccatcttcctggtggagaaggccctgatcaccgtgttattcatcggcatggcagcgctcacgcatcgcgccacgcgagccttcactgctacactctcggaactcggattcctggtgtttctggcggcattgtgggccggcaatctcgtttacgcgtaa

SEQ ID NO: 32639 - protein, 460 aa, Muscodor strobelii
  misc_feature: SGI Peptide ID NO. 571250
  misc_feature (36)..(282): Pfam Id: PF07779 Pfam Desc: Cas1p-like protein
  misc_feature (89)..(282): Pfam Id: PF07779 Pfam Desc: Cas1p-like protein
  misc_feature (16)..(438): NCBI GI: 154316245 Blast Desc: BC1G_03708 [Botryotinia fuckeliana B05.10] gi|150846494|gb|EDN21687.1| BC1G_03708 [Botryotinia fuckeliana B05.10]
  misc_feature (16)..(434): NCBI GI: 156037568 Blast Desc: SS1G_12498 [Sclerotinia sclerotiorum 1980] gi|154697906|gb|EDN97644.1| SS1G_12498 [Sclerotinia sclerotiorum 1980]
  misc_feature (6)..(437): NCBI GI: 50547609 Blast Desc: YALI0C00187p [Yarrowia lipolytica] gi|49647141|emb|CAG81569.1| YALI0C00187p [Yarrowia lipolytica]
  misc_feature (30)..(407): NCBI GI: 261360701 Blast Desc: CAS1 domain-containing protein [Verticillium albo-atrum VaMs.102]
  misc_feature (32)..(405): NCBI GI: 46127017 Blast Desc: FG07886.1 [Gibberella zeae PH-1]
  misc_feature (1)..(405): NCBI GI: 46114564 Blast Desc: FG03124.1 [Gibberella zeae PH-1]
  misc_feature (32)..(404): NCBI GI: 256724384 Blast Desc: NECHADRAFT_88136 [Nectria haematococca mpVI 77-13-4]
  misc_feature (37)..(403): NCBI GI: 46103822 Blast Desc: FG00106.1 [Gibberella zeae PH-1]
  misc_feature (21)..(403): NCBI GI: 256723727 Blast Desc: NECHADRAFT_86689 [Nectria haematococca mpVI 77-13-4]
  misc_feature (4)..(398): NCBI GI: 58262436 Blast Desc: O-acetyltransferase [Cryptococcus neoformans var. neoformans JEC21] gi|134118932|ref|XP_771969.1| CNBN1490 [Cryptococcus neoformans var. neoformans B-3501A] RecName: Full=
  misc_feature: Useful for introducing or modulating the production of volatile compounds
MLYIPRAQSMPKFMRRFSAAPELLTAARDIFVTLAWCWICDGTLQFSKEERHYRQGAFIAICLFWLVGGFSVLHSIGRQASETSWSAVKHSKKEHVSTEEHLFLSRQQTDEIKGLMQGLILLYHYNYASQTLWVYKIVRVLISIYFFLSAYGHTLYLLRTGDYSLKRVAVVLFRTNALSALLPYIMGTNYSSYYFAPSVTFWYLVIYAMLRTFRASNSDPWPLAMKVLVTGSFVSMFITTPGYLERAADILHMIFHMSIDAQELRFRLTLDRYIVFVGVMVASLVYTATINDAREVFTTKGSPRLFDSGRARFWVVCTASLALFTYVTQTGLSDKHSYNASHPYISWIPVLTIITLRNLYIPAQKVFLAVPAALGRISLETYILQYHIWLGGDATARLTLSGFENASFPIFLVEKALITVLFIGMAALTHRATRAFTATLSELGFLVFLAALWAGNLVYA

SEQ ID NO: 32640 - DNA, 3335 bp, Muscodor strobelii; identical to SEQ ID NO: 32634
  misc_feature: SGI EST ID NO. CUFF.77094.0
  misc_feature: Variant of the nucleotide sequence at SEQ ID NO 32638

SEQ ID NO: 32641 - DNA, 1653 bp, Muscodor strobelii
  misc_feature: SGI cDNA ID NO. 571251
  misc_feature: Reduced expression when VOC is produced
  misc_feature: Encodes the peptide sequence at SEQ ID NO 32642
atgcgaggagttgcagcctcgacgctgctgctaggcgccaccacggctgccttagctcaagaacagaaggtcctaggcgactttggccactcaactcagcaacccatcgaacacgtcaccgattctgcaaagaatgccatcgattacctgggtgagcatcttaccgaagctttgggagagatgccctccgctgctaagggtctctgggacgagatgagcctcttggttcccggcttcatcgagaaggccaacacattgattacacgacccaaatctcacacacgcagacccgacagcgaatgggaccatattgtcaagggtgccgacctacaaaaccagtgggttaagacggatggagtcgagcaccgcaaggtcgacggctccctggaggcttacaacctccgcgccaagaaggttgatcctgcctctcttggcttagacaaggtcaagcagtacagtggttatcttgatgacgaggctaatgacaaacatcttttctattggttcttcgagtcaagaaacgaccccaagaacgaccctgtcgttctctggttaaatggcggaccaggttgctcttccatgatgggcttgatgatggaacttggcccatccagtgtgaacaaagatggctctctcaaattcaacgactactcatggaatagcaatgcctcggtcatcttcattgatcagcccgtcaacgttggctactcctacagcagcaaccctgtttacaacacattggcagctagcaaggacatctatgcattactcaccctattcttcgaccaattccctgaatatgccgaacagccattccacatcgctggcgagtcctatgcgggccattacatcccggtctttgcctctgaaattctgtctcacaagaagcgcaatatcaatctccagagcattgcaattggtaatggtttgaccgacccgctcgagcaatacacccagtatcgtcccatggcttgcggcgacggtgggtatgacgcagttctagagccgagtgagtgcgcatcgatggacaattctcttccccgttgtcagtcgttgctccaaaactgttacaacacagagagcgcgtggagttgtgtgccggcaaccatatactgcaacaacgcgatgattggtccataccagcgaacaggctacaacgtttacgatatccgggagaagtgcaaagatcaagccaacctttgttacacagagacagcatggatcgccgagtacttgaaccaggagaaagtgatgaaggctcttggagttgaagttaacgactaccagagctgcaataccgacatcaataggaattttgtcttccaaggtgactggggaaaaccattccaccgtctggttcccgacatcctgaagcaaatccctgtacttatctatgctggtgatgcggactatatttgcaattggcttggcaacaaagcctgggctgaggctcttgagtggtccggcaaggcaggtttcaatgacgtcaagttggaggatcttgcccttgacaaagatgcttacggtcaagtgaagagcagcggtaacttcacgttcatgcgcatttatcaggctggccacatggttcctttcaatcagcccgagggctctttagatttcttcaaccggtggattggtggtgaatggtggtag

SEQ ID NO: 32642 - protein, 550 aa, Muscodor strobelii
  misc_feature: SGI Peptide ID NO. 571251
  misc_feature (141)..(547): Pfam Id: PF00450 Pfam Desc: Serine carboxypeptidase
  misc_feature (4)..(545): NCBI GI: 156037572 Blast Desc: SS1G_12500 [Sclerotinia sclerotiorum 1980] gi|154697908|gb|EDN97646.1| SS1G_12500 [Sclerotinia sclerotiorum 1980]
  misc_feature (1)..(550): NCBI GI: 85081820 Blast Desc: carboxypeptidase Y precursor [Neurospora crassa OR74A] gi|28917873|gb|EAA27560.1| carboxypeptidase Y precursor [Neurospora crassa OR74A]
  misc_feature (1)..(550): NCBI GI: 171686190 Blast Desc: protein product [Podospora anserina] gi|170943056|emb|CAP68709.1| protein product [Podospora anserina]
  misc_feature (1)..(550): NCBI GI: 39941504 Blast Desc: MGG_05663 [Magnaporthe grisea 70-15] gi|145022354|gb|EDK06374.1| MGG_05663 [Magnaporthe grisea 70-15]
  misc_feature (4)..(545): NCBI GI: 154316251 Blast Desc: BC1G_03711 [Botryotinia fuckeliana B05.10] gi|150846497|gb|EDN21690.1| BC1G_03711 [Botryotinia fuckeliana B05.10]
  misc_feature (1)..(550): NCBI GI: 145240681 Blast Desc: BC1G_03711 [Botryotinia fuckeliana B05.10] gi|150846497|gb|EDN21690.1| BC1G_03711 [Botryotinia fuckeliana B05.10]
  misc_feature (1)..(550): NCBI GI: 116207690 Blast Desc: CHGG_03138 [Chaetomium globosum CBS 148.51] gi|88183735|gb|EAQ91203.1| CHGG_03138 [Chaetomium globosum CBS 148.51]
  misc_feature (1)..(550): NCBI GI: 46125035 Blast Desc: FG06895.1 [Gibberella zeae PH-1]
  misc_feature (1)..(550): NCBI GI: 121700286 Blast Desc: carboxypeptidase CpyA/Prc1, [Aspergillus clavatus NRRL 1] gi|119396550|gb|EAW06982.1| carboxypeptidase CpyA/Prc1, [Aspergillus clavatus NRRL 1]
  misc_feature (1)..(550): NCBI GI: 256732685 Blast Desc: [Nectria haematococca mpVI 77-13-4]
  misc_feature (45)..(549): SWISSPROT Homolog: EC 3.4.16.5 Carboxypeptidase C
  misc_feature: Useful for introducing or modulating the production of volatile compounds
MRGVAASTLLLGATTAALAQEQKVLGDFGHSTQQPIEHVTDSAKNAIDYLGEHLTEALGEMPSAAKGLWDEMSLLVPGFIEKANTLITRPKSHTRRPDSEWDHIVKGADLQNQWVKTDGVEHRKVDGSLEAYNLRAKKVDPASLGLDKVKQYSGYLDDEANDKHLFYWFFESRNDPKNDPVVLWLNGGPGCSSMMGLMMELGPSSVNKDGSLKFNDYSWNSNASVIFIDQPVNVGYSYSSNPVYNTLAASKDIYALLTLFFDQFPEYAEQPFHIAGESYAGHYIPVFASEILSHKKRNINLQSIAIGNGLTDPLEQYTQYRPMACGDGGYDAVLEPSECASMDNSLPRCQSLLQNCYNTESAWSCVPATIYCNNAMIGPYQRTGYNVYDIREKCKDQANLCYTETAWIAEYLNQEKVMKALGVEVNDYQSCNTDINRNFVFQGDWGKPFHRLVPDILKQIPVLIYAGDADYICNWLGNKAWAEALEWSGKAGFNDVKLEDLALDKDAYGQVKSSGNFTFMRIYQAGHMVPFNQPEGSLDFFNRWIGGEWW

SEQ ID NO: 32643 - DNA, 1987 bp, Muscodor strobelii
  misc_feature: SGI EST ID NO. CUFF.77134.0
  misc_feature: Variant of the nucleotide sequence at SEQ ID NO 32641
gttcccatccttcttcttatcatcatccacttcctttgctcttcattaccactatccttcttcttccatcgtattttacttgtattcggaggtcatcgtcactttggtgaacacttgatcaccatgcgaggagttgcagcctcgacgctgctgctaggcgccaccacggctgccttagctcaagaacagaaggtcctaggcgactttggccactcaactcagcaacccatcgaacacgtcaccgattctgcaaagaatgccatcgattacctgggtgagcatcttaccgaagctttgggagagatgccctccgctgctaagggtctctgggacgagatgagcctcttggttcccggcttcatcgagaaggccaacacattgattacacgacccaaatctcacacacgcagacccgacagcgaatgggaccatattgtcaagggtgccgacctacaaaaccagtgggttaagacggatggagtcgagcaccgcaaggtcgacggctccctggaggcttacaacctccgcgccaagaaggttgatcctgcctctcttggcttagacaaggtcaagcagtacagtggttatcttgatgacgaggctaatgacaaacatcttttctattggttcttcgagtcaagaaacgaccccaagaacgaccctgtcgttctctggttaaatggcggaccaggttgctcttccatgatgggcttgatgatggaacttggcccatccagtgtgaacaaagatggctctctcaaattcaacgactactcatggaatagcaatgcctcggtcatcttcattgatcagcccgtcaacgttggctactcctacagcagcaaccctgtttacaacacattggcagctagcaaggacatctatgcattactcaccctattcttcgaccaattccctgaatatgccgaacagccattccacatcgctggcgagtcctatgcgggccattacatcccggtctttgcctctgaaattctgtctcacaagaagcgcaatatcaatctccagagcattgcaattggtaatggtttgaccgacccgctcgagcaatacacccagtatcgtcccatggcttgcggcgacggtgggtatgacgcagttctagagccgagtgagtgcgcatcgatggacaattctcttccccgttgtcagtcgttgctccaaaactgttacaacacagagagcgcgtggagttgtgtgccggcaaccatatactgcaacaacgcgatgattggtccataccagcgaacaggctacaacgtttacgatatccgggagaagtgcaaagatcaagccaacctttgttacacagagacagcatggatcgccgagtacttgaaccaggagaaagtgatgaaggctcttggagttgaagttaacgactaccagagctgcaataccgacatcaataggaattttgtcttccaaggtgactggggaaaaccattccaccgtctggttcccgacatcctgaagcaaatccctgtacttatctatgctggtgatgcggactatatttgcaattggcttggcaacaaagcctgggctgaggctcttgagtggtccggcaaggcaggtttcaatgacgtcaagttggaggatcttgcccttgacaaagatgcttacggtcaagtgaagagcagcggtaacttcacgttcatgcgcatttatcaggctggccacatggttcctttcaatcagcccgagggctctttagatttcttcaaccggtggattggtggtgaatggtggtagagtgcggggccgtatcggactggaaccatgatacacattttgttgctgttgttgtcgaatagtgcagactggcgcagagcatatccataaatacgtatgaatataacatgattaactacagtaggatgcttgaagcacgaaataatgttacatatcaattatcattcgtacaaagtagtgatcatttcccggacagtcaactggtcttttc

SEQ ID NO: 32644 - DNA, 927 bp, Muscodor strobelii
  misc_feature: SGI cDNA ID NO. 571252
  misc_feature: Reduced expression when VOC is produced
  misc_feature: Encodes the peptide sequence at SEQ ID NO 32645
atgtctcgacaaatcaaccagccgtcgaaccaaatacggctcaccaatgtctcgctcgttcggctgaaaaagggcaagaagcgcttcgagattgcgtgctacaagaacaaagtattagagtggcgttcaggtattgaaacggacctcgacgaggtgctacaaatccccaatgtcttcctcaacgtatccaaaggccagactgcccctactgccgtcctcaaagaagcattcggcaagaatatgccggtcaacgatatcatccttgagatcctcaacaagggcgagctacaagtgggagagaaggagcgcgccgcccagatggaccgagtacacaatgaagtcgtcagcatcgtagcaagtaagctggtcgatccgcggacgaagcgcgtatacacgacaggcatgatacagaaggctctcgacatgctgagctctcaagcacatcagggagacaagagcgcccccgacagtggcgttgcaacgcccacgactggcgaggatactggcgcaaagccaaagccgaaagaacacgtctggacgggtatagtgacgaccaagagtgcaaaaagtcaagccctcgaggctatgaaggctctgattgagcaccaacccatccctgttgctcgggggcggatgagactgcgtattacttgcacgactagcgttctcaagcaagctgtcaaagcctctgccgctgccaagaacgacgatggcgaaagcgagcagaaggccccagggacagtcaaagacaagattctaagtttcgtagaacaggttgaacagcaggacgtgatgggctcagagtgggaagccatggtatttgtagagccaggtgctttcaaggggctgatggattttgtcggcaatgaaacaaagggccagggtaaagttgaagtattagacacgatggtgacccatgaagattaa

SEQ ID NO: 32645 - protein, 308 aa, Muscodor strobelii
  misc_feature: SGI Peptide ID NO. 571252
  misc_feature (15)..(106): Pfam Id: PF01172 Pfam Desc: Shwachman-Bodian-Diamond syndrome (SBDS) protein
  misc_feature (109)..(290): Pfam Id: PF09377 Pfam Desc: SBDS protein C-terminal domain
  misc_feature (1)..(308): NCBI GI: 46125033 Blast Desc: FG06894.1 [Gibberella zeae PH-1]
  misc_feature (5)..(308): NCBI GI: 85081815 Blast Desc: NCU00476 [Neurospora crassa OR74A] gi|28917872|gb|EAA27559.1| NCU00476 [Neurospora crassa OR74A]
  misc_feature (1)..(308): NCBI GI: 39941502 Blast Desc: MGG_05662 [Magnaporthe grisea 70-15] gi|145022353|gb|EDK06373.1| MGG_05662 [Magnaporthe grisea 70-15]
  misc_feature (5)..(308): NCBI GI: 171686192 Blast Desc: protein product [Podospora anserina] gi|170943057|emb|CAP68710.1| protein product [Podospora anserina]
  misc_feature (5)..(308): NCBI GI: 154316253 Blast Desc: BC1G_03712 [Botryotinia fuckeliana B05.10] gi|150846498|gb|EDN21691.1| BC1G_03712 [Botryotinia fuckeliana B05.10]
  misc_feature (5)..(308): NCBI GI: 116207688 Blast Desc: CHGG_03137 [Chaetomium globosum CBS 148.51] gi|88183734|gb|EAQ91202.1| CHGG_03137 [Chaetomium globosum CBS 148.51]
  misc_feature (5)..(308): NCBI GI: 169598496 Blast Desc: SNOG_02052 [Phaeosphaeria nodorum SN15] gi|160704405|gb|EAT90264.2| SNOG_02052 [Phaeosphaeria nodorum SN15]
  misc_feature (5)..(304): NCBI GI: 189208917 Blast Desc: PTRG_10460 [Pyrenophora tritici-repentis Pt-1C-BFP] gi|187976884|gb|EDU43510.1| PTRG_10460 [Pyrenophora tritici-repentis Pt-1C-BFP]
  misc_feature (5)..(308): NCBI GI: 115390146 Blast Desc: conserved [Aspergillus terreus NIH2624] gi|114194974|gb|EAU36674.1| conserved [Aspergillus terreus NIH2624]
  misc_feature (5)..(308): NCBI GI: 261188779 Blast Desc: UPF0023 family protein [Ajellomyces dermatitidis SLH14081] gi|239592035|gb|EEQ74616.1| UPF0023 family protein [Ajellomyces dermatitidis SLH14081]
  misc_feature: Useful for introducing or modulating the production of volatile compounds
MSRQINQPSNQIRLTNVSLVRLKKGKKRFEIACYKNKVLEWRSGIETDLDEVLQIPNVFLNVSKGQTAPTAVLKEAFGKNMPVNDIILEILNKGELQVGEKERAAQMDRVHNEVVSIVASKLVDPRTKRVYTTGMIQKALDMLSSQAHQGDKSAPDSGVATPTTGEDTGAKPKPKEHVWTGIVTTKSAKSQALEAMKALIEHQPIPVARGRMRLRITCTTSVLKQAVKASAAAKNDDGESEQKAPGTVKDKILSFVEQVEQQDVMGSEWEAMVFVEPGAFKGLMDFVGNETKGQGKVEVLDTMVTHED

SEQ ID NO: 32646 - DNA, 1311 bp, Muscodor strobelii
  misc_feature: SGI EST ID NO. CUFF.77163.0
  misc_feature: Variant of the nucleotide sequence at SEQ ID NO 32644
caaagcataaaaacataatatcataccttaggtagatagctttagtaaatagcatttcatcagtcatcgcaacttagcttaattgcggtcattatgagtcatctctcacctgaagcacttttaaggcagcattgcattgatcgaaatttgcaactcccgcgcacatgagtggcccataacttcaattaccaatacgcacctcctcacgtccatgcgactattccagcacagcgcatgcaaacatgtctcgacaaatcaaccagccgtcgaaccaaatacggctcaccaatgtctcgctcgttcggctgaaaaagggcaagaagcgcttcgagattgcgtgctacaagaacaaagtattagagtggcgttcaggtattgaaacggacctcgacgaggtgctacaaatccccaatgtcttcctcaacgtatccaaaggccagactgcccctactgccgtcctcaaagaagcattcggcaagaatatgccggtcaacgatatcatccttgagatcctcaacaagggcgagctacaagtgggagagaaggagcgcgccgcccagatggaccgagtacacaatgaagtcgtcagcatcgtagcaagtaagctggtcgatccgcggacgaagcgcgtatacacgacaggcatgatacagaaggctctcgacatgctgagctctcaagcacatcagggagacaagagcgcccccgacagtggcgttgcaacgcccacgactggcgaggatactggcgcaaagccaaagccgaaagaacacgtctggacgggtatagtgacgaccaagagtgcaaaaagtcaagccctcgaggctatgaaggctctgattgagcaccaacccatccctgttgctcgggggcggatgagactgcgtattacttgcacgactagcgttctcaagcaagctgtcaaagcctctgccgctgccaagaacgacgatggcgaaagcgagcagaaggccccagggacagtcaaagacaagattctaagtttcgtagaacaggttgaacagcaggacgtgatgggctcagagtgggaagccatggtatttgtagagccaggtgctttcaaggggctgatggattttgtcggcaatgaaacaaagggccagggtaaagttgaagtattagacacgatggtgacccatgaagattaagagaaggcaaactaggtagaaaacacaatcatgtccgttctgactataagtcgtgctgggagctcttgagaataaatcattggggcagcatcttagactaagaatatcggcctctacatattgttttttgtctcgaagttat

SEQ ID NO: 32647 - DNA, 525 bp, Muscodor strobelii
  misc_feature: SGI cDNA ID NO. 571253
  misc_feature: Encodes the peptide sequence at SEQ ID NO 32648
atggcagtaaatgttgattttcctcttcatgtttctacggtccatgatctgcccagggcacctcagtccaattttgttgaatcgcccgtaaagagcatcctcgggtttattccattgactttcgattcctttaccaacgtaatcgacggagagctgtcggattctgaggagaaacggtccaccaccaacccatcgactctcgagacaaatcctgaagtgccagtctcgacccagcatgacgtcgataaagctgtcgatgctgctaagatcgcttttgagacgtggtcgcagttgccatgggacgagcgcagaaaggcaattgaagcatttgccgatgctctcgatgcccatgcaatcgagttcggccacattaccgtcagagaaatgggcatttcattgtctgcagcgattcatgatgtgcactggggagtcgaatggcttcgtgacttctgcaagctttcccttccagagagagtccttgatgttacgtgtgagcgtcacgtcattgaaaaatatggtatgtga

SEQ ID NO: 32648 - protein, 174 aa, Muscodor strobelii
  misc_feature: SGI Peptide ID NO. 571253
  misc_feature (52)..(153): Pfam Id: PF00171 Pfam Desc: Aldehyde dehydrogenase family
  misc_feature (39)..(172): NCBI GI: 115401882 Blast Desc: conserved [Aspergillus terreus NIH2624] gi|114190470|gb|EAU32170.1| conserved [Aspergillus terreus NIH2624]
  misc_feature (39)..(172): NCBI GI: 46140055 Blast Desc: FG11542.1 [Gibberella zeae PH-1]
  misc_feature (41)..(172): NCBI GI: 261189973 Blast Desc: aldehyde dehydrogenase [Ajellomyces dermatitidis SLH14081] gi|239591633|gb|EEQ74214.1| aldehyde dehydrogenase [Ajellomyces dermatitidis SLH14081]
  misc_feature (41)..(172): NCBI GI: 239612835 Blast Desc: aldehyde dehydrogenase [Ajellomyces dermatitidis ER-3]
  misc_feature (39)..(172): NCBI GI: 119487483 Blast Desc: aldehyde dehydrogenase [Neosartorya fischeri NRRL 181] gi|119410691|gb|EAW20637.1| aldehyde dehydrogenase [Neosartorya fischeri NRRL 181]
  misc_feature (39)..(172): NCBI GI: 256724863 Blast Desc: NECHADRAFT_58675 [Nectria haematococca mpVI 77-13-4]
  misc_feature (39)..(172): NCBI GI: 225677614 Blast Desc: betaine aldehyde dehydrogenase [Paracoccidioides brasiliensis Pb03] gi|226295241|gb|EEH50661.1| betaine aldehyde dehydrogenase [Paracoccidioides brasiliensis Pb18]
  misc_feature (39)..(172): NCBI GI: 145249146 Blast Desc: An14g02870 [Aspergillus niger] gi|134081589|emb|CAK41998.1| protein product [Aspergillus niger]
  misc_feature (39)..(172): NCBI GI: 119483928 Blast Desc: aldehyde dehydrogenase [Neosartorya fischeri NRRL 181] gi|119410023|gb|EAW19970.1| aldehyde dehydrogenase [Neosartorya fischeri NRRL 181]
  misc_feature (39)..(172): NCBI GI: 226278777 Blast Desc: betaine aldehyde dehydrogenase [Paracoccidioides brasiliensis Pb01]
  misc_feature (43)..(145): SWISSPROT Homolog: EC 1.2.1.27 Methylmalonate-semialdehyde dehydrogenase (acylating)
  misc_feature (43)..(145): SWISSPROT Homolog: EC 1.2.1.18 Malonate-semialdehyde dehydrogenase (acetylating)
MAVNVDFPLHVSTVHDLPRAPQSNFVESPVKSILGFIPLTFDSFTNVIDGELSDSEEKRSTTNPSTLETNPEVPVSTQHDVDKAVDAAKIAFETWSQLPWDERRKAIEAFADALDAHAIEFGHITVREMGISLSAAIHDVHWGVEWLRDFCKLSLPERVLDVTCERHVIEKYGM

SEQ ID NO: 32649 - DNA, 858 bp, Muscodor strobelii
  misc_feature: SGI cDNA ID NO. 571254
  misc_feature: Encodes the peptide sequence at SEQ ID NO 32650
atgcatctccaaaacacattccaagttctcgtgggcttgctacctatccttgcattaggccactcatcacacgactccataagctcatcatccaggcgaggcttgaaatggagaggtcgtgctcagaagcgcgagcctctaacaatcattcagcaaataatacaagaaccaaacattataatagtagaagacaaccgtgagtattatctggcagagcaagaattcgctgcattagtagaagctcaagctgcactcatcatacaactagacaccatcaagaacaacatccgaataaaccacttcctatcccgcttctcgcaagccaacaccgtcatcgtcacagtgacaaccgtaatagacgccagaacagaggactccaagggcaacaaaaaagataaatcaacccgctacatggtaaaccaactcctcgccgacaacaacaagccagaccaacaggtcacagtgatggtttccgacgcgcagacgatgactatcggcaacgcggcgtcagctaccatcggtaacgtcggcggcgttgtttcagccagcgcagttagcacgcccacagcaactcccgccctctctatcgcggacccaaacgcgccgttcggacaacaaaatcaaagtgttattcttgcagctggagtgtcggcgccatcgatcgacctcgtattcgctgaccctgccgctatcatcctgcctaaccaagcaaatctgtttgtggagagcacggatacgttcacgcaggattgccttttctaccaaagcaatagcaatgccttccttaacattgttacacagcttttcacatcattcgcggtcggagacgcgaacatcacgaagcagatcgcagcgtaa

SEQ ID NO: 32650 - protein, 285 aa, Muscodor strobelii
  misc_feature: SGI Peptide ID NO. 571254
  misc_feature (207)..(252): NCBI GI: 171686218 Blast Desc: protein product [Podospora anserina] gi|170943070|emb|CAP68723.1| protein product [Podospora anserina]
MHLQNTFQVLVGLLPILALGHSSHDSISSSSRRGLKWRGRAQKREPLTIIQQIIQEPNIIIVEDNREYYLAEQEFAALVEAQAALIIQLDTIKNNIRINHFLSRFSQANTVIVTVTTVIDARTEDSKGNKKDKSTRYMVNQLLADNNKPDQQVTVMVSDAQTMTIGNAASATIGNVGGVVSASAVSTPTATPALSIADPNAPFGQQNQSVILAAGVSAPSIDLVFADPAAIILPNQANLFVESTDTFTQDCLFYQSNSNAFLNIVTQLFTSFAVGDANITKQIAA

SEQ ID NO: 32651 - DNA, 2010 bp, Muscodor strobelii
  misc_feature: SGI EST ID NO. CUFF.77215.0
  misc_feature: Variant of the nucleotide sequence at SEQ ID NO 32649
gcggaaagtaactaacaggacctcttttgcccatcagaagcagaagtcgatgctctcacccagctggcagagcaagaattcgctgcattagtagaagctcaagctgcactcatcatacaactagacaccatcaagaacaacatccgaataaaccacttcctatcccgcttctcgcaagccaacaccgtcatcgtcacagtgacaaccgtaatagacgccagaacagaggactccaagggcaacaaaaaagataaatcaacccgctacatggtaaaccaactcctcgccgacaacaacaagccagaccaacaggtcacagtgatggtttccgacgcgcagacgatgactatcggcaacgcggcgtcagctaccatcggtaacgtcggcggcgttgtttcagccagcgcagttagcacgcccacagcaactcccgccctctctatcgcggacccaaacgcgccgttcggacaacaaaatcaaagtgttattcttgcagctggagtgtcggcgccatcgatcgacctcgtattcgctgaccctgccgctatcatcctgcctaaccaagcaaatctgtttgtggagagcacggatacgttcacgcaggattgccttttctaccaaagcaatagcaatgccttccttaacattgttacacagcttttcacatcattcgcggtcggagacgcgaacatcacgaagcagatcgcagcgtaatagatcaacatcaatctctggtgctcgatatcactattctgtatatagacattcgtaagaaaaattcgatacagcagattccagggatttgcggtggcgttgggggaatattcctcgtgggcaaatattgatttccgcagtagacctgcgcgagttggttcaatgaactatgtattcctacaggttaggaggtattgtaatgcatattcccatcaactttcatcaaccacagttacagacgaatgttctttcctatgatatcctacttcgctttgattcatctatgcgggcttgatctaggcttttgactgagtcgcggctacttggccgaacgacatgcttgctctgctacggatgggacatgatttccaacagcattgcgtattgaagcaaaggggaaggggactggataagatgtaatttggaaagaggcttgttccgtgccgtttcaacgttaaggcgctgatcagcgccgttttgcatttcgaacccgaatttggggaaataccagtggcagggccagtactgccacttgagatttggtccccttgtcgacctttatgctgattttgccgccgatctcccggaagtaattagtaaactgtttctcatctaggccaaggtcgtgccggatctccctcggatcaaattgataattcgataaaattgctgccagtacacagcaatgcgtgtagagcaaatcgcggtggaaggagtcgacgatctgatcggacgagaatttccgcctaatgctttggaataccggttcgggagctggttgcagaagctccctgagttgatctggtttgggaagctttcgcgctttaccaggcttaattgtcgctttggcaaatttaatcaagcaatctagataacgaagggctcttaacctcgctgcagagtttggcccttcgcccacaggctgtagccgggaagcaacgaaggcacttgttaggtaagtggctgtgttcttctttattatgtcctgccagtctttgatgggaatggcgcccagaatctcgcttccgatgaggccttccagagtgtagacatcttgtatctcttcggcctcgaagttgcctggcggcctgggcttcgatgcatctaccactgcttgcagttcttctctggatgccatggtgctggtgacttcgttgatggaggcaaggattgctttcgatgacgcgtctagcttctgtggtttgctgtcggggttggtgattgcgttctcggttacggccgcaagagctttcttggctttcttggtgccgaaggcatggccgagatccgtccgct

SEQ ID NO: 32652 - DNA, 1410 bp, Muscodor strobelii
  misc_feature: SGI cDNA ID NO. 571255
  misc_feature: Encodes the peptide sequence at SEQ ID NO 32653
atggggagtaaagagaagagaaagaggcaagaagaggctatctcacagcctaagaagaagatagccaccgaggcagcctcactgccggcgcgaccgtctaaggcttcacaagcaacacaaacttcacaaccaccactcccaaccacgattcgagttgcttcagttcagatcggtaacagctgcccccctgtactagccacgcatccaggtctttgcattccgcaggatgtcaagttccagacctacaccaaacccagcccgaaacagcaacgatccaagcatgccacatccgactctgcagacctgctccttcactcctcgtctcatagcaagatagactataccgccaaggaagaaggccctggtggtcgcgagtcccacctcaaacattatatcggcgtcttcgaccctgccaatggccaattgtcggtcgttgaggccaagaagatgaccataaggggccttgtgcgctcccagcagccccctgaagaagacatgcagagcaactccaaggtaacaagcacacctcttctatttaccatgatacctattcctgacacctcccagtccatgttggagcagcggacggatctcggccatgccttcggcaccaagaaagccaagaaagctcttgcggccgtaaccgagaacgcaatcaccaaccccgacagcaaaccacagaagctagacgcgtcatcgaaagcaatccttgcctccatcaacgaagtcaccagcaccatggcatccagagaagaactgcaagcagtggtagatgcatcgaagcccaggccgccaggcaacttcgaggccgaagagatacaagatgtctacactctggaaggcctcatcggaagcgagattctgggcgccattcccatcaaagactggcaggacataataaagaagaacacagccacttacctaacaagtgccttcgttgcttcccggctacagcctgtgggcgaagggccaaactctgcagcgaggttaagagcccttcgttatctagattgcttgattaaatttgccaaagcgacaattaagcctggtaaagcgcgaaagcttcccaaaccagatcaactcagggagcttctgcaaccagctcccgaaccggtattccaaagcattaggcggaaattctcgtccgatcagatcgtcgactccttccaccgcgatttgctctacacgcattgctgtgtactggcagcaattttatcgaattatcaatttgatccgagggagatccggcacgaccttggcctagatgagaaacagtttactaattacttccgggagatcggcggcaaaatcagcataaaggtcgacaaggggaccaaatctcaagtggcagtactggccctgccactggtatttccccaaattcgggttcgaaatgcaaaacggcgctga

SEQ ID NO: 32653 - protein, 469 aa, Muscodor strobelii
  misc_feature: SGI Peptide ID NO. 571255
  misc_feature (72)..(468): Pfam Id: PF06870 Pfam Desc: A49-like RNA polymerase I associated factor
  misc_feature (193)..(342): Pfam Id: PF06870 Pfam Desc: A49-like RNA polymerase I associated factor
  misc_feature (377)..(468): Pfam Id: PF06870 Pfam Desc: A49-like RNA polymerase I associated factor
  misc_feature (3)..(461): NCBI GI: 145608782 Blast Desc: MGG_06381 [Magnaporthe grisea 70-15] gi|145016211|gb|EDK00701.1| MGG_06381 [Magnaporthe grisea 70-15]
  misc_feature (3)..(469): NCBI GI: 256729875 Blast Desc: [Nectria haematococca mpVI 77-13-4]
  misc_feature (1)..(469): NCBI GI: 46122345 Blast Desc: FG05550.1 [Gibberella zeae PH-1]
  misc_feature (1)..(468): NCBI GI: 85083476 Blast Desc: NCU06485 [Neurospora crassa OR74A] gi|28918211|gb|EAA27889.1| [Neurospora crassa OR74A]
  misc_feature (6)..(461): NCBI GI: 261358358 Blast Desc: conserved [Verticillium albo-atrum VaMs.102]
  misc_feature (52)..(462): NCBI GI: 171686784 Blast Desc: protein product [Podospora anserina] gi|170943353|emb|CAP69006.1| protein product [Podospora anserina]
  misc_feature (5)..(461): NCBI GI: 154323131 Blast Desc: BC1G_00908 [Botryotinia fuckeliana B05.10] gi|150848242|gb|EDN23435.1| BC1G_00908 [Botryotinia fuckeliana B05.10]
  misc_feature (5)..(461): NCBI GI: 156064489 Blast Desc: SS1G_00252 [Sclerotinia sclerotiorum 1980] gi|154691114|gb|EDN90852.1| SS1G_00252 [Sclerotinia sclerotiorum 1980]
  misc_feature (31)..(469): NCBI GI: 116192031 Blast Desc: CHGG_05733 [Chaetomium globosum CBS 148.51] gi|88181646|gb|EAQ89114.1| CHGG_05733 [Chaetomium globosum CBS 148.51]
  misc_feature (99)..(461): NCBI GI: 169611875 Blast Desc: SNOG_09052 [Phaeosphaeria nodorum SN15] gi|160702386|gb|EAT83244.2| SNOG_09052 [Phaeosphaeria nodorum SN15]
MGSKEKRKRQEEAISQPKKKIATEAASLPARPSKASQATQTSQPPLPTTIRVASVQIGNSCPPVLATHPGLCIPQDVKFQTYTKPSPKQQRSKHATSDSADLLLHSSSHSKIDYTAKEEGPGGRESHLKHYIGVFDPANGQLSVVEAKKMTIRGLVRSQQPPEEDMQSNSKVTSTPLLFTMIPIPDTSQSMLEQRTDLGHAFGTKKAKKALAAVTENAITNPDSKPQKLDASSKAILASINEVTSTMASREELQAVVDASKPRPPGNFEAEEIQDVYTLEGLIGSEILGAIPIKDWQDIIKKNTATYLTSAFVASRLQPVGEGPNSAARLRALRYLDCLIKFAKATIKPGKARKLPKPDQLRELLQPAPEPVFQSIRRKFSSDQIVDSFHRDLLYTHCCVLAAILSNYQFDPREIRHDLGLDEKQFTNYFREIGGKISIKVDKGTKSQVAVLALPLVFPQIRVRNAKRR

SEQ ID NO: 32654 - DNA, 2520 bp, Muscodor strobelii
  misc_feature: SGI EST ID NO. CUFF.77216.1
  misc_feature: Variant of the nucleotide sequence at SEQ ID NO 32652
tgaacttcaatcgcaatagaagcggcagcctgagcatttacgaagctcatttgcctcaaactgtacacatacttcactgtaaagtcctcacataccatttcttgtctgttacaggctctcccgtcgttcaattgtcatataccaagcatctccacctctctattgtcgtcaccttccacctatcggactatggggagtaaagagaagagaaagaggcaagaagaggctatctcacagcctaagaagaagatagccaccgaggcagcctcactgccggcgcgaccgtctaaggcttcacaagcaacacaaacttcacaaccaccactcccaaccacgattcgagttgcttcagttcagatcggtaacagctgcccccctgtactagccacgcatccaggtctttgcattccgcaggatgtcaagttccagacctacaccaaacccagcccgaaacagcaacgatccaagcatgccacatccgactctgcagacctgctccttcactcctcgtctcatagcaagatagactataccgccaaggaagaaggccctggtggtcgcgagtcccacctcaaacattatatcggcgtcttcgaccctgccaatggccaattgtcggtcgttgaggccaagaagatgaccataaggggccttgtgcgctcccagcagccccctgaagaagacatgcagagcaactccaagtccatgttggagcagcggacggatctcggccatgccttcggcaccaagaaagccaagaaagctcttgcggccgtaaccgagaacgcaatcaccaaccccgacagcaaaccacagaagctagacgcgtcatcgaaagcaatccttgcctccatcaacgaagtcaccagcaccatggcatccagagaagaactgcaagcagtggtagatgcatcgaagcccaggccgccaggcaacttcgaggccgaagagatacaagatgtctacactctggaaggcctcatcggaagcgagattctgggcgccattcccatcaaagactggcaggacataataaagaagaacacagccacttacctaacaagtgccttcgttgcttcccggctacagcctgtgggcgaagggccaaactctgcagcgaggttaagagcccttcgttatctagattgcttgattaaatttgccaaagcgacaattaagcctggtaaagcgcgaaagcttcccaaaccagatcaactcagggagcttctgcaaccagctcccgaaccggtattccaaagcattaggcggaaattctcgtccgatcagatcgtcgactccttccaccgcgatttgctctacacgcattgctgtgtactggcagcaattttatcgaattatcaatttgatccgagggagatccggcacgaccttggcctagatgagaaacagtttactaattacttccgggagatcggcggcaaaatcagcataaaggtcgacaaggggaccaaatctcaagtggcagtactggccctgccactggtatttccccaaattcgggttcgaaatgcaaaacggcgctgatcagcgccttaacgttgaaacggcacggaacaagcctctttccaaattacatcttatccagtccccttcccctttgcttcaatacgcaatgctgttggaaatcatgtcccatccgtagcagagcaagcatgtcgttcggccaagtagccgcgactcagtcaaaagcctagatcaagcccgcatagatgaatcaaagcgaagtaggatatcataggaaagaacattcgtctgtaactgtggttgatgaaagttgatgggaatatgcattacaatacctcctaacctgtaggaatacatagttcattgaaccaactcgcgcaggtctactgcggaaatcaatatttgcccacgaggaatattcccccaacgccaccgcaaatccctggaatctgctgtatcgaatttttcttacgaatgtctatatacagaatagtgatatcgagcaccagagattgatgttgatctattacgctgcgatctgcttcgtgatgttcgcgtctccgaccgcgaatgatgtgaaaagctgtgtaacaatgttaaggaaggcattgctattgctttggtagaaaaggcaatcctgcgtgaacgtatccgtgctctccacaaacagatttgcttggttaggcaggatgatagcggcagggtcagcgaatacgaggtcgatcgatggcgccgacactccagctgcaagaataacactttgattttgttgtccgaacggcgcgtttgggtccgcgatagagagggcgggagttgctgtgggcgtgctaactgcgctggctgaaacaacgccgccgacgttaccgatggtagctgacgccgcgttgccgatagtcatcgtctgcgcgtcggaaaccatcactgtgacctgttggtctggcttgttgttgtcggcgaggagttggtttaccatgtagcgggttgatttatcttttttgttgcccttggagtcctctgttctggcgtctattacgg

SEQ ID NO: 32655 - DNA, 1365 bp, Muscodor strobelii
  misc_feature: SGI cDNA ID NO. 571256
  misc_feature: Encodes the peptide sequence at SEQ ID NO 32656
atgtggatgactacgagctcgattttgataattttcattgtctggttagcagctgctcaatcggtgtcactcctgaacatcacgatcgcagatcttatcgcctcactcgaagcaggtgacttcaccagtcaagacctagtagcactctacacgcaacgaatcagagaagtcaacgaagagctcaacgcggtgattgagctcaatcccgatgcacaacgcatagccgaggcgctagacgatgagcgcgcgattggagttatcagaggtggcctccatggcataccaatcttagtaaaagacaactatgctgaagccaccgttgtcacaaagctgagagaagccggcgctatcatcttgggcaagactaatctagccgagttttccggagctcgcggctcaaacacgacacagggctggagtcctcgtggtggacagacattcggtgcgtacgtcgagaaccagactgcctgcggttcatcgagcggttcagcagtcgctgctgctctgggtcttgccgctggaacgcttggcacggatacgtcgggcagtataacatgtcctgccatgtacagcaacgtggtcggtatcaagccaacggttggcctgacctcgcggtttgggattgtaccggtgggtatattgctaagtgtcatcgcttttgacgatttcatctcagcccgtcaagacaccgcgggtccaatagctcagaatgtcgaggatgctgccctcattctagatgccatcgttggtaaagacccaaacgataattatacctccgcgcaaccgtgggaatcccctccaagttttgctgagggtctgaatcaatcggctctgcgagacgctcgtatcggtgtcgtgtggatgaatgaatcattttttcacacaagtaacttcgtcaacttgcagtacatcaaaccagccttcgatcaagctatcgtcgacctcaaaacggcaggagcagagcttttcaacgttgatctagatctcaatggtctcacggtctcagaaataaccagatctgtatacgatatcgtcacgtactacttaacagctgacatgaaagagggtatggagcgttacttccagcaaattctcgatcctgaccgagcatctatccaaaacatatctgatctagtcgaatgtatgagaactgaacctcaagaacttatctctaaatttagtatcgacttcctagaagaagtagactttgttaacggtaccgccggtggatcgagagcatgggaagcttacatgaatgtctcaacgataacgagacatatggtagtaagcccattggaaagatatggtcttgatgctcttgttatgctccccgaaggtgtgtatgcaagcctgctacgcgagtga

SEQ ID NO: 32656 - protein, 454 aa, Muscodor strobelii
  misc_feature: SGI Peptide ID NO. 571256
  misc_feature (45)..(452): Pfam Id: PF01425 Pfam Desc: Amidase
  misc_feature (104)..(218): Pfam Id: PF01425 Pfam Desc: Amidase
  misc_feature (45)..(103): Pfam Id: PF01425 Pfam Desc: Amidase
  misc_feature (224)..(287): Pfam Id: PF01425 Pfam Desc: Amidase
  misc_feature (24)..(441): NCBI GI: 189201323 Blast Desc: glutamyl-tRNA(Gln) amidotransferase subunit A [Pyrenophora tritici-repentis Pt-1C-BFP] gi|187984097|gb|EDU49585.1| glutamyl-tRNA(Gln) amidotransferase A
  misc_feature (11)..(442): NCBI GI: 238837925 Blast Desc: amidase [Microsporum canis CBS 113480]
  misc_feature (23)..(385): NCBI GI: 171695870 Blast Desc: protein product [Podospora anserina] gi|170948177|emb|CAP60341.1| protein product [Podospora anserina]
  misc_feature (29)..(428): NCBI GI: 254521207 Blast Desc: peptide amidase [Stenotrophomonas sp. SKA14] gi|219718798|gb|EED37323.1| peptide amidase [Stenotrophomonas sp. SKA14]
  misc_feature (29)..(447): NCBI GI: 190572974 Blast Desc: amidase [Stenotrophomonas maltophilia K279a] gi|190010896|emb|CAQ44505.1| amidase [Stenotrophomonas maltophilia K279a]
  misc_feature (17)..(388): NCBI GI: 70997715 Blast Desc: amidase [Aspergillus fumigatus Af293] gi|66851230|gb|EAL91556.1| amidase, [Aspergillus fumigatus Af293] gi|159126673|gb|EDP51789.1| amidase, [Aspergillus fumigatus
  misc_feature (17)..(447): NCBI GI: 225555498 Blast Desc: amidase [Ajellomyces capsulatus G186AR]
  misc_feature (17)..(447): NCBI GI: 240273757 Blast Desc: amidase [Ajellomyces capsulatus H143]
  misc_feature (29)..(447): NCBI GI: 194364564 Blast Desc: Amidase [Stenotrophomonas maltophilia R551-3] gi|194347368|gb|ACF50491.1| Amidase [Stenotrophomonas maltophilia R551-3]
  misc_feature (29)..(447): NCBI GI: 19744118 Blast Desc: peptide amidase [Stenotrophomonas maltophilia]
  misc_feature (16)..(287): SWISSPROT Homolog: EC 3.5.1.4 Amidase
MWMTTSSILIIFIVWLAAAQSVSLLNITIADLIASLEAGDFTSQDLVALYTQRIREVNEELNAVIELNPDAQRIAEALDDERAIGVIRGGLHGIPILVKDNYAEATVVTKLREAGAIILGKTNLAEFSGARGSNTTQGWSPRGGQTFGAYVENQTACGSSSGSAVAAALGLAAGTLGTDTSGSITCPAMYSNVVGIKPTVGLTSRFGIVPVGILLSVIAFDDFISARQDTAGPIAQNVEDAALILDAIVGKDPNDNYTSAQPWESPPSFAEGLNQSALRDARIGVVWMNESFFHTSNFVNLQYIKPAFDQAIVDLKTAGAELFNVDLDLNGLTVSEITRSVYDIVTYYLTADMKEGMERYFQQILDPDRASIQNISDLVECMRTEPQELISKFSIDFLEEVDFVNGTAGGSRAWEAYMNVSTITRHMVVSPLERYGLDALVMLPEGVYASLLRE

SEQ ID NO: 32657 - DNA, 1018 bp, Muscodor strobelii
  misc_feature: SGI EST ID NO. CUFF.77155.0
  misc_feature: Variant of the nucleotide sequence at SEQ ID NO 32655
aagccggcgctatcatcttgggcaagactaatctagccgagttttccggagctcgcggctcaaacacgacacagggctggagtcctcgtggtggacagacattcggtgcgtacgtcgagaaccagactgcctgcggttcatcgagcggttcagcagtcgctgctgctctgggtcttgccgctggaacgcttggcacggatacgtcgggcagtataacatgtcctgccatgtacagcaacgtggtcggtatcaagccaacggttggcctgacctcgcggtttgggattgtaccggatctcagcccgtcaagacaccgcgggtccaatagctcagaatgtcgaggatgctgccctcattctagatgccatcgttggtaaagacccaaacgataattatacctccgcgcaaccgtgggaatcccctccaagttttgctgagggtctgaatcaatcggctctgcgagacgctcgtatcggtgtcgtgtggatgaatgaatcattttttcacacaagtaacttcgtcaacttgcagtacatcaaaccagccttcgatcaagctatcgtcgacctcaaaacggcaggagcagagcttttcaacgttgatctagatctcaatggtctcacggtctcagaaataaccagatctgtatacgatatcgtcacgtactacttaacagctgacatgaaagagggtatggagcgttacttccagcaaattctcgatcctgaccgagcatctatccaaaacatatctgatctagtcgaatgtatgagaactgaacctcaagaacttatctctaaatttagtatcgacttcctagaagaagtagactttgttaacggtaccgccggtggatcgagagcatgggaagcttacatgaatgtctcaacgataacgagacatatggtagtaagcccattggaaagatatggtcttgatgctcttgttatgctccccgaaggtgtgtatgcaagcctgctacgcgagtgattccttattgccgtgtttaggtaatcgc

SEQ ID NO: 32658 - DNA, 1641 bp, Muscodor strobelii
  misc_feature: SGI cDNA ID NO. 571257
  misc_feature: Elevated expression when VOC is produced
  misc_feature: Encodes the peptide sequence at SEQ ID NO 32659
atgtccgattccgacaggatggagaaggacatggagaagaatgtctctgtatctccccatcactatggagctgagtctccggtggacgaagaggtcggcatcgtccacaaggccgctgccctcaagaccgatctcaggggtcgtcacatgcagatgatttccattggcggtgcaattggtgcaggtctgttcatcggttctggaaaggccctcgcaactggtggtccagctcccctgctcatcggttacattgttgtcggcgccatgttgctcatgactatgcaagccctgggagaattggccgtcatgtatccgatcaatggtgccttctatacatacatcgtccgtttcatcgacccgtcatggggctttgctgttggttgggaatatgcgattggttggcttactatcctacccttcgaagtaatcgctgccagtggtactgtgaaatactggaatgacacgctgaattcggccatcttcgtcaccattttcttggttgttcttacgattatccaggtcttcggtgtccgtggatacggtgaagtcgaattcgttctcagtatcatcaagattgcagcatgtatcggcttcatcatcttcggtattgtcgtcaatgtcggcggtgtcggagacaagggctatctgggcgctaaatactggcacgatcccggtgctttccacaatggattcaatggttttgccagtgtcttcgtcgttgcttcctttgctttcggtggtactgagctggtaggattggctgctgccgaatcagcaaacccccgaaaagccatcccccttgccgcaaaacaggtcttcttccgaatctttttcttttacgttgtcaatctcttcattcttggcctcatccttccttacaacgacgagcgtctcagcctgggatcatctaataattcgagattctcacccttcactctcgccattgccgacgctggtgttgcggttctgccctctatcttcaacgccgtcatcactatctctgtcattagtgtcgccaactcatgcacttttggatcaacccgaaccatgcaggctcttgccgagcgtggaatggcgcctaaattccttgcctatgttgacaagcatggtcgaccggtctgggccgttgttatccagcttattttcggcctcttgggatatgtagtagatgcgccgaagggaggtgaggcctttgattggcttctctcattgtctggcctttcttacttcttcgtctacggctcggtttgccttgcccacatccgcttcagacatgcatggaaactgcaaggaagagacttgcgggagatcccctacaaagcacctcttggtatctacggtagttggtttgggttcttcctcgtttgggtctgcctgctcgccacattctacaatgccctttaccccagcccagatgctcagcccagcgccgaggcgttcttcaaggtgtacttagctgccgtcattgtacttctcctgtacgtcttctggaaggtttatacccggaactggaaaatgtacatcaagctcgaggagatcgatctcgtttcaggcagccgaccgttggatccatccgagttcgacacaccggaggagaagaagcctagttggccagtacgcatccttcgttcgcttttctaa

SEQ ID NO: 32659 - protein, 546 aa, Muscodor strobelii
  misc_feature: SGI Peptide ID NO. 571257
  misc_feature (49)..(510): Pfam Id: PF00324 Pfam Desc: Amino acid permease
  misc_feature (7)..(546): NCBI GI: 145614258 Blast Desc: MGG_11327 [Magnaporthe grisea 70-15] gi|145021199|gb|EDK05328.1| MGG_11327 [Magnaporthe grisea 70-15]
  misc_feature (16)..(546): NCBI GI: 256729863 Blast Desc: [Nectria haematococca mpVI 77-13-4]
  misc_feature (16)..(546): NCBI GI: 62361830 Blast Desc: amino acid permease [Glomus mosseae]
  misc_feature (16)..(546): NCBI GI: 46122393 Blast Desc: FG05574.1 [Gibberella zeae PH-1]
  misc_feature (26)..(545): NCBI GI: 46133827 Blast Desc: FG09053.1 [Gibberella zeae PH-1]
  misc_feature (17)..(546): NCBI GI: 171685852 Blast Desc: protein product [Podospora anserina] gi|170942887|emb|CAP68540.1| protein product [Podospora anserina]
  misc_feature (13)..(545): NCBI GI: 212539442 Blast Desc: general amino-acid permease GAP1, [Penicillium marneffei ATCC 18224] gi|210067175|gb|EEA21267.1| general amino-acid permease GAP1, [Penicillium marneffei ATCC 18224]
  misc_feature (12)..(545): NCBI GI: 242804523 Blast Desc: amino acid transporter, [Talaromyces stipitatus ATCC 10500] gi|218717737|gb|EED17158.1| amino acid transporter, [Talaromyces stipitatus ATCC 10500]
  misc_feature (9)..(538): NCBI GI: 156044714 Blast Desc: SS1G_10461 [Sclerotinia sclerotiorum 1980] gi|154694849|gb|EDN94587.1| SS1G_10461 [Sclerotinia sclerotiorum 1980]
  misc_feature (3)..(538): NCBI GI: 169786157 Blast Desc: [Aspergillus oryzae RIB40] gi|83776287|dbj|BAE66406.1| protein product [Aspergillus oryzae]
  misc_feature: Useful for introducing or modulating the production of volatile compounds
MSDSDRMEKDMEKNVSVSPHHYGAESPVDEEVGIVHKAAALKTDLRGRHMQMISIGGAIGAGLFIGSGKALATGGPAPLLIGYIVVGAMLLMTMQALGELAVMYPINGAFYTYIVRFIDPSWGFAVGWEYAIGWLTILPFEVIAASGTVKYWNDTLNSAIFVTIFLVVLTIIQVFGVRGYGEVEFVLSIIKIAACIGFIIFGIVVNVGGVGDKGYLGAKYWHDPGAFHNGFNGFASVFVVASFAFGGTELVGLAAAESANPRKAIPLAAKQVFFRIFFFYVVNLFILGLILPYNDERLSLGSSNNSRFSPFTLAIADAGVAVLPSIFNAVITISVISVANSCTFGSTRTMQALAERGMAPKFLAYVDKHGRPVWAVVIQLIFGLLGYVVDAPKGGEAFDWLLSLSGLSYFFVYGSVCLAHIRFRHAWKLQGRDLREIPYKAPLGIYGSWFGFFLVWVCLLATFYNALYPSPDAQPSAEAFFKVYLAAVIVLLLYVFWKVYTRNWKMYIKLEEIDLVSGSRPLDPSEFDTPEEKKPSWPVRILRSLF

SEQ ID NO: 32660 - DNA, 1988 bp, Muscodor strobelii
  misc_feature: SGI EST ID NO. CUFF.77161.0
  misc_feature: Variant of the nucleotide sequence at SEQ ID NO 32658
gtggcacatggcatatgaaaacatccggcaggaagtatagcttgtcgccgcgtatataacatctcagagactgcccccttcccgctgcggctttatacccggtctcgccttgtgtctcttcttgactctcgccttcgacaaccgtgtcgcccctaacctcatccgttggtatagtgcgaccaaggaactcatcgccatcatgtccgattccgacaggatggagaaggacatggagaagaatgtctctgtatctccccatcactatggagctgagtctccggtggacgaagaggtcggcatcgtccacaaggccgctgccctcaagaccgatctcaggggtcgtcacatgcagatgatttccattggcggtgcaattggtgcaggtctgttcatcggttctggaaaggccctcgcaactggtggtccagctcccctgctcatcggttacattgttgtcggcgccatgttgctcatgactatgcaagccctgggagaattggccgtcatgtatccgatcaatggtgccttctatacatacatcgtccgtttcatcgacccgtcatggggctttgctgttggttgggaatatgcgattggttggcttactatcctacccttcgaagtaatcgctgccagtggtactgtgaaatactggaatgacacgctgaattcggccatcttcgtcaccattttcttggttgttcttacgattatccaggtcttcggtgtccgtggatacggtgaagtcgaattcgttctcagtatcatcaagattgcagcatgtatcggcttcatcatcttcggtattgtcgtcaatgtcggcggtgtcggagacaagggctatctgggcgctaaatactggcacgatcccggtgctttccacaatggattcaatggttttgccagtgtcttcgtcgttgcttcctttgctttcggtggtactgagctggtaggattggctgctgccgaatcagcaaacccccgaaaagccatcccccttgccgcaaaacaggtcttcttccgaatctttttcttttacgttgtcaatctcttcattcttggcctcatccttccttacaacgacgagcgtctcagcctgggatcatctaataattcgagattctcacccttcactctcgccattgccgacgctggtgttgcggttctgccctctatcttcaacgccgtcatcactatctctgtcattagtgtcgccaactcatgcacttttggatcaacccgaaccatgcaggctcttgccgagcgtggaatggcgcctaaattccttgcctatgttgacaagcatggtcgaccggtctgggccgttgttatccagcttattttcggcctcttgggatatgtagtagatgcgccgaagggaggtgaggcctttgattggcttctctcattgtctggcctttcttacttcttcgtctacggctcggtttgccttgcccacatccgcttcagacatgcatggaaactgcaaggaagagacttgcgggagatcccctacaaagcacctcttggtatctacggtagttggtttgggttcttcctcgtttgggtctgcctgctcgccacattctacaatgccctttaccccagcccagatgctcagcccagcgccgaggcgttcttcaaggtgtacttagctgccgtcattgtacttctcctgtacgtcttctggaaggtttatacccggaactggaaaatgtacatcaagctcgaggagatcgatctcgtttcaggcagccgaccgttggatccatccgagttcgacacaccggaggagaagaagcctagttggccagtacgcatccttcgttcgcttttctaatccgggtggctggtgtgccacggtgttggaaatgtttcgaagcatggttattagtacaatatcatatactataccccacacgtagaacaacatatagttctgttaattatacccactacacgtcaatcgtgtattttcaatatcttac

SEQ ID NO: 32661 - DNA, 858 bp, Muscodor strobelii
  misc_feature: SGI cDNA ID NO. 571258
  misc_feature: Encodes the peptide sequence at SEQ ID NO 32662
atgttccagactggtctggtcagtatgacacctcccaacactttcccgacgacggtgcacccgtttccctcgccaacggcacacgcttgtgcgtatgaagttggacttcgaaacgcggcgaatgcggttgtatttggcaaggagctaaattctttgcaattggtggattgggtgatggacctcacacggtcccttgatccgcgcgcaatagccaagtgcctggaggccgaaccacaactcagttattccgtgttcgagttgagattgaagagctccttcggggggttcggctactcacggttagccgacgatgtctgcgacatttcggcgctggtgaaatatcttcgaaacgtacgttggttcttagttctcttgccagaaatcgggaaggaacgtatcgtcctgatgggtcattctaccggtagccagggttgtatggagtacacggcatcgattcataatgtgtcacctgtcgacggctatattctccaggggcctgtctgtgatggagacgcaatcgcgatgtcgatggaccagtccgcgcttcaagtaagtctgaaatctgcgaaacagttaatatccaatggcaaaggactagaatgtatgccacgggaactgttgcccgtattcttccgagagacgccaattactgcccaacgttggtatgcgctttgtgcacctgacggcgaggacaactatttttcaccaacattgccggatgaggtggctagtacatattggaaaagagtcgacaagcctctccttatactacactctggccgtgatgaattcgtaccagagtcagttgatgtaagtaatttgaactgtcaaatattaaagactggtcctctgttgtaa

SEQ ID NO: 32662 - protein, 285 aa, Muscodor strobelii
  misc_feature: SGI Peptide ID NO. 571258
  misc_feature (9)..(280): Pfam Id: PF08538 Pfam Desc: Domain of function (DUF1749)
  misc_feature (80)..(274): Pfam Id: PF08538 Pfam Desc: Domain of function (DUF1749)
  misc_feature (9)..(285): NCBI GI: 256729677 Blast Desc: NECHADRAFT_83743 [Nectria haematococca mpVI 77-13-4]
  misc_feature (9)..(275): NCBI GI: 46122389 Blast Desc: FG05572.1 [Gibberella zeae PH-1]
  misc_feature (15)..(283): NCBI GI: 145614262 Blast Desc: MGG_08862 [Magnaporthe grisea 70-15] gi|145021201|gb|EDK05330.1| MGG_08862 [Magnaporthe grisea 70-15]
  misc_feature (15)..(283): NCBI GI: 169613973 Blast Desc: SNOG_10120 [Phaeosphaeria nodorum SN15] gi|111061335|gb|EAT82455.1| SNOG_10120 [Phaeosphaeria nodorum SN15]
  misc_feature (10)..(274): NCBI GI: 85087127 Blast Desc: NCU00364 [Neurospora crassa OR74A] gi|28918930|gb|EAA28599.1| [Neurospora crassa OR74A]
  misc_feature (8)..(239): NCBI GI: 116182682 Blast Desc: CHGG_01969 [Chaetomium globosum CBS 148.51] gi|88186266|gb|EAQ93734.1| CHGG_01969 [Chaetomium globosum CBS 148.51]
  misc_feature (15)..(226): NCBI GI: 261359025 Blast Desc: conserved [Verticillium albo-atrum VaMs.102]
  misc_feature (12)..(274): NCBI GI: 116207348 Blast Desc: CHGG_02967 [Chaetomium globosum CBS 148.51] gi|88183564|gb|EAQ91032.1| CHGG_02967 [Chaetomium globosum CBS 148.51]
  misc_feature (9)..(266): NCBI GI: 171685866 Blast Desc: protein product [Podospora anserina] gi|170942894|emb|CAP68547.1| protein product [Podospora anserina]
  misc_feature (15)..(270): NCBI GI: 171694700 Blast Desc: protein product [Podospora anserina] gi|170947592|emb|CAP59753.1| protein product [Podospora anserina]
MFQTGLVSMTPPNTFPTTVHPFPSPTAHACAYEVGLRNAANAVVFGKELNSLQLVDWVMDLTRSLDPRAIAKCLEAEPQLSYSVFELRLKSSFGGFGYSRLADDVCDISALVKYLRNVRWFLVLLPEIGKERIVLMGHSTGSQGCMEYTASIHNVSPVDGYILQGPVCDGDAIAMSMDQSALQVSLKSAKQLISNGKGLECMPRELLPVFFRETPITAQRWYALCAPDGEDNYFSPTLPDEVASTYWKRVDKPLLILHSGRDEFVPESVDVSNLNCQILKTGPLL

SEQ ID NO: 32663 - DNA, 766 bp, Muscodor strobelii
  misc_feature: SGI EST ID NO. CUFF.77206.2
  misc_feature: Variant of the nucleotide sequence at SEQ ID NO 32661
gcgcgcaatagccaagtgcctggaggccgaaccacaactcagttattccgtgttcgagttgagattgaagagctccttcggggggttcggctactcacggttagccgacgatgtctgcgacatttcggcgctggtgaaatatcttcgaaacgtacgttggttcttagttctcttgccagaagtctctacggacacttgtaaaactccgccattgaagctgatgatacacgcccgccttaattagatcgggaaggaacgtatcgtcctgatgggtcattctaccggtagccaggtatggatcgtcatgtcttgtgctcagtgatgttgatagatagtgactgggttagggttgtatggagtacacggcatcgattcataatgtgtcacctgtcgacggctatattctccaggggcctgtctgtgatggagacgcaatcgcgatgtcgatggaccagtccgcgcttcaagtaagtctgaaatctgcgaaacagttaatatccaatggcaaaggactagaatgtatgccacgggaactgttgcccgtattcttccgagagacgccaattactgcccaacgttggtatgcgctttgtgcacctgacggcgaggacaactatttttcaccaacattgccggatgaggtggctagtacatattggaaaagagtcgacaagcctctccttatactacactctggccgtgatgaattcgtaccagagtcagttgatggtatgtgtagatagataccacgcgagtcaaatttctg

SEQ ID NO: 32664 - DNA, 3237 bp, Muscodor strobelii
  misc_feature: SGI cDNA ID NO. 571259
  misc_feature: Encodes the peptide sequence at SEQ ID NO 32665
atggcagttgatccatcggccgcgaggagccagttcttcaaagagctgaagccacagtgtgttgcaatcaacaaccttgcggttcgttcctcggacaaacgtgccagcgcaaaggatctcactaaggtgaccgaggatctttcagtaactcttcagcgccaggtgtctctggatgcttctgttctagatgaaaagctggcagactatatctatttcccgctttccaatatactccggaatcagcaacattatccctcccgcttaacggagctcacaatcaaatgcttcacaatcctcgttgattatggctggaggagcaagctgcctaaagagctagcgcagcaaatcattctactcctcacattaatcatcagtggcaccccaggccaggcaaagaaggacagcatacccgaggaaaccgagcttgagtcattcagggccctagcatcagtggtaaaagctcaaggatcctcaccgagcggtgccacagcgttggttgacgcaaagactatcccagctcttggccacgctatcacagttgtgctcgatggtgtcactgctggaagaacatcctccattcagctcgaagcattgcggtctctcgatgccctcgtggtagcaattaaggaccagacggctttagcgtctttcttgcctggtattgtgtcctctctcagtagacttctagcacctccatcagcgctcaatgcccaaggaaatgtactaatacatggcatcggcggactgaagaacattcttacgaaagtactaggggatattaggatccgagctgtgttcaacttgtcagctgacgagtcaacaacccaagggactcaaaacaagattctctcgccgtcgtggctaaaggcaactacagataaagtgagaattgctcttgggggcgttcttaagctacgcagtcacagatctgactacgtacggtcagcattagagagactatgcatatctctattagacgaatgccatcagtctttagcagaatctgccccaatacttgtcgagacagctgtgattcttgcgagtcatggtgagaatgggagcaaggtttccgctgagacaagtcttaccgatcttgctacgttatatccagagattgggaatttcgtaaagagcacaatgtacaattgggttacaagccttccgcgtgtagttcaaggtagtgaagagaagaccaagcaacaggctatgcgcaatcttatacaaggacagcatttcatcacgacgcttcagattgactcacgtattctcgaagactccttagccagctcttttcgagacactgcaacagcactgatccttgcgtctaagccgggaacagcggtaacagaaatttctgccgatacggttgacctgaacaacacaggcttaatcaagcaaggcggctcaatctcatttcaacctgtactggtaaatcaggaaacccagcgctccacgcgtgaggcatttcttgaattggtcactggcctgggcccagcaagtcaacaaatcaagacagccagtagtatgcttgcctacgtacgtgagtctactggaaaccaacaagttgcttcatattggttggcctttgagttgatcaaatcggcactcacccgatcctcggacatggatgaatttcttgattttacgtttgctgctcccgcatcggatggaagcgagtctgctttgcatgaactgtattcgctatcagtcgtcatgctggaatcgcaggccgaagctgaggatactgatccacgcatgcaagcacttgcattagaggtcgtaacatttgtagcatccaggatgcaagaagcgtttcgatcagagctcatagatgtgctatatcctattgcaacctttcttggctcggatgtcccgcaactacgagagcatgctatcgttagcttgaatagcatagcagcatcgtgcgcctactcatccgttacagaacttatcattgataatgttgattacatggtgaactccgtttcactacgacttaatacgttcgatatatctccggcttccactcaggttctcagaatgatgattaagcttacggggccaagattgctgccctacctggacgatgtcgtggcgtcgatatttgcggctctggatagctaccatggatatacggtcttcgttgagtctctattcacagttctctccgatattgttcaacaaggtacgcaatcgagtaagctactccgagaagacttgcaaagcttcattgggcacgaaaagtccggtgtaggaattatcactatgcaacagctatctgagatcatagacgaccgcaaggaacgtgccaaaagacaggaacacgaagagaagaagtacgaagaacttaaaaagacctcttcaacccgcttcgaagatggacgaacccaaattgttgatgatgctacagatgagcacgagtctgctggtgaaatcgacaagtccccgctgccccaaaccccaaccttccagctactctctcgcatcacgagtctaacacaacactatcttacttcgccaacgccaacgcttcgtaaatctcttctgaagcttctggcaaatgtttttcctgcgattgcggcagatgtagatgcattcctgccgcttgttaatgatgtgtggcctgttcttgtagagcgactgtacgacccagagacctttgtggctattggagcctgcgaagctctatctgcactttgcggtaatgccggtgacttcttgagcacgcgcattaaaactgaatggtgggacaatggactcgggagttggtgtcgtaagatcaaggctgaggccttgcaacagcaaggacacggcaagagtaacagtagttcgagctcgaagattggcgctcctgtcaatcacaatggggtgaatgatcacaagattttcatacccataagaggcgttgatggtcgactagagcacaaacaagcacagaatgaagtctccgctcccgttggtagtggattgggccgttttgcccaagcttcccaagtttgggtagctgtacagagtttgctcgttgccatcgtcagtcatgtccagattgatgacgatattctggaccaaattttagtgcttcttgtcgatggatttgattcgacgccaacggccaagacggcattggaaaccattgatcctgatgctgtctggttgctcctttacgaacgtgggatgctaaatgcacagcggaaaacatgcccaatgatggcgggcgtaaagttcatcaggatataa

SEQ ID NO: 32665 - protein, 1078 aa, Muscodor strobelii
  misc_feature: SGI Peptide ID NO. 571259
  misc_feature (9)..(1078): NCBI GI: 85087048 Blast Desc: NCU00345 [Neurospora crassa OR74A] gi|28918911|gb|EAA28580.1| [Neurospora crassa OR74A]
  misc_feature (1)..(1075): NCBI GI: 256729864 Blast Desc: NECHADRAFT_47102 [Nectria haematococca mpVI 77-13-4]
  misc_feature (6)..(1078): NCBI GI: 171685854 Blast Desc: protein product [Podospora anserina] gi|170942888|emb|CAP68541.1| protein product [Podospora anserina]
  misc_feature (6)..(1075): NCBI GI: 46122391 Blast Desc: FG05573.1 [Gibberella zeae PH-1]
  misc_feature (54)..(1075): NCBI GI: 145614260 Blast Desc: MGG_08863 [Magnaporthe grisea 70-15] gi|145021200|gb|EDK05329.1| MGG_08863 [Magnaporthe grisea 70-15]
  misc_feature (1)..(739): NCBI GI: 116207352 Blast Desc: CHGG_02969 [Chaetomium globosum CBS 148.51] gi|88183566|gb|EAQ91034.1| CHGG_02969 [Chaetomium globosum CBS 148.51]
  misc_feature (14)..(1069): NCBI GI: 156032979 Blast Desc: SS1G_13565 [Sclerotinia sclerotiorum 1980] gi|154698968|gb|EDN98706.1| SS1G_13565 [Sclerotinia sclerotiorum 1980]
  misc_feature (8)..(1024): NCBI GI: 239606314 Blast Desc: HEAT repeat protein [Ajellomyces dermatitidis ER-3]
  misc_feature (8)..(1024): NCBI GI: 261190028 Blast Desc: HEAT repeat protein [Ajellomyces dermatitidis SLH14081] gi|239591252|gb|EEQ73833.1| HEAT repeat protein [Ajellomyces dermatitidis SLH14081]
  misc_feature (360)..(1075): NCBI GI: 261358480 Blast Desc: conserved [Verticillium albo-atrum VaMs.102]
MAVDPSAARSQFFKELKPQCVAINNLAVRSSDKRASAKDLTKVTEDLSVTLQRQVSLDASVLDEKLADYIYFPLSNILRNQQHYPSRLTELTIKCFTILVDYGWRSKLPKELAQQIILLLTLIISGTPGQAKKDSIPEETELESFRALASVVKAQGSSPSGATALVDAKTIPALGHAITVVLDGVTAGRTSSIQLEALRSLDALVVAIKDQTALASFLPGIVSSLSRLLAPPSALNAQGNVLIHGIGGLKNILTKVLGDIRIRAVFNLSADESTTQGTQNKILSPSWLKATTDKVRIALGGVLKLRSHRSDYVRSALERLCISLLDECHQSLAESAPILVETAVILASHGENGSKVSAETSLTDLATLYPEIGNFVKSTMYNWVTSLPRVVQGSEEKTKQQAMRNLIQGQHFITTLQIDSRILEDSLASSFRDTATALILASKPGTAVTEISADTVDLNNTGLIKQGGSISFQPVLVNQETQRSTREAFLELVTGLGPASQQIKTASSMLAYVRESTGNQQVASYWLAFELIKSALTRSSDMDEFLDFTFAAPASDGSESALHELYSLSVVMLESQAEAEDTDPRMQALALEVVTFVASRMQEAFRSELIDVLYPIATFLGSDVPQLREHAIVSLNSIAASCAYSSVTELIIDNVDYMVNSVSLRLNTFDISPASTQVLRMMIKLTGPRLLPYLDDVVASIFAALDSYHGYTVFVESLFTVLSDIVQQGTQSSKLLREDLQSFIGHEKSGVGIITMQQLSEIIDDRKERAKRQEHEEKKYEELKKTSSTRFEDGRTQIVDDATDEHESAGEIDKSPLPQTPTFQLLSRITSLTQHYLTSPTPTLRKSLLKLLANVFPAIAADVDAFLPLVNDVWPVLVERLYDPETFVAIGACEALSALCGNAGDFLSTRIKTEWWDNGLGSWCRKIKAEALQQQGHGKSNSSSSSKIGAPVNHNGVNDHKIFIPIRGVDGRLEHKQAQNEVSAPVGSGLGRFAQASQVWVAVQSLLVAIVSHVQIDDDILDQILVLLVDGFDSTPTAKTALETIDPDAVWLLLYERGMLNAQRKTCPMMAGVKFIRI

SEQ ID NO: 32666 - DNA, 3651 bp, Muscodor strobelii
  misc_feature: SGI EST ID NO. CUFF.77253.0
  misc_feature: Variant of the nucleotide sequence at SEQ ID NO 32664
ctagtttttcaagtatttcgaaaggctattaggaggaattaaccatgctattgatggcatacaggaagttgtcactagttttacctataaccgtctgcttagtggacgaccttctaggcgtagtggagacgggactcgattctttccgtcgacacactgccaaacccgactcggttgttcaattccttccatttcctctcaggtagcctgtaatctacagttcttcgtcaaaacttttcagatttcaacatagataccatatgatggtttaccaagatggcagttgatccatcggccgcgaggagccagttcttcaaagagctgaagccacagtgtgttgcaatcaacaaccttgcggttcgttcctcggacaaacgtgccagcgcaaaggatctcactaaggtgaccgaggatctttcagtaactcttcagcgccaggtgtctctggatgcttctgttctagatgaaaagctggcagactatatctatttcccgctttccaatatactccggaatcagcaacattatccctcccgcttaacggagctcacaatcaaatgcttcacaatcctcgttgattatggctggaggagcaagctgcctaaagagctagcgcagcaaatcattctactcctcacattaatcatcagtggcaccccaggccaggcaaagaaggacagcatacccgaggaaaccgagcttgagtcattcagggccctagcatcagtggtaaaagctcaaggatcctcaccgagcggtgccacagcgttggttgacgcaaagactatcccagctcttggccacgctatcacagttgtgctcgatggtgtcactgctggaagaacatcctccattcagctcgaagcattgcggtctctcgatgccctcgtggtagcaattaaggaccagacggctttagcgtctttcttgcctgaacattcttacgaaagtactaggggatattaggatccgagctgtgttcaacttgtcagctgacgagtcaacaacccaagggactcaaaacaagattctctcgccgtcgtggctaaaggcaactacagataaagtgagaattgctcttgggggcgttcttaagctacgcagtcacagatctgactacgtacggtcagcattagagagactatgcatatctctattagacgaatgccatcagtctttagcagaatctgccccaatacttgtcgagacagctgtgattcttgcgagtcatggtgagaatgggagcaaggtttccgctgagacaagtcttaccgatcttgctacgttatatccagagattgggaatttcgtaaagagcacaatgtacaattgggttacaagccttccgcgtgtagttcaaggtagtgaagagaagaccaagcaacaggctatgcgcaatcttatacaaggacagcatttcatcacgacgcttcagattgactcacgtattctcgaagactccttagccagctcttttcgagacactgcaacagcactgatccttgcgtctaagccgggaacagcggtaacagaaatttctgccgatacggttgacctgaacaacacaggcttaatcaagcaaggcggctcaatctcatttcaacctgtactggtaaatcaggaaacccagcgctccacgcgtgaggcatttcttgaattggtcactggcctgggcccagcaagtcaacaaatcaagacagccagtagtatgcttgcctacgtacgtgagtctactggaaaccaacaagttgcttcatattggttggcctttgagttgatcaaatcggcactcacccgatcctcggacatggatgaatttcttgattttacgtttgctgctcccgcatcggatggaagcgagtctgctttgcatgaactgtattcgctatcagtcgtcatgctggaatcgcaggccgaagctgaggatactgatccacgcatgcaagcacttgcattagaggtcgtaacatttgtagcatccaggatgcaagaagcgtttcgatcagagctcatagatgtgctatatcctattgcaacctttcttggctcggatgtcccgcaactacgagagcatgctatcgttagcttgaatagcatagcagcatcgtgcgcctactcatccgttacagaacttatcattgataatgttgattacatggtgaactccgtttcactacgacttaatacgttcgatatatctccggcttccactcaggttctcagaatgatgattaagcttacggggccaagattgctgccctacctggacgatgtcgtggcgtcgatatttgcggctctggatagctaccatggatatacggtcttcgttgagtctctattcacagttctctccgatattgttcaacaaggtacgcaatcgagtaagctactccgagaagacttgcaaagcttcattgggcacgaaaagtccggtgtaggaattatcactatgcaacagctatctgagatcatagacgaccgcaaggaacgtgccaaaagacaggaacacgaagagaagaagtacgaagaacttaaaaagacctcttcaacccgcttcgaagatggacgaacccaaattgttgatgatgctacagatgagcacgagtctgctggtgaaatcgacaagtccccgctgccccaaaccccaaccttccagctactctctcgcatcacgagtctaacacaacactatcttacttcgccaacgccaacgcttcgtaaatctcttctgaagcttctggcaaatgtttttcctgcgattgcggcagatgtagatgcattcctgccgcttgttaatgatgtgtggcctgttcttgtagagcgactgtacgacccagagacctttgtggctattggagcctgcgaagctctatctgcactttgcggtaatgccggtgacttcttgagcacgcgcattaaaactgaatggtgggacaatggactcgggagttggtgtcgtaagatcaaggctgaggccttgcaacagcaaggacacggcaagagtaacagtagttcgagctcgaagattggcgctcctgtcaatcacaatggggtgaatgatcacaagattttcatacccataagaggcgttgatggtcgactagagcacaaacaagcacagaatgaagtctccgctcccgttggtagtggattgggccgttttgcccaagcttcccaagtttgggtagctgtacagagtttgctcgttgccatcgtcagtcatgtccagattgatgacgatattctggaccaaattttagtgcttcttgtcgatggatttgattcgacgccaacggccaagacggcattggaaaccattgatcctgatgctgtctggttgctcctttacgaacgtgggatgctaaatgcacagcggaaaacatgcccaatgatggcgggcgtaaagttcatcaggatataaagtcctataaatctcaccatataacctagattctcgactgcgttgttggttgcctagaagtcgtgtgacctagcatgttgtcttaatcgcctgattgattctatgaggcttgcaggtcgtgacatgcgctttttatctatgctaagttcacgctttggacgtcttcgtgaagtcttgatccagtctgaagctctaacagcgagcgctggcggcgccacatacaatacgcc

SEQ ID NO: 32667 - DNA, 1665 bp, Muscodor strobelii
  misc_feature: SGI cDNA ID NO. 571260
  misc_feature: Elevated expression when VOC is produced
  misc_feature: Encodes the peptide sequence at SEQ ID NO 32668
atggtcaaccgtggtcgggcacaggaccagtttgtctcaagggcgtcgatagagtcgtatctcgaccgagaagggagagcccacactccagacgatcaccattcggatgcaaggagaccccctttgccaatagacgaaggacttagacaggtttgccagatacctggcacctcattttttgttgttgccactcaggacagtggagagatgatatcgttcttttctccctcaggctcgacatcgattgatccgacaagattcttcgacgagactgcgtttcgctcagaggtcagtcgggtacagaacggtgacaattctgctcacggaaatccactgatctctctagacacagagatgagtagtttcgatcccgtaaccggtcagccagcatccagtcatgagtttactcacagcaccggcatccattctgcgtcaggtctccaaggcggatcgagtacaaggacgaggagaaaccagggtgtaaccccgacacgtagtggagatatctctacattggagagacccagaagatccccgggtactggcatgagaaggatgataattaaagatggagaggctctctgggccttttacgaacgccgatttcgagattgtcaacaatcagcatgtaaactaattgccaaagcttggattaaagctgtggagccaaaaaagcagactacgcacccctacactaggggagaagaagggaaacctgactggtggcccaagccttggggtcctcaacccagccagagggtcatccacaaagagccggatcatatacccaaggttgctcgagttcgtctgcttgtccatatcctccacatggtagtttggaaacaacacccagctgtagagaaagtcaggctgaacgtcgaaaagctgaaagtgatcacatttgatgcgctgtctgggtggtttgccgacgtagaacatccagctaatcaacagaaacgccgattcgtccaggagatcttcaaaatcgcgtacaaagaagagcagtatgttaacagcgaaattgatgagcttaccgaggtatatgtcatgaatgacaatggtgtccctccagaaggtgatgaatcggacaatgaagaggttgtcaacacgccaacttcctctagcctgctgccacctttgaggcagaatgatcaactgttgatgccccatgtctatggccacaatcacactgagtccggccactctacacccaacagttatgccagcagcgtgacgatgcgtaacgaaccttacgaacatccgactttcagtcccgatttctcttctgagaggccgaattatgtacacggtgttaatttgttgggtcacgagtcaagctatatacaggaacacatggatatctctagcgcacactcgatttcccctgtggaaagtagacgtccgtcacttttcacctcacaaaccgagtatccggcgtcatggtcaggttcgaatgcccctgatgcgccttcgatgtacgcgtatcccactcaagatccgaatgcgcagaatgggttcgaaatgccgaccaactctacctatctcggacataactatgacggtctaccgcgacaagggaatgataatgtggcccatgaatccagctacggttctcgagtcattagtcatgatcctttacacactcagccgccgtaccacacctag

SEQ ID NO: 32668 - protein, 554 aa, Muscodor strobelii
  misc_feature: SGI Peptide ID NO. 571260
  misc_feature (38)..(524): NCBI GI: 46122381 Blast Desc: FG05568.1 [Gibberella zeae PH-1]
  misc_feature (181)..(524): NCBI GI: 256729679 Blast Desc: NECHADRAFT_101281 [Nectria haematococca mpVI 77-13-4]
  misc_feature (41)..(523): NCBI GI: 156052096 Blast Desc: SS1G_07456 [Sclerotinia sclerotiorum 1980] gi|154705233|gb|EDO04972.1| SS1G_07456 [Sclerotinia sclerotiorum 1980]
  misc_feature (42)..(364): NCBI GI: 145613409 Blast Desc: MGG_01673 [Magnaporthe grisea 70-15] gi|145020487|gb|EDK04616.1| MGG_01673 [Magnaporthe grisea 70-15]
  misc_feature (42)..(363): NCBI GI: 154309822 Blast Desc: BC1G_07381 [Botryotinia fuckeliana B05.10] gi|150851842|gb|EDN27035.1| BC1G_07381 [Botryotinia fuckeliana B05.10]
  misc_feature (46)..(363): NCBI GI: 164423137 Blast Desc: NCU09010 [Neurospora crassa OR74A] gi|157069963|gb|EAA28772.2| [Neurospora crassa OR74A]
  misc_feature (24)..(538): NCBI GI: 171686294 Blast Desc: protein product [Podospora anserina] gi|170943108|emb|CAP68761.1| protein product [Podospora anserina]
  misc_feature (40)..(477): NCBI GI: 116207824 Blast Desc: CHGG_03205 [Chaetomium globosum CBS 148.51] gi|88183802|gb|EAQ91270.1| CHGG_03205 [Chaetomium globosum CBS 148.51]
  misc_feature (16)..(524): NCBI GI: 261360189 Blast Desc: conserved [Verticillium albo-atrum VaMs.102]
  misc_feature (188)..(437): NCBI GI: 212535502 Blast Desc: PMAA_084020 [Penicillium marneffei ATCC 18224] gi|210070306|gb|EEA24396.1| PMAA_084020 [Penicillium marneffei ATCC 18224]
  misc_feature: Useful for introducing or modulating the production of volatile compounds
MVNRGRAQDQFVSRASIESYLDREGRAHTPDDHHSDARRPPLPIDEGLRQVCQIPGTSFFVVATQDSGEMISFFSPSGSTSIDPTRFFDETAFRSEVSRVQNGDNSAHGNPLISLDTEMSSFDPVTGQPASSHEFTHSTGIHSASGLQGGSSTRTRRNQGVTPTRSGDISTLERPRRSPGTGMRRMIIKDGEALWAFYERRFRDCQQSACKLIAKAWIKAVEPKKQTTHPYTRGEEGKPDWWPKPWGPQPSQRVIHKEPDHIPKVARVRLLVHILHMVVWKQHPAVEKVRLNVEKLKVITFDALSGWFADVEHPANQQKRRFVQEIFKIAYKEEQYVNSEIDELTEVYVMNDNGVPPEGDESDNEEVVNTPTSSSLLPPLRQNDQLLMPHVYGHNHTESGHSTPNSYASSVTMRNEPYEHPTFSPDFSSERPNYVHGVNLLGHESSYIQEHMDISSAHSISPVESRRPSLFTSQTEYPASWSGSNAPDAPSMYAYPTQDPNAQNGFEMPTNSTYLGHNYDGLPRQGNDNVAHESSYGSRVISHDPLHTQPPYHT

SEQ ID NO: 32669 - DNA, 3678 bp, Muscodor strobelii
  misc_feature: SGI EST ID NO. CUFF.77260.0
  misc_feature: Variant of the nucleotide sequence at SEQ ID NO 32667
ggcatttcgaggatcgagtgcccacgcatgtccaaccctctcttttgtgctttgcactagaattctgaatttacaagcttgtctccccattacgatcgcgcccttatacatctcattgcatctatataaatttgccctcaaagaacgggcggccgggggttcagggtcttacatatccatccctgttccatcaccgttgatagtttttgcaaccttagcacacagtgtctctgcagtactttgtttcgacttcaaaacgatcatttctttttccccctacgtgcacaactcgaccttcgtgaactggcaaggttggaaattgccatattattcttgattaaactggtgctataagcggaccgacaagaaaaatttcaatttctaatcaccaagtgaagttctcgcccgtgtctcacaacggtgagaaggtggcagagtaactttcattgtgcctttctataccgctctactgtttcgtctctccgattcagccaaggcttcgctgcagtttcatcaacgtataagaaagcccagcaataatcgacagggctttctttgttctgaaactctgctatcacgaacccttgaccccgtcctctgtccgtctagccgctccaaggaacacgcccctgtcgttcgtgaacaaagagagtctgtttcgtctaaggtccctccgttgttgtacgtttcgtcttctcatcatctccagttgttaggcccctaccacttagccgttccccccccggaataggtgggcagcgatacatgcttatacatatgtatgtatactgtatgttgtcatataaacattgcacctaaaaccaaattgatttccaccttatctaccattcattgaaatagtatcatctctttttctggaactattactcaataagattacttctatgaatactctatcccactttgtttggtcagattgatcgtactcttgaacccttactctatatccctcgacagaaggcatttcgggaactaaaacaaagtaaccagacgcttacagcgacagtcatccttgagctcgttgactacacctcatagaggagtctagccaatatctatcacgacttcaagagcctactgcatttgtacatatatatttttcgttcgcaatcatggtcaaccgtggtcgggcacaggaccagtttgtctcaagggcgtcgatagagtcgtatctcgaccgagaagggagagcccacactccagacgatcaccattcggatgcaaggagaccccctttgccaatagacgaaggacttagacaggtttgccagatacctggcacctcattttttgttgttgccactcaggacagtggagagatgatatcgttcttttctccctcaggctcgacatcgattgatccgacaagattcttcgacgagactgcgtttcgctcagaggtcagtcgggtacagaacgacacagagatgagtagtttcgatcccgtaaccggtcagccagcatccagtcatgagtttactcacagcaccggcatccattctgcgtcaggtctccaaggcggatcgagtacaaggacgaggagaaaccagggtgtaaccccgacacgtagtggagatatctctacattggagagacccagaagatccccgggtactggcatgagaaggatgataattaaagatggagaggctctctgggccttttacgaacgccgatttcgagattgtcaacaatcagcatgtaaactaattgccaaagcttggattaaagctgtggagccaaaaaagcagactacgcacccctacactaggggagaagaagggaaacctgactggtggcccaagccttggggtcctcaacccagccagagggtcatccacaaagagccggatcatatacccaaggttgctcgagttcgtctgcttgtccatatcctccacatggtagtttggaaacaacacccagctgtagagaaagtcaggctgaacgtcgaaaagctgaaagtgatcacatttgatgcgctgtctgggtggtttgccgacgtagaacatccagctaatcaacagaaacgccgattcgtccaggagatcttcaaaatcgcgtacaaagaagagcagtatgttaacagcgaaattgatgagcttaccgaggtatatgtcatgaatgacaatggtgtccctccagaaggtgatgaatcggacaatgaagaggttgtcaacacgccaacttcctctagcctgctgccacctttgaggcagaatgatcaactgttgatgccccatgtctatggccacaatcacactgagtccggccactctacacccaacagttatgccagcagcgtgacgatgcgtaacgaaccttacgaacatccgactttcagtcccgatttctcttctgagaggccgaattatgtacacggtgttaatttgttgggtcacgagtcaagctatatacaggaacacatggatatctctagcgcacactcgatttcccctgtggaaagtagacgtccgtcacttttcacctcacaaaccgagtatccggcgtcatggtcaggttcgaatgcccctgatgcgccttcgatgtacgcgtatcccactcaagatccgaatgcgcagaatgggttcgaaatgccgaccaactctacctatctcggacataactatgacggtctaccgcgacaagggaatgataatgtggcccatgaatccagctacggttctcgagtcattagtcatgatcctttacacactcagccgccgtaccacacctagggaccagaggggaacgactcctaatatttccgagtatagagcacctggtcctgagaattacatccgagtatagactctaagctttcgtgatcaaccgctacgaaggagctgacttctcgattttccaactcttacgtttcttttgcgagtacatgaagtctcgtacccctaaatacaagtcatgagcacttccattgccctagtttcatttcggttcggcggcgcctaatctgcttttttaatcatcactcatgatctccaaagtcatgagtatcgtccaacacagcggcgttagcttacgtttactgggtggcagcaaacatgcttgtcaaaagcaagaggtcaaaagttggtggctaaggcgcgatcaatgcgccgaattgcatcgtgtggtcttctactttgcacatcattttttcgcattccattcatttctttcgttcatttgcgcaacattgcttgttcgattctctcttctctcatgggaatgtcacggatcgacttattagtgtcggtgccctagtcttgtcgaatttgattagttacttctttatgagcgacaacagaatgacaagatatattactcatgtgttggttgggtttgtttacttagtctgctagctccttagccatgaacagtggatggaattgaattgagatacatacaggacctcatgaaaacaatgaatggataagtcagtttgaggggcttcgagctatacctggtgcctatgcaagcgatggctaatggaatggaaagtgtgctgttttgctgactatagtcttctcacgtcatcaggaacttctaaaatcatgtcaagtatgtctatgcgtgtagtatgtatctcatgtaaaaaactgacccacgcatggtcattatcatcttaccaagagttggggaattctactctaaagccga

SEQ ID NO: 32670 - DNA, 4641 bp, Muscodor strobelii
  misc_feature: SGI cDNA ID NO. 571261
  misc_feature: Reduced expression when VOC is produced
  misc_feature: Encodes the peptide sequence at SEQ ID NO 32671
atgcggaacgaggtcatgcaacagcagggtctgcagtccaccggcagcttcaccggccaccgacctctctttgatctcggccaccactatctcaccgcagcctccgaccgccagcagcctctatgcggcaacattgagggttggggccccttgagccccttccgctacgacttcacgccctgcttcgtcgacgtctgggtcttcgccgttgccgccttcggcctcgtctgcggccctctggctatctggcacgtcttgcgcaaagaaaaggctgcaccgctttccaaaggctggcatttttggaccaagcagtctttgctcgccctgatcatcgtcgactgtgtcgtccagctcgtcatccaaatcatcagttttccccatgtatggtccggcgatttccgcttcctcacaactcttgtcacagtcttgtcgcttggagttatcttcgcagtccaatggctggagcacggccgctcgagaaacgctaatggggtcgtcttgttctactggctgcttctgttgatcgcctacaccgtcaagcttcgttcacttgtgtcccagcagttatacgataagaatgtcgcctacttcgttgcttacaccgtcggcttcggcctctccctcgttgaattcgtcttggaatggttctggccacagccgggcggcgcataccaggcgttggtagacgaggagggcgaagagtgccccgtcgagtacgccaccgtcttttcccgcctcaccttctcgtggatgacaccaatgatgaaatatggatacaagcagtttcttaccgaggaagacttgtggggcctggctcataatgacaagacttctgcaactggaggtagctttgacgaagcctggcagtatgaactggaccacaagaacaagcccagcatctggctgtccatgttcaaagcctacggaggcccatacgttgctgcgaccggcttcaaaattataaatgatctcgctgccttcacccagccgcaacttctccggtttcttatcagcttcgttggctcgtatgagcatggtaaccacccggagccacctattaaaggtgctgccattgcaattgccatgtttctggtcgcaaccctgcagacgaccatgattcaccaatattttcaactcgcgttcgtttccggcatgcgcatcaaatctggactagcatcagccatctacaagaaatccctaaagctctccaacgagggtaggtcagcaaagtcaactggtgatattgtcaattatatggcagtcgatgcgcagcgtcttcaggatcttactcagtttgcgcaacaagtctggtctgccccgtttcagattgttctttgtatgatttcactttatcagcttgttggttggtctatgttagcaggaatcggcgtcatgattgtcatgatccccatcaatggttttattgccaagttcatgaagacactgcaaaaacagcaaatgaaaaataaggatgcacgtagccgtcttattgccgaaattgttaataacatgaagagcatcaagctttatgcatggagcaccgcttttatgaacaagctcaacttcgtcagaaacgatcaggaactcaagaacctccgcaaaatcggcgcaggccaagccatggccaacttcacatggtctactacaccgtttctggtatcttgttccacttttgctgtgtttgtgtggacgcacgacgagcccttaagcactgagatcgtttttccagctctagcgcttttcaatctactcgggttccctctttctgtcctgcccatggtaatcacctccattattgaagcgacggtggctgccaaccgcctgagcgactttctgactgctgaagaggtccagcctgacgcagtcatacttggtccagccgcagaagaacgtggagacgaagctgtcgtgattcgtaaaggcaccttctcctggaaccgccacgaggccaaaaacgctcttaagaccatcgactttactgctcacaagggtgatcttacctgcgtggtcggcagagtgggccatggaaagtcttcgctgctacagagtatcctcggtgatctgtggaaagtcgaaggtgaggtgcggctcaatggcagtgtggcatacgtagcgcaacaaccctggatcatgaatgctacagtgaaagagaacattgtcttcggccatcgatacgactcgaatttctacgaaaagacagtcaaggcgtgtgctttactggacgattttgcacagctgcctgatggagacgagacgtacgtcggtgagcgaggcatttctctgagtggtggtcaaaaggcacggctcgcccttgcgcgcgcggtctacgccagggctgatgtctacctgctcgacgattgtctatctgctgtagattcgcacgttggacggcacatcatcgagaacgtgttgggctcagaaggccttctgaaatccaaatgtcgtatcctcgccacaaacgccattgccgttttgaacgatgctgactacatatatcagctcaaagatggagagattattgaacacggcacataccgccagcttattgccatgaagggaggcatagccggattaatacaatctgttggacaggagtctggctcatcgtcatcgaatagcagcgcttccggctctggcccgggaagtgagacctccacctacatcgaggttgccagtccggataaggaagaaatggaggaggcgcaagaaggattagctgagctagcccccattcgaacaggtgcgtcctcgagtgcgcaagaccgaagaaatagtatggcaacacttcgacgggccagcgctgcaagtatgcgaggagctcgaggcaaactcggggatgaagaagatcccagctccaaatccagacaaacaaaagagcacctggagcagggcaaagtcaaatgggatgtctatcttgagtacgccaaaaccagcaacctcggtgctgttaccgtctacttgttcactttgattgctgcccagacggcccagataggcggtagtatctggctcaagaactgggctgaggccaacagctcagcaggtactaacccagacgttgctaagtatctatcgatctaccttgcattcggtgtcggatctgcggctctatccgtcgtccagactctaatcttatggatattctgctcgatcgaagcatcaagaaagcttcacgaacgcatggccatggctatattcagatctcccatgtcattctttgacacaacgccagcgggaagaattttgaatcgattctctagcgacgtgtatcgtctggatgaggttttggcccgaactttcaacatgcttttcgtcaacttagccaaatcaggcttcacactgggactcatttcagttggtactccagctttcatcgccttcatcctacctctcagcggagtatactactgggttcaacggtactatcttcggacttcgcgagaactgaaaagactagacagtgtgagccgcagtcccatatatgcgcatttccaagaatctcttggtggcattagtacgattcgcgcatatcgccagcaagatcggtttgaacatgagaatgaatggcgggtcgactcaaatctgcgagctttcttcccctctatcagtgcgaatagatggttggcggtgcgcctagaattcttaggtgccatcattattctcgcggctgctgggctcgccattatttcggttacaaacaacacgggcttgagttctggcatggttggtttgggaatgtcgtatgctcttttgattactacgtcattgaattggatagtgcgccagacggtggaggtcgaaaccaacatcgtatctgttgaacgcattcttgaatatgcgcgcctgccaagcgaagctcctgaaattattccccgccgcaggccgcctgttgcttggcctgcacatggtgcagtccaatttcacaattttagcgctcgatatcgcgaaggtctggacttggtattgaagaaaatcaatcttgacatcaaatcacatgagaaaatcggtgtggtcggacgaactggtgctggcaaatcgtccttgacattgtcactgtttcgcctcatcgaggccgacacgggaaacatcagcatagataacctagacacttctacaattggtctactggatttacgccgtcgccttgcaatcatcccacaggatgcggcgcttttcgaaggcactgttcgggataatctagatcccgctcatgtccacgatgacactgagctctggagcgtattagaccacgcgcgattgaaggagcatatctctactatggatggcggccttgaagccaagatacacgaaggaggctcgaacctctccgcaggccaacgacaattgatctcgctagctcgtgccatgctgactccgtcgaacatactcgtactcgatgaagcaacagcggccgttgatgtagaaacggacgctttacttcaagctaccttacgatcggacctattcgcccaccgcaccattattactgtagctcatcgcataaacactattctcgacagcgacagggtagtagttcttgataagggtgaaatcgtagaattcgatacccccaaggccctgatcaagcagaaaagcatattttacagcctagtgaaagaatccggcttggacacggagtaa

SEQ ID NO: 32671 - protein, 1546 aa, Muscodor strobelii
  misc_feature: SGI Peptide ID NO. 571261
  misc_feature (312)..(588): Pfam Id: PF00664 Pfam Desc: ABC transporter transmembrane region
  misc_feature (978)..(1256): Pfam Id: PF00664 Pfam Desc: ABC transporter transmembrane region
  misc_feature (1332)..(1516): Pfam Id: PF00005 Pfam Desc: ABC transporter
  misc_feature (664)..(837): Pfam Id: PF00005 Pfam Desc: ABC transporter
  misc_feature (14)..(1546): NCBI GI: 85089866 Blast Desc: NCU09012 [Neurospora crassa OR74A] gi|28919476|gb|EAA28910.1| NCU09012 [Neurospora crassa OR74A]
  misc_feature (9)..(1546): NCBI GI: 261360188 Blast Desc: metal resistance protein YCF1 [Verticillium albo-atrum VaMs.102]
  misc_feature (11)..(1546): NCBI GI: 46122387 Blast Desc: FG05571.1 [Gibberella zeae PH-1]
  misc_feature (7)..(1546): NCBI GI: 256729678 Blast Desc: [Nectria haematococca mpVI 77-13-4]
  misc_feature (8)..(1543): NCBI GI: 145613407 Blast Desc: conserved [Magnaporthe grisea 70-15] gi|145020486|gb|EDK04615.1| conserved [Magnaporthe grisea 70-15]
  misc_feature (8)..(1546): NCBI GI: 171686296 Blast Desc: protein product [Podospora anserina] gi|170943109|emb|CAP68762.1| protein product [Podospora anserina]
  misc_feature (22)..(1543): NCBI GI: 189190088 Blast Desc: multidrug resistance-associated protein 1 [Pyrenophora tritici-repentis Pt-1C-BFP] gi|187972989|gb|EDU40488.1| multidrug resistance-associated protein 1 [Pyrenophora tritici-repentis
  misc_feature (8)..(1451): NCBI GI: 116207820 Blast Desc: CHGG_03203 [Chaetomium globosum CBS 148.51] gi|88183800|gb|EAQ91268.1| CHGG_03203 [Chaetomium globosum CBS 148.51]
  misc_feature (31)..(1543): NCBI GI: 239608996 Blast Desc: ABC metal ion transporter [Ajellomyces dermatitidis ER-3]
  misc_feature (31)..(1543): NCBI GI: 261189406 Blast Desc: ABC metal ion transporter [Ajellomyces dermatitidis SLH14081] gi|239591691|gb|EEQ74272.1| ABC metal ion transporter [Ajellomyces dermatitidis SLH14081]
  misc_feature (75)..(1543): SWISSPROT Homolog: EC 3.6.3.44 Xenobiotic-transporting ATPase
  misc_feature: Useful for introducing or modulating the production of volatile compounds
MRNEVMQQQGLQSTGSFTGHRPLFDLGHHYLTAASDRQQPLCGNIEGWGPLSPFRYDFTPCFVDVWVFAVAAFGLVCGPLAIWHVLRKEKAAPLSKGWHFWTKQSLLALIIVDCVVQLVIQIISFPHVWSGDFRFLTTLVTVLSLGVIFAVQWLEHGRSRNANGVVLFYWLLLLIAYTVKLRSLVSQQLYDKNVAYFVAYTVGFGLSLVEFVLEWFWPQPGGAYQALVDEEGEECPVEYATVFSRLTFSWMTPMMKYGYKQFLTEEDLWGLAHNDKTSATGGSFDEAWQYELDHKNKPSIWLSMFKAYGGPYVAATGFKIINDLAAFTQPQLLRFLISFVGSYEHGNHPEPPIKGAAIAIAMFLVATLQTTMIHQYFQLAFVSGMRIKSGLASAIYKKSLKLSNEGRSAKSTGDIVNYMAVDAQRLQDLTQFAQQVWSAPFQIVLCMISLYQLVGWSMLAGIGVMIVMIPINGFIAKFMKTLQKQQMKNKDARSRLIAEIVNNMKSIKLYAWSTAFMNKLNFVRNDQELKNLRKIGAGQAMANFTWSTTPFLVSCSTFAVFVWTHDEPLSTEIVFPALALFNLLGFPLSVLPMVITSIIEATVAANRLSDFLTAEEVQPDAVILGPAAEERGDEAVVIRKGTFSWNRHEAKNALKTIDFTAHKGDLTCVVGRVGHGKSSLLQSILGDLWKVEGEVRLNGSVAYVAQQPWIMNATVKENIVFGHRYDSNFYEKTVKACALLDDFAQLPDGDETYVGERGISLSGGQKARLALARAVYARADVYLLDDCLSAVDSHVGRHIIENVLGSEGLLKSKCRILATNAIAVLNDADYIYQLKDGEIIEHGTYRQLIAMKGGIAGLIQSVGQESGSSSSNSSASGSGPGSETSTYIEVASPDKEEMEEAQEGLAELAPIRTGASSSAQDRRNSMATLRRASAASMRGARGKLGDEEDPSSKSRQTKEHLEQGKVKWDVYLEYAKTSNLGAVTVYLFTLIAAQTAQIGGSIWLKNWAEANSSAGTNPDVAKYLSIYLAFGVGSAALSVVQTLILWIFCSIEASRKLHERMAMAIFRSPMSFFDTTPAGRILNRFSSDVYRLDEVLARTFNMLFVNLAKSGFTLGLISVGTPAFIAFILPLSGVYYWVQRYYLRTSRELKRLDSVSRSPIYAHFQESLGGISTIRAYRQQDRFEHENEWRVDSNLRAFFPSISANRWLAVRLEFLGAIIILAAAGLAIISVTNNTGLSSGMVGLGMSYALLITTSLNWIVRQTVEVETNIVSVERILEYARLPSEAPEIIPRRRPPVAWPAHGAVQFHNFSARYREGLDLVLKKINLDIKSHEKIGVVGRTGAGKSSLTLSLFRLIEADTGNISIDNLDTSTIGLLDLRRRLAIIPQDAALFEGTVRDNLDPAHVHDDTELWSVLDHARLKEHISTMDGGLEAKIHEGGSNLSAGQRQLISLARAMLTPSNILVLDEATAAVDVETDALLQATLRSDLFAHRTIITVAHRINTILDSDRVVVLDKGEIVEFDTPKALIKQKSIFYSLVKESGLDTE

SEQ ID NO: 32672 - DNA, 5742 bp, Muscodor strobelii
  misc_feature: SGI EST ID NO. CUFF.77398.0
  misc_feature: Variant of the nucleotide sequence at SEQ ID NO 32670
cgacgtagggatgactaattgacaaattgaccatcgcggtgtggtctgctgccccgtttaaatttctacggcctgtagctcccgtctttcgtcatttcacgtcggtcgctcgtcaccctcacacgccccttgttatgctctcttcccgtcgccctcgcagctgatcgggaaagcggaatgcggaacgaggtcatgcaacagcagggtctgcagtccaccggcagcttcaccggccaccgacctctctttgatctcggccaccactatctcaccgcagcctccgaccgccagcagcctctatgcggcaacattgagggttggggccccttgagccccttccgctacgacttcacgccctgcttcgtcgacgtctgggtcttcgccgttgccgccttcggcctcgtctgcggccctctggctatctggcacgtcttgcgcaaagaaaaggctgcaccgctttccaaaggctggcatttttggaccaagcaggtaagacgcctccccagccattcagtgccgagctttggatgtcgacatctcacacgtaacgtttgctacagtctttgctcgccctgatcatcgtcgactgtgtcgtccagctcgtcatccaaatcatcagttttccccatgtatggtccggcgatttccgcttcctcacaactcttgtcacagtcttgtcgcttggagttatcttcgcagtccaatggctggagcacggccgctcgagaaacgctaatggggtcgtcttgttctactggctgcttctgttgatcgcctacaccgtcaagcttcgttcacttgtgtcccagcagttatacgataagaatgtcgcctacttcgttgcttacaccgtcggcttcggcctctccctcgttgaattcgtcttggaatggttctggccacagccgggcggcgcataccaggcgttggtagacgaggagggcgaagagtgccccgtcgagtacgccaccgtcttttcccgcctcaccttctcgtggatgacaccaatgatgaaatatggatacaagcagtttcttaccgaggaagacttgtggggcctggctcataatgacaagacttctgcaactggaggtagctttgacgaagcctggcagtatgaactggaccacaagaacaagcccagcatctggctgtccatgttcaaagcctacggaggcccatacgttgctgcgaccggcttcaaaattataaatgatctcgctgccttcacccagccgcaacttctccggtttcttatcagcttcgttggctcgtatgagcatggtaaccacccggagccacctattaaaggtgctgccattgcaattgccatgtttctggtcgcaaccctgcagacgaccatgattcaccaatattttcaactcgcgttcgtttccggcatgcgcatcaaatctggactagcatcagccatctacaagaaatccctaaagctctccaacgagggtaggtcagcaaagtcaactggtgatattgtcaattatatggcagtcgatgcgcagcgtcttcaggatcttactcagtttgcgcaacaagtctggtctgccccgtttcagattgttctttgtatgatttcactttatcagcttgttggttggtctatgttagcaggaatcggcgtcatgattgtcatgatccccatcaatggttttattgccaagttcatgaagacactgcaaaaacagcaaatgaaaaataaggatgcacgtagccgtcttattgccgaaattgttaataacatgaagagcatcaagctttatgcatggagcaccgcttttatgaacaagctcaacttcgtcagaaacgatcaggaactcaagaacctccgcaaaatcggcgcaggccaagccatggccaacttcacatggtctactacaccgtttctggtatcttgttccacttttgctgtgtttgtgtggacgcacgacgagcccttaagcactgagatcgtttttccagctctagcgcttttcaatctactcgggttccctctttctgtcctgcccatggtaatcacctccattattgaagcgacggtggctgccaaccgcctgagcgactttctgactgctgaagaggtccagcctgacgcagtcatacttggtccagccgcagaagaacgtggagacgaagctgtcgtgattcgtaaaggcaccttctcctggaaccgccacgaggccaaaaacgctcttaagaccatcgactttactgctcacaagggtgatcttacctgcgtggtcggcagagtgggccatggaaagtcttcgctgctacagagtatcctcggtgatctgtggaaagtcgaaggtgaggtgcggctcaatggcagtgtggcatacgtagcgcaacaaccctggatcatgaatgctacagtgaaagagaacattgtcttcggccatcgatacgactcgaatttctacgaaaagacagtcaaggcgtgtgctttactggacgattttgcacagctgcctgatggagacgagacgtacgtcggtgagcgaggcatttctctgagtggtggtcaaaaggcacggctcgcccttgcgcgcgcggtctacgccagggctgatgtctacctgctcgacgattgtctatctgctgtagattcgcacgttggacggcacatcatcgagaacgtgttgggctcagaaggccttctgaaatccaaatgtcgtatcctcgccacaaacgccattgccgttttgaacgatgctgactacatatatcagctcaaagatggagagattattgaacacggcacataccgccagcttattgccatgaagggaggcatagccggattaatacaatctgttggacaggagtctggctcatcgtcatcgaatagcagcgcttccggctctggcccgggaagtgagacctccacctacatcgaggttgccagtccggataaggaagaaatggaggaggcgcaagaaggattagctgagctagcccccattcgaacaggtgcgtcctcgagtgcgcaagaccgaagaaatagtatggcaacacttcgacgggccagcgctgcaagtatgcgaggagctcgaggcaaactcggggatgaagaagatcccagctccaaatccagacaaacaaaagagcacctggagcagggcaaagtcaaatgggatgtctatcttgagtacgccaaaaccagcaacctcggtgctgttaccgtctacttgttcactttgattgctgcccagacggcccagataggcggtagtatctggctcaagaactgggctgaggccaacagctcagcaggtactaacccagacgttgctaagtatctatcgatctaccttgcattcggtgtcggatctgcggctctatccgtcgtccagactctaatcttatggatattctgctcgatcgaagcatcaagaaagcttcacgaacgcatggccatggctatattcagatctcccatgtcattctttgacacaacgccagcgggaagaattttgaatcgattctctagcgacgtgtatcgtctggatgaggttttggcccgaactttcaacatgcttttcgtcaacttagccaaatcaggcttcacactgggactcatttcagttggtactccagctttcatcgccttcatcctacctctcagcggagtatactactgggttcaacggtactatcttcggacttcgcgagaactgaaaagactagacagtgtgagccgcagtcccatatatgcgcatttccaagaatctcttggtggcattagtacgattcgcgcatatcgccagcaagatcggtttgaacatgagaatgaatggcgggtcgactcaaatctgcgagctttcttcccctctatcagtgcgaatagatggttggcggtgcgcctagaattcttaggtgccatcattattctcgcggctgctgggctcgccattatttcggttacaaacaacacgggcttgagttctggcatggttggtttgggaatgtcgtatgctcttttgattactacgtcattgaattggatagtgcgccagacggtggaggtcgaaaccaacatcgtatctgttgaacgcattcttgaatatgcgcgcctgccaagcgaagctcctgaaattattccccgccgcaggccgcctgttgcttggcctgcacatggtgcagtccaatttcacaattttagcgctcgatatcgcgaaggtctggacttggtattgaagaaaatcaatcttgacatcaaatcacatgagaaaatcggtgtggtcggacgaactggtgctggcaaatcgtccttgacattgtcactgtttcgcctcatcgaggccgacacgggaaacatcagcatagataacctagacacttctacaattggtctactggatttacgccgtcgccttgcaatcatcccacaggatgcggcgcttttcgaaggcactgttcgggataatctagatcccgctcatgtccacgatgacactgagctctggagcgtattagaccacgcgcgattgaaggagcatatctctactatggatggcggccttgaagccaagatacacgaaggaggctcgaacctctccgcaggccaacgacaattgatctcgctagctcgtgccatgctgactccgtcgaacatactcgtactcgatgaagcaacagcggccgttgatgtagaaacggacgctttacttcaagctaccttacgatcggacctattcgcccaccgcaccattattactgtagctcatcgcataaacactattctcgacagcgacagggtagtagttcttgataagggtgaaatcgtagaattcgatacccccaaggccctgatcaagcagaaaagcatattttacagcctagtgaaagaatccggcttggacacggagtaaggtccgccggagtccagacctcgaatgcatggcagggattatcgacatgttgatcgacggagccgtgggttgcggcgtcatttagaataagcgacctcaatggtctgtacaaattgcatcatcaatgaaaatagtaaaacgtttgcacttctcacggatttcttgcttacaatctcctgctaagctattgccacttttacaaaatagtttcgactctcaaagcattcatctaagacgatgggccgaggatcgatcggtatccatagcaaaatctgccgatgtgaaacgccacatgcggttgcttgctagagaccatgtcttgaaatcgcatcgcttagtatatgattcatgaggttaggtagtctcagtcaatcttgccaaaagatcaatgcacagatccactctatgtctccggcggctgcatgcgccgaaggtcacaggactgacaattcgttgagctgaggggtggagggtgcacctgaaagatgacataggcaaacggaagaaaaagagaaggattaagcgtttgtaatgctgcagcttgggttacatgcggtgtgcataccgttccacgcactgcgaatgattcgccctgacctccgaggcttggcgcatcgtgaatatcatttgtaacgttgaggaggaaatacgattgggaactgatacgagttcgatcgcaattcatcacctcagtaaatagatgaaaagatacttggtggctggcgagctaggtagtgtgatccatacagttgtccgaattcgtcgacctgcgttgtattcgttcggattctcatgatggagcaggtaggtggagcgagaccgtcaaggaaaaagagtttctcttctacaaatc

SEQ ID NO: 32673 - DNA, 711 bp, Muscodor strobelii
  misc_feature: SGI cDNA ID NO. 571262
  misc_feature: Encodes the peptide sequence at SEQ ID NO 32674
atgcttgagtctttcgatggccaagaaaagcctgcccgcgggcgtggctcgtttcagccaaaccgttcgatgccagatctcctcgagcccaaggaggccgcaatacacaatggccatgaataccccgaatctgacaaagtaccggcattgtcaggtaacgcctcaacccgtcttcaacgtcgaaatacgactgtcgtcccttccaccgagggctcgagagcagacaggatgctacccgtcattcacggtcctattagcaagcccttctttatttcgccatggccgaagagtaccaagcgagccagttcgaacgagcgcaaaatgaacggtacttcaagccgctcttttcaatatgggatcacgacagtggcaagacacgaggcggacgctcagagtgatggcaccgaggtggagtatagacacgaattacatatgatggaaaagcgacgcagaagcgagtttcctcgacgtttagtaacggccatcgttggtgggatttttgtcatcgtgccaatgatcatcatgagtatcaatcggacgctcacgaaatgtcttgttaccagctctattgctgtttttctttttggcatcactttagcgtggacgagtacgtccgacgacgcgagcttgttcattgcaactgcaggctacgctgctttcttggccgtattcgtggctatgggaggtgagcccagtgagtcgtcatcctaa

SEQ ID NO: 32674 - protein, 236 aa, Muscodor strobelii
  misc_feature: SGI Peptide ID NO. 571262
  misc_feature (147)..(227): NCBI GI: 116195502 Blast Desc: CHGG_04349 [Chaetomium globosum CBS 148.51] gi|88180262|gb|EAQ87730.1| CHGG_04349 [Chaetomium globosum CBS 148.51]
  misc_feature (157)..(225): NCBI GI: 119499267 Blast Desc: NFIA_040700 [Neosartorya fischeri NRRL 181] gi|119414555|gb|EAW24494.1| conserved [Neosartorya fischeri NRRL 181]
  misc_feature (157)..(225): NCBI GI: 256731928 Blast Desc: NECHADRAFT_41924 [Nectria haematococca mpVI 77-13-4]
  misc_feature (157)..(235): NCBI GI: 116199569 Blast Desc: [Chaetomium globosum CBS 148.51] gi|88179219|gb|EAQ86687.1| [Chaetomium globosum CBS 148.51]
  misc_feature (152)..(227): NCBI GI: 212528158 Blast Desc: conserved [Penicillium marneffei ATCC 18224] gi|210073634|gb|EEA27721.1| conserved [Penicillium marneffei ATCC 18224]
  misc_feature (157)..(226): NCBI GI: 261356877 Blast Desc: conserved [Verticillium albo-atrum VaMs.102]
  misc_feature (157)..(225): NCBI GI: 169605669 Blast Desc: SNOG_05859 [Phaeosphaeria nodorum SN15] gi|111065803|gb|EAT86923.1| SNOG_05859 [Phaeosphaeria nodorum SN15]
  misc_feature (131)..(227): NCBI GI: 85092861 Blast Desc: NCU08188 [Neurospora crassa OR74A] gi|28921023|gb|EAA30345.1| NCU08188 [Neurospora crassa OR74A]
  misc_feature (157)..(229): NCBI GI: 154317786 Blast Desc: BC1G_02876 [Botryotinia fuckeliana B05.10] gi|150843534|gb|EDN18727.1| BC1G_02876 [Botryotinia fuckeliana B05.10]
  misc_feature (157)..(227): NCBI GI: 169772475 Blast Desc: [Aspergillus oryzae RIB40] gi|83768567|dbj|BAE58704.1| protein product [Aspergillus oryzae]
MLESFDGQEKPARGRGSFQPNRSMPDLLEPKEAAIHNGHEYPESDKVPALSGNASTRLQRRNTTVVPSTEGSRADRMLPVIHGPISKPFFISPWPKSTKRASSNERKMNGTSSRSFQYGITTVARHEADAQSDGTEVEYRHELHMMEKRRRSEFPRRLVTAIVGGIFVIVPMIIMSINRTLTKCLVTSSIAVFLFGITLAWTSTSDDASLFIATAGYAAFLAVFVAMGGEPSESSS

SEQ ID NO: 32675 - DNA, 2541 bp, Muscodor strobelii
  misc_feature: SGI cDNA ID NO. 571263
  misc_feature: Encodes the peptide sequence at SEQ ID NO 32676
atgccttcttcctcccgactgccacccgacggcccgacgaaccctgctgccatcccatctaagcgcaagatccccggtgcgttcgcctctcgcgcgcagcctgacgcccggccgtccggatccgaccccaaacgccccaagcccgcccagcccgtgcccgccgccctgacgatgagcaagtcgctcggcaagcggcccgtcggtctcttcaagcaggccttccccgcggccgagggcgccaagaagctcgtcatcaagaatctccgcaccacctcccacgcccaagatctgcaaaggtactacgacaggacaagactcgagctcaatgaggccctcaccgccatcttcgagcagcggccgccccagcacccacttgagaagctgtacaggggagtcgaggatatctgccgccatggagaggccccctcgctgttcgagtccctcgagcagcagtgcagagcgtatctgaacggtcccctcaagcgctccatcggcacggacatcgtcaactctgatatcaacgccctccagagcgtatacaagcactgggtcctgtggaacaatcaatcgactatcattcgttcgattttcagctacctcgaccggtcatttttattgaacagcaaggacagccaccgccgtcagatcaatgacatggcaatagagttattccgaaacatgttatttgcacctcatcattcttcgcttcacagcatagggtctctgtcgatagcgggcttatgccgtcttattgactacgatcggaggggagaccaacgcttcgatccagggctccttcgcaattccgtctccatgctatatgtcctgaacatctacaacgccaaattcgagccagagctgctgaaagtctccgcctcgtacttccaagagtttgccgaggagcagagcgccggctctttgaagtcctatattgctgcttgtgaaaagcttcttgatcgggaagacgatcgctgcaacgcctataacttggacagtaccaccaagaaacagctcatggatgccgcgcacaagatgctcatcaacgagtacgctgcgaagctactagatggcggcagtataagcaaggttctcgatgagaatgctgttgattctatgagagccctgtatgagctgttgcgtttgaccaacctacaaaagaagctcaaaacaccatgggaagactacatcaaggaggctggctctgcaatcgtcaacgatacctccaggggtgacgaaatggtggtccgattgcttgagttccggaagacattggatatcatggtgcgagatgccttcaaaaaggatgatgatttcacgtatggtctgagacagtcatttgacagcttcatcaacgacaagaagaacctggcctcgtggaacactgggacatctaaggttggcgaaatgattgcgaaatatgtcgacatgctgctccgtggtggcatcaagactcttccaaaatcactcatttccgatactcaggaccgcaaagatgccgagaaaagcggacaggccagcacaggcgacgaagatgccgagctggaccgacaattggatcaggccctggagttgtttcgcttcatcgaaggcaaagatgtctttgaagccttttataagcaagaccttgccaggagactcttgatgggccgtagtgccagtgcagacgcagagaggagcatgctggcaaagctcaagggcgaatgtggctcgaatttcactcgcaacctggagcagatgttcaaagaccaacaaattgctcgcgatgagatgagctcttacaaggaatggcgcgagaataccgggaaagattctagtaaattagacctgaatgtgagcattctgtcagctgctgcgtggccaacgtacgcagatgacgaactgcgactgcctggagaggttcaatcgcagttggagcagttttctacgttttataacaacaagcacactggacgacgcttgacctggaagcaatccctggcccattgcgtcctcaaagctaccttcaaaaagggcacaaaagagttacttgttagcgcataccaagctgtcatattgacactttttaatgacggcaacgatgttctttcgtatcaacaaatctccgagcgttcaggtcttaagggtcaggatcttatccggacgttgcaatccttagcgtgcggaaagattcgtgtgctcgtcaagaacccaaaaggcaaagatgtcaactcgacagacgtattcaaagtcaacgatagcttctcagacccgaagtatcgcgtcaagatcaaccagatccagctaaaggagactgtgaaggagaataaggacacacatgaacgagttgcgcaggatcgacaatttgagacgcaagctgccattgtccgtatcatgaagagtcgaaagacgatgacgcatgcccagcttgtttcggaggtgttgactcagactaagaaacgaggagctgtcgagcttagtgagattaagaagaacatcgagaagttgatcgaaaaggaataccttgagagagaggcaaacaactcatacacatacttggcttag

SEQ ID NO: 32676 - protein, 846 aa, Muscodor strobelii
  misc_feature: SGI Peptide ID NO. 571263
  misc_feature (107)..(748): Pfam Id: PF00888 Pfam Desc: Cullin family
  misc_feature (56)..(846): NCBI GI: 46122285 Blast Desc: FG05520.1 [Gibberella zeae PH-1]
  misc_feature (32)..(846): NCBI GI: 164428981 Blast Desc: NCU00272 [Neurospora crassa OR74A] gi|157072362|gb|EAA28507.2| conserved [Neurospora crassa OR74A]
  misc_feature (58)..(846): NCBI GI: 156058430 Blast Desc: SS1G_03226 [Sclerotinia sclerotiorum 1980] gi|154701014|gb|EDO00753.1| SS1G_03226 [Sclerotinia sclerotiorum 1980]
  misc_feature (7)..(846): NCBI GI: 171685922 Blast Desc: protein product [Podospora anserina] gi|170942922|emb|CAP68575.1| protein product [Podospora anserina]
  misc_feature (58)..(843): NCBI GI: 154310602 Blast Desc: BC1G_06775 [Botryotinia fuckeliana B05.10] gi|150851315|gb|EDN26508.1| BC1G_06775 [Botryotinia fuckeliana B05.10]
  misc_feature (57)..(846): NCBI GI: 261358294 Blast Desc: cullin-4B [Verticillium albo-atrum VaMs.102]
  misc_feature (25)..(846): NCBI GI: 145614202 Blast Desc: MGG_11316 [Magnaporthe grisea 70-15] gi|145021147|gb|EDK05276.1| MGG_11316 [Magnaporthe grisea 70-15]
  misc_feature (240)..(846): NCBI GI: 116207878 Blast Desc: CHGG_03232 [Chaetomium globosum CBS 148.51] gi|88183829|gb|EAQ91297.1| CHGG_03232 [Chaetomium globosum CBS 148.51]
  misc_feature (38)..(846): NCBI GI: 239613010 Blast Desc: ubiquitin ligase subunit CulD [Ajellomyces dermatitidis ER-3]
  misc_feature (73)..(846): NCBI GI: 238842605 Blast Desc: Cullin-4B [Microsporum canis CBS 113480]
MPSSSRLPPDGPTNPAAIPSKRKIPGAFASRAQPDARPSGSDPKRPKPAQPVPAALTMSKSLGKRPVGLFKQAFPAAEGAKKLVIKNLRTTSHAQDLQRYYDRTRLELNEALTAIFEQRPPQHPLEKLYRGVEDICRHGEAPSLFESLEQQCRAYLNGPLKRSIGTDIVNSDINALQSVYKHWVLWNNQSTIIRSIFSYLDRSFLLNSKDSHRRQINDMAIELFRNMLFAPHHSSLHSIGSLSIAGLCRLIDYDRRGDQRFDPGLLRNSVSMLYVLNIYNAKFEPELLKVSASYFQEFAEEQSAGSLKSYIAACEKLLDREDDRCNAYNLDSTTKKQLMDAAHKMLINEYAAKLLDGGSISKVLDENAVDSMRALYELLRLTNLQKKLKTPWEDYIKEAGSAIVNDTSRGDEMVVRLLEFRKTLDIMVRDAFKKDDDFTYGLRQSFDSFINDKKNLASWNTGTSKVGEMIAKYVDMLLRGGIKTLPKSLISDTQDRKDAEKSGQASTGDEDAELDRQLDQALELFRFIEGKDVFEAFYKQDLARRLLMGRSASADAERSMLAKLKGECGSNFTRNLEQMFKDQQIARDEMSSYKEWRENTGKDSSKLDLNVSILSAAAWPTYADDELRLPGEVQSQLEQFSTFYNNKHTGRRLTWKQSLAHCVLKATFKKGTKELLVSAYQAVILTLFNDGNDVLSYQQISERSGLKGQDLIRTLQSLACGKIRVLVKNPKGKDVNSTDVFKVNDSFSDPKYRVKINQIQLKETVKENKDTHERVAQDRQFETQAAIVRIMKSRKTMTHAQLVSEVLTQTKKRGAVELSEIKKNIEKLIEKEYLEREANNSYTYLA

SEQ ID NO: 32677 - DNA, 5170 bp, Muscodor strobelii
  misc_feature: SGI EST ID NO. CUFF.77298.0
  misc_feature: Variant of the nucleotide sequence at SEQ ID NO 32675
tggtaaagttgagcttgctcgtcggggatttttgggtcaactctagtggaacgtcgcgcagtgcagcctttggagtttgtacccagacgttggatatttttattttattttaaatcaacgttgaacgtaaatacatacttaggtaggtagctcataggtacaagggagacaacgtcagttccgcctagctttgcagatgccataggtacaacgtgagcacctcagccaatcaatcgcctacgacagcttcgtgagactacgtagatgagagtgggtgccgaattggccggatcggcaaatgattacaagtacagtctcttctcacgcccgtcatatcatcgacccaacccccagtgtgctgtttgcaagcttgtactggagtatttgtgcagctatcgcgttgcaccgttgtaccccttgcctctatcacaacgtcggccaccagatatcgagccacacagcgaacagcgaaccgcacgacaactcgtacccgtaacgccagcgaggtctatgtgacaggctgttgctggacctcgtctggttcatgccttcttcctcccgactgccacccgacggcccgacgaaccctgctgccatcccatctaagcgcaagatccccggtgcgttcgcctctcgcgcgcagcctgacgcccggccgtccggatccgaccccaaacgccccaagcccgcccagcccgtgcccgccgccctgacgatgagcaagtcgctcggcaagcggcccgtcggtctcttcaagcaggccttccccgcggccgagggcgccaagaagctcgtcatcaagaatctccgcaccacctcccacgcccaagatctgcaaaggtactacgacaggacaagactcgagctcaatgaggccctcaccgccatcttcgagcagcggccgccccagcacccacttgagaagctgtacaggggagtcgaggatatctgccgccatggagaggccccctcgctgttcgagtccctcgagcagcagtgcagagcgtatctgaacggtcccctcaagcgctccatcggcacggacatcgtcaactctgatatcaacgccctccagagcgtatacaagcactgggtcctgtggaacaatcaatcgactatcattcgttcgattttcagctacctcgaccggtcatttttattgaacagcaaggacagccaccgccgtcagatcaatgacatggcaatagagttattccgaaacatgttatttgcacctcatcattcttcgcttcacagcatagggtctctgtcgatagcgggcttatgccgtcttattgactacgatcggaggggagaccaacgcttcgatccagggctccttcgcaattccgtctccatgctatatgtcctgaacatctacaacgccaaattcgagccagagctgctgaaagtctccgcctcgtacttccaagagtttgccgaggagcagagcgccggctctttgaagtcctatattgctgcttgtgaaaagcttcttgatcgggaagacgatcgctgcaacgcctataacttggacagtaccaccaagaaacagctcatggatgccgcgcacaagatgctcatcaacgagtacgctgcgaagctactagatggcggcagtataagcaaggttctcgatgagaatgctgttgattctatgagagccctgtatgagctgttgcgtttgaccaacctacaaaagaagctcaaaacaccatgggaagactacatcaaggaggctggctctgcaatcgtcaacgatacctccaggggtgacgaaatggtggtccgattgcttgagttccggaagacattggatatcatggtgcgagatgccttcaaaaaggatgatgatttcacgtatggtctgagacagtcatttgacagcttcatcaacgacaagaagaacctggcctcgtggaacactgggacatctaaggttggcgaaatgattgcgaaatatgtcgacatgctgctccgtggtggcatcaagactcttccaaaatcactcatttccgatactcaggaccgcaaagatgccgagaaaagcggacaggccagcacaggcgacgaagatgccgagctggaccgacaattggatcaggccctggagttgtttcgcttcatcgaaggcaaagatgtctttgaagccttttataagcaagaccttgccaggagactcttgatgggccgtagtgccagtgcagacgcagagaggagcatgctggcaaagctcaagggcgaatgtggctcgaatttcactcgcaacctggagcagatgttcaaagaccaacaaattgctcgcgatgagatgagctcttacaaggaatggcgcgagaataccgggaaagattctagtaaattagacctgaatgtgagcattctgtcagctgctgcgtggccaacgtacgcagatgacgaactgcgactgcctggagaggttcaatcgcagttggagcagttttctacgttttataacaacaagcacactggacgacgcttgacctggaagcaatccctggcccattgcgtcctcaaagctaccttcaaaaagggcacaaaagagttacttgttagcgcataccaagctgtcatattgacactttttaatgacggcaacgatgttctttcgtatcaacaaatctccgagcgttcaggtcttaagggtcaggatcttatccggacgttgcaatccttagcgtgcggaaagattcgtgtgctcgtcaagaacccaaaaggcaaagatgtcaactcgacagacgtattcaaagtcaacgatagcttctcagacccgaagtatcgcgtcaagatcaaccagatccagctaaaggagactgtgaaggagaataaggacacacatgaacgagttgcgcaggatcgacaatttgagacgcaagctgccattgtccgtatcatgaagagtcgaaagacgatgacgcatgcccagcttgtttcggaggtgttgactcagactaagaaacgaggagctgtcgagcttagtgagattaagaagaacatcgagaagttgatcgaaaaggaataccttgagagagaggcaaacaactcatacacatacttggcttagatgttccacgccctacgcagagggcgacatgttgaggtacatatataataaggtctagacgttgaattaggtcaggagtgtgaataaatccgagcagctctgtgcaagaataggcaatattgatacgcgcctgtcgacttgttgctattataccgtacatgagagcttgtgtagctgagagtcagacacaggtttctcgtaatatggaatatagataacacaaactgttacctacgatcccatagctcttgtatgcattatcgatgaaaccagtacatgattacctttataaagaaggttatgtggttaattcgaggcttccaaatgacttatagccatcctgaagctctagcccatctttaaaccctcaaaatacatgacaagaccaggatggcgtgaaagatactgctatgggcttcctctatctacacggataaatgatgtctcaaaacgtcacggaacggccgtttattagacttagccctttgttttggtcatgggaagtatagagctctgttatagccaccttttggcgttcgactagtcgactcgacaacgattcttgggcagtggccttactcatcgtaaaacccagtagcccaaacaatcaaacgtccacccttccgttcatcatcggtaaaaagcccattccaagcgctccacacctccttcaacaggatcttgtgacgagcacctggcccattaggaccaaagtactcgcgcagcggttcttcgattccctcaaatccaacgatgtaccgtgccatatcctcgcccggtgcgtcgcgtggccataagtctcgcttcaggaaggcgatgggatctttgtaaaaccgccgcgtctcatcttggtaattagtgcgctcgacagatctaggggccgtgtctaaaggcggctcgcacgtcaaggcgcgagcgtggagagcgggatagatcagatgagaacgccacggagttgtatgacaaggtgttaagaaaagcgcgaaaagctcttgtgggggccgcaaatcgtcgatggacgtagtggcattgatcgattgtcgagtgaaagacaggtagtcaggatggatctgctcaaattcgttgcggaggaatgacatgacttggattggcgccgctgcatgaaaccacgataggtagcccccaactataacgtttacgagcaataaaagggccagtaaaggctttttcttaaactcaagagatggtgctgggcacatggccgcccctgccacagagactgtcgtgaaaaatgacgtgacataaggggcagcgatgatgtatagaagaggtgacagaggttgaataaagcgaatctccttatgcgatactagtgatagtgtagatatagtagagatgacgacgaaggtcagagccttgagtgcgttagaggtggttgttgaatagagtgcctccgcatctaatgatctcaggagaccttgaaaggcgaaaggagtgatagtggtgcagaggagtggaattccttgggtcaagaaatagtgccagtcattctgtccgtagaatcttgcgatatctttagttacgttgacgtgtaaccaggtaaaaggagggaaggtccaatctccgaagtactgatggtctactaacaacgacacgcccaacgcgaaggagctagaaattacatcttcagtaaaggaatttttcaggaatgacttgtagactcacccgcaaagaaatgcttctcgaaataagatcaacaaggcccctcgagacagaggtgattgccccgtaagagtgaaccgcgtaatcatgagagtaccaatagctaaccatataaagacattcgtaggccgtaacagcacagcaaatgcagccaacaccagcgagaggcgcaaactgttaagtttcgttagataaaattctccacagttggacgatatgcttacctgttgactttgccacttgtcttgagaagagacgatgaaccctgagagtccttttcgctgttctcaacaccgagaacttcccatggccaatagtatagggccatgatggtgagcactgtttccaaacaatttgagaaagttcttgttgcagtataccattgccaaggattcaacagcg

SEQ ID NO: 32678 - DNA, 1893 bp, Muscodor strobelii
  misc_feature: SGI cDNA ID NO. 571264
  misc_feature: Encodes the peptide sequence at SEQ ID NO 32679
atgagttcaaaaaagcgccaaaacaatagtgataagaaagctgtaaagcctttgagtccagaggttcatgatgaggtcaccaaagctattgcagaccagactcgagaggggctgttcgtgatatttctagtccgtctcatcaatgctctctgtgtccgaacattctttcaaccagatgaatattttcaagcccttgagcccgcatggcaaatggtctacggagatcatggcggagcttggttgacctgggaatggcggcatgctttgcgctcctccatacatcctgccattttttcactgggctatttcatcgtcgagaactactggagtggtttcgatatgccgacgaccaaggccaaatggctcttgcttgtacccaaagttctgcaaactgcctttgctactttgagtgactggtatacttggagattagctgagaaactttacggtcctagcagcgcagccggttggtctgttcttttgatgacgctgttgaatccttggcaatggtatactgcaacaagaactttctcaaattgtttggaaacagtgctcaccatcatggccctatactattggccatgggaagttctcggtgttgagaacagcgaaaaggactctcagggttcatcgtctcttctcaagacaagtggcaaagtcaacagtttgcgcctctcgctggtgttggctgcatttgctgtgctgttacggcctacgaatgtctttatatggttagctattggtactctcatgattacgcggttcactcttacggggcaatcacctctgtctcgaggggccttgttgatcttatttcgagaagcatttctttgcggctccttcgcgttgggcgtgtcgttgttagtagaccatcagtacttcggagattggaccttccctccttttacctggttacacgtcaacgtaactaaagatatcgcaagattctacggacagaatgactggcactatttcttgacccaaggaattccactcctctgcaccactatcactcctttcgcctttcaaggtctcctgagatcattagatgcggaggcactctattcaacaaccacctctaacgcactcaaggctctgaccttcgtcgtcatctctactatatctacactatcactagtatcgcataaggagattcgctttattcaacctctgtcacctcttctatacatcatcgctgccccttatgtcacgtcatttttcacgacagtctctgtggcaggggcggccatgtgcccagcaccatctcttgagtttaagaaaaagcctttactggcccttttattgctcgtaaacgttatagttgggggctacctatcgtggtttcatgcagcggcgccaatccaagtcatgtcattcctccgcaacgaatttgagcagatccatcctgactacctgtctttcactcgacaatcgatcaatgccactacgtccatcgacgatttgcggcccccacaagagcttttcgcgcttttcttaacaccttgtcatacaactccgtggcgttctcatctgatctatcccgctctccacgctcgcgccttgacgtgcgagccgcctttagacacggcccctagatctgtcgagcgcactaattaccaagatgagacgcggcggttttacaaagatcccatcgccttcctgaagcgagacttatggccacgcgacgcaccgggcgaggatatggcacggtacatcgttggatttgagggaatcgaagaaccgctgcgcgagtactttggtcctaatgggccaggtgctcgtcacaagatcctgttgaaggaggtgtggagcgcttggaatgggctttttaccgatgatgaacggaagggtggacgtttgattgtttgggctactgggttttacgatgagtaa

SEQ ID NO: 32679 - protein, 630 aa, Muscodor strobelii
  misc_feature: SGI Peptide ID NO. 571264
  misc_feature (38)..(512): Pfam Id: PF03901 Pfam Desc: Alg9-like mannosyltransferase family
  misc_feature (21)..(630): NCBI GI: 171687028 Blast Desc: protein product [Podospora anserina] gi|170943475|emb|CAP69128.1| protein product [Podospora anserina]
  misc_feature (2)..(630): NCBI GI: 85079757 Blast Desc: NCU00193 [Neurospora crassa OR74A] gi|28917479|gb|EAA27180.1| conserved [Neurospora crassa OR74A]
  misc_feature (32)..(630): NCBI GI: 256729687 Blast Desc: glycosyltransferase family 22 [Nectria haematococca mpVI 77-13-4]
  misc_feature (32)..(630): NCBI GI: 46122335 Blast Desc: FG05545.1 [Gibberella zeae PH-1] gi|110808258|sp|Q4IB63.1|GPI10_GIBZE RecName: Full=GPI mannosyltransferase 3; AltName: Full=GPI mannosyltransferase III;
  misc_feature (26)..(625): NCBI GI: 261358147 Blast Desc: GPI mannosyltransferase [Verticillium albo-atrum VaMs.102]
  misc_feature (2)..(560): NCBI GI: 116191747 Blast Desc: CHGG_05591 [Chaetomium globosum CBS 148.51] gi|88181504|gb|EAQ88972.1| CHGG_05591 [Chaetomium globosum CBS 148.51]
  misc_feature (34)..(624): NCBI GI: 119178210 Blast Desc: CIMG_07963 [Coccidioides immitis RS]
  misc_feature (34)..(624): NCBI GI: 240104790 Blast Desc: GPI mannosyltransferase, [Coccidioides posadasii C735 delta SOWgp]
  misc_feature (2)..(624): NCBI GI: 154273364 Blast Desc: conserved [Ajellomyces capsulatus NAm1] gi|150416046|gb|EDN11390.1| conserved [Ajellomyces capsulatus NAm1]
  misc_feature (18)..(624): NCBI GI: 242801397 Blast Desc: mannosyltransferase, [Talaromyces stipitatus ATCC 10500] gi|218717101|gb|EED16522.1| mannosyltransferase, [Talaromyces stipitatus ATCC 10500]
MSSKKRQNNSDKKAVKPLSPEVHDEVTKAIADQTREGLFVIFLVRLINALCVRTFFQPDEYFQALEPAWQMVYGDHGGAWLTWEWRHALRSSIHPAIFSLGYFIVENYWSGFDMPTTKAKWLLLVPKVLQTAFATLSDWYTWRLAEKLYGPSSAAGWSVLLMTLLNPWQWYTATRTFSNCLETVLTIMALYYWPWEVLGVENSEKDSQGSSSLLKTSGKVNSLRLSLVLAAFAVLLRPTNVFIWLAIGTLMITRFTLTGQSPLSRGALLILFREAFLCGSFALGVSLLVDHQYFGDWTFPPFTWLHVNVTKDIARFYGQNDWHYFLTQGIPLLCTTITPFAFQGLLRSLDAEALYSTTTSNALKALTFVVISTISTLSLVSHKEIRFIQPLSPLLYIIAAPYVTSFFTTVSVAGAAMCPAPSLEFKKKPLLALLLLVNVIVGGYLSWFHAAAPIQVMSFLRNEFEQIHPDYLSFTRQSINATTSIDDLRPPQELFALFLTPCHTTPWRSHLIYPALHARALTCEPPLDTAPRSVERTNYQDETRRFYKDPIAFLKRDLWPRDAPGEDMARYIVGFEGIEEPLREYFGPNGPGARHKILLKEVWSAWNGLFTDDERKGGRLIVWATGFYDE

SEQ ID NO: 32680 - DNA, 5260 bp, Muscodor strobelii
  misc_feature: SGI EST ID NO. CUFF.77299.1
  misc_feature: Variant of the nucleotide sequence at SEQ ID NO 32678
cgacgaccaaggccaaatggctcttgcttgtacccaaagttctgcaaactgcctttgctactttgagtgactggtatacttggagattagctgagaaactttacggtcctagcagcgcagccggttggtctgttcttttgatgacgctgttgaatccttggcaatggtatactgcaacaagaactttctcaaattgtttggaaacagtgctcaccatcatggccctatactattggccatgggaagttctcggtgttgagaacagcgaaaaggactctcagggttcatcgtctcttctcaagacaagtggcaaagtcaacagtttgcgcctctcgctggtgttggctgcatttgctgtgctgttacggcctacgaatgtctttatatggttagctattggtactctcatgattacgcggttcactcttacggggcaatcacctctgtctcgaggggccttgttgatcttatttcgagaagcatttctttgcggctccttcgcgttgggcgtgtcgttgttagtagaccatcagtacttcggagattggaccttccctccttttacctggttacacgtcaacgtaactaaagatatcgcaagattctacggacagaatgactggcactatttcttgacccaaggaattccactcctctgcaccactatcactcctttcgcctttcaaggtctcctgagatcattagatgcggaggcactctattcaacaaccacctctaacgcactcaaggctctgaccttcgtcgtcatctctactatatctacactatcactagtatcgcataaggagattcgctttattcaacctctgtcacctcttctatacatcatcgctgccccttatgtcacgtcatttttcacgacagtctctgtggcaggggcggccatgtgcccagcaccatctcttgagtttaagaaaaagcctttactggcccttttattgctcgtaaacgttatagttgggggctacctatcgtggtttcatgcagcggcgccaatccaagtcatgtcattcctccgcaacgaatttgagcagatccatcctgactacctgtctttcactcgacaatcgatcaatgccactacgtccatcgacgatttgcggcccccacaagagcttttcgcgcttttcttaacaccttgtcatacaactccgtggcgttctcatctgatctatcccgctctccacgctcgcgccttgacgtgcgagccgcctttagacacggcccctagatctgtcgagcgcactaattaccaagatgagacgcggcggttttacaaagatcccatcgccttcctgaagcgagacttatggccacgcgacgcaccgggcgaggatatggcacggtacatcgttggatttgagggaatcgaagaaccgctgcgcgagtactttggtcctaatgggccaggtgctcgtcacaagatcctgttgaaggaggtgtggagcgcttggaatgggctttttaccgatgatgaacggaagggtggacgtttgattgtttgggctactgggttttacgatgagtaaggccactgcccaagaatcgttgtcgagtcgactagtcgaacgccaaaaggtggctataacagagctctatacttcccatgaccaaaacaaagggctaagtctaataaacggccgttccgtgacgttttgagacatcatttatccgtgtagatagaggaagcccatagcagtatctttcacgccatcctggtcttgtcatgtattttgagggtttaaagatgggctagagcttcaggatggctataagtcatttggaagcctcgaattaaccacataaccttctttataaaggtaatcatgtactggtttcatcgataatgcatacaagagctatgggatcgtaggtaacagtttgtgttatctatattccatattacgagaaacctgtgtctgactctcagctacacaagctctcatgtacggtataatagcaacaagtcgacaggcgcgtatcaatattgcctattcttgcacagagctgctcggatttattcacactcctgacctaattcaacgtctagaccttattatatatgtacctcaacatgtcgccctctgcgtagggcgtggaacatctaagccaagtatgtgtatgagttgtttgcctctctctcaaggtattccttttcgatcaacctatttacgcattagtgataattaaacgaccaaggcaagcatgaacgtacttctcgatgttcttcttaatctcactaagctcgacagctcctcgtttcttagtctgagtcaacacctccgaaacaagctgggcatgcgtcatcgtctttcgactcttcatgatacggacaatggcagcttgcgtctcaaattgtcgatcctgcgcaactcgttcatgtgtgtccttattctccttcacagtctcctttagctggatctggttgatcttgacgcgatacttcgggtctgagaagctatcgttgactttgaatacgtctgtcgagttgacatctttgccttttgggttcttgacgagcacacgaatctttccgcacgctaaggattgcaacgtccggataagatcctgacccttaagacctgaacgctcggagatttgttgatacgaaagaacatcgttgccgtcattaaaaagtgtcaatatgacagcttggtatgcgctaacaagtaactcttttgtgccctttttgaaggtagctttgaggacgcaatgggccagggattgcttccaggtcaagcgtcgtccagtgtgcttgttgttataaaacgtagaaaactgctccaactgcgattgaacctctccaggcagtcgcagttcgtcatctgcgtacgttggccacgcagcagctgacagaatgctcacattcaggtctaatttactagaatctttcccggtattctcgcgccattccttgtaagagctcatctcatcgcgagcaatttgttggtctttgaacatctgctccaggttgcgagtgaaattcgagccacattcgcccttgagctttgccagcatgctcctctctgcgtctgcactggcactacggcccatcaagagtctcctggcaaggtcttgcttataaaaggcttcaaagacatctttgccttcgatgaagcgaaacaactccagggcctgatccaattgtcggtccagctcggcatcttcgtcgcctgtgctggcctgtccgcttttctcggcatctttgcggtcctgagtatcggaaatgagtgattttggaagagtcttgatgccaccacggagcagcatgtcgacatatttcgcaatcatttcgccaaccttagatgtcccagtgttccacgaggccaggttcttcttgtcgttgatgaagctgtcaaatgactgtctcagaccatacgtgaaatcatcatcctttttgaaggcatctcgcaccatgatatccaatgtcttccggaactcaagcaatcggaccaccatttcgtcacccctggaggtatcgttgacgattgcagagccagcctccttgatgtagtcttcccatggtgttttgagcttcttttgtaggttggtcaaacgcaacagctcatacagggctctcatagaatcaacagcattctcatcgagaaccttgcttatactgccgccatctagtagcttcgcagcgtactcgttgatgagcatcttgtgcgcggcatccatgagctgtttcttggtggtactgtccaagttataggcgttgcagcgatcgtcttcccgatcaagaagcttttcacaagcagcaatataggacttcaaagagccggcgctctgctcctcggcaaactcttggaagtacgaggcggagactttcagcagctctggctcgaatttggcgttgtagatgttcaggacatatagcatggagacggaattgcgaaggagccctggatcgaagcgttggtctcccctccgatcgtagtcaataagacggcataagcccgctatcgacagagaccctatgctgtgaagcgaagaatgatgaggtgcaaataacatgtttcggaataactctattgccatgtcattgatctgacggcggtggctgtccttgctgttcaataaaaatgaccggtcgaggtagctgaaaatcgaacgaatgatagtcgattgattgttccacaggacccagtgcttgtatacgctctggagggcgttgatatcagagttgacgatgtccgtgccgatggagcgcttgaggggaccgttcagatacgctctgcactgctgctcgagggactcgaacagcgagggggcctctccatggcggcagatatcctcgactcccctgtacagcttctcaagtgggtgctggggcggccgctgctcgaagatggcggtgagggcctcattgagctcgagtcttgtcctgtcgtagtacctttgcagatcttgggcgtgggaggtggtgcggagattcttgatgacgagcttcttggcgccctcggccgcggggaaggcctgcttgaagagaccgacgggccgcttgccgagcgacttgctcatcgtcagggcggcgggcacgggctgggcgggcttggggcgtttggggtcggatccggacggccgggcgtcaggctgcgcgcgagaggcgaacgcaccggggatcttgcgcttagatgggatggcagcagggttcgtcgggccgtcgggtggcagtcgggaggaagaaggcatgaaccagacgaggtccagcaacagcctgtcacatagacctcgctggcgttacgggtacgagttgtcgtgcggttcgctgttcgctgtgtggctcgatatctggtggccgacgttgtgatagaggcaaggggtacaacggtgcaacgcgatagctgcacaaatactccagtacaagcttgcaaacagcacactgggggttgggtcgatgatatgacgggcgtgagaagagactgtacttgtaatcatttgccgatccggccaattcggcacccactctcatctacgtagtctcacgaagctgtcgtaggcgattgattggctgaggtgctcacgttgtacctatggcatctgcaaagctaggcggaactgacgttgtctcccttgtacctatgagctacctacctaagtatgtatttacgttcaacgttgatttaaaataaaataaaaatatccaacgtctgggtacaaactccaaaggctgcactgcgcgacgttccactagagttgacccaaaaatccccgacgagcaagctcaactttacca

SEQ ID NO: 32681 - DNA, 1362 bp, Muscodor strobelii
  misc_feature: SGI cDNA ID NO. 571265
  misc_feature: Reduced expression when VOC is produced
  misc_feature: Encodes the peptide sequence at SEQ ID NO 32682
atggctccccatgccgaaggcgcaaacggccaggccgccaacaactcgagtggtgcgtccaggttccattcttcctcgaccaagagtgcgattgacgccgagcacaagttcgctgcacacaactaccatcctctgcccgtggtcttcgcccgcgcgagaggtgttgatgtatgggaccctgagggcaagcattacatcgatttcctctccgcctatagcgccgtcaaccaaggtcattgtcatccggaactcgtcaaggcattgacggagcaagctagtcgtttgaccttgagctctagagcttttcataatgacgtattcccaaaatgggcggagaaggtccagcagatgttcggttacgacatggtcctgcccatgaataccggcgccgaagccgttgagaccgccataaaaattgctaggaaatgggcatacaaggtcaagggcatcccgcaggacaaagcattgatctttggtgtggaggagaacttccacggccgcacaatgacagcagtcaccctgtccaccgatccagaatccaaggataactatggaccatacatacctaacgttggagccgtctgtccttcgactggcaaggccattcggtacaatactattgctgatctagaggcggttttggagtcgcatggcaaagagacagccgcatttatttgcgagcccattcagggcgaagcaggtgtcgtggttccagatgaaggctatctgaagcaagtgcaggatctctgcaagaaacacaatgtgctcttcatttgcgacgagatccaaactggaattggtcgaacaggccgtatgctgtgttcagaatgggctggtatcaagccggacatggtaactctaggcaaggccatctctggcgggatgtatcctgtgagctgcgttctcagcagtaaggacatcatgctagtcgtagagcctggaacacacggttccacatatggtggcaaccctcttggctgcgctgtgtcgattcgagctctcgaacttatggaagaagaacagcttacccaaaaagctgagaaattaggaaatgctttccgtgaggcattggctgcattcaactctccagctatcaagttgatccgcggcaaagggcttctaaacgctgttgttatcgacgagtcccaaacgaatggacactccgcatgggatctctgtgttcttttgaaggacaaaggtcttttggcaaaaccaacacacggaaacatcatccgatttgctcctccgttagtgatcactgagaatgagttgcaaaaagccgttgctattatcggagaggcacttaaagagcttcctaatctcaagagacatgagaacgtccacgtagaactagagaactaa

SEQ ID NO: 32682 - protein, 453 aa, Muscodor strobelii
  misc_feature: SGI Peptide ID NO. 571265
  misc_feature (48)..(381): Pfam Id: PF00202 Pfam Desc: Aminotransferase class-III
  misc_feature (20)..(442): NCBI GI: 226279818 Blast Desc: ornithine aminotransferase [Paracoccidioides brasiliensis Pb01]
  misc_feature (9)..(442): NCBI GI: 238491350 Blast Desc: L-ornithine aminotransferase Car2, [Aspergillus flavus NRRL3357] gi|220697325|gb|EED53666.1| L-ornithine aminotransferase Car2, [Aspergillus flavus NRRL3357]
  misc_feature (9)..(442): NCBI GI: 169773365 Blast Desc: [Aspergillus oryzae RIB40] gi|83769012|dbj|BAE59149.1| protein product [Aspergillus oryzae]
  misc_feature (15)..(453): NCBI GI: 70994128 Blast Desc: L-ornithine aminotransferase Car2 [Aspergillus fumigatus Af293] gi|66849545|gb|EAL89873.1| L-ornithine aminotransferase Car2, [Aspergillus fumigatus Af293] L-ornithine
  misc_feature (13)..(442): NCBI GI: 67522707 Blast Desc: OAT_EMENI Ornithine aminotransferase (Ornithine--oxo-acid aminotransferase) [Aspergillus nidulans FGSC A4] gi|146345471|sp|Q92413.2|OAT_EMENI RecName: Full=Ornithine
  misc_feature (15)..(442): NCBI GI: 115397773 Blast Desc: ornithine aminotransferase [Aspergillus terreus NIH2624] gi|114192669|gb|EAU34369.1| ornithine aminotransferase [Aspergillus terreus NIH2624]
  misc_feature (1)..(440): NCBI GI: 238839648 Blast Desc: ornithine aminotransferase [Microsporum canis CBS 113480]
  misc_feature (15)..(453): NCBI GI: 119500704 Blast Desc: L-ornithine aminotransferase Car2, [Neosartorya fischeri NRRL 181] gi|119415274|gb|EAW25212.1| L-ornithine aminotransferase Car2, [Neosartorya fischeri NRRL 181]
  misc_feature (19)..(445): NCBI GI: 258577111 Blast Desc: ornithine-oxo-acid transaminase [Uncinocarpus reesii 1704] gi|237903003|gb|EEP77404.1| ornithine-oxo-acid transaminase [Uncinocarpus reesii 1704]
  misc_feature (13)..(442): NCBI GI: 4416517 Blast Desc: ornithine transaminase [Emericella nidulans]
  misc_feature (22)..(442): SWISSPROT Homolog: EC 2.6.1.13 Ornithine aminotransferase
  misc_feature: Useful for introducing or modulating the production of volatile compounds
MAPHAEGANGQAANNSSGASRFHSSSTKSAIDAEHKFAAHNYHPLPVVFARARGVDVWDPEGKHYIDFLSAYSAVNQGHCHPELVKALTEQASRLTLSSRAFHNDVFPKWAEKVQQMFGYDMVLPMNTGAEAVETAIKIARKWAYKVKGIPQDKALIFGVEENFHGRTMTAVTLSTDPESKDNYGPYIPNVGAVCPSTGKAIRYNTIADLEAVLESHGKETAAFICEPIQGEAGVVVPDEGYLKQVQDLCKKHNVLFICDEIQTGIGRTGRMLCSEWAGIKPDMVTLGKAISGGMYPVSCVLSSKDIMLVVEPGTHGSTYGGNPLGCAVSIRALELMEEEQLTQKAEKLGNAFREALAAFNSPAIKLIRGKGLLNAVVIDESQTNGHSAWDLCVLLKDKGLLAKPTHGNIIRFAPPLVITENELQKAVAIIGEALKELPNLKRHENVHVELEN

SEQ ID NO: 32683 - DNA, 2213 bp, Muscodor strobelii
  misc_feature: SGI EST ID NO. CUFF.77668.0
  misc_feature: Variant of the nucleotide sequence at SEQ ID NO 32681
gtctagtatttataccttccatagatctacaagcaatacttactcggatccgtctcctcagcttagattgtttttccccgaatgctcaccgtcgacgtagactaaggcttgcaatctcttatacttctctgtctcactaatctagacagttgttcatcctcagacccttgaatcaccccaccaccccgcgaccctcgtcatcatggctccccatgccgaaggcgcaaacggccaggccgccaacaactcgagtggtgcgtccaggttccattcttcctcgaccaagagtgcgattgacgccgagcacaagttcgctgcacacaactaccatcctctgcccgtggtcttcgcccgcgcgagaggtgttgatgtatgggaccctgagggcaagcattacatcgatttcctctccgcctatagcgccgtcaaccaaggtcattgtcatccggaactcgtcaaggcattgacggagcaagctagtcgtttgaccttgagctctagagcttttcataatgacgtattcccaaaatgggcggagaaggtccagcagatgttcggttacgacatggtcctgcccatgaataccggcgccgaagccgttgagaccgccataaaaattgctaggaaatgggcatacaaggtcaagggcatcccgcaggacaaagcattgatctttggtgtggaggagaacttccacggccgcacaatgacagcagtcaccctgtccaccgatccagaatccaaggataactatggaccatacatacctaacgttggagccgtctgtccttcgactggcaaggccattcggtacaatactattgctgatctagaggcggttttggagtcgcatggcaaagagacagccgcatttatttgcgagcccattcagggcgaagcaggtgtcgtggttccagatgaaggctatctgaagcaagtgcaggatctctgcaagaaacacaatgtgctcttcatttgcgacgagatccaaactggaattggtcgaacaggccgtatgctgtgttcagaatgggctggtatcaagccggacatggtaactctaggcaaggccatctctggcgggatgtatcctgtgagctgcgttctcagcagtaaggacatcatgctagtcgtagagcctggaacacacggttccacatatggtggcaaccctcttggctgcgctgtgtcgattcgagctctcgaacttatggaagaagaacagcttacccaaaaagctgagaaattaggaaatgctttccgtgaggcattggctgcattcaactctccagctatcaagttgatccgcggcaaagggcttctaaacgctgttgttatcgacgagtcccaaacgaatggacactccgcatgggatctctgtgttcttttgaaggacaaaggtcttttggtaagtcgcatatcacgagatcactttacaaattatccagacggattatgtatgcttactctgtcgcaggcaaaaccaacacacggaaacatcatccgatttgctcctccgttagtgatcactgagaatgagttgcaaaaagccgttgctattatcggagaggcacttaaagagcttcctaatctcaagagacatgagaacgtccacgtagaactagagaactaaggaacacctaactagcggtccaccgacgattttctctatcttgtattgttatgattcaagtggtgcaactgcgagaatcgagtttggtaggtccgcctgtcatacacactatgatgaggggcacacggaagtggaaaaacggggaagcagtgggcgaggctctgcgatgtcaaagcacacatcgtttcctgcgacccatgatccactcgctgtaaccctccacactcaagcgagaaagtcactccgacttgctacctgtgatttggccttagccgggagacgctgacctatttgaccggagatgtcaaatcggagtatggattacggtttttggcaccggaggattgctgttcgattatggttggatttgcctcgtctcacaagagaatcttggtatgacacccgatagatacccacgcacgcaaaaggtctacctacatgcatctacaactcccgaataaatctagctggatgtatgatgccctgcagcgtggtcgatgatacagtttttctcgatgcgtctcatcacatcgcctctaatatagcgtgttaatttttatcatcgttcgaacaaatatct

SEQ ID NO: 32684 - DNA, 2901 bp, Muscodor strobelii
  misc_feature: SGI cDNA ID NO. 571266
  misc_feature: Encodes the peptide sequence at SEQ ID NO 32685
atggccgatgcacgagccgcctcgcgccgtgcgagggccggcgacgatgtcgtcggccagttcatcatcggttccgagataggcaaaggcagctttgcacaggtgtacgtgggcaagcacaaggtgtctggagctctggtagccatcaaatccgtcgatctcagccggctgaacaagaagttaaaagagaacctatatagcgagatttccatactgaagaagcttcgtcacccgcacattgtggccttgcatgactgcatcgaatcgagtacacacatcaacctcctgatggaatactgcgagctcggggacttgtccttgttcatcaagaagagagagaagctcattacacatcccgctacatgcgacatggcacggaagtatccaagcacccccgggtctggtctgaacgaggtcgtcatccggcatttcctcaaacagctcgccagtgcactccagtttctgaggagaagcaccttggtccatcgggatatcaaaccacagaaccttcttctccttccttccatcacctatcgggagtcaggtaatgatgccaagccaattcttggtgctagtgtcgattccttaatacctgccgctgggatcacatccttgccaatgctcaaacttgcggacttcggctttgcacgagttcttccgtccacatcgctggctgagacgctctgcggatcacctctgtatatggcacctgaaatactacgctatgagcagtatgatgccaaggccgacttgtggtcggtgggaaccgtcgcgtacgaaatgacctctggcaggcctcctttccgagccagtaaccatgtcgagctcttacgcaagatcgagagcggagaagatgtaatcaagttctctagagaaactcaggttacccctgatctcaaggctctgattcgtgcgttgctgaaacggactcctgtcgaacgaatgagttttgagaacttcttcaaccaccgtgtcatcgtggatcctatacctggtcttgttgaggacgacgtaccgagacctcgacggcaaacaccacaagaaatacgggcttcgtccaagacagacgagcctcgatcagaggggcgtcggttatcgatgcacaatcgttatcgctctgagccagaggtcgtacatctagaaggaggttcaccgtcatctcgagagaaagctactaagctctcacccttatccactacgccagaacaaccaggtcagagtgcggttcgtgtaagtcagtcgccgcagccagatcttgcacctggccttggcatacgacggcctcaaccacagccttccacttcagcgccctccaaagccgctatcacggaagaccggcgacgacggggttattcgaatgcttcgaccaatagacctttccaggacgagcaatcatcgccttccaccaatccgagcaaattcgcagatgcaacaagagaacgttcgtctcgccagtcagttgatgaacgagagaaagcctctcaagatatagcattcgaaagagactacgttgttgtagagaagaaatatgtcgaagtgaacgcctttgcagacgagctggctgctaaaggtgcccaggtacaggctgtttctcctcgatcggggcaagttattcgacgtgcgacccagcagggtgatccaaggtcggccaccggagcagttccggcgcaaccctccaacgctctgcagatagcacaagggaaacagcgaccggacacttaccaccgaggctcatatgacaaaaacctgtctgcaagccctgggtcaacaacctcagtaatttccaaagcgatccaagatgctagcttgaggctatttggattcaaatatccttctcatatgcttggcaagggaccatcacctccacacatgtacagcgcatttcccgcctatcctacgccgagtagtcctgccggcttgatcacagatggacgttcagggggtcccgttgacgaggatctgcgagtcgcccagtgtattgaagactttgctactcgtagtgacgttgtttggggctttgctgaagtgaaatataagcaactggtgcctctcgctccgtcgatggggcaaggccttgggggcctatctgccgagaaaattagcttggacgaagatgacggtcttacagtggaagctgttgtcgtcctttcggaagaggctctcgtcctctacgtcaaagcactttcgctccttgcaaaatcaatggaccttgcaagcctatggtgggcccgtaaagctaaaagtgattcgacatctgcgcagcaccttatcggtcgcgatacaaacagcacgcagaacctcgtaaccagagttaattctgcagtgcaatgggttcgcaagcgtttcaacgaaacgttggagaaggctgatttggtcagacgcaagttgacagaggcccagaagcaattacctgaagaccatccgagttatctgagcaatgatcaggcagaggctctcctctctggcactacgggtggcgatggtgtcatgttgacgcctggactaaacgctgaaaagctgatgtacgaccgcgcgattgacatgagccggactgccgccatcaacgagattgccaatgaggatctgcacggatgtgaactctcctacgtcacggccattcgtatgctcgaagctgtgcttgatcacgatgatgaactgtcaagcacccgaaaagtcttaggatctcccaaggcagagtctagtgctcaagaagctgcacgagaaatgaatgctgatgatcaacaaatggttcataatatgatccaaatgattaccggcaggcttgcgacacttcgaaagaaaatccaggtgattgcaaatgcatctaaggcgcatcaagacttgccgagcaagcgcagtgatgagatgacccctcgaagtgttcccactcacatctcatga

SEQ ID NO: 32685 - protein, 966 aa, Muscodor strobelii
  misc_feature: SGI Peptide ID NO. 571266
  misc_feature (21)..(326): Pfam Id: PF00069 Pfam Desc: Protein kinase domain
  misc_feature (21)..(326): Pfam Id: PF07714 Pfam Desc: Protein tyrosine kinase
  misc_feature (21)..(165): Pfam Id: PF07714 Pfam Desc: Protein tyrosine kinase
  misc_feature (1)..(966): NCBI GI: 39976981 Blast Desc: MGG_06393 [Magnaporthe grisea 70-15] gi|71152278|sp|Q52EB3.1|ATG1_MAGGR RecName: Full=Serine/threonine-protein kinase ATG1; AltName: protein 1
  misc_feature (13)..(963): NCBI GI: 116191751 Blast Desc: CHGG_05593 [Chaetomium globosum CBS 148.51] gi|121786713|sp|Q2H6X2.1|ATG1_CHAGB RecName: Full=Serine/threonine-protein kinase ATG1; AltName: protein 1 CBS
  misc_feature (1)..(963): NCBI GI: 121808801 Blast Desc: ATG1_PODAN RecName: Full=Serine/threonine-protein kinase atg1; AltName: Full=Autophagy-related protein 1 gi|63054317|gb|AAY28926.1| kinase [Podospora anserina]
  misc_feature (16)..(919): NCBI GI: 85079734 Blast Desc: NCU00188 [Neurospora crassa OR74A] gi|62899772|sp|Q7RX99.1|ATG1_NEUCR RecName: Full=Serine/threonine-protein kinase atg-1; AltName: protein 1
  misc_feature (1)..(963): NCBI GI: 171687032 Blast Desc: protein product [Podospora anserina] gi|170943477|emb|CAP69130.1| protein product [Podospora anserina]
  misc_feature (18)..(966): NCBI GI: 256729877 Blast Desc: [Nectria haematococca mpVI 77-13-4]
  misc_feature (18)..(966): NCBI GI: 46122339 Blast Desc: FG05547.1 [Gibberella zeae PH-1]
  misc_feature (18)..(949): NCBI GI: 156042864 Blast Desc: conserved [Sclerotinia sclerotiorum 1980] gi|166990568|sp|A7F0W2.1|ATG1_SCLS1 RecName: Full=Serine/threonine-protein kinase ATG1; AltName: protein 1
  misc_feature (9)..(948): NCBI GI: 154313470 Blast Desc: conserved [Botryotinia fuckeliana B05.10] gi|62899756|sp|Q6H9I1.1|ATG1_BOTFU RecName: Full=Serine/threonine-protein kinase ATG1; AltName: protein 1; 1
  misc_feature (18)..(961): NCBI GI: 119500722 Blast Desc: serine/threonine protein kinase (Pdd7p), [Neosartorya fischeri NRRL 181] gi|166990566|sp|A1CX69.1|ATG1_NEOFI RecName: Full=Serine/threonine-protein kinase atg1; AltName: protein 1
  misc_feature (18)..(966): SWISSPROT Homolog: EC 2.7.11.1 Non-specific serine/threonine protein kinase
MADARAASRRARAGDDVVGQFIIGSEIGKGSFAQVYVGKHKVSGALVAIKSVDLSRLNKKLKENLYSEISILKKLRHPHIVALHDCIESSTHINLLMEYCELGDLSLFIKKREKLITHPATCDMARKYPSTPGSGLNEVVIRHFLKQLASALQFLRRSTLVHRDIKPQNLLLLPSITYRESGNDAKPILGASVDSLIPAAGITSLPMLKLADFGFARVLPSTSLAETLCGSPLYMAPEILRYEQYDAKADLWSVGTVAYEMTSGRPPFRASNHVELLRKIESGEDVIKFSRETQVTPDLKALIRALLKRTPVERMSFENFFNHRVIVDPIPGLVEDDVPRPRRQTPQEIRASSKTDEPRSEGRRLSMHNRYRSEPEVVHLEGGSPSSREKATKLSPLSTTPEQPGQSAVRVSQSPQPDLAPGLGIRRPQPQPSTSAPSKAAITEDRRRRGYSNASTNRPFQDEQSSPSTNPSKFADATRERSSRQSVDEREKASQDIAFERDYVVVEKKYVEVNAFADELAAKGAQVQAVSPRSGQVIRRATQQGDPRSATGAVPAQPSNALQIAQGKQRPDTYHRGSYDKNLSASPGSTTSVISKAIQDASLRLFGFKYPSHMLGKGPSPPHMYSAFPAYPTPSSPAGLITDGRSGGPVDEDLRVAQCIEDFATRSDVVWGFAEVKYKQLVPLAPSMGQGLGGLSAEKISLDEDDGLTVEAVVVLSEEALVLYVKALSLLAKSMDLASLWWARKAKSDSTSAQHLIGRDTNSTQNLVTRVNSAVQWVRKRFNETLEKADLVRRKLTEAQKQLPEDHPSYLSNDQAEALLSGTTGGDGVMLTPGLNAEKLMYDRAIDMSRTAAINEIANEDLHGCELSYVTAIRMLEAVLDHDDELSSTRKVLGSPKAESSAQEAAREMNADDQQMVHNMIQMITGRLATLRKKIQVIANASKAHQDLPSKRSDEMTPRSVPTHIS

SEQ ID NO: 32686 - DNA, 5165 bp, Muscodor strobelii
  misc_feature: SGI EST ID NO. CUFF.77424.1
  misc_feature: Variant of the nucleotide sequence at SEQ ID NO 32684
tgattaccaatagattcatctgaattgtgcgcttttggctcttatagaacattactttgtgaccacttgccaccgtattagcggcctacccaggtagttctagtcgccttacattacgcctttctcgtcagtcattgtgttatctagtccagtaggcttatcacattgggagcatgccttcttgttgctcgtgacggccctcgtgattattccgtacctgtaagaaacatgattcgctagaagaagtttcctcatctttctgtctttctgtgtctctctatttcgtctattctttctcggcttcattatttttgctataataccgccactgctctcaggtctcatctcaagtatcgcgcccccaactgccttatatatgtaggtaaagttcgtcctaagggtcatccaccacttaacaccgtctaacgccgtttagtgtttcctccgtctccccagcattttcgaaaattaaccaagagttgagctcttcttgtcagtcaatcgtccatctgcgtgtggcaatatcatctaggcattagtgcggtacccatcatctgttggacggcgctcaacgatcttgatggcctgagacagaagatacctgcatttcagcgagcttcagaatcctgtctcgtggaagagtcacacctgcctagcgagtcattcgtaccgggattaaagctgtctgcaacatctctctagttccctatctactgcacaggttggggccagaataatagcccacggctaagataacgtattgtagctttggcgtaacagcctgcaaagtctggtagcttggccccggctaagcactgctcacagtgacgtccccgcttgacagtgccatcggttacctaggtacctaggtccactgtgacgcatttccgtccatcccaactcgagagacgcgctcacctcgactttcgagcttctttctcttcgacttgtttcgactcctgccttgtgcttcggagcatcctttccatcccttttccatctcgacctcgcacaacacttcgcccctaaacgcccgtacatgacgaccaccagcccacccccgttcccgtcacccaacctctcctaggccctcggcctccaaccggccttcgaccgaccttcctggcatcgccaaatcacacagggagccatggccgatgcacgagccgcctcgcgccgtgcgagggccggcgacgatgtcgtcggccagttcatcatcggttccgagataggcaaaggcagctttgcacaggtgtacgtgggcaagcacaaggtaggttgtcttagaaacgacagttcccatgtccatcacgtcgctctcctgaagaattcacaacttcatgtgtctactatatttgggaggcagatacgaaagttcctgtccatctactgttgtttccgacgatgtctttgtcttcagcgcaaagagcgagccgtagattggagactgggctaacacacatgattgggaaggtgtctggagctctggtagccatcaaatccgtcgatctcagccggctgaacaagaagttaaaagagaacctatatagcgagatttccatactgaagaagcttcgtcacccgcacattgtggccttgcatgactgcatcgaatcgagtacacacatcaacctcctgatggaatactgcgagctcggggacttgtccttgttcatcaagaagagagagaagctcattacacatcccgctacatgcgacatggcacggaagtatccaagcacccccgggtctggtctgaacgaggtcgtcatccggcatttcctcaaacagctcgccagtgcactccagtttctgaggagaagcaccttggtccatcgggatatcaaaccacagaaccttcttctccttccttccatcacctatcgggagtcaggtaatgatgccaagccaattcttggtgctagtgtcgattccttaatacctgccgctgggatcacatccttgccaatgctcaaacttgcggacttcggctttgcacgagttcttccgtccacatcgctggctgagacgctctgcggatcacctctgtatatggcacctgaaatactacgctatgagcagtatgatgccaaggccgacttgtggtcggtgggaaccgtcgcgtacgaaatgacctctggcaggcctcctttccgagccagtaaccatgtcgagctcttacgcaagatcgagagcggagaagatgtaatcaagttctctagagaaactcaggttacccctgatctcaaggctctgattcgtgcgttgctgaaacggactcctgtcgaacgaatgagttttgagaacttcttcaaccaccgtgtcatcgtggatcctatacctggtcttgttgaggacgacgtaccgagacctcgacggcaaacaccacaagaaatacgggcttcgtccaagacagacgagcctcgatcagaggggcgtcggttatcgatgcacaatcgttatcgctctgagccagaggtcgtacatctagaaggaggttcaccgtcatctcgagagaaagctactaagctctcacccttatccactacgccagaacaaccaggtcagagtgcggttcgtgtaagtcagtcgccgcagccagatcttgcacctggccttggcatacgacggcctcaaccacagccttccacttcagcgccctccaaagccgctatcacggaagaccggcgacgacggggttattcgaatgcttcgaccaatagacctttccaggacgagcaatcatcgccttccaccaatccgagcaaattcgcagatgcaacaagagaacgttcgtctcgccagtcagttgatgaacgagagaaagcctctcaagatatagcattcgaaagagactacgttgttgtagagaagaaatatgtcgaagtgaacgcctttgcagacgagctggctgctaaaggtgcccaggtacaggctgtttctcctcgatcggggcaagttattcgacgtgcgacccagcagggtgatccaaggtcggccaccggagcagttccggcgcaaccctccaacgctctgcagatagcacaagggaaacagcgaccggacacttaccaccgaggctcatatgacaaaaacctgtctgcaagccctgggtcaacaacctcagtaatttccaaagcgatccaagatgctagcttgaggctatttggattcaaatatccttctcatatgcttggcaagggaccatcacctccacacatgtacagcgcatttcccgcctatcctacgccgagtagtcctgccggcttgatcacagatggacgttcagggggtcccgttgacgaggatctgcgagtcgcccagtgtattgaagactttgctactcgtagtgacgttgtttggggctttgctgaagtgaaatataagcaactggtgcctctcgctccgtcgatggggcaaggccttgggggcctatctgccgagaaaattagcttggacgaagatgacggtcttacagtggaagctgttgtcgtcctttcggaagaggctctcgtcctctacgtcaaagcactttcgctccttgcaaaatcaatggaccttgcaagcctatggtgggcccgtaaagctaaaagtgattcgacatctgcgcagcaccttatcggtcgcgatacaaacagcacgcagaacctcgtaaccagagttaattctgcagtgcaatgggttcgcaagcgtttcaacgaaacgttggagaaggctgatttggtcagacgcaagttgacagaggcccagaagcaattacctgaagaccatccgagttatctgagcaatgatcaggcagaggctctcctctctggcactacgggtggcgatggtgtcatgttgacgcctggactaaacgctgaaaagctgatgtacgaccgcgcgattgacatgagccggactgccgccatcaacgagattgccaatgaggatctgcacggatgtgaactctcctacgtcacggccattcgtatgctcgaagctgtgcttgatcacgatgatgaactgtcaagcacccgaaaagtcttaggatctcccaaggcagagtctagtgctcaagaagctgcacgagaaatgaatgctgatgatcaacaaatggttcataatatgatccaaatgattaccggcaggcttgcgacacttcgaaagaaaatccaggtgattgcaaatgcatctaaggcgcatcaagacttgccgagcaagcgcagtgatgagatgacccctcgaagtgttcccactcacatctcatgaagatatgggactgaaaccttatgattgatgacgacacgtataagattgcgatacagattgttcaagcctcacggcccttcctgctctcaaatgctttcattgtttcactgaaggcaaaagggagattgtcatcttaagttccttatgttattcattcgccggcgttgatggataagaggaatttctgtcatacgggttacaattaatatggtcgggcgtttgatatattcctcttgtctgggtattgagcggtttgacacacgattttcgatactgcttttcctacacatctttgattcttgcacattgctttttttgcgcttctgtgtatctactttgttgacatcaagttgggtttgatgcaaagtccaggccctgagaatattggcaacattggcatcgagtccagcagcctcagccgtgtcctcgttatgaggattcttggccgaggactaatgatcccaagtctagactgttgagtgggctcagtctcaaggcttccaatgctgatggcggaaaacaaagactctgacgacatgttcccggtataacattcctaagagttggctccgtcatgtccaacctttcaccaagtattcggcatcgagctagttgttttgagacaattagctgtgtggaggtggacgatgttaagttgggaacaagactatgcttgtttcaatccgctcaaagggggtggtcctatacaatatggtccatagtaggatgtgtctagtctgtggaatatattatataatgtattccaacttcattatctatgttaatatcgaagcgtgcatatgttgtaggccatgatgacagcagcatgagtagtaaaggtcattgcgtgaccatgtcattcagatagtggctactagttctatgttgtaaaaagagacatgacttgtacagtc

SEQ ID NO: 32687 - DNA, 2259 bp, Muscodor strobelii
  misc_feature: SGI cDNA ID NO. 571267
  misc_feature: Reduced expression when VOC is produced
  misc_feature: Encodes the peptide sequence at SEQ ID NO 32688
atgacgtccgccggcacgccctccaaaccaccgcctcaccatcccatgagcccaccaccgcccgtcgctctgccatcctcatccacccagcccgccacgcctgcctcgccgcccagcaaacgcgcagacctcaagtcctggtggaagaagttccaggtccagggccgacaccacgatgccccagagactcgaccccagggcatctttggtgtgccccttcgacagagcatcacctatgccaatgttgccatctctctcgtcgatgaggatggccagagctacatatatggatatgtgcctatagttgtggccaagtgtggagtctacctcaaggagaaagccacgagtgtagagggcatttttcgactgaacggctccgagaagcgcatcaaggagctcaagatccagttcgattcgccggaccggtatggcaagggcctggtttgggatggctacacggttcacgacgccgccaatgttcttcgacgatatctcaatgatcttccagagcctgtcgttcccttggacctctatgcgcatttccgcgaacccctgcgcggccacacgaaacaagccgtgggagacacggaaggctctcagtttgcagacacgttcaacgaagcagaagccattgacaaatatcaacagctcatcaaagacctgccgcccttgaatcgccaactgctcttgtacattctggacctcctcgctgtctttgcagccaaggccgacgagaatcgcatgacggcccagaatctcgccgccatcttccagccgggcatgctgtctcatccgcagcatgctatggcgcccgaggaatatcgccttaaccaatgcgtcatcatcttcctgatcgaacaccaagataacttcttgatcggcatgcagggaacaggtacggacgagcagacgaaacaagagatcgagaagggcacccccaagatcgtcaccccaaccacaccaaatcgcaagactggcgtagcccgatcgtcatcaaatgccagcgcgggtgccgagagcgtcagcagagacggaaaagtacgaagaaaccggtcaacatcttcgcgccattcacgctactcaaacggcacctccacccccaatagtcctgcagtctcgacgccaggaggcagtggcttagggagaagtaatactctgccatcgaagaaatcgcctcatcttccagccggaagattcgcccgacaacaatcaccagctatcgcagtcgcgcccgcctctccctccccgggactcacgcctgcggtcgataccccggcaacggtgacggaagagatctcggtcgcttcagataaatctgccacggcctcgagcgtcacgcccgcggccacagcacccggtcgaagccaagagagattattagcaccaccacccagcgataccctcactccatcaaaggaacgaaatctccagagcattttccagcgatcacctacctccgacagcgagaaacggcagccgaacaagctacgcaagaagcgtcttcccagcagcacgaatccgagtgctcagagctcgactgcctctctcacacagtcagcatttgcctcgcccagtgccgaagtcccagaccctatcgaagaagcccaaaacattgcgggaaatactcagccagagaatggaacaacaactgaaacaccatcggaacccaccccaagagcatcccaagttcccgctgcgggcgttctccccaacgagggtcacgataccttaaagccccagccgagccagactacgtctctgcattcgtcgttcaatgaaggctccgaggcggagcaactagacgacccgggtctgccagtcgctggcgaacaagctgagaaagagaagaagcgccggtggcgcatgtctcgccgtagagaagacaccacatctccgaaccgtggattgggttccaacagtcatgcggaaatgagtaattccactgttggaagcagccataggccacgtaaaagcttcactggggagtcgtccgagactgctaccgccggattgtcggaaaacgagactggtgcagaagccagaggtcctctgggctggatcaagactaagtatcgggaggctagagagaacgcggatcataagcgcactaagtctcccaccgaaggtcatgggttcttgccctcgagtgcccgagagagtgcagctccaacctcgccaactagacctacagccacgactcaaaatgatgaagaatcgttacaggcccagcccgttgtaaatgaggagtcgaaatcgtga

SEQ ID NO: 32688 - protein, 752 aa, Muscodor strobelii
  misc_feature: SGI Peptide ID NO. 571267
  misc_feature (100)..(270): Pfam Id: PF00620 Pfam Desc: RhoGAP domain
  misc_feature (62)..(696): NCBI GI: 261358146 Blast Desc: rho-GTPase-activating protein [Verticillium albo-atrum VaMs.102]
  misc_feature (35)..(706): NCBI GI: 46122333 Blast Desc: FG05544.1 [Gibberella zeae PH-1]
  misc_feature (36)..(706): NCBI GI: 256729879 Blast Desc: NECHADRAFT_105042 [Nectria haematococca mpVI 77-13-4]
  misc_feature (65)..(706): NCBI GI: 85079767 Blast Desc: NCU00196 [Neurospora crassa OR74A] gi|28917482|gb|EAA27183.1| conserved [Neurospora crassa OR74A]
  misc_feature (60)..(709): NCBI GI: 171687014 Blast Desc: protein product [Podospora anserina] gi|170943468|emb|CAP69121.1| protein product [Podospora anserina]
  misc_feature (62)..(709): NCBI GI: 116191757 Blast Desc: CHGG_05596 [Chaetomium globosum CBS 148.51] gi|88181509|gb|EAQ88977.1| CHGG_05596 [Chaetomium globosum CBS 148.51]
  misc_feature (25)..(738): NCBI GI: 156040667 Blast Desc: SS1G_12350 [Sclerotinia sclerotiorum 1980] gi|154696406|gb|EDN96144.1| SS1G_12350 [Sclerotinia sclerotiorum 1980]
  misc_feature (21)..(706): NCBI GI: 145608766 Blast Desc: MGG_06390 [Magnaporthe grisea 70-15] gi|145016200|gb|EDK00690.1| MGG_06390 [Magnaporthe grisea 70-15]
  misc_feature (23)..(708): NCBI GI: 121711094 Blast Desc: Rho GTPase activator (Sac7), [Aspergillus clavatus NRRL 1] gi|119401313|gb|EAW11737.1| Rho GTPase activator (Sac7), [Aspergillus clavatus NRRL 1]
  misc_feature (27)..(677): NCBI GI: 242783519 Blast Desc: Rho GTPase activator (Sac7), [Talaromyces stipitatus ATCC 10500] gi|218720350|gb|EED19769.1| Rho GTPase activator (Sac7), [Talaromyces stipitatus ATCC 10500]
  misc_feature: Useful for introducing or modulating the production of volatile compounds
MTSAGTPSKPPPHHPMSPPPPVALPSSSTQPATPASPPSKRADLKSWWKKFQVQGRHHDAPETRPQGIFGVPLRQSITYANVAISLVDEDGQSYIYGYVPIVVAKCGVYLKEKATSVEGIFRLNGSEKRIKELKIQFDSPDRYGKGLVWDGYTVHDAANVLRRYLNDLPEPVVPLDLYAHFREPLRGHTKQAVGDTEGSQFADTFNEAEAIDKYQQLIKDLPPLNRQLLLYILDLLAVFAAKADENRMTAQNLAAIFQPGMLSHPQHAMAPEEYRLNQCVIIFLIEHQDNFLIGMQGTGTDEQTKQEIEKGTPKIVTPTTPNRKTGVARSSSNASAGAESVSRDGKVRRNRSTSSRHSRYSNGTSTPNSPAVSTPGGSGLGRSNTLPSKKSPHLPAGRFARQQSPAIAVAPASPSPGLTPAVDTPATVTEEISVASDKSATASSVTPAATAPGRSQERLLAPPPSDTLTPSKERNLQSIFQRSPTSDSEKRQPNKLRKKRLPSSTNPSAQSSTASLTQSAFASPSAEVPDPIEEAQNIAGNTQPENGTTTETPSEPTPRASQVPAAGVLPNEGHDTLKPQPSQTTSLHSSFNEGSEAEQLDDPGLPVAGEQAEKEKKRRWRMSRRREDTTSPNRGLGSNSHAEMSNSTVGSSHRPRKSFTGESSETATAGLSENETGAEARGPLGWIKTKYREARENADHKRTKSPTEGHGFLPSSARESAAPTSPTRPTATTQNDEESLQAQPVVNEESKS

SEQ ID NO: 32689 - DNA, 3164 bp, Muscodor strobelii
  misc_feature: SGI EST ID NO. CUFF.77418.1
  misc_feature: Variant of the nucleotide sequence at SEQ ID NO 32687
ccgcagtgccgccttctattcttttgcctgcctggctgcgcacctgcccatctgccgtcgagtgctaggtagggagtgctaagtgctgacgaccgaagccgaccatcattgttcctccaacctacttccacctcaattacggcccccttctcgaattgcgcgaccgaccgcccaacgcccaacgcccacgccgacacggacacttattctgttgcacatctgctgtcattgtgccgccgaccagcacatcaccctgaacagaagcagaagcgcacaagccagcccgccgccggttggtgagggcccatctcgcagccgcagccgcatcctcatccgcggtcgcccgcgcgtcatcgacacaatgacgtccgccggcacgccctccaaaccaccgcctcaccatcccatgagcccaccaccgcccgtcgctctgccatcctcatccacccagcccgccacgcctgcctcgccgcccagcaaacgcgcagacctcaagtcctggtggaagaagttccaggtccagggccgacaccacgatgccccagagactcgaccccagggcatctttggtgtgccccttcgacagagcatcacctatgccaatgttgccatctctctcgtcgatgaggatggccagagctacatatatggatatgtgcctatagttgtggccaagtgtggagtctacctcaaggagaaagccacgagtgtagagggcatttttcgactgaacggctccgagaagcgcatcaaggagctcaagatccagttcgattcgccggaccggtatggcaagggcctggtttgggatggctacacggttcacgacgccgccaatgttcttcgacgatatctcaatgatcttccagagcctgtcgttcccttggacctctatgcgcatttccgcgaacccctgcgcggccacacgaaacaagccgtgggagacacggaaggctctcagtttgcagacacgttcaacgaagcagaagccattgacaaatatcaacagctcatcaaagacctgccgcccttgaatcgccaactgctcttgtacattctggacctcctcgctgtctttgcagccaaggccgacgagaatcgcatgacggcccagaatctcgccgccatcttccagccgggcatgctgtctcatccgcagcatgctatggcgcccgaggaatatcgccttaaccaatgcgtcatcatcttcctgatcgaacaccaagataacttcttgatcggcatgcagggaacaggtacggacgagcagacgaaacaagagatcgagaagggcacccccaagatcgtcaccccaaccacaccaaatcgcaagactggcgtagcccgatcgtcatcaaatgccagcgcgggtgccgagagcgtcagcagagacggaaaagtacgaagaaaccggtcaacatcttcgcgccattcacgctactcaaacggcacctccacccccaatagtcctgcagtctcgacgccaggaggcagtggcttagggagaagtaatactctgccatcgaagaaatcgcctcatcttccagccggaagattcgcccgacaacaatcaccagctatcgcagtcgcgcccgcctctccctccccgggactcacgcctgcggtcgataccccggcaacggtgacggaagagatctcggtcgcttcagataaatctgccacggcctcgagcgtcacgcccgcggccacagcacccggtcgaagccaagagagattattagcaccaccacccagcgataccctcactccatcaaaggaacgaaatctccagagcattttccagcgatcacctacctccgacagcgagaaacggcagccgaacaagctacgcaagaagcgtcttcccagcagcacgaatccgagtgctcagagctcgactgcctctctcacacagtcagcatttgcctcgcccagtgccgaagtcccagaccctatcgaagaagcccaaaacattgcgggaaatactcagccagagaatggaacaacaactgaaacaccatcggaacccaccccaagagcatcccaagttcccgctgcgggcgttctccccaacgagggtcacgataccttaaagccccagccgagccagactacgtctctgcattcgtcgttcaatgaaggctccgaggcggagcaactagacgacccgggtctgccagtcgctggcgaacaagctgagaaagagaagaagcgccggtggcgcatgtctcgccgtagagaagacaccacatctccgaaccgtggattgggttccaacagtcatgcggaaatgagtaattccactgttggaagcagccataggccacgtaaaagcttcactggggagtcgtccgagactgctaccgccggattgtcggaaaacgagactggtgcagaagccagaggtcctctgggctggatcaagactaagtatcgggaggctagagagaacgcggatcataagcgcactaagtctcccaccgaaggtcatgggttcttgccctcgagtgcccgagagagtgcagctccaacctcgccaactagacctacagccacgactcaaaatgatgaagaatcgttacaggcccagcccgttgtaaatgaggagtcgaaatcgtgacgtgggacagagatacgggtccaaatacgacgtgcgtatcctcgtggggctacttcgaattgggctgtggtcaattgatacgacaaagggttgctgattggggagaggatgatgaccataaatccgctcatactttgcttggccatctcgggcctcatggagcgttcaacggtgttttggctgtctggaaagaaaaggaaaaaagtaaagcgcatttgaatgtgcgggtagtgtggtgtcgtcggatttcgttttggcctctggaggaggttttcagcttcgtagtggtcttttctgaactgcagagcatatcgctcaggacaagtaatggcttgacctgccagctcttttttctctgttcacggataccccttacacgaataatgagtgcacacgagcagctccgtaatgtcgaattccattgctctatattttcaatgattcttaggttacagtagccactaagcggctctcgaagatgaggagatcataaagtctagatatgaatcagatcggggtatgtctgccccggccttctgagtac

SEQ ID NO: 32690 - DNA, 1485 bp, Muscodor strobelii
  misc_feature: SGI cDNA ID NO. 571268
  misc_feature: Encodes the peptide sequence at SEQ ID NO 32691
atgaatatcgacggggagaaaggcgagaaggagttctcgggaaataatacttaccaccccggtctcagcgactccgattacgatgaaactggcgtcgtttgcccgcctcataccaccgaaaggaaattgataaatcgggtcgattggcatcttatgcccttcgtcattgttctctaccttctcgccttcttagacagggttaacatcgcaaatgccaaaagcttcggccttaaagctgatctcaagctcggagggctcgagtacaacacggctttgacgatcttctttgtaccttatgttttcttcgaggtgccgagtaatatcctcctcaagaaactttcgcctagactctggttacccggatgtatgttgggctttggcttggttagcatctttcaaggactggtgcagaactatgctggtttgctcgcaactcgattctttctcggagtcttcgagactggaatgttccctggttgcttctatctgattggcatgtggtataagagggccgaagcccaaaaacgatattcgcttttcttctcctcaacatcattagctggtgcctttggcggtttactcgctagcgccattggcaaactcgacaaagtcgaaggatactcgggatggcggtggatcttcatcctcgaaggcactctgacctgcgtggtcgctatcctgttcttcttcatattcccatcattccccgagagtgccaagtggctgtcagaggacgagaaagcatacgttaaagcgcgtttgcaagtagagcagggaaagaatggcgcggagcgaaagattacgtaccgagatttcttcaagaccatgaaagatcatcgtgtgtaccttgggggctttatgtacttcgggttgatcgttccagcttacagttacgccttcttcgctccgacaatcatctcgacatatcactacaatcccatccagacacagctacattctgtccctccatgggcagcttcgttcgtcttctcgctcattattgcctatttttcggactatttccgtcatcgcgctgcctttgctattgcgccgctggctattaccatcacggcattcgccacccttttgacaatacacaccaacaccgcggttgagtatgccatgttgcatctagtaacaattggtacctatggcgtgatgcctatcgtcatatgttggttcaccatgaatctgggaggtcaccatcgtcgtgccattggcacagcttggcaaatcggatttggcaatattggcggtatcattgcaacttatctctttccggacagtgatgcaccccaattcagaaaaggatatggcgtttgccttggcttcgtagtgctaagcgccttagcatcgacatgctacttgatctcgatccatatggaaaaccacagaagggcaaagaccgcccacaacactagtctcacggattacgaaaagactgagctcggtgatctgaatcccgagtatcgctatatgtactaa

SEQ ID NO: 32691 - protein, 494 aa, Muscodor strobelii
  misc_feature: SGI Peptide ID NO. 571268
  misc_feature (55)..(423): Pfam Id: PF07690 Pfam Desc: Major Facilitator Superfamily
  misc_feature (6)..(493): NCBI GI: 154313488 Blast Desc: BC1G_05441 [Botryotinia fuckeliana B05.10] gi|150849510|gb|EDN24703.1| BC1G_05441 [Botryotinia fuckeliana B05.10]
  misc_feature (1)..(492): NCBI GI: 156042850 Blast Desc: SS1G_11224 [Sclerotinia sclerotiorum 1980] gi|154695609|gb|EDN95347.1| SS1G_11224 [Sclerotinia sclerotiorum 1980]
  misc_feature (6)..(493): NCBI GI: 164428929 Blast Desc: NCU00195 [Neurospora crassa OR74A] gi|157072339|gb|EAA27182.2| conserved [Neurospora crassa OR74A]
  misc_feature (6)..(493): NCBI GI: 189196312 Blast Desc: conserved [Pyrenophora tritici-repentis Pt-1C-BFP] gi|187980373|gb|EDU46999.1| conserved [Pyrenophora tritici-repentis Pt-1C-BFP]
  misc_feature (13)..(493): NCBI GI: 261354364 Blast Desc: pantothenate transporter liz1 [Verticillium albo-atrum VaMs.102]
  misc_feature (4)..(484): NCBI GI: 116191755 Blast Desc: CHGG_05595 [Chaetomium globosum CBS 148.51] gi|88181508|gb|EAQ88976.1| CHGG_05595 [Chaetomium globosum CBS 148.51]
  misc_feature (28)..(493): NCBI GI: 46116750 Blast Desc: FG04217.1 [Gibberella zeae PH-1]
  misc_feature (20)..(492): NCBI GI: 169603870 Blast Desc: SNOG_04943 [Phaeosphaeria nodorum SN15] gi|160706470|gb|EAT87334.2| SNOG_04943 [Phaeosphaeria nodorum SN15]
  misc_feature (8)..(493): NCBI GI: 256725989 Blast Desc: [Nectria haematococca mpVI 77-13-4]
  misc_feature (35)..(494): NCBI GI: 121712704 Blast Desc: MFS transporter, [Aspergillus clavatus NRRL 1] gi|119402116|gb|EAW12537.1| MFS transporter, [Aspergillus clavatus NRRL 1]
MNIDGEKGEKEFSGNNTYHPGLSDSDYDETGVVCPPHTTERKLINRVDWHLMPFVIVLYLLAFLDRVNIANAKSFGLKADLKLGGLEYNTALTIFFVPYVFFEVPSNILLKKLSPRLWLPGCMLGFGLVSIFQGLVQNYAGLLATRFFLGVFETGMFPGCFYLIGMWYKRAEAQKRYSLFFSSTSLAGAFGGLLASAIGKLDKVEGYSGWRWIFILEGTLTCVVAILFFFIFPSFPESAKWLSEDEKAYVKARLQVEQGKNGAERKITYRDFFKTMKDHRVYLGGFMYFGLIVPAYSYAFFAPTIISTYHYNPIQTQLHSVPPWAASFVFSLIIAYFSDYFRHRAAFAIAPLAITITAFATLLTIHTNTAVEYAMLHLVTIGTYGVMPIVICWFTMNLGGHHRRAIGTAWQIGFGNIGGIIATYLFPDSDAPQFRKGYGVCLGFVVLSALASTCYLISIHMENHRRAKTAHNTSLTDYEKTELGDLNPEYRYMY

SEQ ID NO: 32692 - DNA, 2246 bp, Muscodor strobelii
  misc_feature: SGI EST ID NO. CUFF.77275.0
  misc_feature: Variant of the nucleotide sequence at SEQ ID NO 32690
accgaggcttggcccacggaccgatgatcgctgtgttagatattttcttctttttctcttattgtttcgccttgccctttgctttatgaaaaaacatctcgtacagctacacgagaaagtcctcgtggttgtgaggtagtgagcatacagcagggtcggatgcaaagttagttcgcgcgtggctacggcggccaggtttattagaaagcaaacaagggtcttactagaaggcaaaggattttcacgaatcaagtgcataaagatccatccctccctgtagctctggacttttgtacgtattgtggttgtccattaaatctctggccagcctcataaatcatcggacgatctcctgctttcaggcgggtcgcgcaactaagtcacagcaactattccattctatttcgggtgtagataaagtctattgacaatagttcacaacaatgaatatcgacggggagaaaggcgagaaggagttctcgggaaataatacttaccaccccggtctcagcgactccgattacgatgaaactggcgtcgtttgcccgcctcataccaccgaaaggaaattgataaatcgggtcgattggcatcttatgcccttcgtcattgttctctaccttctcgccttcttagacagggttaacatcgcaaatgccaaaagcttcggccttaaagctgatctcaagctcggagggctcgagtacaacacggctttgacgatcttctttgtaccttatgttttcttcgaggtgccgagtaatatcctcctcaagaaactttcgcctagactctggttacccggatgtatgttgggctttggcttggttagcatctttcaaggactggtgcagaactatgctggtttgctcgcaactcgattctttctcggagtcttcgagactggaatgttccctggttgcttctatctgattggcatgtggtataagagggccgaagcccaaaaacgatattcgcttttcttctcctcaacatcattagctggtgcctttggcggtttactcgctagcgccattggcaaactcgacaaagtcgaaggatactcgggatggcggtggatcttcatcctcgaaggcactctgacctgcgtggtcgctatcctgttcttcttcatattcccatcattccccgagagtgccaagtggctgtcagaggacgagaaagcatacgttaaagcgcgtttgcaagtagagcagggaaagaatggcgcggagcgaaagattacgtaccgagatttcttcaagaccatgaaagatcatcgtgtgtaccttgggggctttatgtacttcgggttgatcgttccagcttacagttacgccttcttcgctccgacaatcatctcgacatatcactacaatcccatccagacacagctacattctgtccctccatgggcagcttcgttcgtcttctcgctcattattgcctatttttcggactatttccgtcatcgcgctgcctttgctattgcgccgctggctattaccatcacggcattcgccacccttttgacaatacacaccaacaccgcggttgagtatgccatgttgcatctagtaacaattggtacctatggcgtgatgcctatcgtcatatgttggttcaccatgaatctgggaggtcaccatcgtcgtgccattggcacagcttggcaaatcggatttggcaatattggcggtatcattgcaacttatctctttccggacagtgatgcaccccaattcagaaaaggatatggcgtttgccttggcttcgtagtgctaagcgccttagcatcgacatgctacttgatctcgatccatatggaaaaccacagaagggcaaagaccgcccacaacactagtctcacggattacgaaaagactgagctcggtgatctgaatcccgagtatcgctatatgtactaagcgcatggtctactgttatcaaacagtagtcgtcgagagggtagaacgtcaatagagaaacagcttgcaatattgaattaattgaaaagcgatctgtttaagagggagggactagtgatgggaaaggaatatccatttaattctaagataccaatgatactcggtggatttgtcgttggctgatacccattcatgtaccctgcttccactgggtgagaggccagtttgttgaatagatgactaaatatgtctcgtatcaattctgcaaatagagagttatatcaagccataggacttaatcgcgaatgaacagtgcgg

SEQ ID NO: 32693 - DNA, 1545 bp, Muscodor strobelii
  misc_feature: SGI cDNA ID NO. 571269
  misc_feature: Encodes the peptide sequence at SEQ ID NO 32694
atgaagtcagacatagcctccgagtcgtccccagcacctccatacggggctgttcgggatgatgccctccacagctggtccgcctggtttggaggcccgaataccgtcgtcggtgctcgcattgctcctcgcatcgtcgaccatgtcaatgtcaacgattcagatagtgatctgacagatcaccaggctattcttgagaagcaattggcggaggaggctggagctgcgattcagtaccggacatgcagctggcagaagactgctggactacttttctccgaatacatctgcctggccatcatgagtttcccgtggtcatacagcgtcctaggactcgttcccggaatcatcttaacggttatccaggctgccattgtgttatacacgtccttgatactatggcaattctgtcttcggcatcccgaggtcagagatgtctgtgatatcggccagatgctgttttggggcaagaagtgggcatggtacgcaacggccgttatgttcattttgaacaacacctttattcaaggtctgcatgtgctgcttggagctaaatatgtgaacacaatcattgggggggaaaccaacgcaattgcgtgccagaccgtctcaattggtgttatcgttgctgtcatctcttggctttcttcgctcccgcgtaccttcgaccttctctcgaaactcggtactggttccgccttcttcacattcgtctccgtcctcctcgcggtgatcttttccgctatcgaaagccatcccgctggctatgatctagcaacgatgggcgaaccgattgtcacgaagattcccatcccaggcactgggttggttgcgggacttaacgcattcttgaatattagctatactttcattggccaaatcacgattccgagcttcattgctgaaatgaaggagcctagagatttccccaaggccctgtgggcatgcacgatcgccgagatcatcctttttagcatagttggcggtgtcgtatacgcgtacaccggcaaccagtacatgaccacccctgcctttggttccctggagcctctgtacaagaagattgccttctcatttatgattcccacgattatcttcttgggcgttctctatgcttcagtatctgcccgcttcattttcttccgcattttccagaattcgcgccacaagaacgagaacacgttgattggctggggcacgtgggctgcaatcttgcttgctacctggattctcgctttcatcattgctaactcgattccattcttcagctcccttctgtccctcctatcttctctattcgattccttctttggtttcatcttctggggtgtcgcctatctccgcatgcgaaatgccgacggtatctcgctattcaaagagagatcggttcgcggcattgtggaagggtggttcaacgtcttcctcatcgtcgcaggtgtcttcgtcttgactgtgggaacatacgccaccgttcaggacattgtctggaactatgagtcaggcgccttcggcaaagcatggagctgtgcttctaacggcatctga

SEQ ID NO: 32694 - protein, 514 aa, Muscodor strobelii
  misc_feature: SGI Peptide ID NO. 571269
  misc_feature (80)..(492): Pfam Id: PF01490 Pfam Desc: Transmembrane amino acid transporter protein
  misc_feature (80)..(333): Pfam Id: PF01490 Pfam Desc: Transmembrane amino acid transporter protein
  misc_feature (26)..(514): NCBI GI: 46137719 Blast Desc: FG10375.1 [Gibberella zeae PH-1]
  misc_feature (23)..(514): NCBI GI: 39977795 Blast Desc: MGG_06782 [Magnaporthe grisea 70-15] gi|145013694|gb|EDJ98335.1| MGG_06782 [Magnaporthe grisea 70-15]
  misc_feature (26)..(514): NCBI GI: 116198941 Blast Desc: CHGG_07626 [Chaetomium globosum CBS 148.51] gi|88178905|gb|EAQ86373.1| CHGG_07626 [Chaetomium globosum CBS 148.51]
  misc_feature (42)..(514): NCBI GI: 121701841 Blast Desc: neutral amino acid permease, [Aspergillus clavatus NRRL 1] gi|119397328|gb|EAW07759.1| neutral amino acid permease, [Aspergillus clavatus NRRL 1]
  misc_feature (39)..(514): NCBI GI: 119495831 Blast Desc: neutral amino acid permease, [Neosartorya fischeri NRRL 181] gi|119412854|gb|EAW22795.1| neutral amino acid permease, [Neosartorya fischeri NRRL 181]
  misc_feature (47)..(514): NCBI GI: 212542491 Blast Desc: neutral amino acid permease, [Penicillium marneffei ATCC 18224] gi|210066307|gb|EEA20400.1| neutral amino acid permease, [Penicillium marneffei ATCC 18224]
  misc_feature (39)..(514): NCBI GI: 159131197 Blast Desc: neutral amino acid permease, [Aspergillus fumigatus A1163]
  misc_feature (39)..(514): NCBI GI: 70995370 Blast Desc: neutral amino acid permease [Aspergillus fumigatus Af293] gi|66850077|gb|EAL90404.1| neutral amino acid permease, [Aspergillus fumigatus Af293]
  misc_feature (53)..(514): NCBI GI: 169781622 Blast Desc: [Aspergillus oryzae RIB40] gi|238498418|ref|XP_002380444.1| neutral amino acid permease, [Aspergillus flavus NRRL3357] gi|83774016|dbj|BAE64141.1| protein
  misc_feature (48)..(514): NCBI GI: 255940604 Blast Desc: Pc16g07460 [Penicillium chrysogenum Wisconsin 54-1255] gi|211585694|emb|CAP93416.1| Pc16g07460 [Penicillium chrysogenum Wisconsin 54-1255]
MKSDIASESSPAPPYGAVRDDALHSWSAWFGGPNTVVGARIAPRIVDHVNVNDSDSDLTDHQAILEKQLAEEAGAAIQYRTCSWQKTAGLLFSEYICLAIMSFPWSYSVLGLVPGIILTVIQAAIVLYTSLILWQFCLRHPEVRDVCDIGQMLFWGKKWAWYATAVMFILNNTFIQGLHVLLGAKYVNTIIGGETNAIACQTVSIGVIVAVISWLSSLPRTFDLLSKLGTGSAFFTFVSVLLAVIFSAIESHPAGYDLATMGEPIVTKIPIPGTGLVAGLNAFLNISYTFIGQITIPSFIAEMKEPRDFPKALWACTIAEIILFSIVGGVVYAYTGNQYMTTPAFGSLEPLYKKIAFSFMIPTIIFLGVLYASVSARFIFFRIFQNSRHKNENTLIGWGTWAAILLATWILAFIIANSIPFFSSLLSLLSSLFDSFFGFIFWGVAYLRMRNADGISLFKERSVRGIVEGWFNVFLIVAGVFVLTVGTYATVQDIVWNYESGAFGKAWSCASNGI

SEQ ID NO: 32695 - DNA, 2978 bp, Muscodor strobelii
  misc_feature: SGI EST ID NO. CUFF.77341.0
  misc_feature: Variant of the nucleotide sequence at SEQ ID NO 32693
taaaaaagtggcatacaacgtcgaatttgcacgtgctatcgttgataatgggcgtctctgtcggcatcgacttacctaggtaaagtattgtgcatccgaaacgcaattcagagcaccagttcatatagcataagatcgctagtcggaaggcaatagcactcatttcctaacatgtatccgttaatcaggcgattgtctatccggttgcttaggtattaaatgtacttatgggctgtcttgctagtattggtatgcagtgccatcatttttaactataggtacgttttattttgagttcgatagccattggaatgccttgtgcttccgcagccgagcagtttacgttgtatttgtacctttctattggctctgtgctgcgtctttttctccgggaggtgcaatttagtaggctttgcttctcgaaagtgatcaacaatcatcgtatgcataccaccacccactgtcaatcaacgggggctccgagatgctggtcaacctaacctagtcgactctgcccagtcaggatcccaattttattataacaatccttcgaatctatcccacttattgacttgggaaggcagctaacgatttgttaaaaaggcgtcccctggctctttaacctttgcctctctcactttcttctgagtcttgacagtcgacccattcatccacacccagccgccagcatgaagtcagacatagcctccgagtcgtccccagcacctccatacggggctgttcgggatgatgccctccacagctggtccgcctggtttggaggcccgaataccgtcgtcggtgctcgcattgctcctcgcatcgtcgaccatgtcaatgtcaacgattcagatagtgatctgacagatcaccaggctattcttgagaagcaattggcggaggaggctggagctgcgattcagtaccggacatgcagctggcagaagactgctggactacttttctccgaatacatctgcctggccatcatgagtttcccgtggtcatacagcgtcctaggactcgttcccggaatcatcttaacggttatccaggctgccattgtgttatacacgtccttgatactatggcaattctgtcttcggcatcccgaggtcagagatgtctgtgatatcggccagatgctgttttggggcaagaagtgggcatggtacgcaacggccgttatgttcattttgaacaacacctttattcaaggtctgcatgtgctgcttggagctaaatatgtgaacacaatcattgggggggaaaccaacgcaattgcgtgccagaccgtctcaattggtgttatcgttgctgtcatctcttggctttcttcgctcccgcgtaccttcgaccttctctcgaaactcggtactggttccgccttcttcacattcgtctccgtcctcctcgcggtgatcttttccgctatcgaaagccatcccgctggctatgatctagcaacgatgggcgaaccgattgtcacgaagattcccatcccaggcactgggttggttgcgggacttaacgcattcttgaatattagctatactttcattggccaaatcacgattccgagcttcattgctgaaatgaaggagcctagagatttccccaaggccctgtgggcatgcacgatcgccgagatcatcctttttagcatagttggcggtgtcgtatacgcgtacaccggcaaccagtacatgaccacccctgcctttggttccctggagcctctgtacaagaagattgccttctcatttatgattcccacgattatcttcttgggcgttctctatgcttcagtatctgcccgcttcattttcttccgcattttccagaattcgcgccacaagaacgagaacacgttgattggctggggcacgtgggctgcaatcttgcttgctacctggattctcgctttcatcattgctaactcgattccattcttcagctcccttctgtccctcctatcttctctattcgattccttctttggtttcatcttctggggtgtcgcctatctccgcatgcgaaatgccgacggtatctcgctattcaaagagagatcggttcgcggcattgtggaagggtggttcaacgtcttcctcatcgtcgcaggtgtcttcgtcttgactgtgggaacatacgccaccgttcaggacattgtctggaactatgagtcaggcgccttcggcaaagcatggagctgtgcttctaacggcatctgagcgaaatgatttcttgttattgtgctatatagactgtttttgttacttttttcggcagataccccaaggattgggcctcttcatcacaaacgaaaagacggcagaccttcaccataactctagtcataatcatccggtcacaatccgaatacacctcttgtgacaacctcggataaccagccgaccttacatagggtttagccctgagaccggatgtcgaatagatcgttgctgatttagctggttcggcgaaattattgacgtttatgggtatattggttgaggacaggattgaaagacacgaggctcccgattcgcgcgtttattacagggcatatacggcattttcgactacagttatatgggacgtgaggaggcattgcgactgacgttgatgcaagcacatacgtttcacccaccatagtaatgcaagagaggaaggacccgccatgatgcggtgtgtcctaacatctcgcatgaagttctcagagcatccagtagatgcgacgatgcagatcattgctcgctcgtcctgaccctgactttaatgacttgccaacactcggttgtatcatgttgcaacaagactacttgaatactaacctcatacagatactaacatcccatagtgaccaccgattgcgatgacagctatgagaagcaagcccttggcctagatttaaaggtatgtatggatactcagccctttatatagtgagttataagaacataaaagaatccccc

SEQ ID NO: 32696 - DNA, 5319 bp, Muscodor strobelii
  misc_feature: SGI cDNA ID NO. 571270
  misc_feature: Encodes the peptide sequence at SEQ ID NO 32697
atggccgaccacatcgcgcatcgcgtcgcatcccacgtcacagactttgccttgagcctcgccaaacgcgctgaagacgatgtctcccctggcgatggcgtctccgaggagcaggaaatcaactcgtcgtgggcactcttcatctccatctgcttgctcatcgtagccttcttcactagctacactctgcagcagaagaaggtgcaggctgtgcacgagaccgtcatatctattttcctcggaatgacggtgggatttgttctgcgcgtcacctccgagtctggcatccccaatctgctcagcttcggctaccagatcttcttcaatcttcttctgccgcccatcatcctcaactcgggctacgaactccaccaggccaacttcttccgcaacataggcaccatattagtctttgcctttgccggcaccttcctgtccgccgtagtcattggcttcctgctatggctatacacccgcatcccccagggcttcgatatgtccttcaacgatgccatctccgtcggcgccaccttgtctgctaccgatcccgtcaccatcttagccatcttcaacacctacaaggtcgacccgaaactgtacaccatcatttttggcgagtctattctcaatgacgctattgctattgtcatttttgagacggcacaaaagtataggagtgaggaggcggccgcctacggcgtgctgagcttcatcaagggtatcggcaccttcatattgaacttctttggcagcttgggtatcggcgtggcggttggcgtgggtaccgctcttgttttgaagttcacctatgtccggcggtatccccatatcgagacatgtctgatcgtattgattacctacgccagctactttttctcccaggccgtcaagatgtccggtattgtgtccctgttgttctgcgccatcacgctcaagcattacgcatacttcaatatgtctcggcgcactcagctcagtaccaagtacttcttccaagtcatggcgcatctctccgagaattttatcttcatctaccttgggttatcgctcttcacggacaacaaactccagttccagccgctcctcatcatcatcacggtggcggcagtctgtgccgcgagatgggtggctgtgttcccgttgtccaaggcgatcaactggtattatcgtttccgagcacggcggcagggtcgggaggtgagcgacgaactaccttacaactaccaagccatgctcttctgggccgggctgcgcggtgctgtcggtgtggcgctcgcggcactactgacgggcgataactcttatgcgctcaaggctacggtcctggtcgtggtggttcttactgtcatcatatttggcggcaccactgcccgcatgctggagattttgggcatacggaccggagttgcagaagaggtggatagcgacgatgagtttgacatcgaggctgctccctcaggatcgtactacaagagatctggggcaggcattggctacacgccgcgacagaggaatggatcggtgcggatggataggatgagcgcaagccatggcgggcgggacgacgggcctgagcgaggtagttatgtgtccgggcaccggtcacccatgccgtcgcgcacggcaagcaaaagccgcaagaactcgcggcagatccaggatgatgacctagagagatcggatctcctacagccgagcagtctaacggattcggactttggaagcgacattgacacgtcggatctccctccgccggcccgacggtcaccagggcgcaaagccagccccgtgttgacgccgagcagcgggcccgaggacgaaggggtcttttcgtacccgacatcgggccaccgagcgccggcaccgctgtcgacgcgatcggcgatcaaacagctcttcacgacgcacgatcctcaagcgctgttccggcagctggacgaggactatatcaagccgcatcttctgctggacgggtccgaggcgccgggccccagcgggagcggcagtgtgatcaagaggattcaggatggcatgtgggctgactcgcacccggcatccgctggcaagggacaccgatcgctgagacctgtccgactgctgctcgcgactgctgctgctcgactgactgccctcgacgacgacgaagacgacgacgacgacacgatggcctcgtacgccagcaacgcgccggctgcccgccatggccaacaccagatgccacaccccgtgcccgtgcccgtgcaggcccccgccattcctgccggcacctttgcgccgggcaccaagatccaggtcggcgagcaccgtgtggtcatcaccaaatacctgtccgagggcggctttgcccatgtctacctcgtcaagctgccccgccccgtcgacggcaccgacgaggccgtgctgaagagggtcgccgtgcccgacaaggacacgctgcgaggcatgcgcaccgaggtcgagaccatgaagcgcctcaaggggcaccgccccatcgtcacctacatcgactcccacgcctccgagcgcaagggcggcggctacgaggtctttctgctgatggagcactgcaacggcggcggcctgatcgacttcatgaacacccgcctgcagcaccgcctgaccgagcccgagatcctgaacatcttctctgacattgccgagggcgtcgcctgcatgcattacctcaagccgccgctgctgcaccgcgatatcaaggtcgagaacgtcttgatcaccatgcacggcgccaagaggaagttcaagctgtgcgatttcggctcctctgctccgcccaagcccgcgcccacgtccgttgtcgagtgcaggctgttggacgaggatgtccagagacacacgaccatgcagtaccgctcccccgagatggtcgacgtctacagaaaactgcccatagacgagaaatccgacatctgggcactgggtgtccttctttataagctctgctactacacaaccccttttgaggaccagggccagctagctattctcaacgcaagctatcgattcccaagctacccggtcttctcagacaagctcaagcagttgatcgcttccatgctccgagaagcaccgaactcgaggcccaacatctatcaagtgcttcgagagagctgcaagatgcaaggtcgcgaagtgcccatacaagatatatattctgcccgtgcagcctcaggctcacggactggagaaagacagcctccagcgactcacaaaagtccagatgtgcccgccgttggagctgtatactctccgcctccaaagcaggaggcccaggcgcttccggacattacacctatgcgtagaggtagaccagtcgttgccagccaaccagctccagttccagctccgactaaagtggccgtgggcgatccatttgctgctcttgactccaagggaggagctggcggaaacgacgaattatcttctaggtttcccactcttgaccaattctccctattacacgataacggtgccaaatttgattttgatagtccaacatcccctcaagcagccaatggatttccgacaccgcttgaccaaggagttacggagcgcctcgcagaagaagctttcgcaaaatctgagacgaaatccaacacagtgtctaaagctcgcaggcaggtcacggatccgagccgcgcaaagccggtaacggctgccatcaatcaacctcggcaagtgtcacatcctcagaagactacacctctaccgctgaggccaacgggcgaaaagagcagagcttccgctatcatatctagtaatcctgaacttcaggcgatttcgtcgccttcatctcatttaagacgagatccatcaccgaacaagccagtcatggtatcgactggaactatgacaagtcccccacctgcaattcagacccgagaatatcctccgattcatagattcccgccggcggatcaacaccgcccgacgagtttaccaaggcaagaggatacaataacctcgaaccagtttcgaatagatgccgggcaatatccccggccttcgccaagtccccgaatcacagcaatacaaacgcaaccagacgcaaagggacatccatcttcatcgcgcccatctttggaagggggacggccgaatctcgaatacttggaaccaatggcaaaatcttcatcaaacgctggacgatccagacccagcagcatgtatctcgagtctagcatggactatctacgcgagcgagaggcagcccccaagccatccagaacgcctagccaccacgcctcccccaaattgatggctaccacatcgtctccgacattagaaccacaagacgaacctgtaatagaatccaatgtcgagtttctcagatccatggaggattctgataggagaagggacaagagcacaaagcaacatagcaaacgcgcttctctcggctctttgtcaggcacgaagaacattctagcaggcaagtttggagacgccttcaagcggttcgaagggcaccaacctgctccagccgcacgcacaccttctccgctgaaagatatggatcacgccggtctgactcctattgctggctctgaggccactgatggacgtagcgacgatgggcgtacgctcgacgaacacgagatgacaccagaaatgcgtaggcagcttgaagctcagagccttgctgaagaggagcgtcgcgtagaagctgctgccgctgagtacaagcaaaagcttgccgcacgtggtgatgcaaattccataccgcttccgaggagcatcggtggtgtttctcgcgcagtcagcatacagaaccgagtgcaaaaccttttggatgagtcacaaaagtcatcacagcaggtccaacgcaccgcatcaggatatggaaagttctccgatgaggcagcggagaggagtcgcgtggaaaaggacttacctgatatcccaaggaaacctgttgggactggccctcctccaaaacccctgagcagctcgtctgagtctcttgcccgggctcgactcggtagtccggctcctcaattgctgaacaatcgctcacttcctgccagaccagctccagctccaaaacccacgcacctaaataacataccaaccggcagtcggcctcgctcacctcccaagcagcagcacccaccccaaaggacatcccaattattctcggagttatcggtcgaagaacgacctaggttagatatgagcttgcaagaaaaggaagattatatgcaagacttcagtaagaggtttcccagtctttcttctatagagatggtcgagcgggacctgggcgcagaagctgaaatggagtcgaaaaacaaacgatag

SEQ ID NO: 32697 - protein, 1772 aa, Muscodor strobelii
  misc_feature: SGI Peptide ID NO. 571270
  misc_feature (50)..(462): Pfam Id: PF00999 Pfam Desc: Sodium/hydrogen exchanger family
  misc_feature (770)..(1042): Pfam Id: PF00069 Pfam Desc: Protein kinase domain
  misc_feature (770)..(939): Pfam Id: PF00069 Pfam Desc: Protein kinase domain
  misc_feature (956)..(1040): Pfam Id: PF00069 Pfam Desc: Protein kinase domain
  misc_feature (33)..(666): NCBI GI: 46122267 Blast Desc: FG05511.1 [Gibberella zeae PH-1]
  misc_feature (724)..(1760): NCBI GI: 189188160 Blast Desc: Ark1/Prk1 family protein kinase Ppk30 [Pyrenophora tritici-repentis Pt-1C-BFP] gi|187972025|gb|EDU39524.1| Ark1/Prk1 family protein kinase Ppk30 [Pyrenophora tritici-repentis
  misc_feature (722)..(1760): NCBI GI: 212527830 Blast Desc: serine/threonine protein kinase, [Penicillium marneffei ATCC 18224] gi|210073470|gb|EEA27557.1| serine/threonine protein kinase, [Penicillium marneffei ATCC
  misc_feature (751)..(1761): NCBI GI: 226284071 Blast Desc: serine/threonine-protein kinase [Paracoccidioides brasiliensis Pb01]
  misc_feature (755)..(1760): NCBI GI: 119187619 Blast Desc: CIMG_03857 [Coccidioides immitis RS]
  misc_feature (9)..(657): NCBI GI: 261358324 Blast Desc: mitochondrial sodium/hydrogen exchanger [Verticillium albo-atrum VaMs.102]
  misc_feature (17)..(667): NCBI GI: 154316107 Blast Desc: BC1G_03638 [Botryotinia fuckeliana B05.10] gi|150846425|gb|EDN21618.1| BC1G_03638 [Botryotinia fuckeliana B05.10]
  misc_feature (755)..(1760): NCBI GI: 240108133 Blast Desc: kinase domain containing protein [Coccidioides posadasii C735 delta SOWgp]
  misc_feature (755)..(1760): NCBI GI: 242784747 Blast Desc: serine/threonine protein kinase, [Talaromyces stipitatus ATCC 10500] gi|218720602|gb|EED20021.1| serine/threonine protein kinase, [Talaromyces stipitatus ATCC
  misc_feature (751)..(1761): NCBI GI: 226288706 Blast Desc: protein kinase domain-containing protein ppk38 [Paracoccidioides brasiliensis Pb18]
MADHIAHRVASHVTDFALSLAKRAEDDVSPGDGVSEEQEINSSWALFISICLLIVAFFTSYTLQQKKVQAVHETVISIFLGMTVGFVLRVTSESGIPNLLSFGYQIFFNLLLPPIILNSGYELHQANFFRNIGTILVFAFAGTFLSAVVIGFLLWLYTRIPQGFDMSFNDAISVGATLSATDPVTILAIFNTYKVDPKLYTIIFGESILNDAIAIVIFETAQKYRSEEAAAYGVLSFIKGIGTFILNFFGSLGIGVAVGVGTALVLKFTYVRRYPHIETCLIVLITYASYFFSQAVKMSGIVSLLFCAITLKHYAYFNMSRRTQLSTKYFFQVMAHLSENFIFIYLGLSLFTDNKLQFQPLLIIITVAAVCAARWVAVFPLSKAINWYYRFRARRQGREVSDELPYNYQAMLFWAGLRGAVGVALAALLTGDNSYALKATVLVVVVLTVIIFGGTTARMLEILGIRTGVAEEVDSDDEFDIEAAPSGSYYKRSGAGIGYTPRQRNGSVRMDRMSASHGGRDDGPERGSYVSGHRSPMPSRTASKSRKNSRQIQDDDLERSDLLQPSSLTDSDFGSDIDTSDLPPPARRSPGRKASPVLTPSSGPEDEGVFSYPTSGHRAPAPLSTRSAIKQLFTTHDPQALFRQLDEDYIKPHLLLDGSEAPGPSGSGSVIKRIQDGMWADSHPASAGKGHRSLRPVRLLLATAAARLTALDDDEDDDDDTMASYASNAPAARHGQHQMPHPVPVPVQAPAIPAGTFAPGTKIQVGEHRVVITKYLSEGGFAHVYLVKLPRPVDGTDEAVLKRVAVPDKDTLRGMRTEVETMKRLKGHRPIVTYIDSHASERKGGGYEVFLLMEHCNGGGLIDFMNTRLQHRLTEPEILNIFSDIAEGVACMHYLKPPLLHRDIKVENVLITMHGAKRKFKLCDFGSSAPPKPAPTSVVECRLLDEDVQRHTTMQYRSPEMVDVYRKLPIDEKSDIWALGVLLYKLCYYTTPFEDQGQLAILNASYRFPSYPVFSDKLKQLIASMLREAPNSRPNIYQVLRESCKMQGREVPIQDIYSARAASGSRTGERQPPATHKSPDVPAVGAVYSPPPKQEAQALPDITPMRRGRPVVASQPAPVPAPTKVAVGDPFAALDSKGGAGGNDELSSRFPTLDQFSLLHDNGAKFDFDSPTSPQAANGFPTPLDQGVTERLAEEAFAKSETKSNTVSKARRQVTDPSRAKPVTAAINQPRQVSHPQKTTPLPLRPTGEKSRASAIISSNPELQAISSPSSHLRRDPSPNKPVMVSTGTMTSPPPAIQTREYPPIHRFPPADQHRPTSLPRQEDTITSNQFRIDAGQYPRPSPSPRITAIQTQPDAKGHPSSSRPSLEGGRPNLEYLEPMAKSSSNAGRSRPSSMYLESSMDYLREREAAPKPSRTPSHHASPKLMATTSSPTLEPQDEPVIESNVEFLRSMEDSDRRRDKSTKQHSKRASLGSLSGTKNILAGKFGDAFKRFEGHQPAPAARTPSPLKDMDHAGLTPIAGSEATDGRSDDGRTLDEHEMTPEMRRQLEAQSLAEEERRVEAAAAEYKQKLAARGDANSIPLPRSIGGVSRAVSIQNRVQNLLDESQKSSQQVQRTASGYGKFSDEAAERSRVEKDLPDIPRKPVGTGPPPKPLSSSSESLARARLGSPAPQLLNNRSLPARPAPAPKPTHLNNIPTGSRPRSPPKQQHPPQRTSQLFSELSVEERPRLDMSLQEKEDYMQDFSKRFPSLSSIEMVERDLGAEAEMESKNKR

SEQ ID NO: 32698 - DNA, 4236 bp, Muscodor strobelii
  misc_feature: SGI EST ID NO. CUFF.77303.0
  misc_feature: Variant of the nucleotide sequence at SEQ ID NO 32696
caggaaccctgtcgtcacaggccagacacgcatgaaccaccacagcgcagccaacgttggacggccgctatcgagcagcgagttggcgtcccgagacggctcgagaatgctcatgcgctgtgacacggccttagtccgcaacttgtatactttctagatccgacgttgatgctgttgtcgtctcgttttgatccggttgatcattcattcattgattttgtctttctgccttgcggtcggcagcgccttggagagagatgcgccagctgtagctttggtgcctagaccgaccgctccccatgccacagcgctgagacctgtccgactgctgctcgcgactgctgctgctcgactgactgccctcgacgacgacgaagacgacgacgacgacacgatggcctcgtacgccagcaacgcgccggctgcccgccatggccaacaccagatgccacaccccgtgcccgtgcccgtgcaggcccccgccattcctgccggcacctttgcgccgggcaccaagatccaggtcggcgagcaccgtgtggtcatcaccaaatacctgtccgagggcggctttgcccatgtctacctcgtcaagctgccccgccccgtcgacggcaccgacgaggccgtgctgaagagggtcgccgtgcccgacaaggacacgctgcgaggcatgcgcaccgaggtcgagaccatgaagcgcctcaaggggcaccgccccatcgtcacctacatcgactcccacgcctccgagcgcaagggcggcggctacgaggtctttctgctgatggagcactgcaacggcggcggcctgatcgacttcatgaacacccgcctgcagcaccgcctgaccgagcccgagatcctgaacatcttctctgacattgccgagggcgtcgcctgcatgcattacctcaagccgccgctgctgcaccgcgatatcaaggtcgagaacgtcttgatcaccatgcacggcgccaagaggaagttcaagctgtgcgatttcggctcctctgctccgcccaagcccgcgcccacgtccgttgtcgagtgcaggctgttggacgaggatgtccagagacacacgaccatgcagtaccgctcccccgagatggtcgacgtctacagaaaactgcccatagacgagaaatccgacatctgggcactgggtgtccttctttataagctctgctactacacaaccccttttgaggaccagggccagctagctattctcaacgcaagctatcgattcccaagctacccggtcttctcagacaagctcaagcagttgatcgcttccatgctccgagaagcaccgaactcgaggcccaacatctatcaagtgcttcgagagagctgcaagatgcaaggtcgcgaagtgcccatacaagatatatattctgcccgtgcagcctcaggctcacggactggagaaagacagcctccagcgactcacaaaagtccagatgtgcccgccgttggagctgtatactctccgcctccaaagcaggaggcccaggcgcttccggacattacacctatgcgtagaggtagaccagtcgttgccagccaaccagctccagttccagctccgactaaagtggccgtgggcgatccatttgctgctcttgactccaagggaggagctggcggaaacgacgaattatcttctaggtttcccactcttgaccaattctccctattacacgataacggtgccaaatttgattttgatagtccaacatcccctcaagcagccaatggatttccgacaccgcttgaccaaggagttacggagcgcctcgcagaagaagctttcgcaaaatctgagacgaaatccaacacagtgtctaaagctcgcaggcaggtcacggatccgagccgcgcaaagccggtaacggctgccatcaatcaacctcggcaagtgtcacatcctcagaagactacacctctaccgctgaggccaacgggcgaaaagagcagagcttccgctatcatatctagtaatcctgaacttcaggcgatttcgtcgccttcatctcatttaagacgagatccatcaccgaacaagccagtcatggtatcgactggaactatgacaagtcccccacctgcaattcagacccgagaatatcctccgattcatagattcccgccggcggatcaacaccgcccgacgagtttaccaaggcaagaggatacaataacctcgaaccagtttcgaatagatgccgggcaatatccccggccttcgccaagtccccgaatcacagcaatacaaacgcaaccagacgcaaagggacatccatcttcatcgcgcccatctttggaagggggacggccgaatctcgaatacttggaaccaatggcaaaatcttcatcaaacgctggacgatccagacccagcagcatgtatctcgagtctagcatggactatctacgcgagcgagaggcagcccccaagccatccagaacgcctagccaccacgcctcccccaaattgatggctaccacatcgtctccgacattagaaccacaagacgaacctgtaatagaatccaatgtcgagtttctcagatccatggaggattctgataggagaagggacaagagcacaaagcaacatagcaaacgcgcttctctcggctctttgtcaggcacgaagaacattctagcaggcaagtttggagacgccttcaagcggttcgaagggcaccaacctgctccagccgcacgcacaccttctccgctgaaagatatggatcacgccggtctgactcctattgctggctctgaggccactgatggacgtagcgacgatgggcgtacgctcgacgaacacgagatgacaccagaaatgcgtaggcagcttgaagctcagagccttgctgaagaggagcgtcgcgtagaagctgctgccgctgagtacaagcaaaagcttgccgcacgtggtgatgcaaattccataccgcttccgaggagcatcggtggtgtttctcgcgcagtcagcatacagaaccgagtgcaaaaccttttggatgagtcacaaaagtcatcacagcaggtccaacgcaccgcatcaggatatggaaagttctccgatgaggcagcggagaggagtcgcgtggaaaaggacttacctgatatcccaaggaaacctgttgggactggccctcctccaaaacccctgagcagctcgtctgagtctcttgcccgggctcgactcggtagtccggctcctcaattgctgaacaatcgctcacttcctgccagaccagctccagctccaaaacccacgcacctaaataacataccaaccggcagtcggcctcgctcacctcccaagcagcagcacccaccccaaaggacatcccaattattctcggagttatcggtcgaagaacgacctaggttagatatgagcttgcaagaaaaggaagattatatgcaagacttcagtaagaggtttcccagtctttcttctatagagatggtcgagcgggacctgggcgcagaagctgaaatggagtcgaaaaacaaacgatagaaacctaaattcttgttcttgtatgacaagttcccttttcttgaagtctatggtacatacaacggcgtgagatagagagctaaaagagacgactatctatttattctagatatggattggcgtttggaagagagctgtggaatagaagacttgaattcatctgtttggctggtgatcatcttggctgtccttgttctcacatgaactgattacctgaccagcctagctgtgcgatagcttagatgtgcttgatcatggcctcttgtgttggatatcgccatatactggcaatggaacgaatcactcgagttcattcataagcaagggctggctgtcctagaaagccaaagaggtcgctctatcgttactgcaatccttaccagcttaattgtccagtctcacatccatgtatctacctggagtgattcgatcagagttactgacactctattcgacgactggcggagtgtttgttcgtaacgttatctcattatttatgaacagcgccggcatcaaagtcatagtccgatatctgcctggttgtaattctaaagcatgttgactatcaccgtcacttcggtataagaacgtatagtactgatgagttgaatgagctctcgctgacgatgaatcacttcccgcctgtcttgtctacattcgctcagatttacgggattagtagaatg

SEQ ID NO: 32699 - DNA, 1881 bp, Muscodor strobelii
  misc_feature: SGI cDNA ID NO. 571271
  misc_feature: Encodes the peptide sequence at SEQ ID NO 32700
atgccctcgcaatcttcacgttcctcgtcatcaagccactccgagtctcagcttcatctgaaacgcttagattccccacgaccgaacgctgcttccaacaagccgccgacggactcgttgcctatccccgagagtagtcaacatcagattgatacagatggacgagatgggcaggatgaacattcgcctctcttatctcccgctccagatgaggaggcccctttcatgagccaatccactgaattccctccatcccatgatcacgatccctttcaaactaccaagagtgtgtggtatctcatcatattgaccataagtctgggtgggcttcaagttgcctgggctgtcgagctatccaatggcaccccctacttgctttccctcggattgagcaagtccatgatggctctcgtgtggattgcaggtccgattacgggtactctagttcaaccctatggcggtgccgctgccacttcctttgcttttttgtccctcgcctggatcaaggagattattggtggcattctaggcctatttggagccgatcctaaatcggatggcgtcaagaccgttatcatcgttgtcgctgtgatatggatttacatccttgacgtggccgtgaacacagttcaagcgtcgatccgtgctttcatcgtagactgttgcccctcgcatcagcaagaggctgcgaattcgatggctagtagaatgacgggtgttggcaacatcgttggccctttgctcgaccgtactgttgagtacatcggtgattcgagaacggaatcctcagctcgacaagcgcccggcagagagtcggcctggcctgttttcgtttttgtaagaattttttctgccattaggagattgccaccacagatctacaaagtttgcgttgtccagttttttgcctgggttggcttctttcctatgcttttctacacctcgtcttatatcggcgaaatttacattcagcccttcctggaagataacccaaacatgacgccctccgagctagacgaattgtatgagagatccacgagaagaggaacacatgccctgctcatctttgccattacgagcctcgttacaaacctcattgttccgtttttcatagaacctacatatgataataatcctactgtcggcgcacatggcgacggagtcctggaggatgattcttcgggttttcacaagtggctcaaacgcttggtaatccctgggttcactcttcgccgagcttggatgtattcacacattctcttcactggttcgatgctcagtacgctattcgttcgatcggtcgaaggggcaacaatattgataggtttgattggcataacctgggccctgactctatgggctccatgggcaatcatcagcgcagagattagtcgtcgcgatgtattgtaccgagcgcgcaagcagcaaatgaggcgtctctctcgtaccgaagagcaaagcaatggtgcgctgattgaccaggagaggcagcaggacaatgagccagaacctgaccaagccggtgttatcctaggcattcacaatatgtcgattgcatcgccacagatgattgctactctaggctcaagcatcatctttcgtctcttccaaaagccaaggggagtgcctggcgaccacagctactcatatgtccttgccagcggaggactcttcgtcctggtggcagcatatttcgtctctaaaattgaagacgacatgcctatctcagaatctgccgcgtatgctgctgctgctcaagaagaggaggatgaggaggatagcataaatcgtcactcttccaataaaccaagtatggatatgccgcgcgccaatcttgagccatccgcaacgattaggaacgagggctttatgccgggttga

SEQ ID NO: 32700 - protein, 626 aa, Muscodor strobelii
  misc_feature: SGI Peptide ID NO. 571271
  misc_feature (51)..(623): NCBI GI: 85081709 Blast Desc: NCU00450 [Neurospora crassa OR74A] gi|28917846|gb|EAA27533.1| conserved [Neurospora crassa OR74A]
  misc_feature (46)..(623): NCBI GI: 256733129 Blast Desc: NECHADRAFT_68447 [Nectria haematococca mpVI 77-13-4]
  misc_feature (26)..(623): NCBI GI: 46125025 Blast Desc: FG06890.1 [Gibberella zeae PH-1]
  misc_feature (50)..(575): NCBI GI: 145608700 Blast Desc: MGG_12836 [Magnaporthe grisea 70-15] gi|145016146|gb|EDK00636.1| MGG_12836 [Magnaporthe grisea 70-15]
  misc_feature (85)..(575): NCBI GI: 156037468 Blast Desc: SS1G_12447 [Sclerotinia sclerotiorum 1980] gi|154697856|gb|EDN97594.1| SS1G_12447 [Sclerotinia sclerotiorum 1980]
  misc_feature (87)..(623): NCBI GI: 261358320 Blast Desc: general alpha-glucoside permease [Verticillium albo-atrum VaMs.102]
  misc_feature (38)..(575): NCBI GI: 154316105 Blast Desc: BC1G_03637 [Botryotinia fuckeliana B05.10] gi|150846424|gb|EDN21617.1| BC1G_03637 [Botryotinia fuckeliana B05.10]
  misc_feature (47)..(623): NCBI GI: 171685972 Blast Desc: protein product [Podospora anserina] gi|170942947|emb|CAP68600.1| protein product [Podospora anserina]
  misc_feature (52)..(571): NCBI GI: 70998580 Blast Desc: sucrose transporter [Aspergillus fumigatus Af293] gi|66851648|gb|EAL91974.1| sucrose transporter, [Aspergillus fumigatus Af293] gi|159126253|gb|EDP51369.1| sucrose transporter,
  misc_feature (62)..(571): NCBI GI: 169765183 Blast Desc: [Aspergillus oryzae RIB40] gi|83764917|dbj|BAE55061.1| protein product [Aspergillus oryzae]
MPSQSSRSSSSSHSESQLHLKRLDSPRPNAASNKPPTDSLPIPESSQHQIDTDGRDGQDEHSPLLSPAPDEEAPFMSQSTEFPPSHDHDPFQTTKSVWYLIILTISLGGLQVAWAVELSNGTPYLLSLGLSKSMMALVWIAGPITGTLVQPYGGAAATSFAFLSLAWIKEIIGGILGLFGADPKSDGVKTVIIVVAVIWIYILDVAVNTVQASIRAFIVDCCPSHQQEAANSMASRMTGVGNIVGPLLDRTVEYIGDSRTESSARQAPGRESAWPVFVFVRIFSAIRRLPPQIYKVCVVQFFAWVGFFPMLFYTSSYIGEIYIQPFLEDNPNMTPSELDELYERSTRRGTHALLIFAITSLVTNLIVPFFIEPTYDNNPTVGAHGDGVLEDDSSGFHKWLKRLVIPGFTLRRAWMYSHILFTGSMLSTLFVRSVEGATILIGLIGITWALTLWAPWAIISAEISRRDVLYRARKQQMRRLSRTEEQSNGALIDQERQQDNEPEPDQAGVILGIHNMSIASPQMIATLGSSIIFRLFQKPRGVPGDHSYSYVLASGGLFVLVAAYFVSKIEDDMPISESAAYAAAAQEEEDEEDSINRHSSNKPSMDMPRANLEPSATIRNEGFMPG

SEQ ID NO: 32701 - DNA, 533 bp, Muscodor strobelii
  misc_feature: SGI EST ID NO. CUFF.77314.0
  misc_feature: Variant of the nucleotide sequence at SEQ ID NO 32699
tctgtgtactaggtgggtatgctgagtgataactgtcgactatccatggggaaacggaaaccatttgtcctaggcggtgccgctgccacttcctttgcttttttgtccctcgcctggatcaaggagattattggtggcattctaggcctatttggagccgatcctaaatcggatggcgtcaagaccgttatcatcgttgtcgctgtgatatggatttacatccttgacgtggccgtgaacacagttcaagcgtcgatccgtgctttcatcgtagactgttgcccctcgcatcagcaagaggctgcgaattcgatggctagtagaatgacgggtgttggcaacatcgttgggtatattgcgggcggaattaatcttcaggggtatactcccttttttggatcaactcaattcaaagatctctgtgctatcgccagcatagccctttgctcgaccgtactgttgagtacatcggtgattcgagaacggaatcctcagctcgacaagcgcccggcagagagtcggcctggcctgtt

SEQ ID NO: 32702 - DNA, 801 bp, Muscodor strobelii
  misc_feature: SGI cDNA ID NO. 571272
  misc_feature: Encodes the peptide sequence at SEQ ID NO 32703
atgaagagcatcctgtgttccacagttttggcttgcctcgcagaggccgctgtgatctgggacggtcgattcaatgacttagatggaaatagtgcaatcggttcctacattaacttctcaccggacttcaagaatcccgcagacaggactgactcttgcagtgtttctaagcaaggagcgaaattcactcttgatagcacagcgtactggaacggacaaaatatgagacgtatcgaacttataccgcagacaaaagccgctatcaacagtggcaaggtgttctaccatttctcaatgatgcgcaaagacacaaatgccccatccgtgaaccgcgaacatcaaatctgcttcttcgagtcgcattttgtcgagatgaaatccggctggatctctggcgagtcaggcacttcgaatccaaatcttcagttcatgatctcgcagaactcgaaatggaagacagaatggaagccgaacgtctggcataacgttgcattcgagatcaactttggcagcaacaccgttggcttctggcactcggaaggtggcgatgcattgacacaggtagtcgcgccggtgtcagcatcgacttcgagcaatggcgcggactggcatcttggcgtgcttgagctcccgaggtcgggatatagcgacagtaccgaggacttctatttctctggtgtttatgttgagaatgggtctatcaccactgctatcggtggtccaagtaagtttaccagagtcttcttgtctctattcatgtcacttgcgaggaatcacagccctcaaatgttctggaactaa

SEQ ID NO: 32703 - protein, 266 aa, Muscodor strobelii
  misc_feature: SGI Peptide ID NO. 571272
  misc_feature (1)..(241): NCBI GI: 85081705 Blast Desc: NCU00449 [Neurospora crassa OR74A] gi|28917845|gb|EAA27532.1| conserved [Neurospora crassa OR74A]
  misc_feature (57)..(241): NCBI GI: 116207460 Blast Desc: conserved [Chaetomium globosum CBS 148.51] gi|88183620|gb|EAQ91088.1| conserved [Chaetomium globosum CBS 148.51]
  misc_feature (3)..(244): NCBI GI: 171686038 Blast Desc: protein product [Podospora anserina] gi|170942980|emb|CAP68633.1| protein product [Podospora anserina]
  misc_feature (1)..(239): NCBI GI: 39946208 Blast Desc: MGG_08408 [Magnaporthe grisea 70-15] gi|145019932|gb|EDK04160.1| MGG_08408 [Magnaporthe grisea 70-15]
  misc_feature (1)..(241): NCBI GI: 85090296 Blast Desc: NCU09764 [Neurospora crassa OR74A] gi|28919704|gb|EAA29112.1| conserved [Neurospora crassa OR74A]
  misc_feature (1)..(238): NCBI GI: 116205385 Blast Desc: CHGG_10576 [Chaetomium globosum CBS 148.51] gi|88176704|gb|EAQ84172.1| CHGG_10576 [Chaetomium globosum CBS 148.51]
  misc_feature (11)..(241): NCBI GI: 154292153 Blast Desc: BC1G_14698 [Botryotinia fuckeliana B05.10] gi|150846249|gb|EDN21442.1| BC1G_14698 [Botryotinia fuckeliana B05.10]
  misc_feature (10)..(239): NCBI GI: 261353966 Blast Desc: conserved [Verticillium albo-atrum VaMs.102]
  misc_feature (14)..(241): NCBI GI: 156055190 Blast Desc: SS1G_04946 [Sclerotinia sclerotiorum 1980] gi|154702731|gb|EDO02470.1| SS1G_04946 [Sclerotinia sclerotiorum 1980]
  misc_feature (2)..(241): NCBI GI: 189191658 Blast Desc: conserved [Pyrenophora tritici-repentis Pt-1C-BFP] gi|187973774|gb|EDU41273.1| conserved [Pyrenophora tritici-repentis Pt-1C-BFP]
MKSILCSTVLACLAEAAVIWDGRFNDLDGNSAIGSYINFSPDFKNPADRTDSCSVSKQGAKFTLDSTAYWNGQNMRRIELIPQTKAAINSGKVFYHFSMMRKDTNAPSVNREHQICFFESHFVEMKSGWISGESGTSNPNLQFMISQNSKWKTEWKPNVWHNVAFEINFGSNTVGFWHSEGGDALTQVVAPVSASTSSNGADWHLGVLELPRSGYSDSTEDFYFSGVYVENGSITTAIGGPSKFTRVFLSLFMSLARNHSPQMFWN

SEQ ID NO: 32704 - DNA, 567 bp, Muscodor strobelii
  misc_feature: SGI cDNA ID NO. 571273
  misc_feature: Encodes the peptide sequence at SEQ ID NO 32705
atggcgtctctactcagcattgtcattctcgtccgcctattcctggaccttgttttcggtgcacatgcagacatcggtgtaatgatgaagcctgcgcccaacattacggtggtcaccatcacagcaaatactactctcgtcgacacgaccctggttacagtcactgctttcgcaacaactaccttatcttcggagagacattcccatttatcatcaccaaagcacatcacaactatcgtcgttacggatacaatcactgttactgagaccgaggatcttactgtcacaccatctctactgccaccagtttctgcatcacctccggtttcaaccacgatgagtctacttccccccgtgtccgcaaacatgacaacgggtgtcagcaacaagacgacatcagcaagcattacagccgctccgacttcaacttttgataccggtatgtgcgaggatatgtattgtgaaaatgataccagtttctgcgtatactgggcaggattcacttcgtgggacatctcaaatggccctaagcctggcatggtgcatacatctatcggtgtgtgctag

SEQ ID NO: 32705 - protein, 188 aa, Muscodor strobelii
  misc_feature: SGI Peptide ID NO. 571273
MASLLSIVILVRLFLDLVFGAHADIGVMMKPAPNITVVTITANTTLVDTTLVTVTAFATTTLSSERHSHLSSPKHITTIVVTDTITVTETEDLTVTPSLLPPVSASPPVSTTMSLLPPVSANMTTGVSNKTTSASITAAPTSTFDTGMCEDMYCENDTSFCVYWAGFTSWDISNGPKPGMVHTSIGVC

SEQ ID NO: 32706 - DNA, 648 bp, Muscodor strobelii
  misc_feature: SGI cDNA ID NO. 571274
  misc_feature: Encodes the peptide sequence at SEQ ID NO 32707
atggactcaggccagaaccaaaccacatgtcccgcttgcatctgccccgattacggcgatagcgagctttccatcgctggcaacgtcctgggtattctgacattcgccttcgctatctacgcagcagcgctggtctacgttcgtggcatagccgagtccaatgtccagatggcggaggaccgggcaacgctgaggaagaaatacgaagaaattagtgctcttcacgattccctccagggaagactaggatcattggatagggcctcggatttggatcgtcggcggcaaggaaggctcgaagacgccctgcaaacagcctcaatcagtttcaaggcggccgaggaactcttagaggatcgcttcgtccgcagaggcaccggtttcaagcagattggcaataaggccaagtatgttctccagaaagagcagattgagaagtcactcgagaaagtggacaagtcttgcaaggatctaaaagacatcgcttcagagatcttcggccagctccccgcagagtcagacatgcaagtcttcttcatgttacaggaagccctggatcgtttgcgtgagctgcaagctcgaacagaaaacattggccggacagggggatactatcaccatccagggagcagcgcacgacgaccataa

SEQ ID NO: 32707 - protein, 215 aa, Muscodor strobelii
  misc_feature: SGI Peptide ID NO. 571274
MDSGQNQTTCPACICPDYGDSELSIAGNVLGILTFAFAIYAAALVYVRGIAESNVQMAEDRATLRKKYEEISALHDSLQGRLGSLDRASDLDRRRQGRLEDALQTASISFKAAEELLEDRFVRRGTGFKQIGNKAKYVLQKEQIEKSLEKVDKSCKDLKDIASEIFGQLPAESDMQVFFMLQEALDRLRELQARTENIGRTGGYYHHPGSSARRP

SEQ ID NO: 32708 - DNA, 1161 bp, Muscodor strobelii
  misc_feature: SGI EST ID NO. CUFF.77332.0
  misc_feature: Variant of the nucleotide sequence at SEQ ID NO 32706
tttgtctcgatgctgagatgtcctactgccccgatcgagcccagcctcaccagaaatccgtgtttctctcaacacgtaccgtcgcaatagaagaggtcgattacctggaggatactgagcacacaggtcacgcccgttgtcaccaatagttatggactcaggccagaaccaaaccacatgtcccgcttgcatctgccccgattacggcgatagcgagctttccatcgctggcaacgtcctgggtattctgacattcgccttcgctatctacgcagcagcgctggtctacgttcgtggcatagccgagtccaatgtccagatggcggaggaccgggcaacgctgaggaagaaatacgaagaaattagtgctcttcacgattccctccagggaagactaggatcattggatagggcctcggatttggatcgtcggcggcaaggaaggctcgaagacgccctgcaaacagcctcaatcagtttcaaggcggccgaggaactcttagaggatcgcttcgtccgcagaggcaccggtttcaagcagattggcaataaggccaagtatgttctccagaaagagcagattgagaagtcactcgagaaagtggacaagtcttgcaaggatctaaaagacatcgcttcagagatcttcggccagctccccgcagagtcagacatgcaagtcttcttcatgttacaggaagccctggatcgtttgcgtgagctgcaagctcgaacagaaaacattggccggacagggggatactatcaccatccagggagcagcgcacgacgaccataatgacggtggaggggataacagcgactaatcgaaagccattaactgcaaaatttcgaaccataattcctcaggtctttgaatgacatatcagagtgttataaactctattgaaatcatgtgaatggaatcagatagtccgagagaagcatcgaacatcactcactcactcactcacaactatcggggcaaggaaaaaaaaaaaaaattccacaagacgcatactcctgttcgcccccaaaaccggaggtaagttggctagccaccccatatataccatactaccactggtgaccactgtcgggtgcattcgacactcttttgtagcgtggctcagtggtatgttcttctaggtagtgtatcca

SEQ ID NO: 32709 - DNA, 690 bp, Muscodor strobelii
  misc_feature: SGI cDNA ID NO. 571275
  misc_feature: Elevated expression when VOC is produced
  misc_feature: Encodes the peptide sequence at SEQ ID NO 32710
atgtctcaacaagttttcaccgaccgtgatatcgagaagcaatcttcttcgacaatctcccctgtagcctctcacggccatggcaagtccagactggcgagcgccaaccctctaggtctcctcgccttcggccagtcccttttcatgctttcactcctcgggttccaacctcgcggcgtcgttcacaccaacatcgtggttggtaacttcatctggatgggtggcgttgctcagttcattgctggcgttatcgacttctgtgctggtaatgctttcggtgctaccgtcttctgtgcttatggtgctttcaatcttgcatacgccaccaacttcattcccggatccggtattcttgctgcatacgagaagaatggtatgctgaccgaggaattcgaacaagccgtggctcttttcatctggggctggttcatcatcactttcatcttcactgttggtgcttgccaagccaactggattctgttctctctcctctccgtcgctgatgtcaccctcatcctgctcgcttcaggatacatgactggcaacgagatggtcaagatgggtggtgctggtactggtttggtcgcatctgccatctctttctacgctgccgctgcttacctctacgtcgacggtgtcactcccttcactcttcctctcttccccatccgcaaggacagaattgtctaa

SEQ ID NO: 32710 - protein, 229 aa, Muscodor strobelii
  misc_feature: SGI Peptide ID NO. 571275
  misc_feature (27)..(224): Pfam Id: PF01184 Pfam Desc: GPR1/FUN34/yaaH family
  misc_feature (37)..(206): Pfam Id: PF01184 Pfam Desc: GPR1/FUN34/yaaH family
  misc_feature (47)..(225): NCBI GI: 154322945 Blast Desc: BC1G_00815 [Botryotinia fuckeliana B05.10] gi|150848149|gb|EDN23342.1| BC1G_00815 [Botryotinia fuckeliana B05.10]
  misc_feature (29)..(200): NCBI GI: 256728793 Blast Desc: NECHADRAFT_51022 [Nectria haematococca mpVI 77-13-4]
  misc_feature (33)..(200): NCBI GI: 238500840 Blast Desc: conserved [Aspergillus flavus NRRL3357] gi|220691891|gb|EED48238.1| conserved [Aspergillus flavus NRRL3357]
  misc_feature (10)..(227): NCBI GI: 61676651 Blast Desc: Gpr1 family protein [Paxillus involutus]
  misc_feature (33)..(200): NCBI GI: 67900660 Blast Desc: AN7317.2 [Aspergillus nidulans FGSC A4] gi|40742178|gb|EAA61368.1| AN7317.2 [Aspergillus nidulans FGSC A4] gi|259483330|tpe|CBF78629.1| TPA: conserved [Aspergillus FGSC
  misc_feature (30)..(226): NCBI GI: 170116453 Blast Desc: FUN34 transmembrane protein [Laccaria bicolor S238N-H82] gi|164635569|gb|EDQ99874.1| FUN34 transmembrane protein [Laccaria bicolor S238N-H82]
  misc_feature (20)..(202): NCBI GI: 170112129 Blast Desc: FUN34 transmembrane protein [Laccaria bicolor S238N-H82] gi|164637828|gb|EDR02110.1| FUN34 transmembrane protein [Laccaria bicolor S238N-H82]
  misc_feature (29)..(226): NCBI GI: 71003325 Blast Desc: UM00196.1 [Ustilago maydis 521] gi|46096348|gb|EAK81581.1| UM00196.1 [Ustilago maydis 521]
  misc_feature (10)..(208): NCBI GI: 169856913 Blast Desc: [Coprinopsis cinerea okayama7#130] gi|116503857|gb|EAU86752.1| [Coprinopsis cinerea okayama7#130]
  misc_feature (29)..(220): NCBI GI: 134112938 Blast Desc: CNBF1750 [Cryptococcus neoformans var. neoformans B-3501A] gi|50257660|gb|EAL20365.1| CNBF1750 [Cryptococcus neoformans var. neoformans B-3501A]
  misc_feature: Useful for introducing or modulating the production of volatile compounds
MSQQVFTDRDIEKQSSSTISPVASHGHGKSRLASANPLGLLAFGQSLFMLSLLGFQPRGVVHTNIVVGNFIWMGGVAQFIAGVIDFCAGNAFGATVFCAYGAFNLAYATNFIPGSGILAAYEKNGMLTEEFEQAVALFIWGWFIITFIFTVGACQANWILFSLLSVADVTLILLASGYMTGNEMVKMGGAGTGLVASAISFYAAAAYLYVDGVTPFTLPLFPIRKDRIV

SEQ ID NO: 32711 - DNA, 1369 bp, Muscodor strobelii
  misc_feature: SGI EST ID NO. CUFF.77348.0
  misc_feature: Variant of the nucleotide sequence at SEQ ID NO 32709
gtcggatcctctgatatgacttcaaggattactatgggtctgttacttctcgccatgtgaatgcatctctatccttagccaagctaaacggggagtcttggcccagtaaccttgctagaatgcttgcttctatcaaccttcgagacgatatgatctgtcgttaaataccattgccctgcccctctgagggtctcatctcccctttgtcactccaagtcgcacttcctgtatcaccgacctcctcgtcgcagagttctcttcttcgtttttgcccgtagcgcctaatactcgtcgtcgaacacactctcacttcgatagctatctgggattataccttcgccatgtctcaacaagttttcaccgaccgtgatatcgagaagcaatcttcttcgacaatctcccctgtagcctctcacggccatggcaagtccagactggcgagcgccaaccctctaggtctcctcgccttcggccagtcccttttcatgctttcactcctcgggttccaacctcgcggcgtcgttcacaccaacatcgtggttggtaacttcatctggatgggtggcgttgctcagttcattgctggcgttatcgacttctgtgctggtaatgctttcggtgctaccgtcttctgtgcttatggtgctttcaatcttgcatacgccaccaacttcattcccggatccggtattcttgctgcatacgagaagaatggtatgctgaccgaggaattcgaacaagccgtggctcttttcatctggggctggttcatcatcactttcatcttcactgttggtgcttgccaagccaactggattctgttctctctcctctccgtcgctgatgtcaccctcatcctgctcgcttcaggatacatgactggcaacgagatggtcaagatgggtggtgctggtactggtttggtcgcatctgccatctctttctacgctgccgctgcttacctctacgtcgacggtgtcactcccttcactcttcctctcttccccatccgcaaggacagaattgtctaagcaaagtcaacttagaataagagaccttaagtcttgttcttccactaccgaattcaatacccctagaatccttttctatctcaactgcgacgagagagatcgattcttcatccgttcctagaagattgtatatagatggtttactggttagcgacatttggcattcgttgagtatatactgcgcaagataacacctaaaatctaagactcattttgtcatttgatcaacaacggctcttctcctctcaacgtgatctatatacgtttgaaacaatgagtaacaatcgtgaaagcaagcaaggaatctgaggaatagcacactgcgaggtggactgggg

SEQ ID NO: 32712 - DNA, 1194 bp, Muscodor strobelii
  misc_feature: SGI cDNA ID NO. 571276
  misc_feature: Encodes the peptide sequence at SEQ ID NO 32713
atggggtctgctgcagaagactacaatgtgcggctaacgttgggggtggttatatctgttctagctttgtcgactatctcattcgtcttacggatatgggctcgcttttcaaccggagcaaagctatggtgggatgactattggatgttctgggtgatgtttgtatgcgctgtcatgtcgactttcgatctgcttgggttgcggtttgggtctggaaaacaccagggcgatctaccaaaagccgaagcaactacttttgtgaagcttctctggatatatatgctactgtgggcaactggtgttttttcagtcaagattggcattttgctattttattggcgggtctttcagaaaacaccaaagtttcgggttgctgctatcgccgtcgctttcttttccacgggcatctttctgtccaacttcttcagctttactttccaatgcattcctgtgcagaaattttggcttcctgacacagacggtgcttgcttcgaccaaaatgcattctatctcgcatctgccatcatcaatgttttcggcgatatcactgtccttgctcttcctcttccgataatatggaaactccaagcatcgaggagtaagaaatggtctctgagtttcttgtttctgcttggtgctttcgtcgtctttgccagtgtctttcggattgttgctgttacgcaaatcgacccacacgacttcagcttcacgaacgttggcggcggcctttggagtactgttgaggtcgaagtagggtttatctgcgcaaacctcccggccgtacgcccacttgtcttccgattgatgggatggggcgtcacacagaacgggtcaggaagtcctaattacaacctctccgacctttctgcaactccgaagccacgatttggtcgcagtcctttccgcatgcattccaaaggccgcgacacacttaatgatctcgatgattctagcacagaagctttgaccgagcagagtgtgacgcgtttgacagatacaaagcacaggtctgatgccttagccgccgagagaccagaaccaatgccattgtcagatatcgtcgtgcagcgagatttcaacatgtcagtagatgatccacaaaccgcaatacctgcaggtgtccaaatttcaacaactcgtaatcaaatacatatcccgggcgcggcgaacgattattacggaagtgcgcattga

SEQ ID NO: 32713 - protein, 397 aa, Muscodor strobelii
  misc_feature: SGI Peptide ID NO. 571276
  misc_feature (13)..(360): NCBI GI: 67900490 Blast Desc: AN7232.2 [Aspergillus nidulans FGSC A4] gi|40742089|gb|EAA61279.1| AN7232.2 [Aspergillus nidulans FGSC A4] gi|259483424|tpe|CBF78803.1| TPA: conserved [Aspergillus FGSC
  misc_feature (18)..(360): NCBI GI: 115395874 Blast Desc: conserved [Aspergillus terreus NIH2624] gi|114193145|gb|EAU34845.1| conserved [Aspergillus terreus NIH2624]
  misc_feature (14)..(339): NCBI GI: 121719918 Blast Desc: integral membrane protein [Aspergillus clavatus NRRL 1] gi|119404869|gb|EAW15231.1| integral membrane protein [Aspergillus clavatus NRRL 1]
  misc_feature (20)..(327): NCBI GI: 256720355 Blast Desc: NECHADRAFT_56055 [Nectria haematococca mpVI 77-13-4]
  misc_feature (14)..(339): NCBI GI: 119484626 Blast Desc: integral membrane protein [Neosartorya fischeri NRRL 181] gi|119410248|gb|EAW20195.1| integral membrane protein [Neosartorya fischeri NRRL 181]
  misc_feature (14)..(339): NCBI GI: 70983652 Blast Desc: integral membrane protein [Aspergillus fumigatus Af293] gi|66844979|gb|EAL85315.1| integral membrane protein [Aspergillus fumigatus Af293] gi|159123642|gb|EDP48761.1| protein
  misc_feature (17)..(307): NCBI GI: 169766336 Blast Desc: [Aspergillus oryzae RIB40] gi|83765494|dbj|BAE55637.1| protein product [Aspergillus oryzae]
  misc_feature (14)..(339): NCBI GI: 115401548 Blast Desc: conserved [Aspergillus terreus NIH2624] gi|114190303|gb|EAU32003.1| conserved [Aspergillus terreus NIH2624]
  misc_feature (17)..(307): NCBI GI: 238483045 Blast Desc: integral membrane protein [Aspergillus flavus NRRL3357] gi|220700811|gb|EED57149.1| integral membrane protein [Aspergillus flavus NRRL3357]
  misc_feature (1)..(360): NCBI GI: 242760617 Blast Desc: conserved [Talaromyces stipitatus ATCC 10500] gi|242760622|ref|XP_002340028.1| conserved [Talaromyces stipitatus ATCC 10500] gi|218723223|gb|EED22640.1| conserved ATCC
MGSAAEDYNVRLTLGVVISVLALSTISFVLRIWARFSTGAKLWWDDYWMFWVMFVCAVMSTFDLLGLRFGSGKHQGDLPKAEATTFVKLLWIYMLLWATGVFSVKIGILLFYWRVFQKTPKFRVAAIAVAFFSTGIFLSNFFSFTFQCIPVQKFWLPDTDGACFDQNAFYLASAIINVFGDITVLALPLPIIWKLQASRSKKWSLSFLFLLGAFVVFASVFRIVAVTQIDPHDFSFTNVGGGLWSTVEVEVGFICANLPAVRPLVFRLMGWGVTQNGSGSPNYNLSDLSATPKPRFGRSPFRMHSKGRDTLNDLDDSSTEALTEQSVTRLTDTKHRSDALAAERPEPMPLSDIVVQRDFNMSVDDPQTAIPAGVQISTTRNQIHIPGAANDYYGSAH

SEQ ID NO: 32714 - DNA, 2538 bp, Muscodor strobelii
  misc_feature: SGI EST ID NO. CUFF.77356.0
  misc_feature: Variant of the nucleotide sequence at SEQ ID NO 32712
acgatgtacctctctgccaagaaacggatcaacttccccagcgttgcagcgttacatgcgttgaagaactatacagtatgtgcaagcagaaatttcgccctggaatatatcagttttgacctctcggagagcaaacccctcaacggcctcaccttgatgtaaacaattgtttaaaagagtcacctaccccacgacgccgaccgatgtagtcaatctggacgaagtaggatatcttagaagtaccatcatccaccataacaaagatggggtctgctgcagaagactacaatgtgcggctaacgttgggggtggttatatctgttctagctttgtcgactatctcattcgtcttacggatatgggctcgcttttcaaccggagcaaagctatggtgggatgactattggatgttctgggtgatgtttgtatgcgctgtcatgtcgactttcgatctgcttgggttgcggtttgggtctggaaaacaccagggcgatctaccaaaagccgaagcaactacttttgtgaagcttctctggatatatatgctactgtgggcaactggtgttttttcagtcaagattggcattttgctattttattggcgggtctttcagaaaacaccaaagtttcgggttgctgctatcgccgtcgctttcttttccacgggcatctttctgtccaacttcttcagctttactttccaatgcattcctgtgcagaaattttggcttcctgacacagacggtgcttgcttcgaccaaaatgcattctatctcgcatctgccatcatcaatgttttcggcgatatcactgtccttgctcttcctcttccgataatatggaaactccaagcatcgaggagtaagaaatggtctctgagtttcttgtttctgcttggtgctttcgtcgtctttgccagtgtctttcggattgttgctgttacgcaaatcgacccacacgacttcagcttcacgaacgttggcggcggcctttggagtactgttgaggtcgaagtagggtttatctgcgcaaacctcccggccgtacgcccacttgtcttccgattgatgggatggggcgtcacacagaacgggtcaggaagtcctaattacaacctctccgacctttctgcaactccgaagccacgatttggtcgcagtcctttccgcatgcattccaaaggccgcgacacacttaatgatctcgatgattctagcacagaagctttgaccgagcagagtgtgacgcgtttgacagatacaaagcacaggtctgatgccttagccgccgagagaccagaaccaatgccattgtcagatatcgtcgtgcagcgagatttcaacatgtcagtagatgatccacaaaccgcaatacctgcaggtgtccaaatttcaacaactcgtaatcaaatacatatcccgggcgcggcgaacgattattacggaagtgcgcattgaaccgccagcatcacatgtcgaatgctttgcgtacaataaataggagaagtgtctaatcgttatagctcaaatttctatacatgatatacgaagcgaagtctagctaccgttttcgattagcaaatattcatgttcctatctccagtacagtttttatcatgtcaccatctcgcggaagaatgggaaacacgatgtcacaccaaagcccgcgtattatgaacctataagcaggctgttgggtttgattacgaaaattttcccgccgttgttgtgaaaaaaagcactatgataaatgtcatgattctgtcaacaagtccgttttagactacacgctcatggacctcaggatcaagatgaccagcatgtctgtttctattgtttgcattgcattttatcggatgcgacgaagaacagaaagcgacagaagatatattaatatgtatacgaggtttgtcctgagggtttaattataggtggcggattaggcctcgcgtgttcttgagtacaaaagagttactagagtacggcatttcgcgggatggatgtctggagggcgtcactgatttgttcttcgcatgcggttaggttttggtgttaacatcgtagtggcatgcaggactaaggccatcatacgatgttggacgacttttaagtaaattggtgacaggtcgttcgttgggaccagtcccatggttggctacaaatcaccgaagtgcccacggagccaacctatcccatgggccacgtaagaaaagcgaggaaacgtacatattcgtacgacagacagcctgcgggtcgctgcgagacgcttgctcacactctgaactcttcctgtttcatgttttgggtagcagtaagggatgtgagccttgtgtcggcctatacttgaactaggaggctgccagatatactctactctatcaagacacattcacgagtcagagcccgaggccatcatgatgtatcattcatggtggtagacaattacatcacgaggtgcagtgggcacatcgttcgaaagattcgcatttagaggttggagaggttgcgaaacaatgaaaaagtatgcactcaatcttgc

SEQ ID NO: 32715 - DNA, 3132 bp, Muscodor strobelii
  misc_feature: SGI cDNA ID NO. 571277
  misc_feature: Encodes the peptide sequence at SEQ ID NO 32716
atggcaaacatatccaccgaagtagtcgaggaccgcattcgacagttcggcaagctgtggatggtcgatgatcttattcgggagcgtgggaaagatgaagtccaagtcccaattctaggctaccccagatataaagatagtgccgctgattacgaactcttcaccggtaaagaactcgaccaaatggtggacgaagcatgccgggctttggtcaaggcgggcctcgagatgaactctggcaagataattgccctcttcgctccgtcagatctatcattcgtcataaccttgtttgccatatttcggctaggctgtaaggcattagcagcttcgattcgcttgagcgagccagcattgttgaatctactggagaagacgggttgtgatacgatacttatggggtcgagtactcgcgtcaagttgacggtggattggctcaagaggtcacaacagcacttgacattcatccctatactcacgagggatgattatgataagccatatacctcctcggagccgtttataaggcctattgcagacaaagaagcagagcatgctcagctagcatttttcggccactcgtcaggatccaccggccttcctaagccactcgcgctctctcaccgcagcatactaaataatttgtattccggtacaggttgtaaggcgttcaatgctcttccttggtatcacatgcatgccgtcttcacctcgacacaagcaatgtacatgcgcaaaacagcgcatctcttcaatgcagaactccctctcactgcagacaaccttgttacggcactgaaagcagttcagcctgagatctgccactgtgttccatatgtcctgaaacttatcgctgagagggatgatgggattgaggtgctgcagcgctgcaaatacgtgacggctgctggcgcacggacacccgacgaactgggtgatcgggtagtgaaagcaggtgttaattttggagttattttcggatcaactgaagttggtcatatgggtgactcgattcaacgtgagccaggggacgactcgtgggtctatattcgaccgtacgcaagtttgcgcacccatctgcattggaaaaaaataagtgaaggaatctatgaatcagtgtatctgaaatcgcacccggcgctgatggcttcgacaagtaactcggacgaacccccgggttcctttcacgcaaaagatttatttgagccacacccgactatcgagaatgcctggaagtatatagcccgtgatgatgacagaatcaccttacttagcggcgaaaagatacttcctcttagtatggaaggcgttgttcgggaaagtccccttgtgcgtgacggcctaatggtcggtaacgaccgtttgatggccggccttctagtattctcatctagcgctgccgcggccttaactccaaacgaaattatggatgccatctggccattgattgagtccacaaacaatatcatggacgagcacgcacgcatcactcgcgatatggtggtaatcctacccccagatgtcgagtaccctgcaacagataagaacaacattattcgcgctgctgcctatcgtaagtttgaagacgtgatcgagcatttatataaccaagactccaaggcaaatattgtatccaaaaatatgcgactgagccttgagaatttgcaaaaacacatctatcacgcgatccgtgaacaggcgggtatcgacatatccgactatgaagccgacttttttgccgctggtatcgatagcttacgagcagctcaactgcgcagattattactacaagacctcgaccttggtggcaatccgctggcgagtaatgtcatttacgacgctgggaatgtgatcaagcttgcaaaaacactgtttgctctgcagacagggcagcaacttcacgatgaaaatttggaggaaaagggtgaaatttccctgatggaaaatctcatttccgaatatggtgttttcgaagcgcgaaaggaagtcgtcgtattgactggtgcaactggggctctaggggctcatatattgaatcagcttttggacgacccaggagtagaaaaagtctactgtcttgtccgaggcaacgatcccttaggacgagtgaagagttctttggaagaaagaggactcgctatgaccggaaaaaattcggggcgaggtgaaaagatcacagccttatcgacgaaggactttggcgaagcatgtcttggacttgcgcccgaggattactcggcactacgctctgcaactatcatcatccatgcagcgtggccagtgaacttcaacatatctctcgctagcttcaagccccaagtcgcgggattacgcaatttgttagacttggcatcatcaacaaacaggcagcctggccaagcacgtctagtctttgttagcagcatctcagcggcgttcaacgtgccgtcaccagccagcatccctgaggcgcggctcgactctcttgattatgcagcagctaccggatatgggcgttccaaattagttggcgagcgactgtgcgaggcggctggtgcgagtggcatcgctgtcggcgtcctacggattggccagatatctgcggacagtgtgaatgggatttggaacgagaaggaacacgtgccgctactcgtacgtagcgctatagaaattcatgcactacctagattatatggcaacgagggtagttgcgaatggatgcccgtggatacggtagcggctacggttctgcagcttgctggcaaactcacatcgggagtatcgttctacaacattgtaccaccacacgcattctcatggaacgacaagttcttaccagcgcttcacgaagctggtctcgagtttgaagagatcgagcttgcagagtggctagaacgtctacgggctcgggctcaagaactcggttccgaagccgaaaggaagctccctgcgattaaactagctgattattatgagaagacctacagcaatttggctggaggctacggttcaaacctcaagtttgaaaatgccagggcttgtcaagaaagcgccgcccttcgatcctgtcctgaattgtcggacgttataatcgtgcgcaagatgatacatcactggctggggggtgggatggcgaacggtaatggcaaatga

SEQ ID NO: 32716 - protein, 1043 aa, Muscodor strobelii
  misc_feature: SGI Peptide ID NO. 571277
  misc_feature (55)..(449): Pfam Id: PF00501 Pfam Desc: AMP-binding enzyme
  misc_feature (664)..(926): Pfam Id: PF01370 Pfam Desc: NAD dependent epimerase/dehydratase family
  misc_feature (666)..(909): Pfam Id: PF07993 Pfam Desc: Male sterility protein
  misc_feature (55)..(334): Pfam Id: PF00501 Pfam Desc: AMP-binding enzyme
  misc_feature (774)..(855): Pfam Id: PF01370 Pfam Desc: NAD dependent epimerase/dehydratase family
  misc_feature (13)..(1034): NCBI GI: 255933309 Blast Desc: Pc12g13170 [Penicillium chrysogenum Wisconsin 54-1255] gi|211582744|emb|CAP80944.1| Pc12g13170 [Penicillium chrysogenum Wisconsin 54-1255]
  misc_feature (13)..(1032): NCBI GI: 242807369 Blast Desc: NRPS-like enzyme, [Talaromyces stipitatus ATCC 10500] gi|218715567|gb|EED14989.1| NRPS-like enzyme, [Talaromyces stipitatus ATCC 10500]
  misc_feature (19)..(1032): NCBI GI: 67537314 Blast Desc: AN4827.2 [Aspergillus nidulans FGSC A4] gi|40740872|gb|EAA60062.1| AN4827.2 [Aspergillus nidulans FGSC A4] gi|259482319|tpe|CBF76688.1| TPA: NRPS-like enzyme, (JCVI)
  misc_feature (13)..(1032): NCBI GI: 212547088 Blast Desc: NRPS-like enzyme, [Penicillium marneffei ATCC 18224] gi|210064457|gb|EEA18553.1| NRPS-like enzyme, [Penicillium marneffei ATCC 18224]
  misc_feature (19)..(1032): NCBI GI: 154296846 Blast Desc: BC1G_12512 [Botryotinia fuckeliana B05.10] gi|150843166|gb|EDN18359.1| BC1G_12512 [Botryotinia fuckeliana B05.10]
  misc_feature (22)..(1032): NCBI GI: 145604843 Blast Desc: MGG_07939 [Magnaporthe grisea 70-15] gi|145012759|gb|EDJ97413.1| MGG_07939 [Magnaporthe grisea 70-15]
  misc_feature (18)..(1013): NCBI GI: 261359251 Blast Desc: L-aminoadipate-semialdehyde dehydrogenase [Verticillium albo-atrum VaMs.102]
  misc_feature (1)..(1033): NCBI GI: 238845979 Blast Desc: conserved [Microsporum canis CBS 113480]
  misc_feature (1)..(1033): NCBI GI: 212526194 Blast Desc: NRPS-like enzyme, [Penicillium marneffei ATCC 18224] gi|210072652|gb|EEA26739.1| NRPS-like enzyme, [Penicillium marneffei ATCC 18224]
  misc_feature (1)..(996): NCBI GI: 156065431 Blast Desc: SS1G_00726 [Sclerotinia sclerotiorum 1980] gi|154691585|gb|EDN91323.1| SS1G_00726 [Sclerotinia sclerotiorum 1980]
MANISTEVVEDRIRQFGKLWMVDDLIRERGKDEVQVPILGYPRYKDSAADYELFTGKELDQMVDEACRALVKAGLEMNSGKIIALFAPSDLSFVITLFAIFRLGCKALAASIRLSEPALLNLLEKTGCDTILMGSSTRVKLTVDWLKRSQQHLTFIPILTRDDYDKPYTSSEPFIRPIADKEAEHAQLAFFGHSSGSTGLPKPLALSHRSILNNLYSGTGCKAFNALPWYHMHAVFTSTQAMYMRKTAHLFNAELPLTADNLVTALKAVQPEICHCVPYVLKLIAERDDGIEVLQRCKYVTAAGARTPDELGDRVVKAGVNFGVIFGSTEVGHMGDSIQREPGDDSWVYIRPYASLRTHLHWKKISEGIYESVYLKSHPALMASTSNSDEPPGSFHAKDLFEPHPTIENAWKYIARDDDRITLLSGEKILPLSMEGVVRESPLVRDGLMVGNDRLMAGLLVFSSSAAAALTPNEIMDAIWPLIESTNNIMDEHARITRDMVVILPPDVEYPATDKNNIIRAAAYRKFEDVIEHLYNQDSKANIVSKNMRLSLENLQKHIYHAIREQAGIDISDYEADFFAAGIDSLRAAQLRRLLLQDLDLGGNPLASNVIYDAGNVIKLAKTLFALQTGQQLHDENLEEKGEISLMENLISEYGVFEARKEVVVLTGATGALGAHILNQLLDDPGVEKVYCLVRGNDPLGRVKSSLEERGLAMTGKNSGRGEKITALSTKDFGEACLGLAPEDYSALRSATIIIHAAWPVNFNISLASFKPQVAGLRNLLDLASSTNRQPGQARLVFVSSISAAFNVPSPASIPEARLDSLDYAAATGYGRSKLVGERLCEAAGASGIAVGVLRIGQISADSVNGIWNEKEHVPLLVRSAIEIHALPRLYGNEGSCEWMPVDTVAATVLQLAGKLTSGVSFYNIVPPHAFSWNDKFLPALHEAGLEFEEIELAEWLERLRARAQELGSEAERKLPAIKLADYYEKTYSNLAGGYGSNLKFENARACQESAALRSCPELSDVIIVRKMIHHWLGGGMANGNGK

SEQ ID NO: 32717 - DNA, 4630 bp, Muscodor strobelii
  misc_feature: SGI EST ID NO. CUFF.77386.0
  misc_feature: Variant of the nucleotide sequence at SEQ ID NO 32715
tcgggatatccgttatgtttccggagtggtcgggggatcgtgggggcaagggtggttggcaagggctccgacacacttccacaacggtacgggtacatgaaagccgatcgcgttcggtacttatccctagaagcttgttttctcattgccgcaagtcgagcctgtcaaacaggagcatgtaagtactagatagccaacccaagcctcacgctcggccctccgcttagactgccgctccaccgttgtcataaccggtcccaccagttctactacagtacgatcgactatgctagaatttacttgcatacatactgtttgcaagtaggtacatataatatgcggagggtctccatatacctcattcgcatcgagttccacgtgtaggtaagatgtcacacctgacacctcaccgtctgctgccaaggggaacacagcatgaaaccagcctggctctcgcatctagcaacagggagaagtgagaagaacggaaacaataggcggcgtactgttagttctttcggccccctgatgtccatattcggcgaacatgtagctctgctactactgaatgaagagacctgtcgttaaaagggtccgcatcctaatttctgtgccatattttttgagagctccctggcggggcccgcaacgtaccttaggttcattcaatgataatggggtggacactggaccagggcaagaggggcagaggggcactatgtctgtgtcgatatgtaagacgaggttgcttcgcggcatttgcagaagactaataggttgtcatggatttaagatggagaaaacgagaacagccttcaatttaactcccagacaagcggaagtacagcaagctgttgtcgtttcgaagtttaaaacattgatagccactaaacaacgatattttttctcgattgctcagtcatcactgggaaccgtttccctaccgtccggaaccttcgaaatcttcacctacccctaacgttctcaaaagctcagtcctagagtatttgttccgtcccttcgggaatgcgagttgccgttacccgggctttcccttcgcgcataggcagcctcacgcgtttggaggtaacatagacggacagaggtagaaactggagcaaatattcgatactcggtgttctcctagttcacacaatctacttccgcgatggcaaacatatccaccgaagtagtcgaggaccgcattcgacagttcggcaagctgtggatggtcgatgatcttattcgggagcgtgggaaagatgaagtccaagtcccaattctaggctaccccagatataaagatagtgccgctgattacgaactcttcaccggtaaagaactcgaccaaatggtggacgaagcatgccgggctttggtcaaggcgggcctcgagatgaactctggcaagataattgccctcttcgctccgtcagatctatcattcgtcataaccttgtttgccatatttcggctaggctgtaaggcattagcagcttcgattcgcttgagcgagccagcattgttgaatctactggagaagacgggttgtgatacgatacttatggggtcgagtactcgcgtcaagttgacggtggattggctcaagaggtcacaacagcacttgacattcatccctatactcacgagggatgattatgataagccatatacctcctcggagccgtttataaggcctattgcagacaaagaagcagagcatgctcagctagcatttttcggccactcgtcaggatccaccggccttcctaagccactcgcgctctctcaccgcagcatactaaataatttgtattccggtacaggttgtaaggcgttcaatgctcttccttggtatcacatgcatgccgtcttcacctcgacacaagcaatgtacatgcgcaaaacagcgcatctcttcaatgcagaactccctctcactgcagacaaccttgttacggcactgaaagcagttcagcctgagatctgccactgtgttccatatgtcctgaaacttatcgctgagagggatgatgggattgaggtgctgcagcgctgcaaatacgtgacggctgctggcgcacggacacccgacgaactgggtgatcgggtagtgaaagcaggtgttaattttggagttattttcggatcaactgaagttggtcatatgggtgactcgattcaacgtgagccaggggacgactcgtgggtctatattcgaccgtacgcaagtttgcgcacccatctgcattggaaaaaaataagtgaaggaatctatgaatcagtgtatctgaaatcgcacccggcgctgatggcttcgacaagtaactcggacgaacccccgggttcctttcacgcaaaagatttatttgagccacacccgactatcgagaatgcctggaagtatatagcccgtgatgatgacagaatcaccttacttagcggcgaaaagatacttcctcttagtatggaaggcgttgttcgggaaagtccccttgtgcgtgacggcctaatggtcggtaacgaccgtttgatggccggccttctagtattctcatctagcgctgccgcggccttaactccaaacgaaattatggatgccatctggccattgattgagtccacaaacaatatcatggacgagcacgcacgcatcactcgcgatatggtggtaatcctacccccagatgtcgagtaccctgcaacagataagaacaacattattcgcgctgctgcctatcgtaagtttgaagacgtgatcgagcatttatataaccaagactccaaggcaaatattgtatccaaaaatatgcgactgagccttgagaatttgcaaaaacacatctatcacgcgatccgtgaacaggcgggtatcgacatatccgactatgaagccgacttttttgccgctggtatcgatagcttacgagcagctcaactgcgcagattattactacaagacctcgaccttggtggcaatccgctggcgagtaatgtcatttacgacgctgggaatgtgatcaagcttgcaaaaacactgtttgctctgcagacagggcagcaacttcacgatgaaaatttggaggaaaagggtgaaatttccctgatggaaaatctcatttccgaatatggtgttttcgaagcgcgaaaggaagtcgtcgtattgactggtgcaactggggctctaggggctcatatattgaatcagcttttggacgacccaggagtagaaaaagtctactgtcttgtccgaggcaacgatcccttaggacgagtgaagagttctttggaagaaagaggactcgctatgaccggaaaaaattcggggcgaggtgaaaagatcacagccttatcgacgaaggactttggcgaagcatgtcttggacttgcgcccgaggattactcggcactacgctctgcaactatcatcatccatgcagcgtggccagtgaacttcaacatatctctcgctagcttcaagccccaagtcgcgggattacgcaatttgttagacttggcatcatcaacaaacaggcagcctggccaagcacgtctagtctttgttagcagcatctcagcggcgttcaacgtgccgtcaccagccagcatccctgaggcgcggctcgactctcttgattatgcagcagctaccggatatgggcgttccaaattagttggcgagcgactgtgcgaggcggctggtgcgagtggcatcgctgtcggcgtcctacggattggccagatatctgcggacagtgtgaatgggatttggaacgagaaggaacacgtgccgctactcgtacgtagcgctatagaaattcatgcactacctagattatatggcaacgagggtagttgcgaatggatgcccgtggatacggtagcggctacggttctgcagcttgctggcaaactcacatcgggagtatcgttctacaacattgtaccaccacacgcattctcatggaacgacaagttcttaccagcgcttcacgaagctggtctcgagtttgaagagatcgagcttgcagagtggctagaacgtctacgggctcgggctcaagaactcggttccgaagccgaaaggaagctccctgcgattaaactagctgattattatgagaagacctacagcaatttggctggaggctacggttcaaacctcaagtttgaaaatgccagggcttgtcaagaaagcgccgcccttcgatcctgtcctgaattgtcggacgttataatcgtgcgcaagatgatacatcactggctggggggtgggatggcgaacggtaatggcaaatgaacttcttgcgaaagcccccttggtgtatttgggaggctgtcgtttgggcaaggccgtggtaaaaccaaattaagtcgcgctagcagaagcgcaagatgatgagaagcaagcggtaactggccgtggagcactcgtcatgggtatttgggcatagcctggtttcttgatgtgctcgtctagttcaatagaccagttcgagtagaaggacattgtattgctaagtagatctcggctgtaaggggtctcgacagccaactgcttagagtgtataattgtccatagcgtactatttcatgttctatatctgactagagaaattatcattgtgtc

SEQ ID NO: 32718 - DNA, 810 bp, Muscodor strobelii
  misc_feature: SGI cDNA ID NO. 571278
  misc_feature: Encodes the peptide sequence at SEQ ID NO 32719
atgtccccacctcatcagatctggccaacgcagccagactcacagagaatgaagattgcagatctcctcagccacgaacaggggatcgaagagcctaagacttctaggataccgcagcaggccgtcacttctctcgaggtggcgtcgacctttcgcattcgtgtccgccagcagcctgttgccgcaagatcttgcgggtttggtgagagggatcgtagggtcattgacccgccacccatcgtccaggttacgattgaggatcccaaggcttcagaaaatgacaagaaggccaggctatctcacaagttctcgattatgcattgcacgatctggaacgaagctggagatcaagatgtttcatctatgcccgaagattttcgcactcagcgcaggttgatggggacggtggtgtcctcgccattcatagggttggacgaaaacgacgagcagggttgtttcttctgctttccagatctgtcatgcagaacaccgggctcgttccgcttgaattttagctttgttgtcttgagtccacgctcagtaccggggaacagtacgcccgtggccgcggtagttatgagtgaggtcttcacggtttacaacgccaaggatttcccagggatgagggcaagcactgcactcacgagaagactcaaagagcaaggttgcttgatatcaatcaagaagggaaacgagaaatcgcgtacccgtgaggagagcggcgacgaatacgacgagggcggcgaagatggcgaaggcagcgggccgagtagcgcccaaaggcgggctaaacgaccgaggaatacgtga

SEQ ID NO: 32719 - protein, 269 aa, Muscodor strobelii
  misc_feature: SGI Peptide ID NO. 571278
  misc_feature (51)..(233): NCBI GI: 145611776 Blast Desc: MGG_00131 [Magnaporthe grisea 70-15] gi|145019023|gb|EDK03302.1| MGG_00131 [Magnaporthe grisea 70-15]
  misc_feature (9)..(265): NCBI GI: 256733186 Blast Desc: NECHADRAFT_79226 [Nectria haematococca mpVI 77-13-4]
  misc_feature (51)..(247): NCBI GI: 261354031 Blast Desc: veA protein [Verticillium albo-atrum VaMs.102]
  misc_feature (50)..(250): NCBI GI: 46124793 Blast Desc: FG06774.1 [Gibberella zeae PH-1]
  misc_feature (40)..(250): NCBI GI: 169619443 Blast Desc: SNOG_12917 [Phaeosphaeria nodorum SN15] gi|111058597|gb|EAT79717.1| SNOG_12917 [Phaeosphaeria nodorum SN15]
  misc_feature (40)..(245): NCBI GI: 189207162 Blast Desc: PTRG_09583 [Pyrenophora tritici-repentis Pt-1C-BFP] gi|187976008|gb|EDU42634.1| PTRG_09583 [Pyrenophora tritici-repentis Pt-1C-BFP]
  misc_feature (52)..(234): NCBI GI: 156045037 Blast Desc: SS1G_09707 [Sclerotinia sclerotiorum 1980] gi|154694102|gb|EDN93840.1| SS1G_09707 [Sclerotinia sclerotiorum 1980]
  misc_feature (52)..(234): NCBI GI: 154298328 Blast Desc: BC1G_11619 [Botryotinia fuckeliana B05.10] gi|150858072|gb|EDN33264.1| BC1G_11619 [Botryotinia fuckeliana B05.10]
  misc_feature (51)..(156): NCBI GI: 164423942 Blast Desc: NCU07553 [Neurospora crassa OR74A] gi|157070298|gb|EAA28610.2| [Neurospora crassa OR74A]
  misc_feature (48)..(229): NCBI GI: 171948706 Blast Desc: RYP2 [Ajellomyces capsulatus]
MSPPHQIWPTQPDSQRMKIADLLSHEQGIEEPKTSRIPQQAVTSLEVASTFRIRVRQQPVAARSCGFGERDRRVIDPPPIVQVTIEDPKASENDKKARLSHKFSIMHCTIWNEAGDQDVSSMPEDFRTQRRLMGTVVSSPFIGLDENDEQGCFFCFPDLSCRTPGSFRLNFSFVVLSPRSVPGNSTPVAAVVMSEVFTVYNAKDFPGMRASTALTRRLKEQGCLISIKKGNEKSRTREESGDEYDEGGEDGEGSGPSSAQRRAKRPRNT

SEQ ID NO: 32720 - DNA, 2944 bp, Muscodor strobelii
  misc_feature: SGI EST ID NO. CUFF.77383.0
  misc_feature: Variant of the nucleotide sequence at SEQ ID NO 32718
gggggatatatgtgctctgcatatgacgcacctgatatgagcccctttctaccgtggtgcgctgctctgtcttgctcttgtcttcaagcggaacgggcctcatgtaacgcatgcttatttctcctctacagctgaggccgcaaggtaacacacaccactcatttaggtacacgcccacactcctgatatatttcttctcttggaagacaagcctgggtagatcgagcttcctgataatacacccggcatctcgtcagtatatcaaacaatactcctctacccggcttcatgtatacgacattgacgacccgtgaacggcaaggagtatgtccgtcttgcgtgtagatgcctcctcatagagccctccacttctacacaagtgatgtatgcagccagaaacgcccgactgtctctacatacctgcctaccttacatcatcccagctttccagcttcacacaaatgactccagatcgccaccccgaaccattggccccgacgttccttctacctggcctctcttagagaagtgatctttagcgtcctgtcacatttctttttccaattgcagctgcatacagtatacagacgcacgctatatgataccgccttcatcttactcgtttcgtcaatcatataggacgcttgcttcaagcacaccggctcgtgcgtatatgggacaacatctatatatgctgactacgatctcgatatctagccagccattctgtacagccgtgccaccatcttgatgtccatcgtctaatttgctctatcgataaatatttgcttcaaacacgccatgattgataccatgactcggcctctagactcgttggggtatgatctttatgctccacggcagtcaccatactgcattcaagatcagaatacccagggtttacgtctacccccgccctctagtctctttcacgatgttcactatcaccaagtcgctcccagtgaacaggaccatatatcctacagccgcgcttcgtatcgaaatatacagggtccagagtcgtcggtatcccaccaatccatacaagcttcaaggccagattccaggctcagcgctcatgacaggaggccgatcgaggcggttgatcaattttctacatctcattcacccacagcgagtgaccaatctgaggaaccatcagatcatttccgacttcgtcagctcactgaagaccagaagccgtcgccggtgacccggatttcacctcgagcttcatttgctcatgaggcatcacagcattcatcttacgtagaggcaaaatctttcagaccgattcaagattctcaggttcgaaatggccaccacgatcattctcccaaggccatgtccccacctcatcagatctggccaacgcagccagactcacagagaatgaagattgcagatctcctcagccacgaacaggggatcgaagagcctaagacttctaggataccgcagcaggccgtcacttctctcgaggtggcgtcgacctttcgcattcgtgtccgccagcagcctgttgccgcaagatcttgcgggtttggtgagagggatcgtagggtcattgacccgccacccatcgtccaggttacgattgaggatcccaaggcttcagaaaatgacaagaaggccaggctatctcacaagttctcgattatgcattgcacgatctggaacgaagctggagatcaagatgtttcatctatgcccgaagattttcgcactcagcgcaggttgatggggacggtggtgtcctcgccattcatagggttggacgaaaacgacgagcagggttgtttcttctgctttccagatctgtcatgcagaacaccgggctcgttccgcttgaattttagctttgttgtcttgagtccacgctcagtaccggggaacagtacgcccgtggccgcggtagttatgagtgaggtcttcacggtttacaacgccaaggatttcccagggatgagggcaagcactgcactcacgagaagactcaaagagcaaggttgcttgatatcaatcaagaagggaaacgagaaatcgcgtacccgtgaggagagcggcgacgaatacgacgagggcggcgaagatggcgaaggcagcgggccgagtagcgcccaaaggcgggctaaacgaccgaggaatacgtgatggcacaacctcaatcgctctgacggcttcctatttacattcttggtaattctgagtacattatggatgaggcaatgaactggcgttcacaactggctggctgctaaacacgaggctatctggcagataatgagacattatagtcggagttttggcgttgttcactgtaaacagtataggtcatgaggaaagaggaatggggaaaaaggacttggcgcaagaacggacctcgtccaggcatgtatcgccggtggtggtgactggctctggtgttttgacgacctggtctcagcagggacggtcattggccaagacatttggcggaagagcaccagttgatggcgatgccaattttcgagtcattcaagcaataccctagatttggagagagaggcttggtccggatccctatctggacatgaagggagagctgcaaccttacgtaactccggccttctaggaggggcagcaataaagtgtgttctttctcatgcactatggacaccatagaatgcgagcgaatgactgatgaacttatgagaaaatatccattcttgtcaatatacctatgaagtaactagcaagctgcatgatattgccagagacgtgcctaagaaggagattcgaattgtaaggagctatcggagctgtgggggtattccgcttctcgggggtgctaggcctagacgagatgagttgatgcggtcgggtctggtcgggtctggaattgggggtccaacagacccccgacgcccgttgttgagtagtagtttaggtagagcgataagag

SEQ ID NO: 32721 - DNA, 1200 bp, Muscodor strobelii
  misc_feature: SGI cDNA ID NO. 571279
  misc_feature: Reduced expression when VOC is produced
  misc_feature: Encodes the peptide sequence at SEQ ID NO 32722
atgctctcgcgtgcgctgcgagtcccgcgagctgcggcgcccctggtgcgcgccagggctcccgtcgccaaaccggccagcgttgctgctctgcggaccgtcaccaccgatgctgcctcgtcacacgtcgacaagagcgccgtccccgacgccgacgacaagcccttccaggtcaccctgagcgacgagagcttcgagacgtacgagctcgaccccccctcctacaacatcgacgtcaccaagaaggagctcaagcagatgtactcggacatggtcgtcgtcaggcagatggagatggccgccgaccggctctacaaggagaagaagatccgcggtttctgccacttgtccaccggacaggaggccgttgctgttggcatcgagcacgccctgactaaggaggacgatgtcatcactgcttaccgatgccacggttttgccctgatgcgtggtgcctccgtgcgctccatcatcggcgagctgttgggccgacgcgagggcatcgcctacggcaagggtggttccatgcacatgttcagcaagggcttttacggtggcaacggcatcgtcggtgcccaggttcccgtcggtgctgggctggccttcgcccacaagtacatgggccgcaagaatgcctccgtcatcctctacggcgatggcgccagcaatcagggccaggtctttgaggccttcaacatggccaagctctggggcctgcctgctctgttcggctgtgagaataacaagtacggtatgggtactgctgccaaccgatcctctgccctcaccgactactacaagcgtggccagtacatccccggtctcaaggtcaacgactgggccgttgccgagaacggtcccctcgtcctcgaatacgtcacttaccgatacggcggtcactccatgtccgacccgggcaccacctaccgaactcgcgaggagatccagcgcatgcgatcaaccaatgaccctatcgccggcctcaagcagaagattttggattggggtgtctgcaccgaggacgagctcaagggcctggacaaagacgcacgcaagcttgtgaacgacgaggtcgccgccgccgaggctatggccgtgcctgagacgaagcccgagatcctgttcgaggatatctacgccaagggcagcgaaccgcaattcttgcggggaagaactccaaacgagaacttctatttctaa

SEQ ID NO: 32722 - protein, 399 aa, Muscodor strobelii
  misc_feature: SGI Peptide ID NO. 571279
  misc_feature (89)..(370): Pfam Id: PF00676 Pfam Desc: Dehydrogenase E1 component
  misc_feature (89)..(278): Pfam Id: PF00676 Pfam Desc: Dehydrogenase E1 component
  misc_feature (279)..(370): Pfam Id: PF00676 Pfam Desc: Dehydrogenase E1 component
  misc_feature (1)..(399): NCBI GI: 261360158 Blast Desc: pyruvate dehydrogenase E1 component subunit alpha [Verticillium albo-atrum VaMs.102]
  misc_feature (1)..(399): NCBI GI: 256729731 Blast Desc: [Nectria haematococca mpVI 77-13-4]
  misc_feature (1)..(399): NCBI GI: 39976937 Blast Desc: conserved [Magnaporthe grisea 70-15] gi|145016222|gb|EDK00712.1| conserved [Magnaporthe grisea 70-15]
  misc_feature (1)..(399): NCBI GI: 154318926 Blast Desc: BC1G_02852 [Botryotinia fuckeliana B05.10] gi|150857982|gb|EDN33174.1| BC1G_02852 [Botryotinia fuckeliana B05.10]
  misc_feature (1)..(399): NCBI GI: 156044875 Blast Desc: SS1G_09626 [Sclerotinia sclerotiorum 1980] gi|154694021|gb|EDN93759.1| SS1G_09626 [Sclerotinia sclerotiorum 1980]
  misc_feature (1)..(399): NCBI GI: 46122153 Blast Desc: FG05454.1 [Gibberella zeae PH-1]
  misc_feature (1)..(399): NCBI GI: 116192013 Blast Desc: CHGG_05724 [Chaetomium globosum CBS 148.51] gi|88181637|gb|EAQ89105.1| CHGG_05724 [Chaetomium globosum CBS 148.51]
  misc_feature (27)..(399): NCBI GI: 85083464 Blast Desc: pyruvate dehydrogenase E1 component alpha subunit, mitochondrial [Neurospora crassa OR74A] gi|28918208|gb|EAA27886.1| pyruvate dehydrogenase E1 component
  misc_feature (1)..(399): NCBI GI: 189209542 Blast Desc: pyruvate dehydrogenase E1 component subunit alpha [Pyrenophora tritici-repentis Pt-1C-BFP] gi|187977196|gb|EDU43822.1| pyruvate dehydrogenase E1 component
  misc_feature (1)..(399): NCBI GI: 261193072 Blast Desc: pyruvate dehydrogenase E1 component alpha subunit [Ajellomyces dermatitidis SLH14081] gi|239589077|gb|EEQ71720.1| pyruvate dehydrogenase E1 component alpha subunit [Ajellomyces E1
  misc_feature (34)..(399): SWISSPROT Homolog: EC 1.2.4.1 Pyruvate dehydrogenase (acetyl-transferring)
  misc_feature: Useful for introducing or modulating the production of volatile compounds
  misc_feature: Useful for fungicidal and/or biocontrol applications
MLSRALRVPRAAAPLVRARAPVAKPASVAALRTVTTDAASSHVDKSAVPDADDKPFQVTLSDESFETYELDPPSYNIDVTKKELKQMYSDMVVVRQMEMAADRLYKEKKIRGFCHLSTGQEAVAVGIEHALTKEDDVITAYRCHGFALMRGASVRSIIGELLGRREGIAYGKGGSMHMFSKGFYGGNGIVGAQVPVGAGLAFAHKYMGRKNASVILYGDGASNQGQVFEAFNMAKLWGLPALFGCENNKYGMGTAANRSSALTDYYKRGQYIPGLKVNDWAVAENGPLVLEYVTYRYGGHSMSDPGTTYRTREEIQRMRSTNDPIAGLKQKILDWGVCTEDELKGLDKDARKLVNDEVAAAEAMAVPETKPEILFEDIYAKGSEPQFLRGRTPNENFYF

SEQ ID NO: 32723 - DNA, 1686 bp, Muscodor strobelii
  misc_feature: SGI EST ID NO. CUFF.77500.1
  misc_feature: Variant of the nucleotide sequence at SEQ ID NO 32721
cgggcagaggcgccgggaccaatcccagtcgccctagcctcaaccattggacctggagcttactactagtaataattatctccccccgaaagaaaaaaacacagcgaaacacccgacaaggagcaactacctaagtcgcgagactgcagcccgccaaaccccaatctccaatcttgtcgtccgccgtctcgactgcatcaattgccgttctataccctccggctgctctcgctctctctccgtcccgcgtcacatcgcccgtcatgctctcgcgtgcgctgcgagtcccgcgagctgcggcgcccctggtgcgcgccagggctcccgtcgccaaaccggccagcgttgctgctctgcggaccgtcaccaccgatgctgcctcgtcacacgtcgacaagagcgccgtccccgacgccgacgacaagcccttccaggtcaccctgagcgacgagagcttcgagacgtacgagctcgaccccccctcctacaacatcgacgtcaccaagaaggagctcaagcagatgtactcggacatggtcgtcgtcaggcagatggagatggccgccgaccggctctacaaggagaagaagatccgcggtttctgccacttgtccaccggacaggaggccgttgctgttggcatcgagcacgccctgactaaggaggacgatgtcatcactgcttaccgatgccacggttttgccctgatgcgtggtgcctccgtgcgctccatcatcggcgagctgttgggccgacgcgagggcatcgcctacggcaagggtggttccatgcacatgttcagcaagggcttttacggtggcaacggcatcgtcggtgcccaggttcccgtcggtgctgggctggccttcgcccacaagtacatgggccgcaagaatgcctccgtcatcctctacggcgatggcgccagcaatcagggccaggtctttgaggccttcaacatggccaagctctggggcctgcctgctctgttcggctgtgagaataacaagtacggtatgggtactgctgccaaccgatcctctgccctcaccgactactacaagcgtggccagtacatccccggtctcaaggtcaacggtatggatgtcttggccgtcaaggcagccgtcaagtaacgggaaaagactgggccgttgccgagaacggtcccctcgtcctcgaatacgtcacttaccgatacggcggtcactccatgtccgacccgggcaccacctaccgaactcgcgaggagatccagcgcatgcgatcaaccaatgaccctatcgccggcctcaagcagaagattttggattggggtgtctgcaccgaggacgagctcaagggcctggacaaagacgcacgcaagcttgtgaacgacgaggtcgccgccgccgaggctatggccgtgcctgagacgaagcccgagatcctgttcgaggatatctacgccaagggcagcgaaccgcaattcttgcggggaagaactccaaacgagaacttctatttctaattgtaatccaccgaattattgtagaggtatgcaccgactactgacaacgtataacggattagaatcctatgtatccctgtagtataatttagaatggttggcaggcctctggtttggagtatcatgggattgttttaactagcatataaatttatccgagcttccgtgttcctgat

SEQ ID NO: 32724 - DNA, 1020 bp, Muscodor strobelii
  misc_feature: SGI cDNA ID NO. 571280
  misc_feature: Encodes the peptide sequence at SEQ ID NO 32725
atggcgactagcgagcaagaagagactcgaaaagatgaccaaatttataaacctgtcgtctgtttcctcgggccggtatcgtcatatacgcatcaggctacaatgggggctttctcagaagatcgtttcgagttgatgcccgtcactactatcaaagatatatttgataccacgcagtcaggtcgagctacattcggcgtggtcccgtttgagaactcaaccaatggatctgtggtgttcactctagacaacttcgcagatcggacaaatatatacgcagacttgaatgtctgccgagaagtatatctggatgtgcatcattgcctactaggtcacatcaacaaatctgccaccatacaacagacaccaggggcatcgcgatctaagcccctacacgacttatcgcacatccgccgtatatacagccacccacaagccttcgggcaatgtagagccttccttggggcgtggctccgcggcatagagacgatagacgtaagcagcacgagtcgagctgcagagctagctttcgccgataagacgggcgagagcgcggcaatcagctctgcggcagcggcgtcactgttgggtctcgacatgctagcacagaacatcgaagatcgcgaagataacacgacgcgcttttttgtcttgcggcgtggtacaacgccaatcccaggggaagaagaccccttaccggaccctaacgaagacgacgactctgcacttctgtccaaaacaaagtcactattatccttcacggtgccacaccggagtccaggagccctcgcagatctcctctcgtgtttccgccgcgaaggcttgaatcttacgagtatcaatagccgacccagtctaacgggtgacacggccttcgaatacgtcttctttgtcgagtttgagggccatcggtaccgtgatccacgaggccgcgttgcacgtgtgttggaagatgtaaaggttactgcgaggacgtggagatggttgggtagttgggagaatatgttgcctagggcttga

SEQ ID NO: 32725 - protein, 339 aa, Muscodor strobelii
  misc_feature: SGI Peptide ID NO. 571280
  misc_feature (249)..(317): Pfam Id: PF01842 Pfam Desc: ACT domain
  misc_feature (20)..(223): Pfam Id: PF00800 Pfam Desc: Prephenate dehydratase
  misc_feature (17)..(336): NCBI GI: 46122209 Blast Desc: FG05482.1 [Gibberella zeae PH-1]
  misc_feature (32)..(338): NCBI GI: 261358221 Blast Desc: PDT domain-containing protein [Verticillium albo-atrum VaMs.102]
  misc_feature (18)..(336): NCBI GI: 154311401 Blast Desc: BC1G_06553 [Botryotinia fuckeliana B05.10] gi|150850950|gb|EDN26143.1| BC1G_06553 [Botryotinia fuckeliana B05.10]
  misc_feature (33)..(336): NCBI GI: 156065203 Blast Desc: SS1G_00612 [Sclerotinia sclerotiorum 1980] gi|154691471|gb|EDN91209.1| SS1G_00612 [Sclerotinia sclerotiorum 1980]
  misc_feature (17)..(336): NCBI GI: 189189972 Blast Desc: PTRG_00992 [Pyrenophora tritici-repentis Pt-1C-BFP] gi|187972931|gb|EDU40430.1| PTRG_00992 [Pyrenophora tritici-repentis Pt-1C-BFP]
  misc_feature (17)..(285): NCBI GI: 169612621 Blast Desc: SNOG_09435 [Phaeosphaeria nodorum SN15] gi|111062507|gb|EAT83627.1| SNOG_09435 [Phaeosphaeria nodorum SN15]
  misc_feature (51)..(317): NCBI GI: 164429075 Blast Desc: NCU00409 [Neurospora crassa OR74A] gi|157072399|gb|EAA28059.2| conserved [Neurospora crassa OR74A]
  misc_feature (17)..(336): NCBI GI: 240109374 Blast Desc: prephenate dehydratase, [Coccidioides posadasii C735 delta SOWgp]
  misc_feature (17)..(336): NCBI GI: 119182714 Blast Desc: CIMG_06373 [Coccidioides immitis RS]
  misc_feature (20)..(336): NCBI GI: 121712582 Blast Desc: chorismate mutase/prephenate dehydratase [Aspergillus clavatus NRRL 1] gi|119402055|gb|EAW12476.1| chorismate mutase/prephenate dehydratase [Aspergillus clavatus NRRL 1]
  misc_feature (20)..(336): SWISSPROT Homolog: EC 5.4.99.5 Chorismate mutase
  misc_feature (20)..(336): SWISSPROT Homolog: EC 4.2.1.51 Prephenate dehydratase
MATSEQEETRKDDQIYKPVVCFLGPVSSYTHQATMGAFSEDRFELMPVTTIKDIFDTTQSGRATFGVVPFENSTNGSVVFTLDNFADRTNIYADLNVCREVYLDVHHCLLGHINKSATIQQTPGASRSKPLHDLSHIRRIYSHPQAFGQCRAFLGAWLRGIETIDVSSTSRAAELAFADKTGESAAISSAAAASLLGLDMLAQNIEDREDNTTRFFVLRRGTTPIPGEEDPLPDPNEDDDSALLSKTKSLLSFTVPHRSPGALADLLSCFRREGLNLTSINSRPSLTGDTAFEYVFFVEFEGHRYRDPRGRVARVLEDVKVTARTWRWLGSWENMLPRA

SEQ ID NO: 32726 - DNA, 2792 bp, Muscodor strobelii
  misc_feature: SGI EST ID NO. CUFF.77394.1
  misc_feature: Variant of the nucleotide sequence at SEQ ID NO 32724
cttaaatgagtcttaagcatcataatcgatattggcttctttcatattctggttgtggatctatcataaagtccaacttaatacgaaatatcacccaaacaagcttcctaataatcatccaaactgatattgccattgccaagagcaagtcaatcgaactgcgaattttgcagtaatatttgtactttattctaccatggcgactagcgagcaagaagagactcgaaaagatgaccaaatttataaacctgtcgtctgtttcctcgggccggtatcgtcatatacgcatcaggctacaatgggggctttctcagaagatcgtttcgagttgatgcccgtcactactatcaaagatatatttgataccacgcagtcaggtcgagctacattcggcgtggtcccgtttgagaactcaaccaatggatctgtggtgttcactctagacaacttcgcagatcggacaaatatatacgcagacttgaatgtctgccgagaagtatatctggatgtgcatcattgcctactaggtcacatcaacaaatctgccaccatacaacagacaccaggggcatcgcgatctaagcccctacacgacttatcgcacatccgccgtatatacagccacccacaagccttcgggcaatgtagagccttccttggggcgtggctccgcggcatagagacgatagacgtaagcagcacgagtcgagctgcagagctagctttcgccgataagacgggcgagagcgcggcaatcagctctgcggcagcggcgtcactgttgggtctcgacatgctagcacagaacatcgaagatcgcgaagataacacgacgcgcttttttgtcttgcggcgtggtacaacgccaatcccaggggaagaagaccccttaccggaccctaacgaagacgacgactctgcacttctgtccaaaacaaagtcactattatccttcacggtgccacaccggagtccaggagccctcgcagatctcctctcgtgtttccgccgcgaaggcttgaatcttacgagtatcaatagccgacccagtctaacgggtgacacggccttcgaatacgtcttctttgtcgagtttgagggccatcggtaccgtgatccacgaggccgcgttgcacgtgtgttggaagatgtaaaggttactgcgaggacgtggagatggttgggtagttgggagaatatgttgcctagggcttgagtatgcctacgtagatctaggagaagaagagcatggagtttgaagaagcagtaaatcaaattcaaaatatagaggcgcatgtttagcaactgtgagatcataaatgacaatagacattagacatagtacccacggcttactaactatagcggttgaacccccatgctcaacgaactctcgcttttgagtaaactgcaaattatcatgtagatgaggaatcgcattcctcgtacccaggtgcacatttcaataacgtagatatctctgattcaacgtcgttgtacagccggaccaagcattatgcaagatggcaattattagcatatgtatcagcttgctaagttggtacctatgagcctcgattccgtgcattcggcctagaaggcaatctccacgatatatgttcttcttggtcggacaagaagatacgtcggcactcttcttgattctcgtaggggcatttctcggtagatatgactctggagtcgacattcatcaacgagcctccaactctatcaagtcctagagtaaccggacatatgaactcatcagtgttgtcatcgtagtcatcctcgtccgagctcagataagcatcgaagtacttgaaaagcctatgttcggcgacctgcgtgacttcgaaatcctcgagctcgccgcgcaacacgagagccgaatcgtcaagtttcccctggccgaggttcagaggctggacactgatcaagcaccgcttatccttgtggaatatcaagccaaagcgccgtccagtcggacttgaatatttcagagcaaagatagctcccggccgttggcttaagcgatgtatccatctcgtttcgatatcgtatatcgcaggaggaacggtaataagagtctcgagttcaaagccaggaactcggcgaaggagctttctgtcgagctgaatgctagtcgtgggcacatgttctgtaggcaaactttgtatctttatagtcttggtgtgagacttgaggtactcggcgctcggtactgacagacgtatggcaagaaaggacttatcatcagacctcgtataaaagtcatgaccccagggatataacactatgccgagagtatgggagccttcgcctttcaaccggaaaccgaagagcgccagtatcacgtcttccgaatcgggaggaattcgttgggttttcgcaacatattttgatccgtggagcttcatgacaggcactgttacctgcaacaacttattctgaacaactgggttcattgccgcaagctgcggccaatctggattgcactctatcgaatccccttcgagaaagctaaatggctcggttgccagggaatttcccaaatgccttctgtgcctggctcctccctccatcttaacggaatctggatgctccacgtcaaagccgaagatggtggcatcgtactcttttctcaaaatctccacttgaagtcgttcaaaagctccttcacccccttctccgtacagcaatggcatgtggacggaaaaaattccaagaaggcaataagattcatcttcagctcgactagtccgtcgttgtgaagcccactatgaagactagag

SEQ ID NO: 32727 - DNA, 207 bp, Muscodor strobelii
  misc_feature: SGI cDNA ID NO. 571281
  misc_feature: Encodes the peptide sequence at SEQ ID NO 32728
atggaagagtccctcgctgcaaacgagggacagtctcaagcagtcaagtccaagcaagctcccaatggagacgaaacaaagcgccaattgccagcagcaaccgccaaagaggaagcgccaccgacgccgagaggtgaaaaagagacaacccgcgaacgtagtacagaaaatgggccgtacaggcgacccgttgccttgttcctgtag

SEQ ID NO: 32728 - protein, 68 aa, Muscodor strobelii
  misc_feature: SGI Peptide ID NO. 571281
MEESLAANEGQSQAVKSKQAPNGDETKRQLPAATAKEEAPPTPRGEKETTRERSTENGPYRRPVALFL

SEQ ID NO: 32729 - DNA, 2321 bp, Muscodor strobelii
  misc_feature: SGI EST ID NO. CUFF.77434.0
  misc_feature: Variant of the nucleotide sequence at SEQ ID NO 32727
ggaatttgttgtgggccactagcccgccctgcgttgtgctgtgcctgaggcagtttggataattaattacctactattgactctggctgtgcctgtcaagcctgcaaacctgtcaatacctaagatattcacgtactttttagctcatctgggttggtgattacatacagccaaggtgcgccggtccagcctttttcctgagaggtccacggcgtttcctccatcgcccaggttttcctccctccctctcacaacgccttcgctgtgttgagtatatctcttgatttacggcatcctacagaatagaagtctcgggatttaccatccgctgctcgctccttcacgggagccaccttcaagatgagtgacgccgcagcgactgaggccgagaagaatatcgagatatggaaggtcaagaaattgatcaagcgcctcgaggccgcccgtggcaatggaacgagcatgatttccctgatcattccgcccaaggatcaagtttcccgcatctctaagatgttggctgaagaatacggaaccgcctccaacatcaaatcgcgtgtcaaccgacagtctgtgctctctgccatcacctccacccagcagcgactcaagctctacaacaaagtccctccgaatgggctcgtcgtctactgtggtgaaatcctgacctccgagggcaaggagcgaaaggtcaacatcgacttcgagcccttcaagcccatcaatacctcgctgtacctttgcgacaacaaattccacactgaagccctcgccgagcttctcgagtccgatcagcgcttcggcttcatcatcatggacggcaacggagccctgttcggaacactgagcggaaacactcgtgacgtggtccacaaattctcggtcgaccttcccaagaagcacggtcgtggtggtcaatctgcgcttcgtttcgctcgtctgcgtgaagagaagcgccacaactatgtccgcaaagtcgctgagttggcagtgcagaacttcatcaccaacgacaagcccaacgttgctggtattattctagcgggttctgctgatttcaagaacgacttgaatgcatccgatatgttcgacaatcgtttgcaatccaaggtcatcaaggttgtagatgtctcgtacggtggtgagaacggattcaaccaagccatcgagttgtcttcagagacccttggtaacgtcaagttcatccaagagaagaaactcatcggcaagtatttcgaggaaatcagccaagacactggtaaggtctgctatggtatcgacgacacgctcaaagctctggagctcggtgctgtggagatcctgattgtgttcgaaaacctcgagatcacgcgctacgtccttaagagctccagtggttctgaagtggtcctccacctgaccaagcaacaagaggccaacgatcgcgaacgagaactcttcatggacaaagagtcccgccaggagatggaacttgtctcttcagactcattcctcgagtggatcgccgaacactacaaagacttcggtacgaacctcgagttcgtgtcagatagatctaccgaaggcaatcagttcgtgaagggctttggtggtattggtggtatcctgcgttacaaggtgaacttcgagcaattagctgaagtagatgacgacgatgactactatgacgattgacagatggaagagtccctcgctgcaaacgagggacagtctcaagcagtcaagtccaagcaagctcccaatggagacgaaacaaagcgccaattgccagcagcaaccgccaaagaggaagcgccaccgacgccgagaggtatgacaacctcgtatgcccagagacggcttctcaagaccggtccggcgaattccgagcatactgctcgacaggtcgccatgcctagcccgcttcggtctgtgacaacggcttgagtataccgctcaggtgaaaaagagacaacccgcgaacgtagtacagaaaatgggccgtacaggcgacccgttgccttgttcctgtagcatcgtagcgctttacgtcagcgcggatgttaaatcgctgaacactctctaagagatcctcacaatttgtgctatcctcctaactaccccatgtcacgaggacctgctgccaagttcacaacgcgggtagtagatattatttagtccactcattcagaccaagattgctatgcacacacagtaggcgcacgctaagcgctaataaaatgtctttgacaatttcctgtcccttcggtgatttgtgtatgataacttccgagtacatgtcaagatacatttgattagtgatagtaacgatgtattccgca

SEQ ID NO: 32730 - DNA, 1314 bp, Muscodor strobelii
  misc_feature: SGI cDNA ID NO. 571282
  misc_feature: Encodes the peptide sequence at SEQ ID NO 32731
atgagtgacgccgcagcgactgaggccgagaagaatatcgagatatggaaggtcaagaaattgatcaagcgcctcgaggccgcccgtggcaatggaacgagcatgatttccctgatcattccgcccaaggatcaagtttcccgcatctctaagatgttggctgaagaatacggaaccgcctccaacatcaaatcgcgtgtcaaccgacagtctgtgctctctgccatcacctccacccagcagcgactcaagctctacaacaaagtccctccgaatgggctcgtcgtctactgtggtgaaatcctgacctccgagggcaaggagcgaaaggtcaacatcgacttcgagcccttcaagcccatcaatacctcgctgtacctttgcgacaacaaattccacactgaagccctcgccgagcttctcgagtccgatcagcgcttcggcttcatcatcatggacggcaacggagccctgttcggaacactgagcggaaacactcgtgacgtggtccacaaattctcggtcgaccttcccaagaagcacggtcgtggtggtcaatctgcgcttcgtttcgctcgtctgcgtgaagagaagcgccacaactatgtccgcaaagtcgctgagttggcagtgcagaacttcatcaccaacgacaagcccaacgttgctggtattattctagcgggttctgctgatttcaagaacgacttgaatgcatccgatatgttcgacaatcgtttgcaatccaaggtcatcaaggttgtagatgtctcgtacggtggtgagaacggattcaaccaagccatcgagttgtcttcagagacccttggtaacgtcaagttcatccaagagaagaaactcatcggcaagtatttcgaggaaatcagccaagacactggtaaggtctgctatggtatcgacgacacgctcaaagctctggagctcggtgctgtggagatcctgattgtgttcgaaaacctcgagatcacgcgctacgtccttaagagctccagtggttctgaagtggtcctccacctgaccaagcaacaagaggccaacgatcgcgaacgagaactcttcatggacaaagagtcccgccaggagatggaacttgtctcttcagactcattcctcgagtggatcgccgaacactacaaagacttcggtacgaacctcgagttcgtgtcagatagatctaccgaaggcaatcagttcgtgaagggctttggtggtattggtggtatcctgcgttacaaggtgaacttcgagcaattagctgaagtagatgacgacgatgactactatgacgattga

SEQ ID NO: 32731 - protein, 437 aa, Muscodor strobelii
  misc_feature: SGI Peptide ID NO. 571282
  misc_feature (8)..(142): Pfam Id: PF03463 Pfam Desc: eRF1 domain 1
  misc_feature (146)..(278): Pfam Id: PF03464 Pfam Desc: eRF1 domain 2
  misc_feature (281)..(420): Pfam Id: PF03465 Pfam Desc: eRF1 domain 3
  misc_feature (1)..(436): NCBI GI: 46125099 Blast Desc: ERF1_PODAN Eukaryotic peptide chain release factor subunit 1 (eRF1) (Eukaryotic release factor 1) [Gibberella zeae PH-1]
  misc_feature (3)..(437): NCBI GI: 85084324 Blast Desc: eukaryotic peptide chain release factor subunit 1 [Neurospora crassa OR74A] gi|18250308|gb|AAL17659.1| eukaryotic release factor 1 [Neurospora crassa] gi|28918385|gb|EAA28060.1| 1
  misc_feature (1)..(428): NCBI GI: 171686490 Blast Desc: protein product [Podospora anserina] gi|15213985|sp|O59948.1|ERF1_PODAN RecName: Full=Eukaryotic peptide chain release factor subunit 1; Short=Eukaryotic release
  misc_feature (1)..(436): NCBI GI: 225562239 Blast Desc: eukaryotic peptide chain release factor subunit 1 [Ajellomyces capsulatus G186AR]
  misc_feature (1)..(437): NCBI GI: 240277322 Blast Desc: eukaryotic peptide chain release factor subunit 1 [Ajellomyces capsulatus H143]
  misc_feature (1)..(436): NCBI GI: 154284169 Blast Desc: eukaryotic peptide chain release factor subunit 1 [Ajellomyces capsulatus NAm1] gi|150411060|gb|EDN06448.1| eukaryotic peptide chain release factor subunit 1 [Ajellomyces
  misc_feature (1)..(428): NCBI GI: 116208020 Blast Desc: eukaryotic peptide chain release factor subunit 1 [Chaetomium globosum CBS 148.51] gi|88183900|gb|EAQ91368.1| eukaryotic peptide chain release factor subunit 1 [Chaetomium CBS
  misc_feature (1)..(428): NCBI GI: 156065205 Blast Desc: eukaryotic peptide chain release factor subunit 1 [Sclerotinia sclerotiorum 1980] gi|154691472|gb|EDN91210.1| eukaryotic peptide chain release factor subunit 1 [Sclerotinia
  misc_feature (1)..(436): NCBI GI: 226294380 Blast Desc: eukaryotic peptide chain release factor subunit 1 [Paracoccidioides brasiliensis Pb18]
  misc_feature (1)..(436): NCBI GI: 261190857 Blast Desc: peptide chain release factor eRF/aRF [Ajellomyces dermatitidis SLH14081] gi|239590881|gb|EEQ73462.1| peptide chain release factor eRF/aRF [Ajellomyces dermatitidis SLH14081] chain
MSDAAATEAEKNIEIWKVKKLIKRLEAARGNGTSMISLIIPPKDQVSRISKMLAEEYGTASNIKSRVNRQSVLSAITSTQQRLKLYNKVPPNGLVVYCGEILTSEGKERKVNIDFEPFKPINTSLYLCDNKFHTEALAELLESDQRFGFIIMDGNGALFGTLSGNTRDVVHKFSVDLPKKHGRGGQSALRFARLREEKRHNYVRKVAELAVQNFITNDKPNVAGIILAGSADFKNDLNASDMFDNRLQSKVIKVVDVSYGGENGFNQAIELSSETLGNVKFIQEKKLIGKYFEEISQDTGKVCYGIDDTLKALELGAVEILIVFENLEITRYVLKSSSGSEVVLHLTKQQEANDRERELFMDKESRQEMELVSSDSFLEWIAEHYKDFGTNLEFVSDRSTEGNQFVKGFGGIGGILRYKVNFEQLAEVDDDDDYYDD

SEQ ID NO: 32732 - DNA, 2321 bp, Muscodor strobelii; identical to SEQ ID NO: 32729
  misc_feature: SGI EST ID NO. CUFF.77434.0
  misc_feature: Variant of the nucleotide sequence at SEQ ID NO 32730

SEQ ID NO: 32733 - DNA, 1701 bp, Muscodor strobelii
  misc_feature: SGI cDNA ID NO. 571283
  misc_feature: Encodes the peptide sequence at SEQ ID NO 32734
atggctgacgacgactcttctgagctctcgtccgtctcgtctttgtcctcggcccccgaggacgacggcgatgtgcagctgaagcgcgagaagggcattctaaagttcttccacaagctccctaaagggctccaagcctacccattcattgtcatgttccgcagccgtttcaacgagtctatgcccaagtccctagccaatttcggcccgcaagaactagagagagatgtcactgaatcggtgcctggagaacgtgtggaacacttcttgtgcgccgtgttgggactgctgctgaatcgaaagcaggacgtgaagcccggacattacaatcgagcacttgaagatgccatttcatcccacaagaaccaatgggcaaaagattgggaggacaagaacccactctctggtggcaagagcttcaccaccatgaaccctaccgaacggttgacgctgctcaaaaccctgatcctatgggccttgtcctcatccgaaaccatcaagacattcatcaaccagtcgtacaagcaaaatcgccacgaagacgacctgaaccaacctctgtccgtccagccctggggctcagacagtgataaacgacgatacttcctagtcgagggtctcgacgacacccactttcgcgtatatcgagagagcaaccctgccggttttaacagaacttggtggaacgttgctggcagcatcgaggagctcactgccttatgcgataagctccagacggtagatggcggccccaaagcaaagaagctggcgcaaaagatgctcgcagctgttccacgcttcgaggcgaccgaggagaagcgcaagcgacgcgaataccgcctcatgcgcaaggaacagttcaagcggcctgaaccgggcttctctatgtatgagggccggacacgtggcaagcgcatgaagtacacctactctgacgacgaggacttccttagcgactcgacctcgcgtcgatctacccgaaacactggtaccaatactccagctgagcccacaactactgccagtggtcggcagatcaaggccccctcaagaatgacggtggatgcaaacaacaacattgtaaccacaagtccgacccaggtgagcgaagagagacattcaaaggagccgtccgtcggacctggaggaaggccacgacgctcggcagccgtcagtcaagccaccaacggctacgccgccaagaacaaacaaaactatgattccgaggatgaagaagacgaaagtcccgatctcggtgatgacgaagatgaggatgaccacgtccctgatgcggacagtgaggaagaagaagaggaggaggaggaggaagagttcgacggggatgaggatgaacccatggaggatgacgatcttcaggacgtccccaagagcaagataattaagctcaagtactcacccacgtccaagaagaccaacggtgtcgacttcaacgccttccgatatgatgcgggaggtagtaaagaatctacttccgcctccgaggcaaaaaccgcctctacaaacgaagcaaccgtagcggacaagagcgaagagagcatcgccgtagtagctactgctacgaaaaagtccacaccccccgccactcccgtcctgagctcactgcagtcgacgtctctggcttttagagaaagcccagacaagacgcaacagaagccagtcgatcgtgctccggcgaactag

SEQ ID NO: 32734 - protein, 566 aa, Muscodor strobelii
  misc_feature: SGI Peptide ID NO. 571283
  misc_feature (49)..(562): NCBI GI: 256733144 Blast Desc: NECHADRAFT_37796 [Nectria haematococca mpVI 77-13-4]
  misc_feature (20)..(554): NCBI GI: 171686486 Blast Desc: protein product [Podospora anserina] gi|170943204|emb|CAP68857.1| protein product [Podospora anserina]
  misc_feature (49)..(562): NCBI GI: 46125105 Blast Desc: FG06930.1 [Gibberella zeae PH-1]
  misc_feature (61)..(555): NCBI GI: 261358341 Blast Desc: conserved [Verticillium albo-atrum VaMs.102]
  misc_feature (20)..(565): NCBI GI: 116208016 Blast Desc: CHGG_03301 [Chaetomium globosum CBS 148.51] gi|88183898|gb|EAQ91366.1| CHGG_03301 [Chaetomium globosum CBS 148.51]
  misc_feature (1)..(429): NCBI GI: 39976731 Blast Desc: MGG_06268 [Magnaporthe grisea 70-15] gi|145016336|gb|EDK00826.1| MGG_06268 [Magnaporthe grisea 70-15]
  misc_feature (20)..(429): NCBI GI: 85084332 Blast Desc: NCU00412 [Neurospora crassa OR74A] gi|28918387|gb|EAA28062.1| [Neurospora crassa OR74A]
  misc_feature (18)..(408): NCBI GI: 156065177 Blast Desc: SS1G_00599 [Sclerotinia sclerotiorum 1980] gi|154691458|gb|EDN91196.1| SS1G_00599 [Sclerotinia sclerotiorum 1980]
  misc_feature (25)..(559): NCBI GI: 154311433 Blast Desc: BC1G_06569 [Botryotinia fuckeliana B05.10] gi|150850966|gb|EDN26159.1| BC1G_06569 [Botryotinia fuckeliana B05.10]
  misc_feature (49)..(534): NCBI GI: 240109104 Blast Desc: CPC735_026090 [Coccidioides posadasii C735 delta SOWgp]
MADDDSSELSSVSSLSSAPEDDGDVQLKREKGILKFFHKLPKGLQAYPFIVMFRSRFNESMPKSLANFGPQELERDVTESVPGERVEHFLCAVLGLLLNRKQDVKPGHYNRALEDAISSHKNQWAKDWEDKNPLSGGKSFTTMNPTERLTLLKTLILWALSSSETIKTFINQSYKQNRHEDDLNQPLSVQPWGSDSDKRRYFLVEGLDDTHFRVYRESNPAGFNRTWWNVAGSIEELTALCDKLQTVDGGPKAKKLAQKMLAAVPRFEATEEKRKRREYRLMRKEQFKRPEPGFSMYEGRTRGKRMKYTYSDDEDFLSDSTSRRSTRNTGTNTPAEPTTTASGRQIKAPSRMTVDANNNIVTTSPTQVSEERHSKEPSVGPGGRPRRSAAVSQATNGYAAKNKQNYDSEDEEDESPDLGDDEDEDDHVPDADSEEEEEEEEEEEFDGDEDEPMEDDDLQDVPKSKIIKLKYSPTSKKTNGVDFNAFRYDAGGSKESTSASEAKTASTNEATVADKSEESIAVVATATKKSTPPATPVLSSLQSTSLAFRESPDKTQQKPVDRAPAN

SEQ ID NO: 32735 - DNA, 4978 bp, Muscodor strobelii
  misc_feature: SGI EST ID NO. CUFF.77436.1
  misc_feature: Variant of the nucleotide sequence at SEQ ID NO 32733
tgaacaccgcccacatttgcccacaacctaacatcgactcattgtcatcgtcctcctgccgacatcccaatgaaacaacgacattgactgctgcacagggcatggcatcaaaacgcagcatagtcacacacttatgctcaaggactctatgtactgactgcggattcccagggcaacgatgcaaatgtctgttgatttgacatccagaccaatgtcaattgaatccgagacagatcaccacgtgttgtggcttattattgaccagaccaagcggcaagctccatcatgatgttgatcgttttggggtgcatcgggtgggtaaaaccgaaccgttgaccctccgctatggatgcaattgctccttttcacctcaacgacaatgcagcctgcttcggctgcctgaccaaggtcatcacgcgtttttggtgtatcatcaaattatttgaccataaatggtctttataaactatcagcggctgttcgtattccctgcaaacttgttttggactcattgagactgctatgcctgataagtccactgcacccgggccgccgttctactccctccgtggaagaaaccaattgagcaggcatgctcagctctgctatcagacaggcggtcggagaaatgacgctcaaaatgaagtggctcgtgttcttgtgaccagctatgctcgcatccacgagatgagactcatgattatgagaccaacatcaattcccacgagtcttttatagcgctgcatggcttgttccttatcggactggcttgtattgccagaacaaatatctggtactgctgtcatggctcctgcggaaatttcaaatcctggtatgcacacaatttgtgctgttgagcctccaactcctggctgtggtccctggtacacaccatggggggttgcgagagcttcaagttggagatttacgccggcccaaaaccacaatcaaaaaactattctcattccaagataaggtgggccgcttatcattggaatgacagggctctcaatcccctagaactgcctacaccgacaaatcatcaagccacagcagaatatctgtcaggaaaaagtattcaatcatcaagcttgagcgaatcgtggtggctccggcgcttcaagagcaccccaatgccatgctccaccaaagcggcaggaatgctttgggacagtcgaatcagtctgtcatggcaaactgtagagctgctttgtcaccctagaagtgcagcagaaaaggccaccttgaccacagtcttctgttattgcatgcttgctgtgcaagactggggacagttctgagcggttctcattaattgctgtcaggatcaaagatgttgataagagagctggaatgaaaaagaggatcatctgttgcaagagtattggagagacaaagggcggacctcacagtctaccttccttgggctgtggctactcctgtgcttgtcatgtcctggatggcagtggtgttgtgatatttatataggactgatgaatagacgaaagaaaccctggcctatcagatctgctggcgtctctcctggttgatatgcggctaagcttcctgggtgaaatttattagcgtgggttccgaaattgtgacctcttgaccactttccaccttgctcacctctccacacctgcattccactgcacgcaccaccaccaccacccaactttccatcaaccttaccctccgcgcctgaccccagccggtcgagcatcacgcaaaatggctgacgacgactcttctgagctctcgtccgtctcgtctttgtcctcggcccccgaggacgacggcgatgtgcagctgaagcgcgagaagggcattctaaagttcttccacaagctccctaaagggctccaagcctacccagtccgagcgaccgtcctccacgccaccacgtaaaaggtccccctcgccgaccagagacacggttcttgccgataatcctgatattgctttcattgtcatgttccgcagccgtttcaacgagtctatgcccaagtccctagccaatttcggcccgcaagaactagagagagatgtcactgaatcggtgcctggagaacgtgtggaacacttcttgtgcgccgtgttgggactgctgctgaatcgaaagcaggacgtgaagcccggacattacaatcgagcacttgaagatgccatttcatcccacaagaaccaatgggcaaaagattgggaggacaagaacccactctctggtggcaagagcttcaccaccatgaaccctaccgaacggttgacgctgctcaaaaccctgatcctatgggccttgtcctcatccgaaaccatcaagacattcatcaaccagtcgtacaagcaaaatcgccacgaagacgacctgaaccaacctctgtccgtccagccctggggctcagacagtgataaacgacgatacttcctagtcgagggtctcgacgacacccactttcgcgtatatcgagagagcaaccctgccggttttaacagaacttggtggaacgttgctggcagcatcgaggagctcactgccttatgcgataagctccagacggtagatggcggccccaaagcaaagaagctggcgcaaaagatgctcgcagctgttccacgcttcgaggcgaccgaggagaagcgcaagcgacgcgaataccgcctcatgcgcaaggaacagttcaagcggcctgaaccgggcttctctatgtatgagggccggacacgtggcaagcgcatgaagtacacctactctgacgacgaggacttccttagcgactcgacctcgcgtcgatctacccgaaacactggtaccaatactccagctgagcccacaactactgccagtggtcggcagatcaaggccccctcaagaatgacggtggatgcaaacaacaacattgtaaccacaagtccgacccaggtgagcgaagagagacattcaaaggagccgtccgtcggacctggaggaaggccacgacgctcggcagccgtcagtcaagccaccaacggctacgccgccaagaacaaacaaaactatgattccgaggatgaagaagacgaaagtcccgatctcggtgatgacgaagatgaggatgaccacgtccctgatgcggacagtgaggaagaagaagaggaggaggaggaggaagagttcgacggggatgaggatgaacccatggaggatgacgatcttcaggacgtccccaagagcaagataattaagctcaagtactcacccacgtccaagaagaccaacggtgtcgacttcaacgccttccgatatgatgcgggaggtagtaaagaatctacttccgcctccgaggcaaaaaccgcctctacaaacgaagcaaccgtagcggacaagagcgaagagagcatcgccgtagtagctactgctacgaaaaagtccacaccccccgccactcccgtcctgagctcactgcagtcgacgtctctggcttttagagaaagcccagacaagacgcaacagaagccagtcgatcgtgctccggcgaactagtgttatgctatctgacttgttgggcgtttggttttgaggagaaagggagttatggtagggttatcggaaagatgaagggacctttctgattgtcttgtttgtcggagccggcgcttaagaattgttccttcccctatgatggatttgcttgtccttcagagtgcaagtattgctgtgggtggcgtagatgcatgggcatttacttcgccgcccaagagggaaaaaagagggagggaaaaatgatagatctgtcattgcacgatgcgtatgaggcaaaacgaaaagagatggtaaagcggaactgctgttgctgcttttctcatagctttacagatgtactatactacatgtgcacgaacgactttgcaccacgctcgtggaatgggtggacgcagtctgtacatcgtgttgaccacgcaggctgggagacagaacaacggtagacagaccaatacagcgatccccctggtatttcaaagacccgtgacttgatgatgtattgatcccacaagccccgtgccaagtgcatgtagcccgtccagtgcgcatcatcctctcacacgtctcctctctctattccttcctactcaaatccacctcacctcgtcttcttgtcaggcaagggccagttattcaccccataccaccacctcctaaccctcgccccaaccgagctcccactaagctgcgcgttcctattccaatgctgccatccgacaatagcgaggttgtaaagcagaccctgagcaagaggcatcatcatctaaacacatcccacgtcagtctcaatcaacccaacctaacccattccacacggtcctccccttacccaacgaacaaaacagacatacctgatcccgaacagtaatccacccaaccttccaccaattctcagcccccgcaatactatgtaaatagctctgctcgaacctcaaatcaggcatgggcgggaaactctgtctcctgccccgtcccctgggcgtgggtttcaggacggagacgggtatctcgtcgtcatcgtcgatgtcgtctagggaagaagatgatatgtacacgggttcttttgcggaggcggcggtcgacgggttgatgtcgtgacgtggtgagggagcgcgattgatgtgtgctgtttggattacttctgcgatttgggttgggattgttgaggatgccattttggcgaggggggcgggacgggaggttaaattgagttggaagtgtgtgttagatcattggagatgttgagattacgggaattgacttgagaggtacgatttgggagcttgtgttgaggtattggtgttgcgaatgttgaagcttagttcgtcgttagtagctggttcatgagcttcgtcattttgcagatgtctagcagctggcactccacgggcgatgtcgggctgcacgttcaacggccgaatggcatgaatatggagcatagctcatatatcatat

SEQ ID NO: 32736 - DNA, 489 bp, Muscodor strobelii
  misc_feature: SGI cDNA ID NO. 571284
  misc_feature: Encodes the peptide sequence at SEQ ID NO 32737
atggcatcctcaacaatcccaacccaaatcgcagaagtaatccaaacagcacacatcaatcgcgctccctcaccacgtcacgacatcaacccgtcgaccgccgcctccgcaaaagaacccgtgtacatatcatcttcttccctagacgacatcgacgatgacgacgagatacccgtctccgtcctgaaacccacgcccaggggacggggcaggagacagagtttcccgcccatgcctgatttgaggttcgagcagagctatttacatagtattgcgggggctgagaattggtggaaggttgggtggattactgttcgggatcagatgatgatgcctcttgctcagggtctgctttacaacctcgctattgtcggatggcagcattggaataggaacgcgcagcttagtgggagctcggttggggcgagggttaggaggtggtggtatggggtgaataactggcccttgcctgacaagaagacgaggtga

SEQ ID NO: 32737 - protein, 162 aa, Muscodor strobelii
  misc_feature: SGI Peptide ID NO. 571284
  misc_feature (11)..(104): Pfam Id: PF08589 Pfam Desc: Fungal protein of function (DUF1770)
  misc_feature (3)..(162): NCBI GI: 116208018 Blast Desc: CHGG_03302 [Chaetomium globosum CBS 148.51] gi|88183899|gb|EAQ91367.1| CHGG_03302 [Chaetomium globosum CBS 148.51]
  misc_feature (4)..(157): NCBI GI: 261358340 Blast Desc: conserved [Verticillium albo-atrum VaMs.102]
  misc_feature (3)..(159): NCBI GI: 156065179 Blast Desc: SS1G_00600 [Sclerotinia sclerotiorum 1980] gi|154691459|gb|EDN91197.1| SS1G_00600 [Sclerotinia sclerotiorum 1980]
  misc_feature (3)..(160): NCBI GI: 171686488 Blast Desc: protein product [Podospora anserina] gi|170943205|emb|CAP68858.1| protein product [Podospora anserina]
  misc_feature (6)..(162): NCBI GI: 169598358 Blast Desc: SNOG_01981 [Phaeosphaeria nodorum SN15] gi|160704381|gb|EAT90193.2| SNOG_01981 [Phaeosphaeria nodorum SN15]
  misc_feature (3)..(159): NCBI GI: 154311431 Blast Desc: BC1G_06568 [Botryotinia fuckeliana B05.10] gi|150850965|gb|EDN26158.1| BC1G_06568 [Botryotinia fuckeliana B05.10]
  misc_feature (9)..(157): NCBI GI: 121712724 Blast Desc: conserved [Aspergillus clavatus NRRL 1] gi|119402126|gb|EAW12547.1| conserved [Aspergillus clavatus NRRL 1]
  misc_feature (6)..(162): NCBI GI: 189209017 Blast Desc: conserved [Pyrenophora tritici-repentis Pt-1C-BFP] gi|187976934|gb|EDU43560.1| conserved [Pyrenophora tritici-repentis Pt-1C-BFP]
  misc_feature (10)..(162): NCBI GI: 169765151 Blast Desc: [Aspergillus oryzae RIB40] gi|83764901|dbj|BAE55045.1| protein product [Aspergillus oryzae]
  misc_feature (3)..(162): NCBI GI: 39976729 Blast Desc: MGG_06267 [Magnaporthe grisea 70-15] gi|145016337|gb|EDK00827.1| MGG_06267 [Magnaporthe grisea 70-15]
MASSTIPTQIAEVIQTAHINRAPSPRHDINPSTAASAKEPVYISSSSLDDIDDDDEIPVSVLKPTPRGRGRRQSFPPMPDLRFEQSYLHSIAGAENWWKVGWITVRDQMMMPLAQGLLYNLAIVGWQHWNRNAQLSGSSVGARVRRWWYGVNNWPLPDKKTR

SEQ ID NO: 32738 - DNA, 2823 bp, Muscodor strobelii
  misc_feature: SGI EST ID NO. CUFF.77437.2
  misc_feature: Variant of the nucleotide sequence at SEQ ID NO 32736
ctatgctccatattcatgccattcggccgttgaacgtgcagcccgacatcgcccgtggagtgccagctgctagacatctgcaaaatgacgaagctcatgaaccagctactaacgacgaactaagcttcaacattcgcaacaccaatacctcaacacaagctcccaaatcgtacctctcaagtcaattcccgtaatctcaacatctccaatgatctaacacacacttccaactcaatttaacctcccgtcccgcccccctcgccaaaatggcatcctcaacaatcccaacccaaatcgcagaagtaatccaaacagcacacatcaatcgcgctccctcaccacgtcacgacatcaacccgtcgaccgccgcctccgcaaaagaacccgtgtacatatcatcttcttccctagacgacatcgacgatgacgacgagatacccgtctccgtcctgaaacccacgcccaggggacggggcaggagacagagtttcccgcccatgcctgatttgaggttcgagcagagctatttacatagtattgcgggggctgagaattggtggaaggttgggtggattactgttcgggatcagatgatgatgcctcttgctcagggtctgctttacaacctcgctattgtcggatggcagcattggaataggaacgcgcagcttagtgggagctcggttggggcgagggttaggaggtggtggtatggggtgaataactggcccttgcctgacaagaagacgaggtgaggtggatttgagtaggaaggaatagagagaggagacgtgtgagaggatgatgcgcactggacgggctacatgcacttggcacggggcttgtgggatcaatacatcatcaagtcacgggtctttgaaataccagggggatcgctgtattggtctgtctaccgttgttctgtctcccagcctgcgtggtcaacacgatgtacagactgcgtccacccattccacgagcgtggtgcaaagtcgttcgtgcacatgtagtatagtacatctgtaaagctatgagaaaagcagcaacagcagttccgctttaccatctcttttcgttttgcctcatacgcatcgtgcaatgacagatctatcatttttccctccctcttttttccctcttgggcggcgaagtaaatgcccatgcatctacgccacccacagcaatacttgcactctgaaggacaagcaaatccatcataggggaaggaacaattcttaagcgccggctccgacaaacaagacaatcagaaaggtcccttcatctttccgataaccctaccataactccctttctcctcaaaaccaaacgcccaacaagtcagatagcataacactagttcgccggagcacgatcgactggcttctgttgcgtcttgtctgggctttctctaaaagccagagacgtcgactgcagtgagctcaggacgggagtggcggggggtgtggactttttcgtagcagtagctactacggcgatgctctcttcgctcttgtccgctacggttgcttcgtttgtagaggcggtttttgcctcggaggcggaagtagattctttactacctcccgcatcatatcggaaggcgttgaagtcgacaccgttggtcttcttggacgtgggtgagtacttgagcttaattatcttgctcttggggacgtcctgaagatcgtcatcctccatgggttcatcctcatccccgtcgaactcttcctcctcctcctcctcttcttcttcctcactgtccgcatcagggacgtggtcatcctcatcttcgtcatcaccgagatcgggactttcgtcttcttcatcctcggaatcatagttttgtttgttcttggcggcgtagccgttggtggcttgactgacggctgccgagcgtcgtggccttcctccaggtccgacggacggctcctttgaatgtctctcttcgctcacctgggtcggacttgtggttacaatgttgttgtttgcatccaccgtcattcttgagggggccttgatctgccgaccactggcagtagttgtgggctcagctggagtattggtaccagtgtttcgggtagatcgacgcgaggtcgagtcgctaaggaagtcctcgtcgtcagagtaggtgtacttcatgcgcttgccacgtgtccggccctcatacatagagaagcccggttcaggccgcttgaactgttccttgcgcatgaggcggtattcgcgtcgcttgcgcttctcctcggtcgcctcgaagcgtggaacagctgcgagcatcttttgcgccagcttctttgctttggggccgccatctaccgtctggagcttatcgcataaggcagtgagctcctcgatgctgccagcaacgttccaccaagttctgttaaaaccggcagggttgctctctcgatatacgcgaaagtgggtgtcgtcgagaccctcgactaggaagtatcgtcgtttatcactgtctgagccccagggctggacggacagaggttggttcaggtcgtcttcgtggcgattttgcttgtacgactggttgatgaatgtcttgatggtttcggatgaggacaaggcccataggatcagggttttgagcagcgtcaactatgcagaaatctcgcgttagtttgacaagtcttgcctcaagatgtaattggattgcgtagagtggaggatgcagagacgtacccgttcggtagggttcatggtggtgaagctcttgccaccagagagtgggttcttgtcctcccaatcttttgcccattggttcttgtgggatgaaatggcatcttcaagtgctcgattgtaatgtccggg

SEQ ID NO: 32739 - DNA, 744 bp, Muscodor strobelii
  misc_feature: SGI cDNA ID NO. 571285
  misc_feature: Encodes the peptide sequence at SEQ ID NO 32740
atgatctcagattcaaagtctgatatctccttaaagtccaaacgttccaccagacactactcggatagagaacagcaaaccgagcctgagcctgaacctcaacctgagttccagaagcctgacgctctggccaaagcacaacaacatcgcaaaatgaacgactcatcccgacacccaatcgaatggttggactttgtacttgaacaatcatgggagactcgcaaccctatcgaccctgagcttgatgtttcgggggagtacttggcgatgctcaaacgttccgagacgtgtgttttcgtcgttgtaccaaaggacagcgagtttcccaagccccgtcctgcttactctggctttaaggcagctctggaggatgtgtacgatcggtttggcatgttttacgcgggacatgcggccttcaactgtgtaacaagagagatcacactctacccatgtgatcaaaaacgacccaaagatcgacgtatcgatgaagacacatatctctttgacctcgcggcggcacgtagtgcctggaacaaacgaccaccaccggcccttttgaggcaagagtacctcagccagatgcatcacattctcaacgcagccaagatgagtcgtgcccagcaacgtgccatgcagaagaaagtccaaaaaagagttgcgtgggaggagaaggcggccaaggcagcggcagctgaagaagctacccagaacgcggatcgcactagcaatgaattgatggaatag

SEQ ID NO: 32740 - protein, 247 aa, Muscodor strobelii
  misc_feature: SGI Peptide ID NO. 571285
MISDSKSDISLKSKRSTRHYSDREQQTEPEPEPQPEFQKPDALAKAQQHRKMNDSSRHPIEWLDFVLEQSWETRNPIDPELDVSGEYLAMLKRSETCVFVVVPKDSEFPKPRPAYSGFKAALEDVYDRFGMFYAGHAAFNCVTREITLYPCDQKRPKDRRIDEDTYLFDLAAARSAWNKRPPPALLRQEYLSQMHHILNAAKMSRAQQRAMQKKVQKRVAWEEKAAKAAAAEEATQNADRTSNELME

SEQ ID NO: 32741 - DNA, 1755 bp, Muscodor strobelii
  misc_feature: SGI EST ID NO. CUFF.77403.0
  misc_feature: Variant of the nucleotide sequence at SEQ ID NO 32739
gacgttccagtctcagcagtgtagatgacattctgtcgagaataggcccggcccctaagctacctggcctcgatcagtcagctggtctgttggatgctttcaacgacacgggactgttccctccgctggattgttccttaactgctcagccagtaattcctgagattgttggtaagaatttgctctctttgctgctcgtctactgtccacatgtttgttttgtgagcgaaaatttcgcacgccgtctgaactttgacaatcactaatatgctgagcatttaagttcaggcaacggtggtcgaagcgagtggggagagccctcacaaactgctttcccccagcaaagtgcaaagcttccgcgctcctcttgatctcagcagctttcaccgttgccgtcgtcgcagacagatgatctcagattcaaagtctgatatctccttaaagtccaaacgttccaccagacactactcggatagagaacagcaaaccgagcctgagcctgaacctcaacctgagttccagaagcctgacgctctggccaaagcacaacaacatcgcaaaatgaacgactcatcccgacacccaatcgaatggttggactttgtacttgaacaatcatgggagactcgcaaccctatcgaccctgagcttgatgtttcgggggagtacttggcgatgctcaaacgttccgagacgtgtgttttcgtcgttgtaccaaaggacagcgagtttcccaagccccgtcctgcttactctggctttaaggcagctctggaggatgtgtacgatcggtttggcatgttttacgcgggacatgcggccttcaactgtgtaacaagagagatcacactctacccatgtgatcaaaaacgacccaaagatcgacgtatcgatgaagacacatatctctttgacctcgcggcggcacgtagtgcctggaacaaacgaccaccaccggcccttttgaggcaagagtacctcagccagatgcatcacattctcaacgcagccaagatgagtcgtgcccagcaacgtgccatgcagaagaaagtccaaaaaagagttgcgtgggaggagaaggcggccaaggcagcggcagctgaagaagctacccagaacgcggatcgcactagcaatgaattgatggaataggggtcagcattgagcatcaagtgcgagcgaaaggagaaactaggctggtcggtttctcccgtccctttcccaacggaacgctatagaaaaggagaagagagaaagaaccggacccaagtggaagatacgaccatctttgatagagccgctccatctccgctcaagcatgcatttcacgatgataaccagtcggatggtgaggatgcggatatggctgcccgactgggactctaagttagaacgggatggtaaatgttaagagacgatccttttcgagatgcgcttcttcgtcgtcctcgttagagagaacgttcttgatagattcaggatgagagacgagagagtctggcactgttgcgttcattattagcttggtagattgggtgtgtacaagcaaagaagatagatgcatagtattgcccgcagaagacgtttgtacgtccgagtataattttagaagcagaacaccggtcatggacttggactaagctcgaatagaggataattctatgatatctttcacataacctttatagtgatgcgaagaagtgtccatgtttgtagtagagtatcttgacgaaatacgtattactgtcatggtca

SEQ ID NO: 32742 - DNA, 1959 bp, Muscodor strobelii
  misc_feature: SGI cDNA ID NO. 571286
  misc_feature: Reduced expression when VOC is produced
  misc_feature: Encodes the peptide sequence at SEQ ID NO 32743
atgtttacttgtcgggcctgcttgaggagggctgtctcgtcgctctacgagcatgcgctgtcggccaacgtaaccatcgcaacgacgacagctactacgtctcgtgcccaccgcacctatgccaccgccgccgctcacaacaccaccagcctacccgcccgctctagacatgccacagacgaagccccttccccttcatctgacaccaactctgctcccacgccagagcagttctccgccgccgccggcaagtcggctgagtggagtgcgcgcaaggagctgcagtacttgtccgaccccttccacatcaacaaccaggtccggcgcactctcgacaagggtgacttcgaccatgccgccatgatcaccagggaggccagcaggtcgcacaaggtcgaggtcagctggaaccacctcatcgactaccagctgaaacacgaccgcctggccagcgccctcaagctctacaacgagatgaagaagcgcgcccagctgcccaacgcccagaccttcaccatcatcttccgcggctgcgcccagtccgagcacaagaagaaggccagcgccgaggccgtcaagctgtacaacaccatgctcagcgtcggccgcatcaagcccaacaccatccacctcaacgccgtcctgcacgtctgcgcccgcgccgaggacatcgaagccatgttcggcgtcctgcagtcctccgaggacgccctgcgccaacccaacaacaagacctacaccaccatcctcaacgccctgcgcgcacacgccgacaagtacccctccctccacctgaccgagaaggagatcgaggagggctgggaggtcgccgtcaagcgcgcaaagatgatctgggaggaggtcgtctcccgctggagagctggttcggttactatcgacgaggagctggtctgtgccatgggccgcatcttgttaaagggccattacaacgacaccgtcctcatagaagacttactgaatcagacaatgaatcttacatcgccaaacagcccgacgcctgctctgcccagccccaagaaagcggcagttgaaacaggtgacgaagccgtggccaccacagagcagcagctcaccacgcttgcccttcaggcctcagctccgaggacccagacatcgcgcggccctgccaatgcttttgctcgacctggcggaaattccttgtccttggtcctcgccgcgctggagaagacacgcagaacgacgcatgcattgcggtactggggtatgttcaccaaaggctacggtgtcgtgccggatgcagacaactggacacagctactgagagtcttttcttgcgggaaaaatagtgcccgaactgcagcttatctggtcaacataccgcccgacatgctgagcccaaagcacgtgagaatcgccatgaacacctgcatccgtgacaatctcaatcgctctgccttccaaaacgccaccgacattttagacattatgtgcaaaaacttcagtacaccggatcccttgacgctgaggacgtatcttcaattcgcacatgcccacaagcgctcgtataaattccaactcaaagccgaccacgacgctgcgatgggagcatgggccagacagctcactatagctctcgacaagctctgggcaccctaccagatccttgccaaaaaatgtgccattaagaacccaaaaaagatagcccgtgagaagataggcgaggcccaaaacttcaagcccgaggtcgttgctttggctcgcaagatgattgctgcggctgatattctcgtcacggacaatttggttcccgcgacggtgagcgacagactcaagagacaacgcaacgctctgaacagatttgtcgtcacccattttgcggaagtgcagtcgcaaagtgagcagcatggacggagggaacgagaccggcgtgagccagctcgggcagaccaagaagaaggcgacgggttctggctgtga

SEQ ID NO: 32743 - protein, 652 aa, Muscodor strobelii
  misc_feature: SGI Peptide ID NO. 571286
  misc_feature (134)..(168): Pfam Id: PF01535 Pfam Desc: PPR repeat
  misc_feature (1)..(621): NCBI GI: 85109877 Blast Desc: NCU07871 [Neurospora crassa OR74A] gi|28924784|gb|EAA33896.1| [Neurospora crassa OR74A]
  misc_feature (84)..(588): NCBI GI: 116191703 Blast Desc: CHGG_05569 [Chaetomium globosum CBS 148.51] gi|88181482|gb|EAQ88950.1| CHGG_05569 [Chaetomium globosum CBS 148.51]
  misc_feature (1)..(596): NCBI GI: 39976991 Blast Desc: MGG_06398 [Magnaporthe grisea 70-15] gi|145016192|gb|EDK00682.1| MGG_06398 [Magnaporthe grisea 70-15]
  misc_feature (1)..(621): NCBI GI: 256729938 Blast Desc: NECHADRAFT_101335 [Nectria haematococca mpVI 77-13-4]
  misc_feature (96)..(632): NCBI GI: 171687048 Blast Desc: protein product [Podospora anserina] gi|170943485|emb|CAP69138.1| protein product [Podospora anserina]
  misc_feature (6)..(636): NCBI GI: 46122085 Blast Desc: FG05420.1 [Gibberella zeae PH-1]
  misc_feature (1)..(611): NCBI GI: 156048092 Blast Desc: SS1G_08777 [Sclerotinia sclerotiorum 1980] gi|154693174|gb|EDN92912.1| SS1G_08777 [Sclerotinia sclerotiorum 1980]
  misc_feature (1)..(645): NCBI GI: 154305856 Blast Desc: BC1G_08159 [Botryotinia fuckeliana B05.10] gi|150853044|gb|EDN28236.1| BC1G_08159 [Botryotinia fuckeliana B05.10]
  misc_feature (29)..(555): NCBI GI: 261358470 Blast Desc: pentatricopeptide repeat protein [Verticillium albo-atrum VaMs.102]
  misc_feature (85)..(509): NCBI GI: 189205178 Blast Desc: pentatricopeptide repeat protein [Pyrenophora tritici-repentis Pt-1C-BFP] gi|187986023|gb|EDU51511.1| pentatricopeptide repeat protein [Pyrenophora tritici-repentis
  misc_feature: Useful for introducing or modulating the production of volatile compounds
MFTCRACLRRAVSSLYEHALSANVTIATTTATTSRAHRTYATAAAHNTTSLPARSRHATDEAPSPSSDTNSAPTPEQFSAAAGKSAEWSARKELQYLSDPFHINNQVRRTLDKGDFDHAAMITREASRSHKVEVSWNHLIDYQLKHDRLASALKLYNEMKKRAQLPNAQTFTIIFRGCAQSEHKKKASAEAVKLYNTMLSVGRIKPNTIHLNAVLHVCARAEDIEAMFGVLQSSEDALRQPNNKTYTTILNALRAHADKYPSLHLTEKEIEEGWEVAVKRAKMIWEEVVSRWRAGSVTIDEELVCAMGRILLKGHYNDTVLIEDLLNQTMNLTSPNSPTPALPSPKKAAVETGDEAVATTEQQLTTLALQASAPRTQTSRGPANAFARPGGNSLSLVLAALEKTRRTTHALRYWGMFTKGYGVVPDADNWTQLLRVFSCGKNSARTAAYLVNIPPDMLSPKHVRIAMNTCIRDNLNRSAFQNATDILDIMCKNFSTPDPLTLRTYLQFAHAHKRSYKFQLKADHDAAMGAWARQLTIALDKLWAPYQILAKKCAIKNPKKIAREKIGEAQNFKPEVVALARKMIAAADILVTDNLVPATVSDRLKRQRNALNRFVVTHFAEVQSQSEQHGRRERDRREPARADQEEGDGFWL

SEQ ID NO: 32744 - DNA, 2380 bp, Muscodor strobelii
  misc_feature: SGI EST ID NO. CUFF.77412.0
  misc_feature: Variant of the nucleotide sequence at SEQ ID NO 32742
attggtctttgtgccgttgtcgcagttgcaattgttgcccacgactttgggcggaaatctgtaagagacggctctgagacatgcacatggggggctgttagcttggacggactaaaatgacaggggacccgagatttctgagatttttgacattttgctagagacccctgcgtcatgtcgccatggcttgtctgaaattttgattttcttatcagaagctcagaatgcctgattgactgatcctcctccgtcgattgtcaagctatcgtcatgtttacttgtcgggcctgcttgaggagggctgtctcgtcgctctacgagcatgcgctgtcggccaacgtaaccatcgcaacgacgacagctactacgtctcgtgcccaccgcacctatgccaccgccgccgctcacaacaccaccagcctacccgcccgctctagacatgccacagacgaagccccttccccttcatctgacaccaactctgctcccacgccagagcagttctccgccgccgccggcaagtcggctgagtggagtgcgcgcaaggagctgcagtacttgtccgaccccttccacatcaacaaccaggtccggcgcactctcgacaagggtgacttcgaccatgccgccatgatcaccagggaggccagcaggtcgcacaaggtcgaggtcagctggaaccacctcatcgactaccagctgaaacacgaccgcctggccagcgccctcaagctctacaacgagatgaagaagcgcgcccagctgcccaacgcccagaccttcaccatcatcttccgcggctgcgcccagtccgagcacaagaagaaggccagcgccgaggccgtcaagctgtacaacaccatgctcagcgtcggccgcatcaagcccaacaccatccacctcaacgccgtcctgcacgtctgcgcccgcgccgaggacatcgaagccatgttcggcgtcctgcagtcctccgaggacgccctgcgccaacccaacaacaagacctacaccaccatcctcaacgccctgcgcgcacacgccgacaagtacccctccctccacctgaccgagaaggagatcgaggagggctgggaggtcgccgtcaagcgcgcaaagatgatctgggaggaggtcgtctcccgctggagagctggttcggttactatcgacgaggagctggtctgtgccatgggccgcatcttgttaaagggccattacaacgacaccgtcctcatagaagacttactgaatcagacaatgaatcttacatcgccaaacagcccgacgcctgctctgcccagccccaagaaagcggcagttgaaacaggtgacgaagccgtggccaccacagagcagcagctcaccacgcttgcccttcaggcctcagctccgaggacccagacatcgcgcggccctgccaatgcttttgctcgacctggcggaaattccttgtccttggtcctcgccgcgctggagaagacacgcagaacgacgcatgcattgcggtactggggtatgttcaccaaaggctacggtgtcgtgccggatgcagacaactggacacagctactgagagtcttttcttgcgggaaaaatagtgcccgaactgcagcttatctggtcaacataccgcccgacatgctgagcccaaagcacgtgagaatcgccatgaacacctgcatccgtgacaatctcaatcgctctgccttccaaaacgccaccgacattttagacattatgtgcaaaaacttcagtacaccggatcccttgacgctgaggacgtatcttcaattcgcacatgcccacaagcgctcgtataaattccaactcaaagccgaccacgacgctgcgatgggagcatgggccagacagctcactatagctctcgacaagctctgggcaccctaccagatccttgccaaaaaatgtgccattaagaacccaaaaaagatagcccgtgagaagataggcgaggcccaaaacttcaagcccgaggtcgttgctttggctcgcaagatgattgctgcggctgatattctcgtcacggacaatttggttcccgcgacggtgagcgacagactcaagagacaacgcaacgctctgaacagatttgtcgtcacccattttgcggaagtgcagtcgcaaagtgagcagcatggacggagggaacgagaccggcgtgagccagctcgggcagaccaagaagaaggcgacgggttctggctgtgatatgtctcaaaatttgtagaaaatgtagcaatatgtacaataatgtgacaccaggggaaagaatcccgtcgaacgcatatactagataattcctcctcttaacgactttcccctgctttactcatatatggcttgtaatctccaaacgtgc

SEQ ID NO: 32745 - DNA, 4374 bp, Muscodor strobelii
  misc_feature: SGI cDNA ID NO. 571287
  misc_feature: Encodes the peptide sequence at SEQ ID NO 32746
atgtcgagtgctgcgagcaagcgtgacaggcttgcccagctccgggctctgcggaaagagggcaagaaggcctacgacgcctacgaagtcgcccaggagcagtctttatacgacgaagtcgacgagaaccagtacaagaagattgtccgtgatcgtctgaaccaggacgacttcgtggttgacgacaatggcgagggctacgccgacgacggccgcgaagactgggaccgcgttcagacctaccattccgacaccgacgacgaagaccacgacgcccctgccaagtcgaggagggaaaagaaggccagggcagaccagaacaaggcccagaaagacgccaatgacagagatatcagcgagtatttcatgaagggccaggccgcaccacagcccaaacccaagatcatcaagacggaagaagatgacatgtttctcgccaatctgctgggcgaggtcgacgccaatgtacccgcaccggctgcccgactgcccaagagacacagatcgcccgagaggcggaagccccgtgccgcctctcccgcccgcgacactcgccagcccgccagcaaaaaggtcagactcagccctgaggtcgagctcatagctccagacgttcaggatgacggcctgccccttcagatggacgatgacctgccctcacaccttcaggaccaaatcaagcccgaccccgaagacgaagacgacgatatgatggaggtggcccacgctggtgccatcaacaccgccagtgtcaacctatctgcctctcggcccgtcaagaaactcgtcaagcccgacccttacccttcacccgccagctcttcccccgtcaaagccgccgacgtcgacgtggatgcctcgtcgtggaaccagctgaccgacaagctcaacatcgtcagcccttcgccttcccagagtcgacccgtcggcaaggtggactataaagattgtgtcgaagaagatggtagtctcaatatgttctggactgactatacagaagtcaatggctccctttgtctctttggcaaagtactcaacaagaaggccggtgcttatgttagttgttttgtgaaggtgaacaacatactgcgtaagcttttcttcctgcctcgccagttccgccgacgcgacgggcgagacacgagcgaagagatcggcatgatggacgtgtactcggaagtcgacgaactcatgactaagatgaatgtcgacttgcacaaaatcaaatcatgcgatcgcaagtatgctttcgagctgccaggcatccctcgccaagcgcagtatctgaaattgttgtacccatatacgaagcaacccattgctgccgaaaccagtggcgagaccttctctcacattttcggcacaaacactgccttgttcgagcagttcgttttgtggaaaaacatcatggggccatgctggctgaaaatcaccgacgccgacttcgccaccttgaagaacagctcctttgcaaagcttgaagtgctcgtccccagcccagacacgatatctccactaagtgattcggacaacttggatgcgccacctctcactttgatgagtctggccatgcgaacgtcattcaatgtgaaagacaacaaggccgagatcctatcgatcagtgcccgtatatatgagaatgtctcactaagcgacactacacctgccgagaagctcccatctcggaccttcaccgtcattcgacctaacggtccctcgttccccttcgggttcgagaagctggctcaagacagaaagaagggcttgatcaagttaatgaggcacgaggctgaggttttgtccttcttcctcgcccaacttgatcttgttgatcctgatgttattctcggtcatcaactggaaggtgtcgattatagtatcctcctgaacagattacatgagaagaagacgccgcaatggtcccggctcggacgtctccgcagagcacagtggccagcagcaataggcaagactggcggtaatgtttttgccgaacgccaggtcatggctggccgtcttctttgcgatctagccaacgacgctggaaagtctgtcatgttcaagtgtcagtcttggagcttgactgaaatgtgcaacatttatcttggcggagacattcgtcgaagagatgtcgacaacgaggtcgctctgaaatcttgggctaccgagaagagtggtctgatggactacattacccacatggaggcggatacctacttcatagccgctttagcactgggcacccagatgcttccccttaccaaggtcttgaccaacttagcgggtaactcatgggctcgaacgttgacgggtacgcgagctgagcgcaacgagtacattctcttgcatgagttccaccggaacaagtatatttgccctgataagcaggtcttcaagggccgacagcaaaacgaggagaatcaagaagaaggaagtgcagacaataagaaaaaagacaaatacaagggtggtctggtcttcgagccagaaaaggggttatacgacaaatttgtgcttgtcatggacttcaattccttgtacccctccatcatccaagagtacaatatttgctttactaccgtcgagcggtctggaatgactgaagatgaggatgctgtcccagatgtcccaacagatcaggaccaaggcatactacctaagctgattgccactctagtcagtcgacgacgacaggtgaagtcgctgatgaaggacaagaatgccacacctgagcagcttgcaacatgggatatcaagcaactcgcgttgaagctgacagccaattccatgtatggttgtcttggatacaccaagtcacgattttatgcgcgacctttagctgtcctcaccacattcaaaggccgtgaaattcttcgaagcaccaaagacctggcagagtctaagtcgttacaagtcatctatggtgatactgattcagtcatgatcaacgccaatgtggagtctatcgcggacgccttcaaggtcggcaatgatttcaagaaagctgtcaatgaacgataccgccttcttgagattgatattgacaacgtcttcaggaggattcttctgcaagccaagaagaagtacgccgccgtgaacctcgtcgaggttcctggtaataagtatgtagagaagatggaggtcaagggtctggatatgaaacgaagagaatactgcgctctctccaaggagatctcctcccgaattcttaacgagattctttccggagatgagactgaagttgctgtgcaacggattcatgagtatctgcgggagatcgcagccaagatgcgcgaacacgctatcccgactcaaaaatacatcatctacacccagctcggcaaagcacccaaagaataccccaatgccgactcgatgccacaggtgcaagtggcattgcgtgaaatagcacgtggcaagaacgtcagaaagggcgatgtcatctcatatgtggtcaccggcgacagcaagacgacctcagaacctgtcgccaagcgtgcctgcataccacaagacgttacgaagaaggattcagacctgaaggtagacgtagaatattatatcggcaagcaaattttccctcctgtcgagcgtctgtgtgccaacatcactggtacatcgacctcacagctggccgagcagcttggacttgacgtccgtcgatacgccaacaactcatccaattccggctccaacgagtttgaaatccaccctctcgaatctcagatccctgacgagatccgatttggcgattgtgctcgtctgtctttgcgctgcagaaaatgtaagacttcatcgccattcgaaggtctcttcgcagcaagctcggcctcacagcccagtcaagcgatgactgtcacagcacaaggcgtatcctgtccatcctgttcttctatcataccgaacctgagtatagtcgcgcagctcgaacacgcaatccgcacccagacatcgaaatactacgaaggctggctcgtctgcgacgactcatcgtgcggaaagcgaactcgtcagctatccgtctacggatcgagatgtttgggtccgcagggcctggcgaccggctgtatgggccgcatgcggtatgagtactcggagcgcgagatctacaaccagttggtgtacttcgcgtctctctgggacgtcgagaaggctaaggcgaaagctaattccggcgccactgggcttggtggttcgggcaatgctgggtcgcttaatgccgaggagaaacaacgggttcttacccttgcgaaccacaatctccaccgctttagtgtgcttaagggcgttgtggatagatatcttgataaatgtggacgccagtgggtggctatggataacctgttctcgaagcttgggtttgccgcgatttaa

SEQ ID NO: 32746 - protein, 1457 aa, Muscodor strobelii
  misc_feature: SGI Peptide ID NO. 571287
  misc_feature (772)..(1222): Pfam Id: PF00136 Pfam Desc: DNA polymerase family B
  misc_feature (348)..(697): Pfam Id: PF03104 Pfam Desc: DNA polymerase family B, exonuclease domain
  misc_feature (1239)..(1449): Pfam Id: PF08996 Pfam Desc: DNA Polymerase alpha zinc finger
  misc_feature (3)..(1456): NCBI GI: 116191701 Blast Desc: CHGG_05568 [Chaetomium globosum CBS 148.51] gi|88181481|gb|EAQ88949.1| CHGG_05568 [Chaetomium globosum CBS 148.51]
  misc_feature (6)..(1454): NCBI GI: 46122087 Blast Desc: FG05421.1 [Gibberella zeae PH-1]
  misc_feature (1)..(1457): NCBI GI: 39976989 Blast Desc: MGG_06397 [Magnaporthe grisea 70-15] gi|145016193|gb|EDK00683.1| MGG_06397 [Magnaporthe grisea 70-15]
  misc_feature (1)..(1455): NCBI GI: 164424154 Blast Desc: NCU07870 [Neurospora crassa OR74A] gi|157070398|gb|EAA33895.2| NCU07870 [Neurospora crassa OR74A]
  misc_feature (1)..(1456): NCBI GI: 171687046 Blast Desc: protein product [Podospora anserina] gi|170943484|emb|CAP69137.1| protein product [Podospora anserina]
  misc_feature (1)..(1457): NCBI GI: 156048094 Blast Desc: SS1G_08778 [Sclerotinia sclerotiorum 1980] gi|154693175|gb|EDN92913.1| SS1G_08778 [Sclerotinia sclerotiorum 1980]
  misc_feature (1)..(1457): NCBI GI: 154305854 Blast Desc: BC1G_08158 [Botryotinia fuckeliana B05.10] gi|150853043|gb|EDN28235.1| BC1G_08158 [Botryotinia fuckeliana B05.10]
  misc_feature (5)..(1449): NCBI GI: 115384642 Blast Desc: ATEG_01503 [Aspergillus terreus NIH2624] gi|114196560|gb|EAU38260.1| ATEG_01503 [Aspergillus terreus NIH2624]
  misc_feature (6)..(1449): NCBI GI: 255950462 Blast Desc: Pc22g21010 [Penicillium chrysogenum Wisconsin 54-1255] gi|211593015|emb|CAP99389.1| Pc22g21010 [Penicillium chrysogenum Wisconsin 54-1255]
  misc_feature (5)..(1449): NCBI GI: 238493215 Blast Desc: DNA polymerase alpha catalytic subunit, [Aspergillus flavus NRRL3357] gi|220696338|gb|EED52680.1| DNA polymerase alpha catalytic subunit, [Aspergillus flavus NRRL3357]
  misc_feature (10)..(1376): SWISSPROT Homolog: EC 2.7.7.7 DNA-directed DNA polymerase
MSSAASKRDRLAQLRALRKEGKKAYDAYEVAQEQSLYDEVDENQYKKIVRDRLNQDDFVVDDNGEGYADDGREDWDRVQTYHSDTDDEDHDAPAKSRREKKARADQNKAQKDANDRDISEYFMKGQAAPQPKPKIIKTEEDDMFLANLLGEVDANVPAPAARLPKRHRSPERRKPRAASPARDTRQPASKKVRLSPEVELIAPDVQDDGLPLQMDDDLPSHLQDQIKPDPEDEDDDMMEVAHAGAINTASVNLSASRPVKKLVKPDPYPSPASSSPVKAADVDVDASSWNQLTDKLNIVSPSPSQSRPVGKVDYKDCVEEDGSLNMFWTDYTEVNGSLCLFGKVLNKKAGAYVSCFVKVNNILRKLFFLPRQFRRRDGRDTSEEIGMMDVYSEVDELMTKMNVDLHKIKSCDRKYAFELPGIPRQAQYLKLLYPYTKQPIAAETSGETFSHIFGTNTALFEQFVLWKNIMGPCWLKITDADFATLKNSSFAKLEVLVPSPDTISPLSDSDNLDAPPLTLMSLAMRTSFNVKDNKAEILSISARIYENVSLSDTTPAEKLPSRTFTVIRPNGPSFPFGFEKLAQDRKKGLIKLMRHEAEVLSFFLAQLDLVDPDVILGHQLEGVDYSILLNRLHEKKTPQWSRLGRLRRAQWPAAIGKTGGNVFAERQVMAGRLLCDLANDAGKSVMFKCQSWSLTEMCNIYLGGDIRRRDVDNEVALKSWATEKSGLMDYITHMEADTYFIAALALGTQMLPLTKVLTNLAGNSWARTLTGTRAERNEYILLHEFHRNKYICPDKQVFKGRQQNEENQEEGSADNKKKDKYKGGLVFEPEKGLYDKFVLVMDFNSLYPSIIQEYNICFTTVERSGMTEDEDAVPDVPTDQDQGILPKLIATLVSRRRQVKSLMKDKNATPEQLATWDIKQLALKLTANSMYGCLGYTKSRFYARPLAVLTTFKGREILRSTKDLAESKSLQVIYGDTDSVMINANVESIADAFKVGNDFKKAVNERYRLLEIDIDNVFRRILLQAKKKYAAVNLVEVPGNKYVEKMEVKGLDMKRREYCALSKEISSRILNEILSGDETEVAVQRIHEYLREIAAKMREHAIPTQKYIIYTQLGKAPKEYPNADSMPQVQVALREIARGKNVRKGDVISYVVTGDSKTTSEPVAKRACIPQDVTKKDSDLKVDVEYYIGKQIFPPVERLCANITGTSTSQLAEQLGLDVRRYANNSSNSGSNEFEIHPLESQIPDEIRFGDCARLSLRCRKCKTSSPFEGLFAASSASQPSQAMTVTAQGVSCPSCSSIIPNLSIVAQLEHAIRTQTSKYYEGWLVCDDSSCGKRTRQLSVYGSRCLGPQGLATGCMGRMRYEYSEREIYNQLVYFASLWDVEKAKAKANSGATGLGGSGNAGSLNAEEKQRVLTLANHNLHRFSVLKGVVDRYLDKCGRQWVAMDNLFSKLGFAAI

SEQ ID NO: 32747 - DNA, 4957 bp, Muscodor strobelii
  misc_feature: SGI EST ID NO. CUFF.77415.0
  misc_feature: Variant of the nucleotide sequence at SEQ ID NO 32745
cgcgactgcacgacttacagtggtttcgcgacgcgtcccaatctagagtacatcccactaacagctggaaaaggtatcccatacaaacaatccctctctccagactctccatactatcgtgctactcttctccgaacccaattgaccctcagacttgtccatatttctccttgacgcggagttttggaacttacatgagcatctgagcatttccatgtttctgccttagtccaagccagcataatatcctccttttctctcgcaaacaccatgtcgagtgctgcgagcaagcgtgacaggcttgcccagctccgggctctgcggaaagagggcaagaaggcctacgacgcctacgaagtcgcccaggagcagtctttatacgacgaagtcgacgagaaccagtacaagaagattgtccgtgatcgtctgaaccaggacgacttcgtggttgacgacaatggcgagggctacgccgacgacggccgcgaagactgggaccgcgttcagacctaccattccgacaccgacgacgaagaccacgacgcccctgccaagtcgaggagggaaaagaaggccagggcagaccagaacaaggcccagaaagacgccaatgacagagatatcagcgagtatttcatgaagggccaggccgcaccacagcccaaacccaagatcatcaagacggaagaagatgacatgtttctcgccaatctgctgggcgaggtcgacgccaatgtacccgcaccggctgcccgactgcccaagagacacagatcgcccgagaggcggaagccccgtgccgcctctcccgcccgcgacactcgccagcccgccagcaaaaaggtcagactcagccctgaggtcgagctcatagctccagacgttcaggatgacggcctgccccttcagatggacgatgacctgccctcacaccttcaggaccaagtcatgagcgaccccgcccctcttccctcctccccctatttccaaggtcgtcgctcgcaaggcccagatcaagcccgaccccgaagacgaagacgacgatatgatggaggtggcccacgctggtgccatcaacaccgccagtgtcaacctatctgcctctcggcccgtcaagaaactcgtcaagcccgacccttacccttcacccgccagctcttcccccgtcaaagccgccgacgtcgacgtggatgcctcgtcgtggaaccagctgaccgacaagctcaacatcgtcagcccttcgccttcccagagtcgacccgtcggcaaggtggactataaagattgtgtcgaagaagatggtagtctcaatatgttctggactgactatacagaagtcaatggctccctttgtctctttggcaaagtactcaacaagaaggccggtgcttatgttagttgttttgtgaaggtgaacaacatactgcgtaagcttttcttcctgcctcgccagttccgccgacgcgacgggcgagacacgagcgaagagatcggcatgatggacgtgtactcggaagtcgacgaactcatgactaagatgaatgtcgacttgcacaaaatcaaatcatgcgatcgcaagtatgctttcgagctgccaggcatccctcgccaagcgcagtatctgaaattgttgtacccatatacgaagcaacccattgctgccgaaaccagtggcgagaccttctctcacattttcggcacaaacactgccttgttcgagcagttcgttttgtggaaaaacatcatggggccatgctggctgaaaatcaccgacgccgacttcgccaccttgaagaacagctcctttgcaaagcttgaagtgctcgtccccagcccagacacgatatctccactaagtgattcggacaacttggatgcgccacctctcactttgatgagtctggccatgcgaacgtcattcaatgtgaaagacaacaaggccgagatcctatcgatcagtgcccgtatatatgagaatgtctcactaagcgacactacacctgccgagaagctcccatctcggaccttcaccgtcattcgacctaacggtccctcgttccccttcgggttcgagaagctggctcaagacagaaagaagggcttgatcaagttaatgaggcacgaggctgaggttttgtccttcttcctcgcccaacttgatcttgttgatcctgatgttattctcggtcatcaactggaaggtgtcgattatagtatcctcctgaacagattacatgagaagaagacgccgcaatggtcccggctcggacgtctccgcagagcacagtggccagcagcaataggcaagactggcggtaatgtttttgccgaacgccaggtcatggctggccgtcttctttgcgatctagccaacgacgctggaaagtctgtcatgttcaagtgtcagtcttggagcttgactgaaatgtgcaacatttatcttggcggagacattcgtcgaagagatgtcgacaacgaggtcgctctgaaatcttgggctaccgagaagagtggtctgatggactacattacccacatggaggcggatacctacttcatagccgctttagcactgggcacccagatgcttccccttaccaaggtcttgaccaacttagcgggtaactcatgggctcgaacgttgacgggtacgcgagctgagcgcaacgagtacattctcttgcatgagttccaccggaacaagtatatttgccctgataagcaggtcttcaagggccgacagcaaaacgaggagaatcaagaagaaggaagtgcagacaataagaaaaaagacaaatacaagggtggtctggtcttcgagccagaaaaggggttatacgacaaatttgtgcttgtcatggacttcaattccttgtacccctccatcatccaagagtacaatatttgctttactaccgtcgagcggtctggaatgactgaagatgaggatgctgtcccagatgtcccaacagatcaggaccaaggcatactacctaagctgattgccactctagtcagtcgacgacgacaggtgaagtcgctgatgaaggacaagaatgccacacctgagcagcttgcaacatgggatatcaagcaactcgcgttgaagctgacagccaattccatgtatggttgtcttggatacaccaagtcacgattttatgcgcgacctttagctgtcctcaccacattcaaaggccgtgaaattcttcgaagcaccaaagacctggcagagtctaagtcgttacaagtcatctatggtgatactgattcagtcatgatcaacgccaatgtggagtctatcgcggacgccttcaaggtcggcaatgatttcaagaaagctgtcaatgaacgataccgccttcttgagattgatattgacaacgtcttcaggaggattcttctgcaagccaagaagaagtacgccgccgtgaacctcgtcgaggttcctggtaataagtatgtagagaagatggaggtcaagggtctggatatgaaacgaagagaatactgcgctctctccaaggagatctcctcccgaattcttaacgagattctttccggagatgagactgaagttgctgtgcaacggattcatgagtatctgcgggagatcgcagccaagatgcgcgaacacgctatcccgactcaaaaatacatcatctacacccagctcggcaaagcacccaaagaataccccaatgccgactcgatgccacaggtgcaagtggcattgcgtgaaatagcacgtggcaagaacgtcagaaagggcgatgtcatctcatatgtggtcaccggcgacagcaagacgacctcagaacctgtcgccaagcgtgcctgcataccacaagacgttacgaagaaggattcagacctgaaggtagacgtagaatattatatcggcaagcaaattttccctcctgtcgagcgtctgtgtgccaacatcactggtacatcgacctcacagctggccgagcagcttggacttgacgtccgtcgatacgccaacaactcatccaattccggctccaacgagtttgaaatccaccctctcgaatctcagatccctgacgagatccgatttggcgattgtgctcgtctgtctttgcgctgcagaaaatgtaagacttcatcgccattcgaaggtctcttcgcagcaagctcggcctcacagcccagtcaagcgatgactgtcacagcacaaggcgtatcctgtccatcctgttcttctatcataccgaacctgagtatagtcgcgcagctcgaacacgcaatccgcacccagacatcgaaatactacgaaggctggctcgtctgcgacgactcatcgtgcggaaagcgaactcgtcagctatccgtctacggatcgagatgtttgggtccgcagggcctggcgaccggctgtatgggccgcatgcggtatgagtactcggagcgcgagatctacaaccagttggtgtacttcgcgtctctctgggacgtcgagaaggctaaggcgaaagctaattccggcgccactgggcttggtggttcgggcaatgctgggtcgcttaatgccgaggagaaacaacgggttcttacccttgcgaaccacaatctccaccgctttagtgtgcttaagggcgttgtggatagatatcttgataaatgtggacgccagtgggtggctatggataacctgttctcgaagcttgggtttgccgcgatttaaggggcgagcctgagttaggagagaaacattgaatacctaggtatgaactgtgctgcaaaagcgctgatggtatgaggaatgggctaggcttgcttggttttttatgagggatatttgttgtatatacggagttttcgggaaagcattgtttgttgtcgtttgaatagtggcgggtttctcctgagtacttatcctatgaataggatgagttaagcatactagtatgcgtttaattctcaaaaacag

SEQ ID NO: 32748 - DNA, 4584 bp, Muscodor strobelii
  misc_feature: SGI cDNA ID NO. 571288
  misc_feature: Reduced expression when VOC is produced
  misc_feature: Encodes the peptide sequence at SEQ ID NO 32749
atgacttctacagccagtcaacccgcaaaccaggcgtccaacaacaccgcggcccccgctgcaccgtcttacgcttccgctgccggcgcagtcaagaagcctgcgacgcccgttgttgcgactggctctaaccagcccgttgtagccaccagctcccacgtgccctcgccgcaccatgcaaagtcgtcgtccgtctcgcctctgaacggccgccccaatatcatgcccgctgtccccgccgcggtccccaaccctgcccccgtcgcccacggcacctccaccctcaacggccacgccgaccacgcccgcaagacctccgtcaccatgagtgccaacggccccaacagctactccgccaacggcagctctgccgctcccaaggccggaatccagttcggctaccaggactcccctgccgcctctcacagcactcctcagccctctgcggcgcctatccccatccccggcgcagctggccgtggtgtgactgagccccgtaactcaccctccccgatccctatgcccgccgtcagcggtggcaagcccccctccagcggtgccccctccagcgctaccctcaacttcggtagctttgacggagatcgatcacagcacatgcgcacaccctctacttctcaggagcccggcgccctcggtgctcttcactcgccacacatgcgacgtggctccaatgttagcgacatgagcaacccagctggcacacctggcggaatgggtcgcggtggattccaaggtggtcgtggcggacgtccatacaacggaggtccctacaatccctcgatgggatatcctcccaacttcaaccgtggtcaacaaggccaccagggacgaggtggaatgcctcccaacttcgctggcaatggccgtggtggacatcacttcacgccaccaccgcagaaccgcagtcctgctttgccacccgctatgcctcaccaaccgcccaacatgccccctggaaacatgggccagatgccacccatgaacccgtactactaccagcaaccgggccctaatcaggtacatttccaccagccccaacagaactttgagcgtcctttcaacagcaagaacaagaagaaaggtcgtcgtggcgactccgacaagtactcgggtcagcaacgacgatcagacaaatcagacacgttcagacatgaacccgaccagagccagaagtccaaacgctatagtaagcgtccagattaccgagttggtatgggcgaagactggcgacagggtggccaaggtggctacttgtcgtcagacaggccggatggtccaactgcatccgagacgctcatggtccccatcccacacccttttgccgttcatactcatgcccctcataacggggatcgtatggacatcccgcctgataacctactaacaagtgcgaagcagaactactatcaacctgcgttcaatcccgctggacaacacatgggaatacccagctatcccgtgtatcccgtgatgcaacagtcaccagttcctaattttgcgcagcctcacatggcaggaccttataaccctcctggcgcccagcccatgtcgcgcagcagctcccaaatctcggaacagcaccgacctgcttcaagcactggtcaaagccaggcgcccatcgcccatggtacgccacagccacagggcgcacaaatgaagccagctgttgtgtcttctccccagttcgctcgtccccagaggaagagcgctgccattagcatcaagtttgagtccggagacgttcttgacgtcaagaatctgaaggcaccagcttcacctgcacccacgagccaaccgtctcgcactccacctgtagtggcgtccacccccacgccccctcccaagacatcaacgcctaaatcatttgtttcggctcatgggcggactgacagcacatccaatgcgaagactgcagaggaaaagagggccgaatttatggaaaagatcaagcagtctaccagtggcgataaacccaaggaagacgaggccgttattgataacgctacccctgatgctgaagagtccaaggcggagcctgccactacagaagaggttaagcctgctgatgaggtcaaagcagagacaactgctgagaagaaaccggaggccgagaaacccgccgaagtgactcctgaaaagaccaaggaggaaactgaggaagaggagatggagcgcatgatccgtgaaatggaagaagaagacgctcgacgtgaaaaggaacaggaggaaatgacccgcaagaagaaggccgaagcagacgccaagaagaaactcgatgatgaatcccgagcggccaatgctgccgaaaatgacaggaagctgcgagagcaggagcgagagatggagcgtcttgaggaagagaaggaacgcaagcgtgctgctggtgaatcatcccagagcgttgccgaccttctcaagaaagacgtcaaagaactcgagaaggacgaggcatcatctacagcagacaagttggcaggtcttagtctcaatgacaaggcatctgctggcagcgcgaagccgagcccaggcggccgcgctcccaagccacaggcccttaacctcgctaccttgaacacgaagtccattgagcccccacaacccagtgctgctctccagtcgctgaagacggcccgactcttggacgtgatcaagaccgacatctatccacctggtatcaactcgccgaaccccgccttgaacgctgctgtcgccaagaagggcacttcattcaagtacgactctgctttcttgctgcagttcaagagcgtgttcacggagcagccgtccattgacttccaccaacaagtaaagaatctcattggtgatggtggtgacgggcgatccagcactcgaggctcagctggcggaccggcaagacaaaacactagaggtgctagtactcccggcgcgcctttccagatgggccagtttggcacgggcagtcagctacctcctggcacaacttctgctcagcgcttcgagatgtccaggaccggatcacgtggacctgccgccaaccccatggccagcttcggacggcctggtgcgttcccaggtggcaataacatgatgcgcactccctctgctatgggtagtatgccgcactcccctagacagggcagccgccgccaagatagcaagaggaacgccacgactgcgaagcaagaagctcaggcagccaagacaatgccgcttaccgcgggtctgaagatcgaagctctgcagactagcacaacaggctggaagccaatgagtatcggcaagggcccctctggcggctcaggtgctgctaaccttatggatcccgccatggttcaaagaaaggtcaaggctgccttgaacaagatgacgcctgagaactttgacagaatctctgaccagatcttggagattgctgctcagtccaaggaggaaagcgatggccggaccttgcgacaggttattcaacttctctttgagaaagctactgatgaagctcactgggcatcgatgtatgccaaattcgccaagaaaatgctcgagactatgagtcctgaagtacgtgacgagaatatcaaggataaagctggcaacgtcgttagtggaggcgccttgttccgaaagtatcttctcaacagatgccaggaagagttcgagcgtggttggaagactgaccttccagagaccgaggagggtgccgataagaagcccctcgaggcaaccatgctgtctgacgaatactacaaagctgctgctgccaagagacgaggtctgggtcttgttcagttcattggtgagctgtacaaacttggcatgctcactgaacgtatcatgcacgaatgtgtcaggaagctggtggactacagcggtattcctgacgaagccgaggttgagtccctctccaaactactaagaaccattggtggacatctcgatgccaccgacaagggcagagcaatgatggacgcgtacttcacacgcatccaatctatggttgacctgcctgacatgcccagccgtctccaattcatgctcatggatgtgattgacttgcgaagggccaactgggcttcaaaggagcagaataagggccctaagactcttgaagaggtgcgagctgaggctgaggctcaagcggctcagaaggctgcagaggctgctcgaagcaatacgagaggtcccggaggtcgtgcacagcttggccgtggtgacgctcgtggctacggccaagttccccaacctgcaccaaaccaggttggtatggatgatcttcgccggctcaagggtggtgccagtcgccaggcaaccacgaatctcacacttgggccaatgtctatgctcggttcacgtagcaacagcaatagacgcctaggtcctagcctcagccgtggtgcggacgactccggtgcctcctctaggactggcactcctccagtgaaagaagcgccgagcagcaacaactcgttcggtcttttggccagcatggaatcagatcaccccggctcgcccccctctgctgcagcctcgcccgctatggcaaaggctacagttgagacatccaacacaacaaaagagggcaactga

SEQ ID NO: 32749 - protein, 1527 aa, Muscodor strobelii
  misc_feature: SGI Peptide ID NO. 571288
  misc_feature (1113)..(1355): Pfam Id: PF02854 Pfam Desc: MIF4G domain
  misc_feature (1)..(1516): NCBI GI: 256729750 Blast Desc: NECHADRAFT_95620 [Nectria haematococca mpVI 77-13-4]
  misc_feature (1)..(1527): NCBI GI: 156064201 Blast Desc: SS1G_00108 [Sclerotinia sclerotiorum 1980] gi|154690970|gb|EDN90708.1| SS1G_00108 [Sclerotinia sclerotiorum 1980]
  misc_feature (32)..(1489): NCBI GI: 145608756 Blast Desc: MGG_06396 [Magnaporthe grisea 70-15] gi|145016194|gb|EDK00684.1| MGG_06396 [Magnaporthe grisea 70-15]
  misc_feature (1)..(1516): NCBI GI: 46122089 Blast Desc: FG05422.1 [Gibberella zeae PH-1]
  misc_feature (1)..(1478): NCBI GI: 116191699 Blast Desc: CHGG_05567 [Chaetomium globosum CBS 148.51] gi|88181480|gb|EAQ88948.1| CHGG_05567 [Chaetomium globosum CBS 148.51]
  misc_feature (410)..(1525): NCBI GI: 261358473 Blast Desc: eukaryotic initiation factor 4F subunit p130 [Verticillium albo-atrum VaMs.102]
  misc_feature (741)..(1523): NCBI GI: 171687094 Blast Desc: protein product [Podospora anserina] gi|170943508|emb|CAP69161.1| protein product [Podospora anserina]
  misc_feature (727)..(1527): NCBI GI: 154312324 Blast Desc: BC1G_06195 [Botryotinia fuckeliana B05.10] gi|150850158|gb|EDN25351.1| BC1G_06195 [Botryotinia fuckeliana B05.10]
  misc_feature (727)..(1521): NCBI GI: 85109871 Blast Desc: NCU07868 [Neurospora crassa OR74A] gi|28924781|gb|EAA33893.1| conserved [Neurospora crassa OR74A]
  misc_feature (462)..(1515): NCBI GI: 169783686 Blast Desc: [Aspergillus oryzae RIB40] gi|83775049|dbj|BAE65172.1| protein product [Aspergillus oryzae]
  misc_feature: Useful for introducing or modulating the production of volatile compounds
MTSTASQPANQASNNTAAPAAPSYASAAGAVKKPATPVVATGSNQPVVATSSHVPSPHHAKSSSVSPLNGRPNIMPAVPAAVPNPAPVAHGTSTLNGHADHARKTSVTMSANGPNSYSANGSSAAPKAGIQFGYQDSPAASHSTPQPSAAPIPIPGAAGRGVTEPRNSPSPIPMPAVSGGKPPSSGAPSSATLNFGSFDGDRSQHMRTPSTSQEPGALGALHSPHMRRGSNVSDMSNPAGTPGGMGRGGFQGGRGGRPYNGGPYNPSMGYPPNFNRGQQGHQGRGGMPPNFAGNGRGGHHFTPPPQNRSPALPPAMPHQPPNMPPGNMGQMPPMNPYYYQQPGPNQVHFHQPQQNFERPFNSKNKKKGRRGDSDKYSGQQRRSDKSDTFRHEPDQSQKSKRYSKRPDYRVGMGEDWRQGGQGGYLSSDRPDGPTASETLMVPIPHPFAVHTHAPHNGDRMDIPPDNLLTSAKQNYYQPAFNPAGQHMGIPSYPVYPVMQQSPVPNFAQPHMAGPYNPPGAQPMSRSSSQISEQHRPASSTGQSQAPIAHGTPQPQGAQMKPAVVSSPQFARPQRKSAAISIKFESGDVLDVKNLKAPASPAPTSQPSRTPPVVASTPTPPPKTSTPKSFVSAHGRTDSTSNAKTAEEKRAEFMEKIKQSTSGDKPKEDEAVIDNATPDAEESKAEPATTEEVKPADEVKAETTAEKKPEAEKPAEVTPEKTKEETEEEEMERMIREMEEEDARREKEQEEMTRKKKAEADAKKKLDDESRAANAAENDRKLREQEREMERLEEEKERKRAAGESSQSVADLLKKDVKELEKDEASSTADKLAGLSLNDKASAGSAKPSPGGRAPKPQALNLATLNTKSIEPPQPSAALQSLKTARLLDVIKTDIYPPGINSPNPALNAAVAKKGTSFKYDSAFLLQFKSVFTEQPSIDFHQQVKNLIGDGGDGRSSTRGSAGGPARQNTRGASTPGAPFQMGQFGTGSQLPPGTTSAQRFEMSRTGSRGPAANPMASFGRPGAFPGGNNMMRTPSAMGSMPHSPRQGSRRQDSKRNATTAKQEAQAAKTMPLTAGLKIEALQTSTTGWKPMSIGKGPSGGSGAANLMDPAMVQRKVKAALNKMTPENFDRISDQILEIAAQSKEESDGRTLRQVIQLLFEKATDEAHWASMYAKFAKKMLETMSPEVRDENIKDKAGNVVSGGALFRKYLLNRCQEEFERGWKTDLPETEEGADKKPLEATMLSDEYYKAAAAKRRGLGLVQFIGELYKLGMLTERIMHECVRKLVDYSGIPDEAEVESLSKLLRTIGGHLDATDKGRAMMDAYFTRIQSMVDLPDMPSRLQFMLMDVIDLRRANWASKEQNKGPKTLEEVRAEAEAQAAQKAAEAARSNTRGPGGRAQLGRGDARGYGQVPQPAPNQVGMDDLRRLKGGASRQATTNLTLGPMSMLGSRSNSNRRLGPSLSRGADDSGASSRTGTPPVKEAPSSNNSFGLLASMESDHPGSPPSAAASPAMAKATVETSNTTKEGN

SEQ ID NO: 32750 - DNA, 5749 bp, Muscodor strobelii
  misc_feature: SGI EST ID NO. CUFF.78765.2
  misc_feature: Variant of the nucleotide sequence at SEQ ID NO 32748
cttttctccaacccacaactgatctctcagatcatcacacatcggcccaggaagacatctccttctgacggtcgttaaccctttccccctccggtctccttgcatcatcacgatcaaggacggacatttctggattggacttttctctgtatttgcttacagagaatctcccaccgactccgctctcctcgacgcccgcagagccaacgcacgcacgcacgccctgcgctcgcgctgcctgcctttgccccgtcgcctttttctctcctgtcctgcctcttccgcagcacagcgacaccacaccctgtccacccatctcccgagccgtcgtgcagtctcctcgagactcctcgcgaccgcataatttacagtccgcttgtcgccgtcgaaacggtactatcggattcacggcactgcccgacgcacgagaactggtccttgcagccgtttccacataattaatttgcgcccccgtctcccgctagagcgagacttgccttcctttgcactctgattcatcgcgtcgaccgcattctgtcattcattccttggactcgacgtcttccgactgctgtttttcgcttctttctccctgcgcgcctcgccgtccggaaagaaggattatcccgcacgtccccccagccaaggaaacaaccagaaaactgtgtttgcgaatacgactcatccagccacgacgccaacgttacttatgacttctacagccagtcaacccgcaaaccaggcgtccaacaacaccgcggcccccgctgcaccgtcttacgcttccgctgccggcgcagtcaagaagcctgcgacgcccgttgttgcgactggctctaaccagcccgttgtagccaccagctcccacgtgccctcgccgcaccatgcaaagtcgtcgtccgtctcgcctctgaacggccgccccaatatcatgcccgctgtccccgccgcggtccccaaccctgcccccgtcgcccacggcacctccaccctcaacggccacgccgaccacgcccgcaagacctccgtcaccatgagtgccaacggccccaacagctactccgccaacggcagctctgccgctcccaaggccggaatccagttcggctaccaggactcccctgccgcctctcacagcactcctcagccctctgcggcgcctatccccatccccggcgcagctggccgtggtgtgactgagccccgtaactcaccctccccgatccctatgcccgccgtcagcggtggcaagcccccctccagcggtgccccctccagcgctaccctcaacttcggtagctttgacggagatcgatcacagcacatgcgcacaccctctacttctcaggagcccggcgccctcggtgctcttcactcgccacacatgcgacgtggctccaatgttagcgacatgagcaacccagctggcacacctggcggaatgggtcgcggtggattccaaggtggtcgtggcggacgtccatacaacggaggtccctacaatccctcgatgggatatcctcccaacttcaaccgtggtcaacaaggccaccagggacgaggtggaatgcctcccaacttcgctggcaatggccgtggtggacatcacttcacgccaccaccgcagaaccgcagtcctgctttgccacccgctatgcctcaccaaccgcccaacatgccccctggaaacatgggccagatgccacccatgaacccgtactactaccagcaaccgggccctaatcagaactactatcaacctgcgttcaatcccgctggacaacacatgggaatacccagctatcccgtgtatcccgtgatgcaacagtcaccagttcctaattttgcgcagcctcacatggcaggaccttataaccctcctggcgcccagcccatgtcgcgcagcagctcccaaatctcggaacagcaccgacctgcttcaagcactggtcaaagccaggcgcccatcgcccatggtacgccacagccacagggcgcacaaatgaagccagctgttgtgtcttctccccagttcgctcgtccccagaggaagagcgctgccattagcatcaagtttgagtccggagacgttcttgacgtcaagaatctgaaggcaccagcttcacctgcacccacgagccaaccgtctcgcactccacctgtagtggcgtccacccccacgccccctcccaagacatcaacgcctaaatcatttgtttcggctcatgggcggactgacagcacatccaatgcgaagactgcagaggaaaagagggccgaatttatggaaaagatcaagcagtctaccagtggcgataaacccaaggaagacgaggccgttattgataacgctacccctgatgctgaagagtccaaggcggagcctgccactacagaagaggttaagcctgctgatgaggtcaaagcagagacaactgctgagaagaaaccggaggccgagaaacccgccgaagtgactcctgaaaagaccaaggaggaaactgaggaagaggagatggagcgcatgatccgtgaaatggaagaagaagacgctcgacgtgaaaaggaacaggaggaaatgacccgcaagaagaaggccgaagcagacgccaagaagaaactcgatgatgaatcccgagcggccaatgctgccgaaaatgacaggaagctgcgagagcaggagcgagagatggagcgtcttgaggaagagaaggaacgcaagcgtgctgctggtgaatcatcccagagcgttgccgaccttctcaagaaagacgtcaaagaactcgagaaggacgaggcatcatctacagcagacaagttggcaggtcttagtctcaatgacaaggcatctgctggcagcgcgaagccgagcccaggcggccgcgctcccaagccacaggcccttaacctcgctaccttgaacacgaagtccattgagcccccacaacccagtgctgctctccagtcgctgaagacggcccgactcttggacgtgatcaagaccgacatctatccacctggtatcaactcgccgaaccccgccttgaacgctgctgtcgccaagaagggcacttcattcaagtacgactctgctttcttgctgcagttcaagagcgtgttcacggagcagccgtccattgacttccaccaacaagtaaagaatctcattggtgatggtggtgacgggcgatccagcactcgaggctcagctggcggaccggcaagacaaaacactagaggtgctagtactcccggcgcgcctttccagatgggccagtttggcacgggcagtcagctacctcctggcacaacttctgctcagcgcttcgagatgtccaggaccggatcacgtggacctgccgccaaccccatggccagcttcggacggcctggtgcgttcccaggtggcaataacatgatgcgcactccctctgctatgggtagtatgccgcactcccctagacagggcagccgccgccaagatagcaagaggaacgccacgactgcgaagcaagaagctcaggcagccaagacaatgccgcttaccgcgggtctgaagatcgaagctctgcagactagcacaacaggctggaagccaatgagtatcggcaagggcccctctggcggctcaggtgctgctaaccttatggatcccgccatggttcaaagaaaggtcaaggctgccttgaacaagatgacgcctgagaactttgacagaatctctgaccagatcttggagattgctgctcagtccaaggaggaaagcgatggccggaccttgcgacaggttattcaacttctctttgagaaagctactgatgaagctcactgggcatcgatgtatgccaaattcgccaagaaaatgctcgagactatgagtcctgaagtacgtgacgagaatatcaaggataaagctggcaacgtcgttagtggaggcgccttgttccgaaagtatcttctcaacagatgccaggaagagttcgagcgtggttggaagactgaccttccagagaccgaggagggtgccgataagaagcccctcgaggcaaccatgctgtctgacgaatactacaaagctgctgctgccaagagacgaggtctgggtcttgttcagttcattggtgagctgtacaaacttggcatgctcactgaacgtatcatgcacgaatgtgtcaggaagctggtggactacagcggtattcctgacgaagccgaggttgagtccctctccaaactactaagaaccattggtggacatctcgatgccaccgacaagggcagagcaatgatggacgcgtacttcacacgcatccaatctatggttgacctgcctgacatgcccagccgtctccaattcatgctcatggatgtgattgacttgcgaagggccaactgggcttcaaaggagcagaataagggccctaagactcttgaagaggtgcgagctgaggctgaggctcaagcggctcagaaggctgcagaggctgctcgaagcaatacgagaggtcccggaggtcgtgcacagcttggccgtggtgacgctcgtggctacggccaagttccccaacctgcaccaaaccaggttggtatggatgatcttcgccggctcaagggtggtgccagtcgccaggcaaccacgaatctcacacttgggccaatgtctatgctcggttcacgtagcaacagcaatagacgcctaggtcctagcctcagccgtggtgcggacgactccggtgcctcctctaggactggcactcctccagtgaaagaagcgccgagcagcaacaactcgttcggtcttttggccagcatggaatcagatcaccccggctcgcccccctctgctgcagcctcgcccgctatggcaaaggctacagttgagacatccaacacaacaaaagagggcaactgagtgaccggagctcagtaaatagacgatgctttgcattcacggcagcatttcatgcatagactcggacagtggttgcgttgcatttacggggacatcaaaaacgtgtcaaaaagttttcaggtttcgttcccgtcaatatgatacctatttctagacgtccatttcctcttcgcacccttactccctaagtttttaatgtcatcctcattggttttcacttcccaatctgtatttccatgaactttcgcacgctcccggaaacaacagtagatgctgtacactgagaaggaagaagggtttcattgtgcatgtcatggcgggggttggggaggatattcgtctcagtattgtccagacgtggctatgtcgttcacgtcaagaataagagcagtgctcaaggatcggacaagagatgtggggtggactaaatgcagcagccgcgacggtatcagggcggatggagacaatagggtcttcacgtggggatactagtctggttcaggagacacgggagggattgtgaactgctgtgttgcccaataaagggcttcaatctgtcagcttcgcatctatgtgctttcgttttgcaaacaggagagcggaatcgcttggaatcgggcccaaagcgaggtagagggacgtgtgatggccgaggcggttgggcgggtgtgaggatgagggcacgagtgaagtggtgcatcttttttgacccaattctcactgtatacatattaattcctagaccacaaatggcccgtggcagttcgcgagaatttcagactacataaaaccccattcgagtttattaatgctttggattgtgatgccacgttcttg

SEQ ID NO: 32751 - DNA, 1906 bp, Muscodor strobelii
  misc_feature: SGI cDNA ID NO. 571289
  misc_feature: Elevated expression when VOC is produced
  misc_feature: Encodes the peptide sequence at SEQ ID NO 32752
atggcgccactggtgggactcctcaagggcctcaccctcatctccctagtcgccagcgccccaacacccgtccaaaagcgagctgctctcccggactacgcaataacctacgctccgatcacctatctctacagcggcgagctgtactacccatcagacatcaccgtacacttagcgcacatacagccagaagtgaactacgtcgcgatcggggcaaacaacagcgtcaatgtcaataatctcaattcacttaatagtagtgtttatttgacggcttccgaaaagccgagtaataacccgtattggattacgagtggttatgggaaaccagatgcgactggcaagagtggcgcccctgggacgataattgctgttgagaagaatagcacgtggaccgatgtgttttattttcatttttatagctataattatggcgggaaagtcctggggataaactttgatgatcatgttggggattgggaacatgttatgatacgattcataaactctcaaccttatgcaatataccactcccaacactcagctggctcagcttactactgggacatcatgaccttctctggcgtccgcccaaagacatatgtcggcaacgggggccacgcaaactacgccacagcaggaaaacaagagtacacggtcgcagccggaatagtaacagacacgaccgatgccggagttgcctgggacatgacgctgaattatcggggatactactacgataacaacaccaacaccttcacttccgccggtggagcgggagcggggggaacggagcagggtggagagagtactacgtggttgaactggctgggagcttggggcgatgaacaatatccttcgacctatttagggcagtattgtattttcagtgagtgtcactatgttagtggaccgacaggccctgttgcgaagaatttgggaagaaacgccatgtgtcagacggaggatggatgtcagatttttgatgatatcaatgagttgacggagcagggcaagatcgtagagggctacgccatgatcgcaatcgtcggtgcgagcgttgcgctcggatatctgatctggaccatcacgtgtctgcaaacaaacgtgcgcaaagcgaaagctctcaaagtaccaatcatacacattccaattgattcgaacaacgtcatatggattctcctacaaccgcacgtctggaaaatactggacaatcttcccatttcttgggcttcttacccacgcttcatccgcttctcgcgcagagggtggcattttgcggaaaaggcgagaatccacgaagaaataggaccagtatatgcgcttgtttctcctgtcgcaatcaatattcatgttgcagatccggatgccattcgtgatatcgttacgcgacgtggggattttcagcgacctattgcagagctaaagctcttggaactttacgggccatgcatatcgacggcaagatgggaagaatggccgcgccatcgcaaagtaatggcaacgccatttaacgaaacaatcatgaagtccgtatgggatgagtctctccgccaagctagtggtatgctgcgcacatgggtctccgcggctgaagacggtatacctagctaccagcaagacacaagagcgctctcacttaatgtcctcgctgctataggcttcggcaaagcgtacgacttccgtggttccgcagagccccagctcgatgaaattggtagttatcgagattctctgcagacggtgctcgataacatcattctcctcatgctaataccattcaacatcttgcgcatgttgccgaagaaatgggctaggatcggtgatgctggtattgctttcaaaaaccacatggcgaagatgctagatgaggagacgaatgcattgcatcaaggcaaacagcggg

SEQ ID NO: 32752 - protein, 635 aa, Muscodor strobelii
  misc_feature: SGI Peptide ID NO. 571289
  misc_feature (358)..(633): NCBI GI: 238507582 Blast Desc: cytochrome P450, [Aspergillus flavus NRRL3357] gi|220688511|gb|EED44863.1| cytochrome P450, [Aspergillus flavus NRRL3357]
  misc_feature (361)..(632): NCBI GI: 145246712 Blast Desc: An12g05360 [Aspergillus niger] gi|134080326|emb|CAK46248.1| protein product [Aspergillus niger]
  misc_feature (346)..(633): NCBI GI: 212538427 Blast Desc: cytochrome P450, [Penicillium marneffei ATCC 18224] gi|210069111|gb|EEA23202.1| cytochrome P450, [Penicillium marneffei ATCC 18224]
  misc_feature (346)..(633): NCBI GI: 242813672 Blast Desc: cytochrome P450 monooxygenase, [Talaromyces stipitatus ATCC 10500] gi|218714552|gb|EED13975.1| cytochrome P450 monooxygenase, [Talaromyces stipitatus ATCC 10500]
  misc_feature (346)..(633): NCBI GI: 242765017 Blast Desc: cytochrome P450, [Talaromyces stipitatus ATCC 10500] gi|218724085|gb|EED23502.1| cytochrome P450, [Talaromyces stipitatus ATCC 10500]
  misc_feature (346)..(634): NCBI GI: 169599605 Blast Desc: SNOG_02626 [Phaeosphaeria nodorum SN15] gi|111068237|gb|EAT89357.1| SNOG_02626 [Phaeosphaeria nodorum SN15]
  misc_feature (14)..(342): NCBI GI: 189202240 Blast Desc: conserved [Pyrenophora tritici-repentis Pt-1C-BFP] gi|187984555|gb|EDU50043.1| conserved [Pyrenophora tritici-repentis Pt-1C-BFP]
  misc_feature (346)..(633): NCBI GI: 169772033 Blast Desc: [Aspergillus oryzae RIB40] gi|83768345|dbj|BAE58484.1| protein product [Aspergillus oryzae]
  misc_feature (346)..(633): NCBI GI: 238485360 Blast Desc: cytochrome P450, [Aspergillus flavus NRRL3357] gi|220698797|gb|EED55136.1| cytochrome P450, [Aspergillus flavus NRRL3357]
  misc_feature (4)..(331): NCBI GI: 261204675 Blast Desc: conserved [Ajellomyces dermatitidis SLH14081] gi|239587336|gb|EEQ69979.1| conserved [Ajellomyces dermatitidis SLH14081] gi|239614125|gb|EEQ91112.1| conserved [Ajellomyces
  misc_feature: Useful for introducing or modulating the production of volatile compounds
MAPLVGLLKGLTLISLVASAPTPVQKRAALPDYAITYAPITYLYSGELYYPSDITVHLAHIQPEVNYVAIGANNSVNVNNLNSLNSSVYLTASEKPSNNPYWITSGYGKPDATGKSGAPGTIIAVEKNSTWTDVFYFHFYSYNYGGKVLGINFDDHVGDWEHVMIRFINSQPYAIYHSQHSAGSAYYWDIMTFSGVRPKTYVGNGGHANYATAGKQEYTVAAGIVTDTTDAGVAWDMTLNYRGYYYDNNTNTFTSAGGAGAGGTEQGGESTTWLNWLGAWGDEQYPSTYLGQYCIFSECHYVSGPTGPVAKNLGRNAMCQTEDGCQIFDDINELTEQGKIVEGYAMIAIVGASVALGYLIWTITCLQTNVRKAKALKVPIIHIPIDSNNVIWILLQPHVWKILDNLPISWASYPRFIRFSRRGWHFAEKARIHEEIGPVYALVSPVAINIHVADPDAIRDIVTRRGDFQRPIAELKLLELYGPCISTARWEEWPRHRKVMATPFNETIMKSVWDESLRQASGMLRTWVSAAEDGIPSYQQDTRALSLNVLAAIGFGKAYDFRGSAEPQLDEIGSYRDSLQTVLDNIILLMLIPFNILRMLPKKWARIGDAGIAFKNHMAKMLDEETNALHQGKQR

SEQ ID NO: 32753 - DNA, 1247 bp, Muscodor strobelii
  misc_feature: SGI EST ID NO. CUFF.77470.1
  misc_feature: Variant of the nucleotide sequence at SEQ ID NO 32751
acaggatgctggaggcgtcatgcaaggtccagttctagacaatgacctcttatataaaagggtcgaatcctgccaagagggatctcacttcgtttctcgcggacttcgatctttgatctcggcgtcaaagttggatgttcatcacaatggcgccactggtgggactcctcaagggcctcaccctcatctccctagtcgccagcgccccaacacccgtccaaaagcgagctgctctcccggactacgcaataacctacgctccgatcacctatctctacagcggcgagctgtactacccatcagacatcaccgtacacttagcgcacatacagccagaagtgaactacgtcgcgatcggggcaaacaacagcgtcaatgtcaataatctcaattcacttaatagtagtgtttatttgacggcttccgaaaagccgagtaataacccgtattggattacgagtggttatgggaaaccagatgcgactggcaagagtggcgcccctgggacgataattgctgttgagaagaatagcacgtggaccgatgtgttttattttcatttttatagctataattatggcgggaaagtcctggggataaactttgatgatcatgttggggattgggaacatgttatgatacgattcataaactctcaaccttatgcaatataccactcccaacactcagctggctcagcttactactgggacatcatgaccttctctggcgtccgcccaaagacatatgtcggcaacgggggccacgcaaactacgccacagcaggaaaacaagagtacacggtcgcagccggaatagtaacagacacgaccgatgccggagttgcctgggacatgacgctgaattatcggggatactactacgataacaacaccaacaccttcacttccgccggtggagcgggagcggggggaacggagcagggtggagagagtactacgtggttgaactggctgggagcttggggcgatgaacaatatccttcgacctatttagggcagtattgtattttcagtgagtgtcactatgttagtggaccgacaggccctgttgcgaagaatttgggaagaaacgccatgtgtcagacggaggatggatgtcagatttttgatgatatcaatgagttgacggagcaggggtaggagacaagtatcttgcatacgcagatgtcaaatgcagatgtcggatccaatatataaaatccgttaatcatgtcgatgttgacg

SEQ ID NO: 32754 - DNA, 1326 bp, Muscodor strobelii
  misc_feature: SGI cDNA ID NO. 571290
  misc_feature: Encodes the peptide sequence at SEQ ID NO 32755
atggcttcctcgcaatatggctccctgacgcccttgcaacacttcaaccaacaccagcatcctcctcagcctcaatctcaaccgcaacaacatccccactacaacgctcaactctcgcactttcagattccccaacagcctccgcatctacagcctaatacaccccaccagaaccagaatggcagcatacaccctcagatgcagcagcaatccacgccggatggtgctgctctccagtctcagatgcagaccatgaccccaatccctgccccgaatctcaacctcagtaccaactccaatgtaaatgccggcgccacatccccgacgactgacactcctacgcagcccgatggcgagccccgcaagcctggtcgtccagccaagcgcagacgtggcgataagatagctgctgagactgctccgggccctcttcctcgccagcccaccgtccaccccttcagcaaaggcccttataacaccatggaggatgccattttctctctccagctgcacgtcttcacgtccggctatggcgtgtcgcagaaacgtactgtcaaggagaagctgccctctggcaagtacgacccggagggcgacatcattaggaaggactttgcctgcgacagaggaggaaacgagttcgtgtcgcagtcccgtggcgaaagacggcgcgaatcaaaaaagtgcggatgtccctggaaggctgcaattcgtcggttacgccgagagggtgaccgttggttcatcgagattctggagccccaacacaatcaccctgtcaccgagcccgacgagatgcataccatggcttcataccgtcgctggcaacgtgaaaataacgctgggatccggagcgcaattcaccgactaacacgtgctgcggccatgcccgctcgtcagattgcccaatacctcaaaggcgatctacaggatgctgatcttgatcgcatcgacaaacaaatactacgtgcactcagtatgaatgacaaggagctcccgggcaacgagaaagacaccagttctgtggtattcgagatgctggctaggaggccagtgatcattctgcaggacactaacagcggggagagcacaacggtcaacggacaatctaccccagccaactcatccaatcaccccatgcaaatacagacttataatgggcagccgctcacttaccagaaccacttcagtggaacttttgcaccggctccgaatccgaatcctatcccgccggcaaaccctcctctacctgcgcctacaggagatggcaacaatagtgggcagatcaatccccagccagagttttcgagaaatcagaatgactag

SEQ ID NO: 32755 - protein, 441 aa, Muscodor strobelii
  misc_feature: SGI Peptide ID NO. 571290
  misc_feature (172)..(262): Pfam Id: PF03101 Pfam Desc: FAR1 DNA-binding domain
  misc_feature (198)..(262): Pfam Id: PF03101 Pfam Desc: FAR1 DNA-binding domain
  misc_feature (146)..(282): NCBI GI: 85081010 Blast Desc: NCU05145 [Neurospora crassa OR74A] gi|28881433|emb|CAD70550.1| [Neurospora crassa] gi|28917715|gb|EAA27407.1| [Neurospora crassa OR74A]
  misc_feature (155)..(258): NCBI GI: 164424163 Blast Desc: NCU07855 [Neurospora crassa OR74A] gi|157070401|gb|EAA33880.2| conserved [Neurospora crassa OR74A]
  misc_feature (202)..(306): NCBI GI: 116204135 Blast Desc: CHGG_09951 [Chaetomium globosum CBS 148.51] gi|88176079|gb|EAQ83547.1| CHGG_09951 [Chaetomium globosum CBS 148.51]
  misc_feature (148)..(258): NCBI GI: 145601963 Blast Desc: MGG_05295 [Magnaporthe grisea 70-15] gi|145010421|gb|EDJ95077.1| MGG_05295 [Magnaporthe grisea 70-15]
  misc_feature (155)..(343): NCBI GI: 116191671 Blast Desc: CHGG_05553 [Chaetomium globosum CBS 148.51] gi|88181466|gb|EAQ88934.1| CHGG_05553 [Chaetomium globosum CBS 148.51]
  misc_feature (158)..(335): NCBI GI: 171687118 Blast Desc: protein product [Podospora anserina] gi|170943520|emb|CAP69173.1| protein product [Podospora anserina]
  misc_feature (158)..(258): NCBI GI: 261353847 Blast Desc: conserved [Verticillium albo-atrum VaMs.102]
  misc_feature (202)..(318): NCBI GI: 116200325 Blast Desc: CHGG_08318 [Chaetomium globosum CBS 148.51] gi|88179597|gb|EAQ87065.1| CHGG_08318 [Chaetomium globosum CBS 148.51]
  misc_feature (155)..(258): NCBI GI: 261358074 Blast Desc: conserved [Verticillium albo-atrum VaMs.102]
  misc_feature (158)..(320): NCBI GI: 85106835 Blast Desc: NCU06551 [Neurospora crassa OR74A] gi|28923859|gb|EAA33022.1| NCU06551 [Neurospora crassa OR74A]
MASSQYGSLTPLQHFNQHQHPPQPQSQPQQHPHYNAQLSHFQIPQQPPHLQPNTPHQNQNGSIHPQMQQQSTPDGAALQSQMQTMTPIPAPNLNLSTNSNVNAGATSPTTDTPTQPDGEPRKPGRPAKRRRGDKIAAETAPGPLPRQPTVHPFSKGPYNTMEDAIFSLQLHVFTSGYGVSQKRTVKEKLPSGKYDPEGDIIRKDFACDRGGNEFVSQSRGERRRESKKCGCPWKAAIRRLRREGDRWFIEILEPQHNHPVTEPDEMHTMASYRRWQRENNAGIRSAIHRLTRAAAMPARQIAQYLKGDLQDADLDRIDKQILRALSMNDKELPGNEKDTSSVVFEMLARRPVIILQDTNSGESTTVNGQSTPANSSNHPMQIQTYNGQPLTYQNHFSGTFAPAPNPNPIPPANPPLPAPTGDGNNSGQINPQPEFSRNQND

SEQ ID NO: 32756 - DNA, 2441 bp, Muscodor strobelii
  misc_feature: SGI EST ID NO. CUFF.77430.0
  misc_feature: Variant of the nucleotide sequence at SEQ ID NO 32754
ccaggcagctgccaggtaagcctttgctgaggggttgtatgggagctatctggggaaggaaggacccctgtcctaataaacacgggcatgacagcaccggctagaacatcctgcatgcattttcccacctgccgtgtccaaatcgcgtgccgctgcctccatcacgactcaccacgcaccacttgtcgccgggcacagcatcaaatgagtatacaaaggacgacgcctttctaccatagagtggcgagatcctatctacttaacagtgcattgctaagttgattcacaacggcttggcaattgagagaccgagtcgccgctctctgtagatatctcggcataccacgcgcactcacagaggggcctggcccacgtcttttttagacgaccatggcttcctcgcaatatggctccctgacgcccttgcaacacttcaaccaacaccagcatcctcctcagcctcaatctcaaccgcaacaacatccccactacaacgctcaactctcgcactttcagattccccaacagcctccgcatctacagcctaatacaccccaccagaaccagaatggcagcatacaccctcagatgcagcagcaatccacgccggatggtgctgctctccagtctcagatgcagaccatgaccccaatccctgccccgaatctcaacctcagtaccaactccaatgtaaatgccggcgccacatccccgacgactgacactcctacgcagcccgatggcgagccccgcaagcctggtcgtccagccaagcgcagacgtggcgataagatagctgctgagactgctccgggccctcttcctcgccagcccaccgtccaccccttcagcaaaggcccttataacaccatggaggatgccattttctctctccagctgcacgtcttcacgtccggctatggcgtgtcgcagaaacgtactgtcaaggagaagctgccctctggcaagtacgacccggagggcgacatcattaggaaggactttgcctgcgacagaggaggaaacgagttcgtgtcgcagtcccgtggcgaaagacggcgcgaatcaaaaaagtgcggatgtccctggaaggctgcaattcgtcggttacgccgagagggtgaccgttggttcatcgagattctggagccccaacacaatcaccctgtcaccgagcccgacgagatgcataccatggcttcataccgtcgctggcaacgtgaaaataacgctgggatccggagcgcaattcaccgactaacacgtgctgcggccatgcccgctcgtcagattgcccaatacctcaaaggcgatctacaggatgctgatcttgatcgcatcgacaaacaaatactacgtgcactcagtatgaatgacaaggagctcccgggcaacgagaaagacaccagttctgtggtattcgagatgctggctaggaggccagtgatcattctgcaggacactaacagcggggagagcacaacggtcaacggacaatctaccccagccaactcatccaatcaccccatgcaaatacagacttataatgggcagccgctcacttaccagaaccacttcagtggaacttttgcaccggctccgaatccgaatcctatcccgccggcaaaccctcctctacctgcgcctacaggagatggcaacaatagtgggcagatcaatccccagccagagttttcgagaaatcagaatgactaggggtggattgcgtggtagatgtacgacgtggggttgagatccagcgaagttgatgagtgggggtgggagaagacaggggatggtgaaccagtttcgcttccttgacttcattttaaggcaacagtacagcgatggggacagaaggcggtcagtctgcaatcagtttctgagacggcggtttgcttcattgtttttgcggtacttcattgagcattaggcgcaaaggacgggagatgatatttgtgatatacctattgttcaaaaaccggcgttcggcggcggaagggtagtgtttgtgcttttgcacctgttaggcgaggtgagaacaacaggaggcgcaccaaaagtgatagggtagggggcggactgagaaattgcttttaccgatggagaggtccgttgcttgatgtcgtcaagatgactgatttttctgtctgatgttctgatattgatagtgctctactcggctaggacaagagagataatgagcaactgatgtcttgaaggcggagactgatttgtcaatgtgttggacgaggacgtggagacataacatgatgcccgtagtcttgagttggtataaaaaaatattatgccacacacgactatgatgtgtggtccgagagttattctatcctcaaggcgctctgtgaattagccatcctcgtttgcaggaacgttgttgttatagactgattacctattaagttcggttcataagggag

SEQ ID NO: 32757 - DNA, 948 bp, Muscodor strobelii
  misc_feature: SGI cDNA ID NO. 571291
  misc_feature: Reduced expression when VOC is produced
  misc_feature: Encodes the peptide sequence at SEQ ID NO 32758
atgagcttaccgacggggcgagcggtgcagaccgcccgcgcgaccatcgccctacggccttctctccatctccgctacctcctccccagaacacagcgccgggcagcatcctggttgaatccatttggcggattcggcggatctggcttatttggcaagaagggcggctcctcacccctgtctgaagagcttacggaacggcagaagcagcagacgatgagcaagatcaccaagcgcatcaccgaccgccgccagggcaagtccatcttcgacgaagaaatcaacgagagcgagaagtaccagcgcgagcagcagcaggcggccggtgacttcgccggcggccgagtctccaccatgaaggagcacatgcagcgcgccctcgacccggatccccgctggcgcgtccgctaccagcgcaagaagatcatgcagatggtccgcaacgacggcaagctctcccgcaaggaccagctcaagcttgacgagaaggaggtccgctgcgactccagcgccctgcccacctccaccaagaagttgatgttcctgtcccgccagatcgccggcaagacggtcgaggacgccatcgcccagatgcgcttctctaagaagaagatggcccgcgaggtcaacggcgagatgctcaaggagcccaagaagatcgtcaccaaggacggccagaagctggtcgtctacaatcctacacagctctacgtcgacgagagttgggtcaccaagggccagatgagaggcatgaggatacaataccacgccagatcccgcatgtcgcgcatgtggagaccgagtgctcgtctttccgtcgttctaaaggaagagaagacgagaataaggatgcacaacgacagagtcgagaaggagaggaagaaagcaccctgggtccatctgcccaatcgtcccgtcacagcccagagaccatactactcttggtaa

SEQ ID NO: 32758 - protein, 315 aa, Muscodor strobelii
  misc_feature: SGI Peptide ID NO. 571291
  misc_feature (27)..(315): NCBI GI: 46136725 Blast Desc: FG09878.1 [Gibberella zeae PH-1]
  misc_feature (29)..(315): NCBI GI: 256732022 Blast Desc: NECHADRAFT_93451 [Nectria haematococca mpVI 77-13-4]
  misc_feature (1)..(315): NCBI GI: 85095376 Blast Desc: NCU05813 [Neurospora crassa OR74A] gi|28921532|gb|EAA30837.1| [Neurospora crassa OR74A]
  misc_feature (1)..(315): NCBI GI: 154294798 Blast Desc: mitochondrial large ribosomal subunit [Botryotinia fuckeliana B05.10] gi|150844572|gb|EDN19765.1| mitochondrial large ribosomal subunit [Botryotinia fuckeliana B05.10]
  misc_feature (1)..(315): NCBI GI: 156055252 Blast Desc: SS1G_04977 [Sclerotinia sclerotiorum 1980] gi|154702762|gb|EDO02501.1| SS1G_04977 [Sclerotinia sclerotiorum 1980]
  misc_feature (53)..(315): NCBI GI: 116201069 Blast Desc: CHGG_08419 [Chaetomium globosum CBS 148.51] gi|88176937|gb|EAQ84405.1| CHGG_08419 [Chaetomium globosum CBS 148.51]
  misc_feature (117)..(315): NCBI GI: 171677434 Blast Desc: protein product [Podospora anserina] gi|170936785|emb|CAP61443.1| protein product [Podospora anserina]
  misc_feature (27)..(292): NCBI GI: 261358517 Blast Desc: mitochondrial large ribosomal subunit [Verticillium albo-atrum VaMs.102]
  misc_feature (45)..(315): NCBI GI: 39946376 Blast Desc: MGG_08323 [Magnaporthe grisea 70-15] gi|145020030|gb|EDK04258.1| MGG_08323 [Magnaporthe grisea 70-15]
  misc_feature (4)..(315): NCBI GI: 259482510 Blast Desc: TPA: conserved [Aspergillus nidulans FGSC A4]
  misc_feature: Useful for introducing or modulating the production of volatile compounds
MSLPTGRAVQTARATIALRPSLHLRYLLPRTQRRAASWLNPFGGFGGSGLFGKKGGSSPLSEELTERQKQQTMSKITKRITDRRQGKSIFDEEINESEKYQREQQQAAGDFAGGRVSTMKEHMQRALDPDPRWRVRYQRKKIMQMVRNDGKLSRKDQLKLDEKEVRCDSSALPTSTKKLMFLSRQIAGKTVEDAIAQMRFSKKKMAREVNGEMLKEPKKIVTKDGQKLVVYNPTQLYVDESWVTKGQMRGMRIQYHARSRMSRMWRPSARLSVVLKEEKTRIRMHNDRVEKERKKAPWVHLPNRPVTAQRPYYSW

SEQ ID NO: 32759 - DNA, 1381 bp, Muscodor strobelii
  misc_feature: SGI EST ID NO. CUFF.78242.0
  misc_feature: Variant of the nucleotide sequence at SEQ ID NO 32757
gggactctgaacttttcctcggagctgctgttgcattccagacaacgtcaagacgtcgacgtcttgtccttccatgcagccgtagggacagccaccacggcaccaacacaacagccatgagcttaccgacggggcgagcggtgcagaccgcccgcgcgaccatcgccctacggccttctctccatctccgctacctcctccccagaacacagcgccgggcagcatcctggttgaatccatttggcggattcggcggatctggcttatttggcaagaagggcggctcctcacccctgtctgaagagcttacggaacggcagaagcagcagacgatgagcaagatcaccaagcgcatcaccgaccgccgccagggcaagtccatcttcgacgaagaaatcaacgagagcgagaagtaccagcgcgagcagcagcaggcggccggtgacttcgccggcggccgagtctccaccatgaaggagcacatgcagcgcgccctcgacccggatccccgctggcgcgtccgctaccagcgcaagaagatcatgcagatggtccgcaacgacggcaagctctcccgcaaggaccagctcaagcttgacgagaaggaggtccgctgcgactccagcgccctgcccacctccaccaagaagttgatgttcctgtcccgccagatcgccggcaagacggtcgaggacgccatcgcccagatgcgcttctctaagaagaagatggcccgcgaggtccgcttcaccctcgaggaggcccgcaacaaggctatcgcctctagggggtatgggtctcggcaaggtcaacggcgagatgctcaaggagcccaagaagatcgtcaccaaggacggccagaagctggtcgtctacaatcctacacagctctacgtcgacgagagttgggtcaccaagggccagatgagaggcatgaggatacaataccacgccagatcccgcatgtcgcgcatgtggagaccgagtgctcgtctttccgtcgttctaaaggaagagaagacgagaataaggatgcacaacgacagagtcgagaaggagaggaagaaagcaccctgggtccatctgcccaatcgtcccgtcacagcccagagaccatactactcttggtaaatacccgtccatatacagatcgttgtatggtcagtcattagtcgtgtacatgtacataatatgtagcatatactgtatcgaaagataccctgtagaacaaacacattcgaatctagctgattcatcacttgtccttgtcgtctattcagaaatagtacctttggtttattcctatgtttagatagctacttatcagcgtgctagtcggagctctatctctatgattattcggcagctcagcagactagac

SEQ ID NO: 32760 - DNA, 1026 bp, Muscodor strobelii
  misc_feature: SGI cDNA ID NO. 571292
  misc_feature: Elevated expression when VOC is produced
  misc_feature: Encodes the peptide sequence at SEQ ID NO 32761
atgaagctgttccagctcacgggtgttctcgtccttgccctcacgggccttgccacggctcaggaccagccttctggatgtgctattggttgcatcaatgatgtatttgcagctggcgtcccgggaacctgtagcggcaacgaccaggcttgtgtgtgcaagaacagcgatgctttcacgaatggtatccgcgactgcttcaagtccgcatgtgttggagaagttgcagacgtccagattcctttggccgatcagtttgccacaagtacttgcggtgtcattgtggctgctcagaccgcgcagaccacgcagactagccctgcctcggcagctgcagagactactccaccagctccggtgacaacttcctcatcaagtccagtggtttcagccacaagtactagcatagcaacgactacctcgacacctgctgcgacaacatcttccagccttgccgcaactccatcatctacttccacttccaaggtgaccagctcatctacacaacacagtgccgccactagccatgctacttctgtatcaccgaagcttacttctgcagcatcgtctgcgtcctcgtctacggcagattctgcagctccagcagagaccaattccaccacgtctaaggaagctagcggtttatcgactcccgccaaagctggaatcggtgcgggtgtgggtgcggcggttttagctgctattgttgtagctttatgtgtctgtcttcgacgccgtaagaaggcttcccccgcccctcgtcgtaccatgaagatctcagagccaatggctggccgtcgccaatatgcggataatgtccacactgcagaagccggtatcgttaagccaggcatccttaagtcgactactccagctccgattcagactagccgtcgtccaggagttgcagttcagccagctcagacctctccttcttcaatgtactcgtataattctgagctcgacgcgcatgccagaccttacgaggatctgctcccccgaacacaaccccgtacaatgttttaa

SEQ ID NO: 32761 - protein, 341 aa, Muscodor strobelii
  misc_feature: SGI Peptide ID NO. 571292
  misc_feature (4)..(340): NCBI GI: 256731641 Blast Desc: NECHADRAFT_80220 [Nectria haematococca mpVI 77-13-4]
  misc_feature (9)..(340): NCBI GI: 39946380 Blast Desc: [Magnaporthe grisea 70-15] gi|145616565|ref|XP_001402910.1| MGG_08321 [Magnaporthe grisea 70-15] gi|145009619|gb|EDJ94275.1| [Magnaporthe grisea 70-15]
  misc_feature (1)..(340): NCBI GI: 116201067 Blast Desc: CHGG_08418 [Chaetomium globosum CBS 148.51] gi|88176936|gb|EAQ84404.1| CHGG_08418 [Chaetomium globosum CBS 148.51]
  misc_feature (130)..(268): NCBI GI: 171677436 Blast Desc: protein product [Podospora anserina] gi|170936786|emb|CAP61444.1| protein product [Podospora anserina]
  misc_feature (1)..(71): NCBI GI: 154270873 Blast Desc: [Ajellomyces capsulatus NAm1] gi|150409513|gb|EDN04957.1| [Ajellomyces capsulatus NAm1]
  misc_feature (13)..(71): NCBI GI: 225555547 Blast Desc: chitinase [Ajellomyces capsulatus G186AR]
  misc_feature (13)..(71): NCBI GI: 240280916 Blast Desc: chitinase [Ajellomyces capsulatus H143]
  misc_feature (27)..(341): NCBI GI: 261358516 Blast Desc: VDBG_07054 [Verticillium albo-atrum VaMs.102]
  misc_feature (144)..(340): NCBI GI: 46136723 Blast Desc: FG09877.1 [Gibberella zeae PH-1]
  misc_feature (27)..(340): NCBI GI: 85095380 Blast Desc: NCU05814 [Neurospora crassa OR74A] gi|28921533|gb|EAA30838.1| NCU05814 [Neurospora crassa OR74A]
  misc_feature: Useful for introducing or modulating the production of volatile compounds
MKLFQLTGVLVLALTGLATAQDQPSGCAIGCINDVFAAGVPGTCSGNDQACVCKNSDAFTNGIRDCFKSACVGEVADVQIPLADQFATSTCGVIVAAQTAQTTQTSPASAAAETTPPAPVTTSSSSPVVSATSTSIATTTSTPAATTSSSLAATPSSTSTSKVTSSSTQHSAATSHATSVSPKLTSAASSASSSTADSAAPAETNSTTSKEASGLSTPAKAGIGAGVGAAVLAAIVVALCVCLRRRKKASPAPRRTMKISEPMAGRRQYADNVHTAEAGIVKPGILKSTTPAPIQTSRRPGVAVQPAQTSPSSMYSYNSELDAHARPYEDLLPRTQPRTMF

SEQ ID NO: 32762 - DNA, 185 bp, Muscodor strobelii
  misc_feature: SGI EST ID NO. CUFF.78251.0
  misc_feature: Variant of the nucleotide sequence at SEQ ID NO 32760
catcaatgatgtatttgcagctggcgtcccgggaacctgtagcggcaacgaccaggcttgtgtgtgcaagaacagcgatgctttcacgaatggtatccgcgactgcttcaagtccgcatgtgttggagaagttgcagacgtccagattcctttggccgatcagtttgccacaagtacttgcggtg

SEQ ID NO: 32763 - DNA, 1308 bp, Muscodor strobelii
  misc_feature: SGI cDNA ID NO. 571293
  misc_feature: Encodes the peptide sequence at SEQ ID NO 32764
atggtgtcactgaagctcccgctcgtccttgctctctcgccaattgttgctgcgagccccctcaatacatctcgacaacatttgtctaagcggacatatcctacgtttgagtacgaaaacagcttccaatccggccaagaagaccgaatcaaagcggcacttccagatgccatcgatttggtggttcgggttacagaagactacgagaagtacagcagtatctgggcgaagtattttccagtagaagaccacgatactgtgaaaaacgtcttcaggcagatagtttctaattcgagagagccaggtgaaggagaagaccggttgaaagaggcccgaatatctggttgggacttttatccagatgtaaagggcgaagatctatgtgcccagggccccgcagcctatacgtctaatttgctggaaaaggatggcacgtacaatggcgtgtcgcgaacttacttctgcgatccggcgtatcaacagcctgctaagtactcagacatcaaatgtaccgacatcggcgatacattaaatgaaaagatggacttcctaggggctacagtcctgcacgagtggttacataacgatgccattggcaaggcagtcgtgacagctcatatcacagacgtagacagtcagaatgggtatggcccctataatacgcgacgcttgctgcgtgactcgcctgataagaccaaactcaacgccgacagttacacgtggctagcactcgaggtcctgtggactaagctgtgcctgaaggacaccggctataaggaccctgcgcgacccttagcaccagcttgcgagtacgcagcggacccatctggcgcctccggagcctgcgcacgtttcgcgtttgagggatggtgcgactgtagcaaggccggcgaattcaagcggctggatggtggccatccgtgtgcatatacggcaggtccgcagttcgcgccaatcgacttgtatacagacacgtgcggagtaacgccgaccccaaagacatctcctaagtgtactgacaagaacatgccgttaaccgtggcgcaggcgcttaatgatcagctgaatcacttaggcgacggaacgctctgttgctcgaacgccgatggcagctgcgccgacgtagtggtcaatgagggcttaggagtgcagctgtgttcagccaatggaaagcagctgtgcgcagggtgcgcgcgcgtggcaaactactgggctggtattattggcgcttgtcaagagaacgggtatgtgggtgggaagcagggcattgctgagaatcccgggttgtcgttgcagagtcaccaatga

SEQ ID NO: 32764 - protein, 435 aa, Muscodor strobelii
  misc_feature: SGI Peptide ID NO. 571293
  misc_feature (8)..(255): NCBI GI: 171679293 Blast Desc: protein product [Podospora anserina] gi|170939272|emb|CAP64500.1| protein product [Podospora anserina]
  misc_feature (64)..(256): NCBI GI: 46112791 Blast Desc: FG02897.1 [Gibberella zeae PH-1]
  misc_feature (172)..(255): NCBI GI: 171683091 Blast Desc: protein product [Podospora anserina] gi|170941505|emb|CAP67157.1| protein product [Podospora anserina]
  misc_feature (181)..(269): NCBI GI: 242259718 Blast Desc: ClocelDRAFT_1014 [Clostridium cellulovorans 743B] gi|242228095|gb|EES31345.1| ClocelDRAFT_1014 [Clostridium cellulovorans 743B]
  misc_feature (56)..(261): NCBI GI: 256726583 Blast Desc: [Nectria haematococca mpVI 77-13-4]
MVSLKLPLVLALSPIVAASPLNTSRQHLSKRTYPTFEYENSFQSGQEDRIKAALPDAIDLVVRVTEDYEKYSSIWAKYFPVEDHDTVKNVFRQIVSNSREPGEGEDRLKEARISGWDFYPDVKGEDLCAQGPAAYTSNLLEKDGTYNGVSRTYFCDPAYQQPAKYSDIKCTDIGDTLNEKMDFLGATVLHEWLHNDAIGKAVVTAHITDVDSQNGYGPYNTRRLLRDSPDKTKLNADSYTWLALEVLWTKLCLKDTGYKDPARPLAPACEYAADPSGASGACARFAFEGWCDCSKAGEFKRLDGGHPCAYTAGPQFAPIDLYTDTCGVTPTPKTSPKCTDKNMPLTVAQALNDQLNHLGDGTLCCSNADGSCADVVVNEGLGVQLCSANGKQLCAGCARVANYWAGIIGACQENGYVGGKQGIAENPGLSLQSHQ

SEQ ID NO: 32765 - DNA, 2532 bp, Muscodor strobelii
  misc_feature: SGI cDNA ID NO. 571294
  misc_feature: Encodes the peptide sequence at SEQ ID NO 32766
atgcagaccatagaggtctcgcaagacggcgggccacaacagcacaataacgagcaccgattctctccgcaacatagcacccaggctgatccggatagtgatgatgcccacaatatagtgagcggcgatgacgtcgataacgaggacgaccatgacagcccaggtgcggtgcgcaacgggaagcgcaaacggccaatatctgtttcttgcgaaacatgtaaacagagaaaggtgaaatgcgatcgcggtcaaccatcgtgcggctggtgccggcgcaattcggtattttgcgaatatcgcgagcgtaagaaacctggcctcagagccggctacggtcgagagctggagcagagacttgataagctcgaagagatcctgcgctctcattccgaaatcttacataactcaattatcacatctccggtgcacactgtcgtccctgcaagcgtgcgcaatagcaaccccagtctccctagtgaccatggtacgccccgggactctgcaatcttccggccgaatgagcccatgagaacgccccaagttgagacagccctctttcttcagaaacccaatgcattcccacctagtggacaagtagaatttggattgccgccaccgacaccaaatatgcactcagatggtttcgggaatcagacatcaattgctggcatatctcctccaagccaattacctacgttgcagccaactgcggcagcccaagactactacgggcatacccaacagcaacaactacaatcccctggcttaggtatagcgcagagtcagacacagatttccaccgatcaggatcttccgccctacgacctactatacgcgctggtagatttgtacttcaaacatattaacacgtggtgtccactactccatcgaaagacaactctcgattcattattcgggccttcgacgctcgatgattccgatagggttttgctgcacgctctggtagcaacgacgctgcgttattcaactgatcctcgactaacagaagaacggcgacgtcattaccacgacatttcgaaacagaaagtccttctttatggcctcgaaaactcatcggtgaaatctttgcaggcacttgtcatcttagcgcttgacctctgcggtgacagcaacgggccgcctggatggaacatcatggcattaataactcggtctgtcgtgcagcttggcttggccgtcgaaagtaactcactgtctgtatcaccaaactatgcctcaatttacacgctacgcgccatgatcctgcctgaacctagagattttattgaagaagagtctcgacgaagattattctggatgatatacctattagaccgatatggtacgattgcaacagcctttgacttcggcttggccgataaggatatagatcggaccttaccgtgtcgggatgacctttggatcaagaaccaaaaggttgaaacgcgatggtttaatgcacgggaccaaaatcctgaccaacccgaccatgaaatgaacagacccgagcacctcggcgcattctcatattatatagaaatcttgggcattttctcccagattcatcagttcctccgacaacctgttgatataggtgctctagcagatgtcgagcagtggcaattacggtataaggaacttgacagtttactaacatcatggaagttcggactgccaggcgattatagcaatatggccaaattgtatcagcccggcgtaagcaagacgctaaccgcaacatgggttatgctccatgccacttatcacacagcagtcattcgactccattcttcagctgcttatccaacaacacggtcgcctattttcacgccatcctacagtgcgagccaacgttgtcatggagcagtagaaaatattgcggcactgggggaatttgttgtacagaatggcatgctgaacaaactcggaccaccatttgctttcacattgtgggttgctgctcgtcttctgcttgtacatgggtccacggtcgagcataagttggctccccaaattgccttcctcgtagacactctgcgtgaaatgggccgctattggcccgtcgcagcacgatactgccaactccttcaaagagtgcttgatgagcatagcgatagcgagcgtgtggtcgggcagaccggagaacgtatcatgccatcgtcagtcaaaatacttgctgacatgcggagaacggcatttgacctcgactttttaataagtcggcaacccaggcatatggcaggcgcgccaagtcggatgccgagtgtcaccccagcacgtacaccggcgcctaatgaactagaatacttagacgtgttcgattttttcaacgtacctcgacttccgatgagccatgaagcatcagttggcccgccgaacggccacccgcaagaaatggggcttgagaacgcagtcaagcatgataatcaactcgccgccgcacaagcgagtttgccgatggctaacgaattcaacattacgaatttcatgatggacgcgaatagtgattggcttttcaaacaagcgggttaa

SEQ ID NO: 32766 - protein, 843 aa, Muscodor strobelii
  misc_feature: SGI Peptide ID NO. 571294
  misc_feature (68)..(106): Pfam Id: PF00172 Pfam Desc: Fungal Zn(2)-Cys(6) binuclear cluster domain
  misc_feature (359)..(472): Pfam Id: PF04082 Pfam Desc: Fungal specific transcription factor domain
  misc_feature (26)..(843): NCBI GI: 46136737 Blast Desc: FG09884.1 [Gibberella zeae PH-1]
  misc_feature (57)..(843): NCBI GI: 39946394 Blast Desc: MGG_08314 [Magnaporthe grisea 70-15] gi|145020040|gb|EDK04268.1| MGG_08314 [Magnaporthe grisea 70-15]
  misc_feature (12)..(842): NCBI GI: 116201103 Blast Desc: CHGG_08436 [Chaetomium globosum CBS 148.51] gi|88176954|gb|EAQ84422.1| CHGG_08436 [Chaetomium globosum CBS 148.51]
  misc_feature (70)..(840): NCBI GI: 156044442 Blast Desc: SS1G_10324 [Sclerotinia sclerotiorum 1980] gi|154694713|gb|EDN94451.1| SS1G_10324 [Sclerotinia sclerotiorum 1980]
  misc_feature (30)..(838): NCBI GI: 154294891 Blast Desc: BC1G_13568 [Botryotinia fuckeliana B05.10] gi|150844526|gb|EDN19719.1| BC1G_13568 [Botryotinia fuckeliana B05.10]
  misc_feature (76)..(842): NCBI GI: 171677484 Blast Desc: protein product [Podospora anserina] gi|170936810|emb|CAP61468.1| protein product [Podospora anserina]
  misc_feature (35)..(843): NCBI GI: 189197253 Blast Desc: conserved [Pyrenophora tritici-repentis Pt-1C-BFP] gi|187980912|gb|EDU47538.1| conserved [Pyrenophora tritici-repentis Pt-1C-BFP]
  misc_feature (49)..(784): NCBI GI: 85091598 Blast Desc: NCU09033 [Neurospora crassa OR74A] gi|28920374|gb|EAA29744.1| NCU09033 [Neurospora crassa OR74A]
  misc_feature (41)..(843): NCBI GI: 238482087 Blast Desc: C6 transcription factor, [Aspergillus flavus NRRL3357] gi|220700332|gb|EED56670.1| C6 transcription factor, [Aspergillus flavus NRRL3357]
  misc_feature (46)..(843): NCBI GI: 70987191 Blast Desc: C6 transcription factor [Aspergillus fumigatus Af293] gi|66846705|gb|EAL87037.1| C6 transcription factor, [Aspergillus fumigatus Af293] gi|159123154|gb|EDP48274.1| C6 transcription
MQTIEVSQDGGPQQHNNEHRFSPQHSTQADPDSDDAHNIVSGDDVDNEDDHDSPGAVRNGKRKRPISVSCETCKQRKVKCDRGQPSCGWCRRNSVFCEYRERKKPGLRAGYGRELEQRLDKLEEILRSHSEILHNSIITSPVHTVVPASVRNSNPSLPSDHGTPRDSAIFRPNEPMRTPQVETALFLQKPNAFPPSGQVEFGLPPPTPNMHSDGFGNQTSIAGISPPSQLPTLQPTAAAQDYYGHTQQQQLQSPGLGIAQSQTQISTDQDLPPYDLLYALVDLYFKHINTWCPLLHRKTTLDSLFGPSTLDDSDRVLLHALVATTLRYSTDPRLTEERRRHYHDISKQKVLLYGLENSSVKSLQALVILALDLCGDSNGPPGWNIMALITRSVVQLGLAVESNSLSVSPNYASIYTLRAMILPEPRDFIEEESRRRLFWMIYLLDRYGTIATAFDFGLADKDIDRTLPCRDDLWIKNQKVETRWFNARDQNPDQPDHEMNRPEHLGAFSYYIEILGIFSQIHQFLRQPVDIGALADVEQWQLRYKELDSLLTSWKFGLPGDYSNMAKLYQPGVSKTLTATWVMLHATYHTAVIRLHSSAAYPTTRSPIFTPSYSASQRCHGAVENIAALGEFVVQNGMLNKLGPPFAFTLWVAARLLLVHGSTVEHKLAPQIAFLVDTLREMGRYWPVAARYCQLLQRVLDEHSDSERVVGQTGERIMPSSVKILADMRRTAFDLDFLISRQPRHMAGAPSRMPSVTPARTPAPNELEYLDVFDFFNVPRLPMSHEASVGPPNGHPQEMGLENAVKHDNQLAAAQASLPMANEFNITNFMMDANSDWLFKQAG

SEQ ID NO: 32767 - DNA, 1368 bp, Muscodor strobelii
  misc_feature: SGI cDNA ID NO. 571295
  misc_feature: Encodes the peptide sequence at SEQ ID NO 32768
atggcgtccgtcagagattttccgaccataagggcggtccggtcatttatcatcgacggtgttggttccggtggcgactatcacaacgtgaagggtgggcattggctgattgactcggatatttccacaccttgttcaatctgggataaatacaagaagtcgaggacaagctggggcataaacgtacttgggtcctttctcgttgagatagaagcatctgatggtactattggtttcgcgacgggctttggcggaccgcctgcttgctggcttgtgcataagcattttgagcgcttcctgatcggcgcggacccgaggaacacgaatttattattcgagcagatgtaccgtgcctccatgttttatggtcgcaagggtatcacgaccgctatcatctccgttattgatttggcgatatgggatctgctcggtaagctacggaacgagcccgtttataaacttatcggcggtgctgcaagagagcgcctcaacttctactgcactggcccggagcctgcagcggcgaaagaaatggggttctggggcggcaaagtgcctctaccattctgcccagaagatggacacgaggggctaaagaagaatgtcgaattccttcgcaagcatcgcgagagcgtaggaccagatttcccgctcatggttgattgctacatgagcttgaacgtcccttacactattgaaattgccaagcagtgcgcagacttgaacatcaactggtgggaggagtgcttgagcccagatgacaccgatgggtttgagcaaatcaagcgggcgcatccgactattaagttcaccaccggcgaacacgaatattcgcggtatggcttccgcaagttgatcgagggccgtaatcttgatatcattcagcccgatgtgatgtggcttggcggattgacggagctgttgaaagtgtcagccatggcggcggcttatgatattcccgttgttcctcatgcaagcggctcgtatagttaccactttgtcatctctcagcccaacacacccttccaggagtatctggccaactcgccagatggcaaaagcgttctacccgtctttggtgacctcttcttagatgaacctattcccaccaagggctacctcaccaccgcggacctcgacaaacctggtttcggtctaactctcaaccccgtcgcgaaggcgaaattgattccatccgactaccttttaaacccggctccggtaaatgggcttaaggcgcccgatgttgccccggtcactcccgcccccgcgtccacatccgaagtgccgactacaaatggagaggaggtcaagccaagtctcgttgatcgtattactcacggcgtgaaagagatgacagctgtatga

SEQ ID NO: 32768 - protein, 455 aa, Muscodor strobelii
  misc_feature: SGI Peptide ID NO. 571295
  misc_feature (171)..(268): Pfam Id: PF01188 Pfam Desc: Mandelate racemase / muconate lactonizing enzyme, C-terminal domain
  misc_feature (54)..(156): Pfam Id: PF02746 Pfam Desc: Mandelate racemase / muconate lactonizing enzyme, N-terminal domain
  misc_feature (100)..(156): Pfam Id: PF02746 Pfam Desc: Mandelate racemase / muconate lactonizing enzyme, N-terminal domain
  misc_feature (1)..(455): NCBI GI: 164423163 Blast Desc: NCU09034 [Neurospora crassa OR74A] gi|157069973|gb|EAA29745.2| NCU09034 [Neurospora crassa OR74A]
  misc_feature (1)..(414): NCBI GI: 116201105 Blast Desc: conserved [Chaetomium globosum CBS 148.51] gi|88176955|gb|EAQ84423.1| conserved [Chaetomium globosum CBS 148.51]
  misc_feature (1)..(421): NCBI GI: 256732026 Blast Desc: [Nectria haematococca mpVI 77-13-4]
  misc_feature (1)..(454): NCBI GI: 46136735 Blast Desc: FG09883.1 [Gibberella zeae PH-1]
  misc_feature (1)..(453): NCBI GI: 39946388 Blast Desc: conserved [Magnaporthe grisea 70-15] gi|145020036|gb|EDK04264.1| conserved [Magnaporthe grisea 70-15]
  misc_feature (1)..(454): NCBI GI: 145580359 Blast Desc: conserved [Magnaporthe grisea 70-15] gi|145020036|gb|EDK04264.1| conserved [Magnaporthe grisea 70-15]
  misc_feature (1)..(454): NCBI GI: 222447139 Blast Desc: conserved [Magnaporthe grisea 70-15] gi|145020036|gb|EDK04264.1| conserved [Magnaporthe grisea 70-15]
  misc_feature (2)..(417): NCBI GI: 156044444 Blast Desc: SS1G_10325 [Sclerotinia sclerotiorum 1980] gi|154694714|gb|EDN94452.1| SS1G_10325 [Sclerotinia sclerotiorum 1980]
  misc_feature (2)..(454): NCBI GI: 154294889 Blast Desc: conserved [Botryotinia fuckeliana B05.10] gi|150844525|gb|EDN19718.1| conserved [Botryotinia fuckeliana B05.10]
  misc_feature (1)..(441): NCBI GI: 171677482 Blast Desc: protein product [Podospora anserina] gi|170936809|emb|CAP61467.1| protein product [Podospora anserina]
  misc_feature (4)..(390): SWISSPROT Homolog: EC 4.2.1.90 L-rhamnonate dehydratase
MASVRDFPTIRAVRSFIIDGVGSGGDYHNVKGGHWLIDSDISTPCSIWDKYKKSRTSWGINVLGSFLVEIEASDGTIGFATGFGGPPACWLVHKHFERFLIGADPRNTNLLFEQMYRASMFYGRKGITTAIISVIDLAIWDLLGKLRNEPVYKLIGGAARERLNFYCTGPEPAAAKEMGFWGGKVPLPFCPEDGHEGLKKNVEFLRKHRESVGPDFPLMVDCYMSLNVPYTIEIAKQCADLNINWWEECLSPDDTDGFEQIKRAHPTIKFTTGEHEYSRYGFRKLIEGRNLDIIQPDVMWLGGLTELLKVSAMAAAYDIPVVPHASGSYSYHFVISQPNTPFQEYLANSPDGKSVLPVFGDLFLDEPIPTKGYLTTADLDKPGFGLTLNPVAKAKLIPSDYLLNPAPVNGLKAPDVAPVTPAPASTSEVPTTNGEEVKPSLVDRITHGVKEMTAV

SEQ ID NO: 32769 - DNA, 810 bp, Muscodor strobelii
  misc_feature: SGI cDNA ID NO. 571296
  misc_feature: Encodes the peptide sequence at SEQ ID NO 32770
atgctagccctcaacctccttaaaggcaaaaccgccatcataacaggcggaacgacaggcatcgggcgggcaatcgccctagaatacatcaagcaaggggcaaacgtagtagtaaatcaccttgacctcgaaaaagacaggccacacctcgaatcactcaccgctgaagcatcacaagcctcctccgggcatccaagcgacgcaggtaaactcgcacacctacccggcgatgtcacagatcccacgacgggcgaagcgcttgttaaaagagccgtagaattattcgggcgacttgatatctgcgtcagcaatgcaggaatatgccagttcgcagaattcttgacgatggagcccgatatcttctcccgaaccgtgcggacgaatctcgacggagcgttttacgtctgccaggctgctgcaagacaaatggcgtcacagagtccaccaggcggttctatcataggaatgagtagcatttctgcgctggtcggaggagagttccaggcgcattattgtccaacgaaagcaggcgtcacatctctgatgcagagttgtgcggttgcacttgggaagcataatattcggtgcaatgcgctgctgcctggtacaattaagacgcaattaaatgaggaggatcttgcgaatgatgagaagaggaaatacatggaagggcgcattccattgaagcggacaggtgtccctcatgatatggcgggaccggctgttttcctggcttgtgaggagctgagcgggtatgtgacaggtgcgcaactgctcgttgatgggggcctgttcgtcaatctgcagtag

SEQ ID NO: 32770 - protein, 269 aa, Muscodor strobelii
  misc_feature: SGI Peptide ID NO. 571296
  misc_feature (10)..(190): Pfam Id: PF00106 Pfam Desc: short chain dehydrogenase
  misc_feature (11)..(190): Pfam Id: PF08659 Pfam Desc: KR domain
  misc_feature (75)..(190): Pfam Id: PF00106 Pfam Desc: short chain dehydrogenase
  misc_feature (10)..(38): Pfam Id: PF00106 Pfam Desc: short chain dehydrogenase
  misc_feature (5)..(269): NCBI GI: 261358520 Blast Desc: 3-oxoacyl-[acyl-carrier-protein] reductase [Verticillium albo-atrum VaMs.102]
  misc_feature (1)..(269): NCBI GI: 116201107 Blast Desc: CHGG_08438 [Chaetomium globosum CBS 148.51] gi|88176956|gb|EAQ84424.1| CHGG_08438 [Chaetomium globosum CBS 148.51]
  misc_feature (5)..(269): NCBI GI: 39946386 Blast Desc: MGG_08318 [Magnaporthe grisea 70-15] gi|145020035|gb|EDK04263.1| MGG_08318 [Magnaporthe grisea 70-15]
  misc_feature (6)..(269): NCBI GI: 256732025 Blast Desc: [Nectria haematococca mpVI 77-13-4]
  misc_feature (1)..(269): NCBI GI: 46136733 Blast Desc: FG09882.1 [Gibberella zeae PH-1]
  misc_feature (5)..(269): NCBI GI: 255953469 Blast Desc: Pc21g04410 [Penicillium chrysogenum Wisconsin 54-1255] gi|211589198|emb|CAP95338.1| Pc21g04410 [Penicillium chrysogenum Wisconsin 54-1255]
  misc_feature (3)..(269): NCBI GI: 156044446 Blast Desc: SS1G_10326 [Sclerotinia sclerotiorum 1980] gi|154694715|gb|EDN94453.1| SS1G_10326 [Sclerotinia sclerotiorum 1980]
  misc_feature (3)..(269): NCBI GI: 189196963 Blast Desc: 3-oxoacyl-(acyl-carrier-protein) reductase [Pyrenophora tritici-repentis Pt-1C-BFP] gi|187980767|gb|EDU47393.1| 3-oxoacyl-(acyl-carrier-protein)
  misc_feature (1)..(269): NCBI GI: 238844845 Blast Desc: short-chain dehydrogenase [Microsporum canis CBS 113480]
  misc_feature (1)..(269): NCBI GI: 171677480 Blast Desc: protein product [Podospora anserina] gi|170936808|emb|CAP61466.1| protein product [Podospora anserina]
  misc_feature (27)..(266): SWISSPROT Homolog: EC 1.1.1.100 3-oxoacyl-[acyl-carrier-protein] reductase
MLALNLLKGKTAIITGGTTGIGRAIALEYIKQGANVVVNHLDLEKDRPHLESLTAEASQASSGHPSDAGKLAHLPGDVTDPTTGEALVKRAVELFGRLDICVSNAGICQFAEFLTMEPDIFSRTVRTNLDGAFYVCQAAARQMASQSPPGGSIIGMSSISALVGGEFQAHYCPTKAGVTSLMQSCAVALGKHNIRCNALLPGTIKTQLNEEDLANDEKRKYMEGRIPLKRTGVPHDMAGPAVFLACEELSGYVTGAQLLVDGGLFVNLQ

SEQ ID NO: 32771 - DNA, 316 bp, Muscodor strobelii
  misc_feature: SGI EST ID NO. CUFF.78299.0
  misc_feature: Variant of the nucleotide sequence at SEQ ID NO 32769
atcacaaccacacaatgctagccctcaacctccttaaaggcaaaaccgccatcataacaggcggaacgacaggcatcgggcgggcaatcgccctagaatacatcaagcaaggggcaaacgtagtagtaaatcaccttgacctcgaaaaagacaggccacacctcgaatcactcaccgctgaagcatcacaagcctcctccgggcatccaagcgacgcaggtaaactcgcacacctacccggcgatgtcacagatcccacgacgggcgaagcgcttgttaaaagagccgtagaattattcgggcgacttgatatctg

SEQ ID NO: 32772 - DNA, 1383 bp, Muscodor strobelii
  misc_feature: SGI cDNA ID NO. 571297
  misc_feature: Reduced expression when VOC is produced
  misc_feature: Encodes the peptide sequence at SEQ ID NO 32773
atgtcgtccttgaagcctcaacaggcctcgcctacattccatcgtggtagcttcacagaggaaatagagaacgcccgagttgatttgtctaggaaactgcaactcggtgaagattccgactctccctctccagccctttcagctaccgctccgtcgttgagtcccgacagtgccgcatctacatctccagttctcggttctgagtcgccaatcacccccgccaaagatgccgaagatgtcgtggccgatagctttgctttcgcatttgatattgacggcgtccttgttcgtggtgggcgcgctatccccgaggctattcaggctatgaaggtcctgaacggtgacaaccagtatggtatcaagatcccctacatcttcctcacaaatggtggaggcaagagtgaatccgagagatgtgaggatctgtccaagcagctggaagtggatatttcaccagcccaattcatttgcggccacactcccatgtcagaaatgtcatcgaagttcaagaccgtacttgtcgttggcggcgaaggcgagaagtgccgtactgttgcacaggcctatggattcaaggacgtcatcacccctggcgatattatcaagactgacagcgccactacacctttccgcaagttgacggccgaagagcacaagaactcccagcagcgcgatttcagcgaggttgtcattgaggccatctttgtcttcgctgactctcgtgattgggccggtgatctgcaaatcatccttgaccttgccatgtctaagggtggccgtctcggcacgctatcggagacctttgatgagggaccaccgatctacttctctcacaacgatgttgtctggtccgctgctcacgagaacgtccgtctcggtatgggcgccctgcgcggtatcgtcgagtacacatttaaggaggtcaccaagggtaagaccctcgagactcaagcttttggcaagccccagattggtaccttcgagtttgccacccgtcttctgaagcgatggcgcaagaacgaacacggcttgaactcgccgcccaatactgtttacttcgttggtgacactcccgagagtgacattcgtggtaccaaccgctacaatgagcgcgctcaagaggactggtatagtatcctcgtcaaaaccggggtgtatcaagagggtactgagccggcatataagcctcgtgtcaccgttaccaacgttcttgatgctgtcaaccacggtatcgagcgcgagatggagcgcaagaagaagaatcttcccttcggaaagcctaagattgagaacatgccgaagctgtcccttgaagacgcttcggaatttgccgtctggtctcccgctgaggagcgtgcgcttgagctgattgttgattcttag

SEQ ID NO: 32773 - protein, 460 aa, Muscodor strobelii
  misc_feature: SGI Peptide ID NO. 571297
  misc_feature (2)..(448): NCBI GI: 154305534 Blast Desc: BC1G_08536 [Botryotinia fuckeliana B05.10] gi|150853323|gb|EDN28515.1| BC1G_08536 [Botryotinia fuckeliana B05.10]
  misc_feature (65)..(429): NCBI GI: 46136731 Blast Desc: FG09881.1 [Gibberella zeae PH-1]
  misc_feature (1)..(419): NCBI GI: 39946370 Blast Desc: MGG_08326 [Magnaporthe grisea 70-15] gi|145020027|gb|EDK04255.1| MGG_08326 [Magnaporthe grisea 70-15]
  misc_feature (30)..(420): NCBI GI: 169615130 Blast Desc: SNOG_10719 [Phaeosphaeria nodorum SN15] gi|111060993|gb|EAT82113.1| SNOG_10719 [Phaeosphaeria nodorum SN15]
  misc_feature (71)..(417): NCBI GI: 238840532 Blast Desc: conserved [Microsporum canis CBS 113480]
  misc_feature (3)..(445): NCBI GI: 116201051 Blast Desc: CHGG_08410 [Chaetomium globosum CBS 148.51] gi|88176928|gb|EAQ84396.1| CHGG_08410 [Chaetomium globosum CBS 148.51]
  misc_feature (69)..(445): NCBI GI: 171677444 Blast Desc: protein product [Podospora anserina] gi|170936790|emb|CAP61448.1| protein product [Podospora anserina]
  misc_feature (72)..(441): NCBI GI: 239614779 Blast Desc: phosphatidyl synthase [Ajellomyces dermatitidis ER-3]
  misc_feature (72)..(441): NCBI GI: 261190514 Blast Desc: phosphatidyl synthase [Ajellomyces dermatitidis SLH14081] gi|239591089|gb|EEQ73670.1| phosphatidyl synthase [Ajellomyces dermatitidis SLH14081]
  misc_feature (72)..(420): NCBI GI: 225561173 Blast Desc: phosphatidyl synthase [Ajellomyces capsulatus G186AR]
  misc_feature: Useful for introducing or modulating the production of volatile compounds
MSSLKPQQASPTFHRGSFTEEIENARVDLSRKLQLGEDSDSPSPALSATAPSLSPDSAASTSPVLGSESPITPAKDAEDVVADSFAFAFDIDGVLVRGGRAIPEAIQAMKVLNGDNQYGIKIPYIFLTNGGGKSESERCEDLSKQLEVDISPAQFICGHTPMSEMSSKFKTVLVVGGEGEKCRTVAQAYGFKDVITPGDIIKTDSATTPFRKLTAEEHKNSQQRDFSEVVIEAIFVFADSRDWAGDLQIILDLAMSKGGRLGTLSETFDEGPPIYFSHNDVVWSAAHENVRLGMGALRGIVEYTFKEVTKGKTLETQAFGKPQIGTFEFATRLLKRWRKNEHGLNSPPNTVYFVGDTPESDIRGTNRYNERAQEDWYSILVKTGVYQEGTEPAYKPRVTVTNVLDAVNHGIEREMERKKKNLPFGKPKIENMPKLSLEDASEFAVWSPAEERALELIVDS

SEQ ID NO: 32774 - DNA, 1982 bp, Muscodor strobelii
  misc_feature: SGI EST ID NO. CUFF.78309.0
  misc_feature: Variant of the nucleotide sequence at SEQ ID NO 32772
gccagaggcggcgggcaacgccaggcgcctcaaacgtacgtcgtttggataatgaggttccgctttgtttgtaacctgtgaaatcatcctcaatgtactcatcatcctctttcactacgtagatcgatcgactctatccaccgacgtatatatatctgggcttccccagcttctaatccccagccgtatcctcttctttccataattctccccacttacaacgactcagtatccattgccggtacaccatttgtctttcttgcgtgttgagttcgatcattaccaaaacattccgccatcatgtcgtccttgaagcctcaacaggcctcgcctacattccatcgtggtagcttcacagaggaaatagagaacgcccgagttgatttgtctaggaaactgcaactcggtgaagattccgactctccctctccagccctttcagctaccgctccgtcgttgagtcccgacagtgccgcatctacatctccagttctcggttctgagtcgccaatcacccccgccaaagatgccgaagatgtcgtggccgatagctttgctttcgcatttgatattgacggcgtccttgttcgtggtgggcgcgctatccccgaggctattcaggctatgaaggtcctgaacggtgacaaccagtatggtatcaagatcccctacatcttcctcacaaatggtggaggcaagagtgaatccgagagatgtgaggatctgtccaagcagctggaagtggatatttcaccagcccaattcatttgcggccacactcccatgtcagaaatgtcatcgaagttcaagaccgtacttgtcgttggcggcgaaggcgagaagtgccgtactgttgcacaggcctatggattcaaggacgtcatcacccctggcgatattatcaagactgacagcgccactacacctttccgcaagttgacggccgaagagcacaagaactcccagcagcgcgatttcagcgaggttgtcattgaggccatctttgtcttcgctgactctcgtgattgggccggtgatctgcaaatcatccttgaccttgccatgtctaagggtggccgtctcggcacgctatcggagacctttgatgagggaccaccgatctacttctctcacaacgatgttgtctggtccgctgctcacgagaacgtccgtctcggtatgggcgccctgcgcggtatcgtcgagtacacatttaaggaggtcaccaagggtaagaccctcgagactcaagcttttggcaagccccagattggtaccttcgagtttgccacccgtcttctgaagcgatggcgcaagaacgaacacggcttgaactcgccgcccaatactgtttacttcgttggtgacactcccgagagtgacattcgtggtaccaaccgctacaatgagcgcgctcaagaggactggtatagtatcctcgtcaaaaccggggtgtatcaagagggtactgagccggcatataagcctcgtgtcaccgttaccaacgttcttgatgctgtcaaccacggtatcgagcgcgagatggagcgcaagaagaagaatcttcccttcggaaagcctaagattgagaacatgccgaagctgtcccttgaagacgcttcggaatttgccgtctggtctcccgctgaggagcgtgcgcttgagctgattgttgattcttagaaggatcacgtttcacatttcgttcttttctcatgattatgataccatctcgttacatcactttcgaattacatttacgcgaatggctataaacatagaccatagacaaggagaagactggcactcatttccttttcatgcataacggagtttcacgccttagagaggctactataaggattggcgttgtattgattttcactacttggatagggactcaaataaattggaggcataacatcattagcgatacttcatttcaaaagaatcgtacttaccatttcatgttcatcaaataa

SEQ ID NO: 32775 - DNA, 1551 bp, Muscodor strobelii
  misc_feature: SGI cDNA ID NO. 571298
  misc_feature: Reduced expression when VOC is produced
  misc_feature: Encodes the peptide sequence at SEQ ID NO 32776
atgtcctctcttcctacctttcgcggtgcctcccgcgccattcgatcactgcccaggtttcagtcgatacagtatggcgcaagacgagctcagtctacggctctggatggacagcagcgactgctgtctgcacacctccagcaagctgatccagctgtctacgacatcgtggagaatgagaaaaaacgacagaagcacttcatcaacttaattccctccgagaacttcacatcgcaggccgtccttgatgcgctaggcagtcccatgcaaaacaagtactcggaaggttatcccggcgcacgttattatgccggcaacgaattcatcgatcaatccgaacgactgtgccagcagagggcactcgagacgtttggcttggacgagaaggaatggggtgtcaacgttcagtctctttccggcgccccagccaatctctacgtatactctgcgctcatggacacccacgaccgattgatgggtcttgatctcccccacggcggccatctgtcacacggataccaaacaccaaccaagaagatctcggctgtttccaaatacttcgaaaccgtcccctatagactgaatgaggaaacaggcacgatagactacgaatcactcgaaaagacagccctcctctacagacccaagatcatcgttgcaggcgccagtgcctacggccgcttcatcgactacgcacaaatcaagaagacatgtgacaagatcaacgcctacctcctcgccgatatggctcacatatccggtctcgtcgccgccaaggtcatacccagccccttcagcttcgccgatatcgtcaccacgacaagtcacaagagtttgcgcggcccccgcggcgccatgatcttctacagaaagggcgtgaggaaggtgaagaagaacaaggaggaggtaatgtacaacctcgagggacccatcaacgcctccgtgttcccgggacaccagggcggtccccacaaccacaccatcaccgctctcgccgtagcgctcaaacaagcgcaagcccctgagttccgcgcctaccaagaacaagtcctcgccaatgcccaggcactcgccacgcgtctcggagagtccaaggccaacggtggtctaggctacaagctcgtatcgggcggaacagacaaccacctcgtcctcgtggatcttaagccgcaaaacgtagacggcgcccgcgtggagcgcgtactagagctcgtgggcgtagcttcaaacaagaacacagtgcccggcgacgtatcggccatgattccgggtggtctgcgtatcggcactccagcgatgacgacgaggggctttacccaggatgacttctcgagggtcgcggatataatcgatagagctgttacgatcgctgccagggtcgataaagcggcgaagacggcgaccgaggagaagggcgagaagtataagttgaagagcttcctggattatctagggacgggcgaggaggatagtgagattgttcagttgagggcggaggttagtgactgggtggggacttatccgctgccttgggctgagaagtctgagtaa

SEQ ID NO: 32776 - protein, 516 aa, Muscodor strobelii
  misc_feature: SGI Peptide ID NO. 571298
  misc_feature (46)..(450): Pfam Id: PF00464 Pfam Desc: Serine hydroxymethyltransferase
  misc_feature (15)..(511): NCBI GI: 261358511 Blast Desc: serine hydroxymethyltransferase [Verticillium albo-atrum VaMs.102]
  misc_feature (3)..(514): NCBI GI: 145602941 Blast Desc: MGG_13781 [Magnaporthe grisea 70-15] gi|145011289|gb|EDJ95945.1| MGG_13781 [Magnaporthe grisea 70-15]
  misc_feature (28)..(514): NCBI GI: 171677416 Blast Desc: protein product [Podospora anserina] gi|170936776|emb|CAP61434.1| protein product [Podospora anserina]
  misc_feature (4)..(515): NCBI GI: 156059434 Blast Desc: SS1G_03729 [Sclerotinia sclerotiorum 1980] gi|154701516|gb|EDO01255.1| SS1G_03729 [Sclerotinia sclerotiorum 1980]
  misc_feature (3)..(511): NCBI GI: 46136715 Blast Desc: FG09873.1 [Gibberella zeae PH-1]
  misc_feature (3)..(511): NCBI GI: 256732019 Blast Desc: [Nectria haematococca mpVI 77-13-4]
  misc_feature (4)..(515): NCBI GI: 154310246 Blast Desc: BC1G_07043 [Botryotinia fuckeliana B05.10] gi|150851604|gb|EDN26797.1| BC1G_07043 [Botryotinia fuckeliana B05.10]
  misc_feature (67)..(515): NCBI GI: 85095341 Blast Desc: serine hydroxymethyltransferase, mitochondrial precursor [Neurospora crassa OR74A] gi|51701417|sp|Q7S5N8.1|GLYM_NEUCR RecName: Full= serine AltName:
  misc_feature (27)..(513): NCBI GI: 255935819 Blast Desc: Pc13g05010 [Penicillium chrysogenum Wisconsin 54-1255] gi|211583556|emb|CAP91570.1| Pc13g05010 [Penicillium chrysogenum Wisconsin 54-1255]
  misc_feature (22)..(514): NCBI GI: 121698123 Blast Desc: cytosolic hydroxymethyltransferase, [Aspergillus clavatus NRRL 1] gi|119395862|gb|EAW06294.1| cytosolic hydroxymethyltransferase, [Aspergillus clavatus NRRL 1]
  misc_feature (67)..(515): SWISSPROT Homolog: EC 2.1.2.1 Glycine hydroxymethyltransferase
  misc_feature: Useful for introducing or modulating the production of volatile compounds
MSSLPTFRGASRAIRSLPRFQSIQYGARRAQSTALDGQQRLLSAHLQQADPAVYDIVENEKKRQKHFINLIPSENFTSQAVLDALGSPMQNKYSEGYPGARYYAGNEFIDQSERLCQQRALETFGLDEKEWGVNVQSLSGAPANLYVYSALMDTHDRLMGLDLPHGGHLSHGYQTPTKKISAVSKYFETVPYRLNEETGTIDYESLEKTALLYRPKIIVAGASAYGRFIDYAQIKKTCDKINAYLLADMAHISGLVAAKVIPSPFSFADIVTTTSHKSLRGPRGAMIFYRKGVRKVKKNKEEVMYNLEGPINASVFPGHQGGPHNHTITALAVALKQAQAPEFRAYQEQVLANAQALATRLGESKANGGLGYKLVSGGTDNHLVLVDLKPQNVDGARVERVLELVGVASNKNTVPGDVSAMIPGGLRIGTPAMTTRGFTQDDFSRVADIIDRAVTIAARVDKAAKTATEEKGEKYKLKSFLDYLGTGEEDSEIVQLRAEVSDWVGTYPLPWAEKSE

SEQ ID NO: 32777 - DNA, 1906 bp, Muscodor strobelii
  misc_feature: SGI EST ID NO. CUFF.78351.0
  misc_feature: Variant of the nucleotide sequence at SEQ ID NO 32775
cgccgacctcgcacagcaaaccaagttgtggtctgctttgaatccttctacagctactgtagattagctgccattgattgttaattggagacaattgacttgtctcgtttgtttcaagtgtgttgcattgagaatcgtgagctgtgctcagtgttcgccatgtcctctcttcctacctttcgcggtgcctcccgcgccattcgatcactgcccaggtttcagtcgatacagtatggcgcaagacgagctcagtctacggctctggatggacagcagcgactgctgtctgcacacctccagcaagctgatccagctgtctacgacatcgtggagaatgagaaaaaacgacagaagcacttcatcaacttaattccctccgagaacttcacatcgcaggccgtccttgatgcgctaggcagtcccatgcaaaacaagtactcggaaggttatcccggcgcacgttattatgccggcaacgaattcatcgatcaatccgaacgactgtgccagcagagggcactcgagacgtttggcttggacgagaaggaatggggtgtcaacgttcagtctctttccggcgccccagccaatctctacgtatactctgcgctcatggacacccacgaccgattgatgggtcttgatctcccccacggcggccatctgtcacacggataccaaacaccaaccaagaagatctcggctgtttccaaatacttcgaaaccgtcccctatagactgaatgaggaaacaggcacgatagactacgaatcactcgaaaagacagccctcctctacagacccaagatcatcgttgcaggcgccagtgcctacggccgcttcatcgactacgcacaaatcaagaagacatgtgacaagatcaacgcctacctcctcgccgatatggctcacatatccggtctcgtcgccgccaaggtcatacccagccccttcagcttcgccgatatcgtcaccacgacaagtcacaagagtttgcgcggcccccgcggcgccatgatcttctacagaaagggcgtgaggaaggtgaagaagaacaaggaggaggtaatgtacaacctcgagggacccatcaacgcctccgtgttcccgggacaccagggcggtccccacaaccacaccatcaccgctctcgccgtagcgctcaaacaagcgcaagcccctgagttccgcgcctaccaagaacaagtcctcgccaatgcccaggcactcgccacgcgtctcggagagtccaaggccaacggtggtctaggctacaagctcgtatcgggcggaacagacaaccacctcgtcctcgtggatcttaagccgcaaaacgtagacggcgcccgcgtggagcgcgtactagagctcgtgggcgtagcttcaaacaagaacacagtgcccggcgacgtatcggccatgattccgggtggtctgcgtatcggcactccagcgatgacgacgaggggctttacccaggatgacttctcgagggtcgcggatataatcgatagagctgttacgatcgctgccagggtcgataaagcggcgaagacggcgaccgaggagaagggcgagaagtataagttgaagagcttcctggattatctagggacgggcgaggaggatagtgagattgttcagttgagggcggaggttagtgactgggtggggacttatccgctgccttgggctgagaagtctgagtaaagggtgtgtgtaagaggagaaagacgagagaaccagaaggcatgaagggacatgagatgaggatgaaatgaggtgagatgaggtgaaataggagggagatactgcacatagatttgcacctcaacgtagcattggcgtttatgggcggtaggcttactaaacaaataaacaaagtatatatacgattctcaacact

SEQ ID NO: 32778 - DNA, 693 bp, Muscodor strobelii
  misc_feature: SGI cDNA ID NO. 571299
  misc_feature: Encodes the peptide sequence at SEQ ID NO 32779
atggaatgtgtacaaaaagaagcgcttgcgtggaacggcaaaaggttgattcggcccggacttgaaccggagaccttcagtcagcacgacggccatcaccgcgcatcaacattcaagatggtcaacctacgcacccagaagcgcctcgccgcgtccgtcattggatgcggtaagagaaagatctggctcgaccccaacgaggtttccgagatctccaacgccaactcccgccagaccatccgcaagctcgtcagcgatggcctcatcatccgcaagcccgtcaccatgcactccagatcccgcgcccgtgagctgaacctcgcccgccgcgacggccgccaccgtggtttcggtaagagaaagggtaccgctgatgcccgtatgcccgagcaggttctatggatgcgtcgccagcgtgtcctccgccgcctcctagtcaagtaccgtgcctccggcaagatcgacaagcacctttaccacgagctctaccactccagcaagggtaacaccttcaagcacaagcgcgccctcgtcgagcacatccaccgtgccaaggctgagaaggcccgtgagcgtgccctccaggaagaaatggacgccaagcgacagaagaacaaggctgctcgcgagcgcaagctggagagacagacggccaagcgcaatgctctggctggcgagggcgaggaggcttaa

SEQ ID NO: 32779 - protein, 230 aa, Muscodor strobelii
  misc_feature: SGI Peptide ID NO. 571299
  misc_feature (41)..(188): Pfam Id: PF01280 Pfam Desc: Ribosomal protein L19e
  misc_feature (23)..(229): NCBI GI: 171677414 Blast Desc: protein product [Podospora anserina] gi|170936775|emb|CAP61433.1| protein product [Podospora anserina]
  misc_feature (4)..(226): NCBI GI: 46136717 Blast Desc: FG09874.1 [Gibberella zeae PH-1]
  misc_feature (36)..(226): NCBI GI: 256732020 Blast Desc: [Nectria haematococca mpVI 77-13-4]
  misc_feature (40)..(229): NCBI GI: 261358512 Blast Desc: 60S ribosomal protein L19 [Verticillium albo-atrum VaMs.102]
  misc_feature (40)..(230): NCBI GI: 164425450 Blast Desc: 60S ribosomal protein L19 [Neurospora crassa OR74A] gi|157070930|gb|EAA30828.2| 60S ribosomal protein L19 [Neurospora crassa OR74A]
  misc_feature (40)..(229): NCBI GI: 116201087 Blast Desc: 60S ribosomal protein L19 [Chaetomium globosum CBS 148.51] gi|88176946|gb|EAQ84414.1| 60S ribosomal protein L19 [Chaetomium globosum CBS 148.51]
  misc_feature (40)..(229): NCBI GI: 145602943 Blast Desc: ribosomal protein L19 [Magnaporthe grisea 70-15] gi|145011290|gb|EDJ95946.1| ribosomal protein L19 [Magnaporthe grisea 70-15]
  misc_feature (24)..(228): NCBI GI: 212532667 Blast Desc: translational activator, [Penicillium marneffei ATCC 18224] gi|210071854|gb|EEA25943.1| translational activator, [Penicillium marneffei ATCC 18224]
  misc_feature (17)..(228): NCBI GI: 242776149 Blast Desc: translational activator, [Talaromyces stipitatus ATCC 10500] gi|218722407|gb|EED21825.1| translational activator, [Talaromyces stipitatus ATCC 10500]
  misc_feature (40)..(226): NCBI GI: 238011422 Blast Desc: [Zea mays]
MECVQKEALAWNGKRLIRPGLEPETFSQHDGHHRASTFKMVNLRTQKRLAASVIGCGKRKIWLDPNEVSEISNANSRQTIRKLVSDGLIIRKPVTMHSRSRARELNLARRDGRHRGFGKRKGTADARMPEQVLWMRRQRVLRRLLVKYRASGKIDKHLYHELYHSSKGNTFKHKRALVEHIHRAKAEKARERALQEEMDAKRQKNKAARERKLERQTAKRNALAGEGEEA

SEQ ID NO: 32780 - DNA, 2089 bp, Muscodor strobelii
  misc_feature: SGI EST ID NO. CUFF.78381.0
  misc_feature: Variant of the nucleotide sequence at SEQ ID NO 32778
cagcaccccaccggacagtccacacaacctgcaaatccagccaaatacagtgcaggcaaagctgggcgctgtggcagaattgcaatcccgctgagttaaggcacctggagggggctgctgtcaaatttactctcaaaccctcgccgcccttccgaccgtcccaacgcccaccacttctactaacctcacagcagcacgacggccatcaccgcgcatcaacattcaagatggtcaacctacgcacccagaagcgcctcgccgcgtccgtcattggatgcggtaagagaaagatctggctcgaccccaacgaggtttccgagatctccaacgccaactcccgccagaccatccgcaagctcgtcagcgatggcctcatcatccgcaagcccgtcaccatgcactccagatcccgcgcccgtgagctgaacctcgcccgccgcgacggccgccaccgtggtttcggtaagagaaagggtaccgctgatgcccgtatgcccgagcaggttctatggatgcgtcgccagcgtgtcctccgccgcctcctagtcaagtaccgtgcctccggcaagatcgacaagcacctttaccacgagctctaccactccagcaagggtaacaccttcaagcacaagcgcgccctcgtcgagcacatccaccgtgccaaggctgagaaggcccgtgagcgtgccctccaggaagaaatggacgccaagcgacagaagaacaaggctgctcgcgagcgcaagctggagagacagacggccaagcgcaatgctctggctggcgagggcgaggaggcttaagcggtgatgacactatcacgagcacgaacggtagcggtgtaggtggtcactacggcgcatggggaagagcacggagagggtacgacacattacggaccttcctcttcagcagcagcaacacgcccggccaggcgaactgtcattgtcgtcgggaacccgggttcgcagacgactgcattcggagtacatggttgggtctctactactatttcctcgcggccattggtcgtaatgctttgcatgtatggcattgagaaaaatgaaatcaatgatctggacgctctgaaaaggcagtcgtctctgctcttgtgttttctcgagtgtgtgatatacggctgcacgtgagggtgagactatgtataccttttgacacaagtgagggggtgattacatgccttgacaagaaatcacatattccacgcctcacctagatcaaaattccaaacacgaattaatatcataattctccatgagaagatctcatcagcgcccgatgaccacgatgtgtgcacccagctattttgagatgctcaccaggatccaacatttgatcatagctactaccagtaaccacggatcgagtcaacatactcaaggacctacacgaatcatttcatccccaatcgagaagtgctgacactaatcaacaagtctaaatactgagcacgagtcaaggggatctactcgatgcgtcattgatatatacatcataaatgctccgcaccatatgctatctagcaggaaacggaggaataataacagcaaatggagatcaaccatgttggatcagatatcttcacattgtcccctataaggtggtgagatgccgccgggaacatgtagagcatggctcccgccgtgaggctggaaactactcgaagcggactcgtcacatccaatttagttgatacagaagaaaagaggaaaggaaataagtgtacgcgatgcctgggaaattttacagtgcgttgggggacgggtggggcggcaccacgtgactgagtctggggaattcaaggcaatacagggtagcctgagggaaagggaaaggccttgacgggacctcgaacaatcggccaagtctaccgatattggccggagccaagcacgctgttacttgattgtttgcaatgggatgctctatgatggccacttttcgccccgagacattgctctccaagactatctcggggctcagaggtcgagaatgagactttctgtcaatcaaattcaccacaactgtccaagtaggtagtgatcacaattgcatgatatcaattcccgtg

SEQ ID NO: 32781 - DNA, 7986 bp, Muscodor strobelii
  misc_feature: SGI cDNA ID NO. 571300
  misc_feature: Reduced expression when VOC is produced
  misc_feature: Encodes the peptide sequence at SEQ ID NO 32782
atgagtgatgacaccgcctccaactccaatggcgccgatgccactgccttggactatgccacgacgcgagcctcgctcttctcttcatccacgtccacccgtatagccagcttgcgcgcaattgaagatcgcctgactagccaccccctcgacccgtcagatacagtcgtcctcctgcgtcttctcttcgacactcacagcttctaccccgacagagagtccagaaaagctgcccagtcatgtcttgctgcagccatcgcgactatcaccgaagccaggcttcttgtccctttcattgctgccattcggcaggaagcccagaagccaacgattgctgcgagcaacgcctttacgctggtagaatggtgcgctcttctctttagaggcttggtcaatactccgttctgggacaaatgcgccttagacatcgtacataccaatgccgctgctctcgagaagtgtctacagccctccaaacgacccactttgggcaggaccgccctggtgctcacgcggcgcggattgcgagctgcattctggcatgatgggtttagagaaaagacggtcgtcgagactgttgacgctcttacggcaaaaggaacacagtccaccgccaggaatgctgtcatgcttggtgtggtggccggagtgtgtttccgtcacgaacaagccaaggttgttctgacggcgcaaaagcctagttactttacgttcttcacccgagaattagttggatctcgaaccccagtacccgcccatatcgtaactgggctgaaggatttctttaccggcttcgtcacgcaggaagatctggaaaaggacgttatgccgcccatggagaaaggccttctgcgtgcccctgaagtggtcctaaacttgctagctaatctccttcccctactgcctactgatggtatcgatctttcaaagactctttctgctcacctccttaagccactgctttccaaccaggcaagccagagcaaggatccgaaggccatcgagcttgtagttgatgaggtcctgggccctttgaagtcaggaaaactgacgaccgccgaccagcgcatcctgcactcaaacatgcttcaggctcttcccctctccgcctcggacgcgactaagattgccactggactccctgccatagcttccaaagaggggaacgaggccgctctcggcgctgtgacgtctgttctcagccatgcgtccacatgtcttcttcaagataatgccgaggtacctaaaccaactatcgatgcgtttgtcaaagggttgagcgacaagaagattcctgctcgccgaatctggactcttcgagttggcgaaatcttgttcgcccttcagaaagattcgtcacctatgcctacaagcgtcgcgaaattcgctgaagccgtggccaccccattggctgacaactggacggaagttatcaagaaccctgccgccgcggtgcagagcgggtcaatcaccggtgcctatgtttttgcgacgctcactatccagcttttcaccaaactagaaaacagtgcttttcaaaccaaattaaagaagttggaccttgcaaaagaatgcctctctgtagacccaaagagctcgttgctcctgaattacaggatatacagccgcctagctgcagaagatgatttgaagtggcttcttcgctcgctcgaagctgtgtacggcggagtcgcgagagcctcggatcctgtagccattgcgtggtcacaaacactcatctaccttgtctcttcaccttccactacccctacgatccgcacagccacatgcgaagcgatatcgaaactctacgcccaagacaatgcgtttctttcgaaagcagtcatcgatggactttgggaatgggtttcatcttcagatagtggcgagaaagaaagcgtggctgcgagtgctaagttcgaaagctcatatctccacctggtcttacgctctatttgtctgaaccaagtagaactcgagagggccggcttgcaagacagccaagaattaattgagaaacagatgtgctcattactcatccttgcccgtaacgagttgataccaagggccagctggatcgacctttgtctcaagggcggcgtagatcccggctcattaggacgcaagtatgaacagggccttatagaacaagtggtcgaaaagacgcaatacagccaaatgtcacaacgcatcaaaacagcggctcatcgagcagttgccgacctagcgtttgttgcgcctgaggtcatgatccctcgggtcatttctctgatacagacagatttatcgaccatcaagctccaagaaatcggcccaatagaggcggcaatctttagaataccggagggcactgtattcatagacgttcttgccaaaaaatcacagacggtaccgaacaagaataccaaagactacgatactttgaaatgggaagaagagctcagaacccagatcgccgaaaagaaagggttacagaagaagctctctgcagatgagcaggccaaggtgaatgctcaactcaagaaagaagccgagattcgccgatccgtgcaggggctggaggcgcaactcatgcgcgggatcggcattattgagagcctagtgaccggtcctcctactgacgcgagtctctggcttggatctgctgtgagtgccttgctgggagcgatggaggctggagcatgtcttgtcgtgggtaaagctgcaccttctgcttacttagcgtgctcggagaaggtttcttctcgcttaggaagtattcgacccttcattggtgtcgctacccttcgcgcgcttgatatcacttctttaccggacaatttattagaggagaacttagaagagctcttgaccagagtcctttaccgactccgatttgccggagagcaacgagccttcgattccgtttccgtcatttacattcttcctttgatcttgagcatcttgcgaacaggtggcacgggcgatgctgtcgacgagcgagacgcgcaaatcgtgctcgccatagagatattgactttccacacccacgtgtgtgccgatgagaacgttccgaggaccgatatactctctgtgctcattgcatccatgcagaagtacaaccagcattacaaaatcattaaagactgcttctcagacttggtccgctgtatcgcgccgaatatgactgcagaggagattgttgtacttgccaaaggagccatcgtgtcacaatcatcagtccgcgagactgtcttgcaagctatcagtgccgaggttgacctaagtgatcttaacttctcagaagagctttggatcgcatgccacgatgatgccgaggagaatgccgaaattgcaaaagaaatttgggaagaaagtgaattcagaatcgccaaaggagagtctgtttgcttattaccgtatctggagagcaaggatccacagctgagaagggctgcagccaggtcactcggcgagacatgtaaagcattcccatcggatctcgaggatatcctatcgcggctacgaacgtcgtatattgaattggctaagccacgtgtaccacagttggacgagtatggcatgcctaaaaagggtgacttatccgatccttgggaagcgcgacatggtatcgcggtggccttcaaggaacttgctgctcaccttgagaaatcgcagatcgatgatttcttcagcttcttgatcgataaaggcccacttggtgaccagaactctgtagttcgcagcgaaatgctcgaagctgccatcgtcgctgtcaatctccatgggaaggcattggtggaaaagatgatgaagacatttgagcgaactttatcggctcctgacaagggttcagacgccgccgatcgcatcaatgaagcagttatcatcatgtatggtgctttagcacgtcatctgaaatctggggatccaaaaatcccaggtgttgtcgaaaggttgcttgccactttgagcaccccatccgaaacagtacaatatgcagtagcagattgcctacctcctctcgtccgcacatgtgccgataagtcttccaaatattttgaccaaatgatggaaatgctcctacagtcaaaaagatatgccgagaaacgtggagcagcctatggcttggcaggtctcatccttggacgaggtatctcggttttgcgagaatatcgcatcctcattacgctgaagagcgcaacagaaaacaagaaagaatctcaacagcgagagggtgcatttctcgctttcgagctattgcccacaatactgggccgcttgtttgaaccctatgttatccagatcgtacctcagcttctcacaggctttggagacagtagtgctgatgtccgagacgcatgtcttgctgcatcaaaggcatgcttcgcaaagttgagctcttacggtgtaagacagatcctacctactctcctgaacggtcttgacgatgaccaatggcgaagtaaacgtggtgcttgcgagctccttggtgccatggcctacctggatcctcagcaactggcgcaaagtctgcctgatattattccacctctgacaagcgcgctaaatgacagtcacaaggaagtacgatcggccggaaataagagcttgaagcggtttggggaggtcattgagaaccctgaagtcaagggtcttgttgatatccttctcaaggccctcagtgatcccacgaaatacactgacgaagcactggagtcgcttatcaaggttcaatttgtccactatctggatgcgccatcccttgctctcgtcacgagaatcctgcagagaggtctgggtgatcggtcgcagaccaagcgcaaagcctcacaagtcattggcagcttggcgcatcttaccgagcgcaaggacctcattacacatctgcccgtccttgtctcaggattaaaggttgccgcagtcgatccggtaccgaccacacgagccaccgcttcacgtgccctaggatcgctcgtcgaaaagctcggcgaagatgctctgcccgaccttatccctaacctcatgcaaaccctcaagtctgacactggtgccggtgatcgtcttggttcagcacaggcactcagtgaggttcttgccggtctgggtacaacaaggctggaggagatcctacccacaattctccagaatgttgagtcgtccaaggctgttgtacgagaaggatttatgtctctctttgtgttcttgcctgtttgctttggtaacagcttcgcaaactatttgggtaggattattcctcctattttggcaggtctgacggatgacgtcgagtctatccgtgacacggcactgcgggctggtcgtcttctcgtcaagaattttgctactcgtgcggtagatctgttgctaccagagttagaacgaggtttggcggacgatagccacagaattcgtcttagctcggtcgagctggttggcgatcttctcttcaacctcactggtatcaacgccaatgctgacgcagaagatcaagaagaaatggctaaggaagctggagcttcccttcgtgaagtcctcggtgaggagaaacgtaacaaagtcctctcggcactctacatctgccgttgtgataccgcgggtgctgtgcgcactgctgctatcagtgtatggaaggcattggtggccacacctcgtaccctgaaggagcttacgccgacactcacacaactcattattcgtcgccttggtagctccaacatggagcacaaggttattgccagcaacgctcttggagagttgatccgcaaggctggtgatagtgtgctatctacccttctgccaacacttgaagagagtctgcagacatcaacagacacagatgcgaagcaaggtatctgcttggctctcaaagagctcatttcttcagcttcagacgaggctttggaagatcatgaaaagactcttatttccgtcgtgcgcactgcccttaccgactatgatgacgacgttcgggaggctgctgcggaagccttcgattctctgcagcaaatccttggcaaacgtgctgttgaccaagttctcccgtatctattgaatctgttgcggtcagaagaggatgcagataacgctctgtctgcccttcttactctacttacagaatccacaagatctaatatgatcttgccgaacctcatacctacactcatcacacctcccatctcggctttcaatgcaaaggctctggcgtctctctctcgtgttgctggttcatccatgaatcgccgcctccccaacatcattaattcgatcatggataacattatcaatacaaaggacgaagaacttcgctctgacctagaagactctctcgataccatcgtacagtctatagacgagtacgatggccttaacactgtcatgaacgtactgctacaacttgtcaagaacgatgatcaccgcaaaagggctattacggctacccggctcagtaacttcttcatcaactctgatgtggactactctcgatacaatcaagacattgtccgagctctgctcgtttcctttgatgatcgggataaagatgtcgtcaagtcagcttggactgcacttagcgagttcacgaagaagctcaagaaggaagaaatggaagcacttgtgccatcaaccagggccacattacaactggttggtgtcccgggctcgaatctggccggtttcgagctccccaagggtatcagtgccattctacctatcttcctacaaggtctcatgaacggtactcccgaccagagaacgagcgctgctctggccatatcggatatcgtcgacaggacgagcgaagcatcgctcaagccctttgtcactccgattactggtccccttatccgtgtggtgtcagagcgatcaaccgatgtcaaggcagctattctccttacgcttaacaatctactcgagaagatgccaacggcacttaagccattcttacctcaactgcagagaacttttgccagatctctggcggacacaacaagcgatgtgctccggtcacgagctgccaaagccctgggtacactgattaagttcacacctcgtgtggatcctctcatcgccgagctagtcacaggtagcaagacaacagatcccggtgtcaagactgctatgttgaaggctttatacgaagtcattagtaaagctggttcgaatatgggtgagggctcacgagctgctgtacttggtctcatcgatatggagacggacgaaaaggatagcactatggttatcacgaatgccaaacttcttggtgcccttatcaagaatgtgcctgatgaagtcgcacatggactgatcagaaatcgtgttgcgcccactcatttcaccacctcatcagtactggcactaaacgctgttttcgttgaatcagcagagactttgctcagtagtccggttgcggagaacttgcctagcctcctttgccaaggcatgtcgaataagaatctcttcgtggcggacaactcgatattagcgacgggtaaatatctgctaagcgactcagcaaaatccttcgaagcaacaaaaccaatcttcagcaccctcgcgaccatcatcacacccggcaaccccgtggactcccgacgtctagcactagtagtagtccgcacagcctcgagagcgaacatggaacttgtgagaccacacctagccttgcttgctcccgctgtcttcgcgtccgttcgcgaccccgttatccccgttaagttagcggcggaagcggcgtttgtggagctctttggagttgtggatgaagagagcgcagtgtttgatagatatatggctggcccaggcgcggaattaccgccgatgacgaagaggagtataggggattatttcaagagagttgctattcgccttggtgcgcaggcgagagagaggagagacgcggagggtggtgcgggcggattggggctgacgagtgatgaggttgaggatgagaaggagatttggagtgtcggggctgtggagatgggggatggtgttttcgccgagtag

SEQ ID NO: 32782 - protein, 2661 aa, Muscodor strobelii
  misc_feature: SGI Peptide ID NO. 571300
  misc_feature (1962)..(1998): Pfam Id: PF02985 Pfam Desc: HEAT repeat
  misc_feature (1502)..(1538): Pfam Id: PF02985 Pfam Desc: HEAT repeat
  misc_feature (1738)..(1774): Pfam Id: PF02985 Pfam Desc: HEAT repeat
  misc_feature (17)..(2657): NCBI GI: 85095334 Blast Desc: NCU05803 [Neurospora crassa OR74A] gi|28921522|gb|EAA30827.1| NCU05803 [Neurospora crassa OR74A]
  misc_feature (1)..(2660): NCBI GI: 116201089 Blast Desc: CHGG_08429 [Chaetomium globosum CBS 148.51] gi|88176947|gb|EAQ84415.1| CHGG_08429 [Chaetomium globosum CBS 148.51]
  misc_feature (9)..(2661): NCBI GI: 261358513 Blast Desc: translational activator GCN1 [Verticillium albo-atrum VaMs.102]
  misc_feature (5)..(2661): NCBI GI: 145602921 Blast Desc: MGG_04710 [Magnaporthe grisea 70-15] gi|145011272|gb|EDJ95928.1| MGG_04710 [Magnaporthe grisea 70-15]
  misc_feature (8)..(2653): NCBI GI: 256732020 Blast Desc: [Nectria haematococca mpVI 77-13-4]
  misc_feature (45)..(2659): NCBI GI: 46136717 Blast Desc: FG09874.1 [Gibberella zeae PH-1]
  misc_feature (17)..(2634): NCBI GI: 171677412 Blast Desc: protein product [Podospora anserina] gi|170936774|emb|CAP61432.1| protein product [Podospora anserina]
  misc_feature (8)..(2659): NCBI GI: 154310250 Blast Desc: BC1G_07045 [Botryotinia fuckeliana B05.10] gi|150851606|gb|EDN26799.1| BC1G_07045 [Botryotinia fuckeliana B05.10]
  misc_feature (8)..(2659): NCBI GI: 156059438 Blast Desc: SS1G_03731 [Sclerotinia sclerotiorum 1980] gi|154701518|gb|EDO01257.1| SS1G_03731 [Sclerotinia sclerotiorum 1980]
  misc_feature (9)..(2661): NCBI GI: 189211099 Blast Desc: translational activator [Pyrenophora tritici-repentis Pt-1C-BFP] gi|187977973|gb|EDU44599.1| translational activator [Pyrenophora tritici-repentis Pt-1C-BFP]
  misc_feature: Useful for introducing or modulating the production of volatile compounds
MSDDTASNSNGADATALDYATTRASLFSSSTSTRIASLRAIEDRLTSHPLDPSDTVVLLRLLFDTHSFYPDRESRKAAQSCLAAAIATITEARLLVPFIAAIRQEAQKPTIAASNAFTLVEWCALLFRGLVNTPFWDKCALDIVHTNAAALEKCLQPSKRPTLGRTALVLTRRGLRAAFWHDGFREKTVVETVDALTAKGTQSTARNAVMLGVVAGVCFRHEQAKVVLTAQKPSYFTFFTRELVGSRTPVPAHIVTGLKDFFTGFVTQEDLEKDVMPPMEKGLLRAPEVVLNLLANLLPLLPTDGIDLSKTLSAHLLKPLLSNQASQSKDPKAIELVVDEVLGPLKSGKLTTADQRILHSNMLQALPLSASDATKIATGLPAIASKEGNEAALGAVTSVLSHASTCLLQDNAEVPKPTIDAFVKGLSDKKIPARRIWTLRVGEILFALQKDSSPMPTSVAKFAEAVATPLADNWTEVIKNPAAAVQSGSITGAYVFATLTIQLFTKLENSAFQTKLKKLDLAKECLSVDPKSSLLLNYRIYSRLAAEDDLKWLLRSLEAVYGGVARASDPVAIAWSQTLIYLVSSPSTTPTIRTATCEAISKLYAQDNAFLSKAVIDGLWEWVSSSDSGEKESVAASAKFESSYLHLVLRSICLNQVELERAGLQDSQELIEKQMCSLLILARNELIPRASWIDLCLKGGVDPGSLGRKYEQGLIEQVVEKTQYSQMSQRIKTAAHRAVADLAFVAPEVMIPRVISLIQTDLSTIKLQEIGPIEAAIFRIPEGTVFIDVLAKKSQTVPNKNTKDYDTLKWEEELRTQIAEKKGLQKKLSADEQAKVNAQLKKEAEIRRSVQGLEAQLMRGIGIIESLVTGPPTDASLWLGSAVSALLGAMEAGACLVVGKAAPSAYLACSEKVSSRLGSIRPFIGVATLRALDITSLPDNLLEENLEELLTRVLYRLRFAGEQRAFDSVSVIYILPLILSILRTGGTGDAVDERDAQIVLAIEILTFHTHVCADENVPRTDILSVLIASMQKYNQHYKIIKDCFSDLVRCIAPNMTAEEIVVLAKGAIVSQSSVRETVLQAISAEVDLSDLNFSEELWIACHDDAEENAEIAKEIWEESEFRIAKGESVCLLPYLESKDPQLRRAAARSLGETCKAFPSDLEDILSRLRTSYIELAKPRVPQLDEYGMPKKGDLSDPWEARHGIAVAFKELAAHLEKSQIDDFFSFLIDKGPLGDQNSVVRSEMLEAAIVAVNLHGKALVEKMMKTFERTLSAPDKGSDAADRINEAVIIMYGALARHLKSGDPKIPGVVERLLATLSTPSETVQYAVADCLPPLVRTCADKSSKYFDQMMEMLLQSKRYAEKRGAAYGLAGLILGRGISVLREYRILITLKSATENKKESQQREGAFLAFELLPTILGRLFEPYVIQIVPQLLTGFGDSSADVRDACLAASKACFAKLSSYGVRQILPTLLNGLDDDQWRSKRGACELLGAMAYLDPQQLAQSLPDIIPPLTSALNDSHKEVRSAGNKSLKRFGEVIENPEVKGLVDILLKALSDPTKYTDEALESLIKVQFVHYLDAPSLALVTRILQRGLGDRSQTKRKASQVIGSLAHLTERKDLITHLPVLVSGLKVAAVDPVPTTRATASRALGSLVEKLGEDALPDLIPNLMQTLKSDTGAGDRLGSAQALSEVLAGLGTTRLEEILPTILQNVESSKAVVREGFMSLFVFLPVCFGNSFANYLGRIIPPILAGLTDDVESIRDTALRAGRLLVKNFATRAVDLLLPELERGLADDSHRIRLSSVELVGDLLFNLTGINANADAEDQEEMAKEAGASLREVLGEEKRNKVLSALYICRCDTAGAVRTAAISVWKALVATPRTLKELTPTLTQLIIRRLGSSNMEHKVIASNALGELIRKAGDSVLSTLLPTLEESLQTSTDTDAKQGICLALKELISSASDEALEDHEKTLISVVRTALTDYDDDVREAAAEAFDSLQQILGKRAVDQVLPYLLNLLRSEEDADNALSALLTLLTESTRSNMILPNLIPTLITPPISAFNAKALASLSRVAGSSMNRRLPNIINSIMDNIINTKDEELRSDLEDSLDTIVQSIDEYDGLNTVMNVLLQLVKNDDHRKRAITATRLSNFFINSDVDYSRYNQDIVRALLVSFDDRDKDVVKSAWTALSEFTKKLKKEEMEALVPSTRATLQLVGVPGSNLAGFELPKGISAILPIFLQGLMNGTPDQRTSAALAISDIVDRTSEASLKPFVTPITGPLIRVVSERSTDVKAAILLTLNNLLEKMPTALKPFLPQLQRTFARSLADTTSDVLRSRAAKALGTLIKFTPRVDPLIAELVTGSKTTDPGVKTAMLKALYEVISKAGSNMGEGSRAAVLGLIDMETDEKDSTMVITNAKLLGALIKNVPDEVAHGLIRNRVAPTHFTTSSVLALNAVFVESAETLLSSPVAENLPSLLCQGMSNKNLFVADNSILATGKYLLSDSAKSFEATKPIFSTLATIITPGNPVDSRRLALVVVRTASRANMELVRPHLALLAPAVFASVRDPVIPVKLAAEAAFVELFGVVDEESAVFDRYMAGPGAELPPMTKRSIGDYFKRVAIRLGAQARERRDAEGGAGGLGLTSDEVEDEKEIWSVGAVEMGDGVFAE

SEQ ID NO: 32783 - DNA, 8806 bp, Muscodor strobelii
  misc_feature: SGI EST ID NO. CUFF.77711.2
  misc_feature: Variant of the nucleotide sequence at SEQ ID NO 32781
cgtcgaccgcctgccacattggtgttccattccatcttcggacctgctcaattgtatcctgtccgcaaactctggggtaagaaataccttctgttgtagtattttgtatctgttggtgggccacagtactatagtggtatgggtattgacagcgaagcctagtagagtgcagcatacatcatcaacgcaaatgtttggtgttgagcgctgaagacaaaataccatatccccgccaaagctgcattccacattgcggatgtttgtatatatctgtgacatcttattctaatgagagagggaaagcaggggcactgcatatcctgattcatccctcttctctcttctccttcatggtcgatgatggcctgtcacatctcatccaacaaccaaaatgagtgatgacaccgcctccaactccaatggcgccgatgccactgccttggactatgccacgacgcgagcctcgctcttctcttcatccacgtccacccgtatagccagcttgcgcgcaattgaagatcgcctgactagccaccccctcgacccgtcagatacagtcgtcctcctgcgtcttctcttcgacactcacagcttctaccccgacagagagtccagaaaagctgcccagtcatgtcttgctgcagccatcgcgactatcaccgaagccaggcttcttgtccctttcattgctgccattcggcaggaagcccagaagccaacgattgctgcgagcaacgcctttacgctggtagaatggtgcgctcttctctttagaggcttggtcaatactccgttctgggacaaatgcgccttagacatcgtacataccaatgccgctgctctcgagaagtgtctacagccctccaaacgacccactttgggcaggaccgccctggtgctcacgcggcgcggattgcgagctgcattctggcatgatgggtttagagaaaagacggtcgtcgagactgttgacgctcttacggcaaaaggaacacagtccaccgccaggaatgctgtcatgcttggtgtggtggccggagtgtgtttccgtcacgaacaagccaaggttgttctgacggcgcaaaagcctagttactttacgttcttcacccgagaattagttggatctcgaaccccagtacccgcccatatcgtaactgggctgaaggatttctttaccggcttcgtcacgcaggaagatctggaaaaggacgttatgccgcccatggagaaaggccttctgcgtgcccctgaagtggtcctaaacttgctagctaatctccttcccctactgcctactgatggtatcgatctttcaaagactctttctgctcacctccttaagccactgctttccaacgtgaagtctagcaatcccagcatacgtgaaggagtattgaccgctttcaaggcagcaggcaagccagagcaaggatccgaaggccatcgagcttgtagttgatgaggtcctgggccctttgaagtcaggaaaactgacgaccgccgaccagcgcatcctgcactcaaacatgcttcaggctcttcccctctccgcctcggacgcgactaagattgccactggactccctgccatagcttccaaagaggggaacgaggccgctctcggcgctgtgacgtctgttctcagccatgcgtccacatgtcttcttcaagataatgccgaggtacctaaaccaactatcgatgcgtttgtcaaagggttgagcgacaagaagattcctgctcgccgaatctggactcttcgagttggcgaaatcttgttcgcccttcagaaagattcgtcacctatgcctacaagcgtcgcgaaattcgctgaagccgtggccaccccattggctgacaactggacggaagttatcaagaaccctgccgccgcggtgcagagcgggtcaatcaccggtgcctatgtttttgcgacgctcactatccagcttttcaccaaactagaaaacagtgcttttcaaaccaaattaaagaagttggaccttgcaaaagaatgcctctctgtagacccaaagagctcgttgctcctgaattacaggatatacagccgcctagctgcagaagatgatttgaagtggcttcttcgctcgctcgaagctgtgtacggcggagtcgcgagagcctcggatcctgtagccattgcgtggtcacaaacactcatctaccttgtctcttcaccttccactacccctacgatccgcacagccacatgcgaagcgatatcgaaactctacgcccaagacaatgcgtttctttcgaaagcagtcatcgatggactttgggaatgggtttcatcttcagatagtggcgagaaagaaagcgtggctgcgagtgctaagttcgaaagctcatatctccacctggtcttacgctctatttgtctgaaccaagtagaactcgagagggccggcttgcaagacagccaagaattaattgagaaacagatgtgctcattactcatccttgcccgtaacgagttgataccaagggccagctggatcgacctttgtctcaagggcggcgtagatcccggctcattaggacgcaagtatgaacagggccttatagaacaagtggtcgaaaagacgcaatacagccaaatgtcacaacgcatcaaaacagcggctcatcgagcagttgccgacctagcgtttgttgcgcctgaggtcatgatccctcgggtcatttctctgatacagacagatttatcgaccatcaagctccaagaaatcggcccaatagaggcggcaatctttagaataccggagggcactgtattcatagacgttcttgccaaaaaatcacagacggtaccgaacaagaataccaaagactacgatactttgaaatgggaagaagagctcagaacccagatcgccgaaaagaaagggttacagaagaagctctctgcagatgagcaggccaaggtgaatgctcaactcaagaaagaagccgagattcgccgatccgtgcaggggctggaggcgcaactcatgcgcgggatcggcattattgagagcctagtgaccggtcctcctactgacgcgagtctctggcttggatctgctgtgagtgccttgctgggagcgatggaggctggagcatgtcttgtcgtgggtaaagctgcaccttctgcttacttagcgtgctcggagaaggtttcttctcgcttaggaagtattcgacccttcattggtgtcgctacccttcgcgcgcttgatatcacttctttaccggacaatttattagaggagaacttagaagagctcttgaccagagtcctttaccgactccgatttgccggagagcaacgagccttcgattccgtttccgtcatttacattcttcctttgatcttgagcatcttgcgaacaggtggcacgggcgatgctgtcgacgagcgagacgcgcaaatcgtgctcgccatagagatattgactttccacacccacgtgtgtgccgatgagaacgttccgaggaccgatatactctctgtgctcattgcatccatgcagaagtacaaccagcattacaaaatcattaaagactgcttctcagacttggtccgctgtatcgcgccgaatatgactgcagaggagattgttgtacttgccaaaggagccatcgtgtcacaatcatcagtccgcgagactgtcttgcaagctatcagtgccgaggttgacctaagtgatcttaacttctcagaagagctttggatcgcatgccacgatgatgccgaggagaatgccgaaattgcaaaagaaatttgggaagaaagtgaattcagaatcgccaaaggagagtctgtttgcttattaccgtatctggagagcaaggatccacagctgagaagggctgcagccaggtcactcggcgagacatgtaaagcattcccatcggatctcgaggatatcctatcgcggctacgaacgtcgtatattgaattggctaagccacgtgtaccacagttggacgagtatggcatgcctaaaaagggtgacttatccgatccttgggaagcgcgacatggtatcgcggtggccttcaaggaacttgctgctcaccttgagaaatcgcagatcgatgatttcttcagcttcttgatcgataaaggcccacttggtgaccagaactctgtagttcgcagcgaaatgctcgaagctgccatcgtcgctgtcaatctccatgggaaggcattggtggaaaagatgatgaagacatttgagcgaactttatcggctcctgacaagggttcagacgccgccgatcgcatcaatgaagcagttatcatcatgtatggtgctttagcacgtcatctgaaatctggggatccaaaaatcccaggtgttgtcgaaaggttgcttgccactttgagcaccccatccgaaacagtacaatatgcagtagcagattgcctacctcctctcgtccgcacatgtgccgataagtcttccaaatattttgaccaaatgatggaaatgctcctacagtcaaaaagatatgccgagaaacgtggagcagcctatggcttggcaggtctcatccttggacgaggtatctcggttttgcgagaatatcgcatcctcattacgctgaagagcgcaacagaaaacaagaaagaatctcaacagcgagagggtgcatttctcgctttcgagctattgcccacaatactgggccgcttgtttgaaccctatgttatccagatcgtacctcagcttctcacaggctttggagacagtagtgctgatgtccgagacgcatgtcttgctgcatcaaaggcatgcttcgcaaagttgagctcttacggtgtaagacagatcctacctactctcctgaacggtcttgacgatgaccaatggcgaagtaaacgtggtgcttgcgagctccttggtgccatggcctacctggatcctcagcaactggcgcaaagtctgcctgatattattccacctctgacaagcgcgctaaatgacagtcacaaggaagtacgatcggccggaaataagagcttgaagcggtttggggaggtcattgagaaccctgaagtcaagggtcttgttgatatccttctcaaggccctcagtgatcccacgaaatacactgacgaagcactggagtcgcttatcaaggttcaatttgtccactatctggatgcgccatcccttgctctcgtcacgagaatcctgcagagaggtctgggtgatcggtcgcagaccaagcgcaaagcctcacaagtcattggcagcttggcgcatcttaccgagcgcaaggacctcattacacatctgcccgtccttgtctcaggattaaaggttgccgcagtcgatccggtaccgaccacacgagccaccgcttcacgtgccctaggatcgctcgtcgaaaagctcggcgaagatgctctgcccgaccttatccctaacctcatgcaaaccctcaagtctgacactggtgccggtgatcgtcttggttcagcacaggcactcagtgaggttcttgccggtctgggtacaacaaggctggaggagatcctacccacaattctccagaatgttgagtcgtccaaggctgttgtacgagaaggatttatgtctctctttgtgttcttgcctgtttgctttggtaacagcttcgcaaactatttgggtaggattattcctcctattttggcaggtctgacggatgacgtcgagtctatccgtgacacggcactgcgggctggtcgtcttctcgtcaagaattttgctactcgtgcggtagatctgttgctaccagagttagaacgaggtttggcggacgatagccacagaattcgtcttagctcggtcgagctggttggcgatcttctcttcaacctcactggtatcaacgccaatgctgacgcagaagatcaagaagaaatggctaaggaagctggagcttcccttcgtgaagtcctcggtgaggagaaacgtaacaaagtcctctcggcactctacatctgccgttgtgataccgcgggtgctgtgcgcactgctgctatcagtgtatggaaggcattggtggccacacctcgtaccctgaaggagcttacgccgacactcacacaactcattattcgtcgccttggtagctccaacatggagcacaaggttattgccagcaacgctcttggagagttgatccgcaaggctggtgatagtgtgctatctacccttctgccaacacttgaagagagtctgcagacatcaacagacacagatgcgaagcaaggtatctgcttggctctcaaagagctcatttcttcagcttcagacgaggctttggaagatcatgaaaagactcttatttccgtcgtgcgcactgcccttaccgactatgatgacgacgttcgggaggctgctgcggaagccttcgattctctgcagcaaatccttggcaaacgtgctgttgaccaagttctcccgtatctattgaatctgttgcggtcagaagaggatgcagataacgctctgtctgcccttcttactctacttacagaatccacaagatctaatatgatcttgccgaacctcatacctacactcatcacacctcccatctcggctttcaatgcaaaggctctggcgtctctctctcgtgttgctggttcatccatgaatcgccgcctccccaacatcattaattcgatcatggataacattatcaatacaaaggacgaagaacttcgctctgacctagaagactctctcgataccatcgtacagtctatagacgagtacgatggccttaacactgtcatgaacgtactgctacaacttgtcaagaacgatgatcaccgcaaaagggctattacggctacccggctcagtaacttcttcatcaactctgatgtggactactctcgatacaatcaagacattgtccgagctctgctcgtttcctttgatgatcgggataaagatgtcgtcaagtcagcttggactgcacttagcgagttcacgaagaagctcaagaaggaagaaatggaagcacttgtgccatcaaccagggccacattacaactggttggtgtcccgggctcgaatctggccggtttcgagctccccaagggtatcagtgccattctacctatcttcctacaaggtctcatgaacggtactcccgaccagagaacgagcgctgctctggccatatcggatatcgtcgacaggacgagcgaagcatcgctcaagccctttgtcactccgattactggtccccttatccgtgtggtgtcagagcgatcaaccgatgtcaaggcagctattctccttacgcttaacaatctactcgagaagatgccaacggcacttaagccattcttacctcaactgcagagaacttttgccagatctctggcggacacaacaagcgatgtgctccggtcacgagctgccaaagccctgggtacactgattaagttcacacctcgtgtggatcctctcatcgccgagctagtcacaggtagcaagacaacagatcccggtgtcaagactgctatgttgaaggctttatacgaagtcattagtaaagctggttcgaatatgggtgagggctcacgagctgctgtacttggtctcatcgatatggagacggacgaaaaggatagcactatggttatcacgaatgccaaacttcttggtgcccttatcaagaatgtgcctgatgaagtcgcacatggactgatcagaaatcgtgttgcgcccactcatttcaccacctcatcagtactggcactaaacgctgttttcgttgaatcagcagagactttgctcagtagtccggttgcggagaacttgcctagcctcctttgccaaggcatgtcgaataagaatctcttcgtggcggacaactcgatattagcgacgggtaaatatctgctaagcgactcagcaaaatccttcgaagcaacaaaaccaatcttcagcaccctcgcgaccatcatcacacccggcaaccccgtggactcccgacgtctagcactagtagtagtccgcacagcctcgagagcgaacatggaacttgtgagaccacacctagccttgcttgctcccgctgtcttcgcgtccgttcgcgaccccgttatccccgttaagttagcggcggaagcggcgtttgtggagctctttggagttgtggatgaagagagcgcagtgtttgatagatatatggctggcccaggcgcggaattaccgccgatgacgaagaggagtataggggattatttcaagagagttgctattcgccttggtgcgcaggcgagagagaggagagacgcggagggtggtgcgggcggattggggctgacgagtgatgaggttgaggatgagaaggagatttggagtgtcggggctgtggagatgggggatggtgttttcgccgagtagatgcgcggcggaaggaaaagcggtttggaaaggaaaggggcttaggtgaagatggagagaaaaataggcttacgaagcgattgaatgagagatgtttatgttatttgctgtgttttgcttgatttgtgaataggagtgtaggttggttgacagtgtatgcctaagtgtcagtccgaagagagattggcaacatgggcagttgaagtcaacataagatagcagtgtcgcatatgagcccaggtattcaaaaaccaccccttcgatgatacggaacacccacgagaggctattcgaaggtttgaggcatgtctaggcggttgtttggttgaatggctatccgagagtctatcaccatcacccttggtcaccgttgc

SEQ ID NO: 32784 - DNA, 4452 bp, Muscodor strobelii
  misc_feature: SGI cDNA ID NO. 571301
  misc_feature: Encodes the peptide sequence at SEQ ID NO 32785
atggcgggtgccaagaagaaaaagaccaagcccgccgccaacccagccagaggttttgctaccacttctgttgcttccaagcccagactcgacagcgatgcgccctcgggcacccagacccccaacgccctcgattccccagccaagaagccagacgctcccggcgcatcctcagctgctacccaatccaccacaattgctccccagcccgagaaggagaaagagaaagagctaagcccagaggaatttgaaaagcagctacaagagtcagagttgcagttacttgtcgagaaacatgcccaaaaggtcaaaagagacgcccagcgccagaaaggtcgtctcgagaccgaccgaagactgcttagaggacaggccgagcctttgaataccaggaaatggctgccacaagagataatggaccaggttctggatcttatccacgctgagagccgcttctcaccgtcttcgataggctcggagaaattggcagagaaggcactctccgaagaggaattgactgtcagactatggacactacaacagactctcgctggcctccccttccccgaggaaaagatgcccgccgtcataaagcatgtgctcgggttgacgccaaacgtatcatccaacaacaaagactacatctggggtctggacgaagcactcgactggcttgccaagcagtgcactcgcgaagaattgcgcgagtacgattacagaggcaacaagaccataaagtcacagctagatacacctggtgatagtcctttaccttctggcgccagcacgccacgctttcccgaggcaaccgcaaacggcaaaaaagccggcggcaagaacgggttgcaacacccgcgcaatggcactccaaagaaatcagcaattgtatgcaatgaggattttgagcctgatcaattgattccggcgtacttagagacgatgaccgagttgttccacatccaacgccccagacaaatgacaaagaggccaaatggcgccaaaggcagcgcgaaggccaatggacagaagaagcccgaaagtgacggcactgaagatatgaacgaggctaaactccttgcgagaactgtccgcattgaggaagatgttctgttcgacaagattgaggccgagcatatttggcgaggccgcaagattgaattggaaaaggagtttgccgcaaatgcgaagaaagcccagcaagaaaaggaggaaagagagacaagagaggccactgattcgaatgatgcaagtgaatcgggagacgacataaccaaagaagctgagagagtcgctgcagagattctgaaccaggacgatggtgatgatgaacaattgctgtctgatttgtttggcgatctcccagtcctcgaagccgatgctacgggcaaattgaacactgtcgtgaacggacccgatggcatcaaggtaacaatccgagacttcggcaagtggtcaggtgtgagccctacgagggctctagaagaggcctgtcgatcaagagattcatccgctaggattatctacagccttgtgtctgagagtccattttctaacaggcatatggcgaccatctcttggtccaaagcacaagagaccgatggcctgcctactataccgtccattgaatctagcatattccccctacaattcgctttcaaaatgactaccatctctactcccgacaagaagcaatcggaggcctacgttgctaccgttgccatgttcgctattttcggatctacaaaggaagagaagatattcatgagactgcccgctgtctggagagaactgtggtcagaaatggcagaagagcgaaagaatcaactagatgccgccgataggctcgagatcaaagacatacgcgccctcatccgacagaaagaagataaagagttagaagatggtgtcattttatcaacagctttccgtggccgcggggttcagcgtccggccaaagacggaagcgacgaatccgttaccgatcgcgctggtagcagtggtttggcactcgagtactaccagaagatatggtatgataagtgcacaaccccgaaattccaagcgatgctacagaagcggatgcagcttcctatgtgggacttcaggcagcaggtcctggagaccgttgagcgagagcaggttgtgattgtttgcggtgagactggatgtggtaagagtacccaagtgccttcattcttactggagcaccagctatctcagggtcgcccgtgcaaaatctactgcactgagccccgacgtatctctgccatatcccttgcgcgtcgtgtaagcgacgagctcggtgaggggcgtaatgatcttggtaccgcacgatccctagttggttactcgatccgaggtgagccgaatacttccaaagagacgcggctggtttttgcgactactggtatcgtcatgcgaatgcttgagggttcgaacgatcttcgagagatcacccatctcgttctcgacgaagtacacgaacgcacgattgactcagatttcttactcatcgtgctcaaaaatcttctagaaaagaggaaagacctcaaggttattctcatgtccgcgaccgttgacgccgagaggttctctaattacttgggtcgtgcgcctgttttgaatgttccagggcggactttccccgtccaagtcaaatacctggaggacgcacttgagcttacaggttatacccttgaccagcagagccatgagaaggagatagagattgacgatgatccgcttgacaccgagaatgatggttcctccggcgcagctgccgcaaaggagcttcgacaatactcggctaagactcgaaatactctgacccagattgacgagtatcaaatcgagtttaacttgatcgttcgactcatattgcagatagcaaacgacccggcctacgagttctacagcaaggcaattctaatattcctaccaggtatagcggatatcaggacactaaatgattttatacttggtgaaccattctttcagagacaatgggacgtgatccccttacattctagctttgcaactgaagaccaagagcgagcgttccttatcccacccctcggaacgaggaagatcgtgttagccaccaatattgcggaaacgggcatcaccatccctgatgtaacttgcgtcatcgacactggaaaacaccgcgaaatgcgattcgtcgagaaacgacagatgtctaagctcatcgacacattcatctctagagccaatgccaaacaacggcgtggcagagcaggccgtgttcaggagggcctttgcttccacatgttcacaaagtaccggcatgatcagctgatgagtgatcaacaaactcctgaaatgctgcgcttgtctctacaagaacttgctattcgcgtcaagatttacggtcttggtggaatagaggatacgcttggacaagctctcgacccgccatctgccaagaacattcgtagagcagtagacgctctaattgacgtgagagcactcactgcagcagaagatctcacaccacttggtcatcaattggctaaactcccccttgacgtatttttaggcaaattggttttacagggcactatattcaagtgtctggatatggctgtcactgttgctgctattttacaatctaaatcgccattcactgcgcctttcggccaacgtacccaggccgaccaggcacgtaaggcgtttaggagagccgactcagatcttctcactgcgtacaacgcctatttaggctggaagaaagtgtgtcagacatctagccacgacttccagtactgcaaaaagaactttctatcttcacaaaatctatccaacatcgaggacgcaaaaggacagctgcttctggaattagcagatgctgagtctctgcaactgaccaaggaagagtaccagaatattaagcgtctccgatactcgaaccggcgaagacaattctttgacttgccccaacgtgttaacatcaatagtgacaacgacttcgtcaattgctctgtcattgcttggagcttctatcctaaactacttctcaaggagaacaagggcttccgtaatattggaaacaaccagagcatcagtctccaccctacaagcgtgaacaagggacatccggagctgaaatggctttcatattattatatcatgcaatccaaacaatttctcaatgcccatgagacaactgccgtcgacacttttgccattgcactgctctgcggtgacgtgcgtgttgatatgtacgcaggcgtaattatcctggacggtaacagagcgcgtttcagcgctccagactggaagactatgcttgtaatcaagaccttgcgcgcacgactccgcgatattctcacgaggagcttcgggaagccgggcaaggggctaacggctcagcaagagaagtggttggatgtctggaacaagattttcagccaggatttcacgaaggcttag

SEQ ID NO: 32785 - protein, 1483 aa, Muscodor strobelii
  misc_feature: SGI Peptide ID NO. 571301
  misc_feature (699)..(864): Pfam Id: PF00270 Pfam Desc: DEAD/DEAH box helicase
  misc_feature (1281)..(1410): Pfam Id: PF07717 Pfam Desc: Domain of function (DUF1605)
  misc_feature (1153)..(1243): Pfam Id: PF04408 Pfam Desc: Helicase associated domain (HA2)
  misc_feature (996)..(1090): Pfam Id: PF00271 Pfam Desc: Helicase conserved C-terminal domain
  misc_feature (1)..(1478): NCBI GI: 261190290 Blast Desc: ATP dependent RNA helicase [Ajellomyces dermatitidis SLH14081] gi|239591383|gb|EEQ73964.1| ATP dependent RNA helicase [Ajellomyces dermatitidis SLH14081]
  misc_feature (7)..(1482): NCBI GI: 189211101 Blast Desc: ATP-dependent RNA helicase A [Pyrenophora tritici-repentis Pt-1C-BFP] gi|187977974|gb|EDU44600.1| ATP-dependent RNA helicase A [Pyrenophora tritici-repentis
  misc_feature (6)..(1478): NCBI GI: 225559471 Blast Desc: DEAH box polypeptide 36 [Ajellomyces capsulatus G186AR]
  misc_feature (17)..(1476): NCBI GI: 67539338 Blast Desc: AN5839.2 [Aspergillus nidulans FGSC A4] gi|40739158|gb|EAA58348.1| AN5839.2 [Aspergillus nidulans FGSC A4] gi|259480002|tpe|CBF70735.1| TPA: ATP dependent RNA helicase,
  misc_feature (6)..(1476): NCBI GI: 242776144 Blast Desc: ATP dependent RNA helicase, [Talaromyces stipitatus ATCC 10500] gi|218722406|gb|EED21824.1| ATP dependent RNA helicase, [Talaromyces stipitatus ATCC 10500]
  misc_feature (1)..(1478): NCBI GI: 226283206 Blast Desc: pre-mRNA-splicing factor ATP-dependent RNA helicase PRP16 [Paracoccidioides brasiliensis Pb01]
  misc_feature (1)..(1478): NCBI GI: 119193066 Blast Desc: CIMG_00910 [Coccidioides immitis RS]
  misc_feature (690)..(1480): NCBI GI: 256731640 Blast Desc: [Nectria haematococca mpVI 77-13-4]
  misc_feature (1)..(1432): NCBI GI: 240105864 Blast Desc: Helicase associated domain family protein [Coccidioides posadasii C735 delta SOWgp]
  misc_feature (17)..(1476): NCBI GI: 238837739 Blast Desc: pre-mRNA-splicing factor ATP-dependent RNA helicase PRP22 [Microsporum canis CBS 113480]
MAGAKKKKTKPAANPARGFATTSVASKPRLDSDAPSGTQTPNALDSPAKKPDAPGASSAATQSTTIAPQPEKEKEKELSPEEFEKQLQESELQLLVEKHAQKVKRDAQRQKGRLETDRRLLRGQAEPLNTRKWLPQEIMDQVLDLIHAESRFSPSSIGSEKLAEKALSEEELTVRLWTLQQTLAGLPFPEEKMPAVIKHVLGLTPNVSSNNKDYIWGLDEALDWLAKQCTREELREYDYRGNKTIKSQLDTPGDSPLPSGASTPRFPEATANGKKAGGKNGLQHPRNGTPKKSAIVCNEDFEPDQLIPAYLETMTELFHIQRPRQMTKRPNGAKGSAKANGQKKPESDGTEDMNEAKLLARTVRIEEDVLFDKIEAEHIWRGRKIELEKEFAANAKKAQQEKEERETREATDSNDASESGDDITKEAERVAAEILNQDDGDDEQLLSDLFGDLPVLEADATGKLNTVVNGPDGIKVTIRDFGKWSGVSPTRALEEACRSRDSSARIIYSLVSESPFSNRHMATISWSKAQETDGLPTIPSIESSIFPLQFAFKMTTISTPDKKQSEAYVATVAMFAIFGSTKEEKIFMRLPAVWRELWSEMAEERKNQLDAADRLEIKDIRALIRQKEDKELEDGVILSTAFRGRGVQRPAKDGSDESVTDRAGSSGLALEYYQKIWYDKCTTPKFQAMLQKRMQLPMWDFRQQVLETVEREQVVIVCGETGCGKSTQVPSFLLEHQLSQGRPCKIYCTEPRRISAISLARRVSDELGEGRNDLGTARSLVGYSIRGEPNTSKETRLVFATTGIVMRMLEGSNDLREITHLVLDEVHERTIDSDFLLIVLKNLLEKRKDLKVILMSATVDAERFSNYLGRAPVLNVPGRTFPVQVKYLEDALELTGYTLDQQSHEKEIEIDDDPLDTENDGSSGAAAAKELRQYSAKTRNTLTQIDEYQIEFNLIVRLILQIANDPAYEFYSKAILIFLPGIADIRTLNDFILGEPFFQRQWDVIPLHSSFATEDQERAFLIPPLGTRKIVLATNIAETGITIPDVTCVIDTGKHREMRFVEKRQMSKLIDTFISRANAKQRRGRAGRVQEGLCFHMFTKYRHDQLMSDQQTPEMLRLSLQELAIRVKIYGLGGIEDTLGQALDPPSAKNIRRAVDALIDVRALTAAEDLTPLGHQLAKLPLDVFLGKLVLQGTIFKCLDMAVTVAAILQSKSPFTAPFGQRTQADQARKAFRRADSDLLTAYNAYLGWKKVCQTSSHDFQYCKKNFLSSQNLSNIEDAKGQLLLELADAESLQLTKEEYQNIKRLRYSNRRRQFFDLPQRVNINSDNDFVNCSVIAWSFYPKLLLKENKGFRNIGNNQSISLHPTSVNKGHPELKWLSYYYIMQSKQFLNAHETTAVDTFAIALLCGDVRVDMYAGVIILDGNRARFSAPDWKTMLVIKTLRARLRDILTRSFGKPGKGLTAQQEKWLDVWNKIFSQDFTKA

SEQ ID NO: 32786 - DNA, 5306 bp, Muscodor strobelii
  misc_feature: SGI EST ID NO. CUFF.77867.0
  misc_feature: Variant of the nucleotide sequence at SEQ ID NO 32784
ctccattgccgttgcactttctcgacccgacagcgtgaggtcctgtcacgcgagccgtggtggctgcatgctcaggcaccgacgacggcttcagggtagcttttgtatattgtagcacaattcagctgagagtggtactttcttcaggcgacacaccccgccatggcgatgatgtagctgttgcacctcgaagctcaaagctgtgaattttccctacgccttcaatcgtcttcgccgacacttttctatgctcggcgacaacaacaccaacaccacttctcctcataagcaatccttgctactcgacgatgcttatctgctagctgaccgccatgctgcatcgcaggactacctaacctccaacccgctttttgccttctaggtcgtgcgcctacgacatctggcacctattccgcatgtacctcctaagtcgaaccatatccaccctagagagccatgattcaactctttcacgccacctccgcttgagcctcatccctcccttcttcaccactgcatagtccttgatcaatatcttcgcatcaacctcgcatctgtctcttgttctcttgaccatggcgggtgccaagaagaaaaagaccaagcccgccgccaacccagccagaggttttgctaccacttctgttgcttccaagcccagactcgacagcgatgcgccctcgggcacccagacccccaacgccctcgattccccagccaagaagccagacgctcccggcgcatcctcagctgctacccaatccaccacaattgctccccagcccgagaaggagaaagagaaagagctaagcccagaggaatttgaaaagcagctacaagagtcagagttgcagttacttgtcgagaaacatgcccaaaaggtcaaaagagacgcccagcgccagaaaggtcgtctcgagaccgaccgaagactgcttagaggacaggccgagcctttgaataccaggaaatggctgccacaagagataatggaccaggttctggatcttatccacgctgagagccgcttctcaccgtcttcgataggctcggagaaattggcagagaaggcactctccgaagaggaattgactgtcagactatggacactacaacagactctcgctggcctccccttccccgaggaaaagatgcccgccgtcataaagcatgtgctcgggttgacgccaaacgtatcatccaacaacaaagactacatctggggtctggacgaagcactcgactggcttgccaagcagtgcactcgcgaagaattgcgcgagtacgattacagaggcaacaagaccataaagtcacagctagatacacctggtgatagtcctttaccttctggcgccagcacgccacgctttcccgaggcaaccgcaaacggcaaaaaagccggcggcaagaacgggttgcaacacccgcgcaatggcactccaaagaaatcagcaattgtatgcaatgaggattttgagcctgatcaattgattccggcgtacttagagacgatgaccgagttgttccacatccaacgccccagacaaatgacaaagaggccaaatggcgccaaaggcagcgcgaaggccaatggacagaagaagcccgaaagtgacggcactgaagatatgaacgaggctaaactccttgcgagaactgtccgcattgaggaagatgttctgttcgacaagattgaggccgagcatatttggcgaggccgcaagattgaattggaaaaggagtttgccgcaaatgcgaagaaagcccagcaagaaaaggaggaaagagagacaagagaggccactgattcgaatgatgcaagtgaatcgggagacgacataaccaaagaagctgagagagtcgctgcagagattctgaaccaggacgatggtgatgatgaacaattgctgtctgatttgtttggcgatctcccagtcctcgaagccgatgctacgggcaaattgaacactgtcgtgaacggacccgatggcatcaaggtaacaatccgagacttcggcaagtggtcaggtgtgagccctacgagggctctagaagaggcctgtcgatcaagagattcatccgctaggattatctacagccttgtgtctgagagtccattttctaacaggcatatggcgaccatctcttggtccaaagcacaagagaccgatggcctgcctactataccgtccattgaatctagcatattccccctacaattcgctttcaaaatgactaccatctctactcccgacaagaagcaatcggaggcctacgttgctaccgttgccatgttcgctattttcggatctacaaaggaagagaagatattcatgagactgcccgctgtctggagagaactgtggtcagaaatggcagaagagcgaaagaatcaactagatgccgccgataggctcgagatcaaagacatacgcgccctcatccgacagaaagaagataaagagttagaagatggtgtcattttatcaacagctttccgtggccgcggggttcagcgtccggccaaagacggaagcgacgaatccgttaccgatcgcgctggtagcagtggtttggcactcgagtactaccagaagatatggtatgataagtgcacaaccccgaaattccaagcgatgctacagaagcggatgcagcttcctatgtgggacttcaggcagcaggtcctggagaccgttgagcgagagcaggttgtgattgtttgcggtgagactggatgtggtaagagtacccaagtgccttcattcttactggagcaccagctatctcagggtcgcccgtgcaaaatctactgcactgagccccgacgtatctctgccatatcccttgcgcgtcgtgtaagcgacgagctcggtgaggggcgtaatgatcttggtaccgcacgatccctagttggttactcgatccgaggtgagccgaatacttccaaagagacgcggctggtttttgcgactactggtatcgtcatgcgaatgcttgagggttcgaacgatcttcgagagatcacccatctcgttctcgacgaagtacacgaacgcacgattgactcagatttcttactcatcgtgctcaaaaatcttctagaaaagaggaaagacctcaaggttattctcatgtccgcgaccgttgacgccgagaggttctctaattacttgggtcgtgcgcctgttttgaatgttccagggcggactttccccgtccaagtcaaatacctggaggacgcacttgagcttacaggttatacccttgaccagcagagccatgagaaggagatagagattgacgatgatccgcttgacaccgagaatgatggttcctccggcgcagctgccgcaaaggagcttcgacaatactcggctaagactcgaaatactctgacccagattgacgagtatcaaatcgagtttaacttgatcgttcgactcatattgcagatagcaaacgacccggcctacgagttctacagcaaggcaattctaatattcctaccaggtatagcggatatcaggacactaaatgattttatacttggtgaaccattctttcagagacaatgggacgtgatccccttacattctagctttgcaactgaagaccaagagcgagcgttccttatcccacccctcggaacgaggaagatcgtgttagccaccaatattgcggaaacgggcatcaccatccctgatgtaacttgcgtcatcgacactggaaaacaccgcgaaatgcgattcgtcgagaaacgacagatgtctaagctcatcgacacattcatctctagagccaatgccaaacaacggcgtggcagagcaggccgtgttcaggagggcctttgcttccacatgttcacaaagtaccggcatgatcagctgatgagtgatcaacaaactcctgaaatgctgcgcttgtctctacaagaacttgctattcgcgtcaagatttacggtcttggtggaatagaggatacgcttggacaagctctcgacccgccatctgccaagaacattcgtagagcagtagacgctctaattgacgtgagagcactcactgcagcagaagatctcacaccacttggtcatcaattggctaaactcccccttgacgtatttttaggcaaattggttttacagggcactatattcaagtgtctggatatggctgtcactgttgctgctattttacaatctaaatcgccattcactgcgcctttcggccaacgtacccaggccgaccaggcacgtaaggcgtttaggagagccgactcagatcttctcactgcgtacaacgcctatttaggctggaagaaagtgtgtcagacatctagccacgacttccagtactgcaaaaagaactttctatcttcacaaaatctatccaacatcgaggacgcaaaaggacagctgcttctggaattagcagatgctgagtctctgcaactgaccaaggaagagtaccagaatattaagcgtctccgatactcgaaccggcgaagacaattctttgacttgccccaacgtgttaacatcaatagtgacaacgacttcgtcaattgctctgtcattgcttggagcttctatcctaaactacttctcaaggagaacaagggcttccgtaatattggaaacaaccagagcatcagtctccaccctacaagcgtgaacaagggacatccggagctgaaatggctttcatattattatatcatgcaatccaaacaatttctcaatgcccatgagacaactgccgtcgacacttttgccattgcactgctctgcggtgacgtgcgtgttgatatgtacgcaggcgtaattatcctggacggtaacagagcgcgtttcagcgctccagactggaagactatgcttgtaatcaagaccttgcgcgcacgactccgcgatattctcacgaggagcttcgggaagccgggcaaggggctaacggctcagcaagagaagtggttggatgtctggaacaagattttcagccaggatttcacgaaggcttagtatgtctataagtgactttgctgctggtgcatatgcagggagaaggaaaaagcgaggaaggcatttgctgagggaatcggtgccctacgttgtattgctcgcaactttcctcacatcacacatcacaaatcatgcatcacatctacataacacatccggggatcaaaacacattgcatcaaccacattagctctgcacgaaaattagggaaggacaaggtagctagctagatacccaaaacacaacaaaggaaaaaagaaagtattgccattggcgcgc

SEQ ID NO: 32787 - DNA, 4461 bp, Muscodor strobelii
  misc_feature: SGI cDNA ID NO. 571302
  misc_feature: Encodes the peptide sequence at SEQ ID NO 32788
atggcgggtgccaagaagaaaaagaccaagcccgccgccaacccagccagaggttttgctaccacttctgttgcttccaagcccagactcgacagcgatgcgccctcgggcacccagacccccaacgccctcgattccccagccaagaagccagacgctcccggcgcatcctcagctgctacccaatccaccacaattgctccccagcccgagaaggagaaagagaaagagctaagcccagaggaatttgaaaagcagctacaagagtcagagttgcagttacttgtcgagaaacatgcccaaaaggtcaaaagagacgcccagcgccagaaaggtcgtctcgagaccgaccgaagactgcttagaggacaggccgagcctttgaataccaggaaatggctgccacaagagataatggaccaggttctggatcttatccacgctgagagccgcttctcaccgtcttcgataggctcggagaaattggcagagaaggcactctccgaagaggaattgactgtcagactatggacactacaacagactctcgctggcctccccttccccgaggaaaagatgcccgccgtcataaagcatgtgctcgggttgacgccaaacgtatcatccaacaacaaagactacatctggggtctggacgaagcactcgactggcttgccaagcagtgcactcgcgaagaattgcgcgagtacgattacagaggcaacaagaccataaagtcacagctagacccactagatacacctggtgatagtcctttaccttctggcgccagcacgccacgctttcccgaggcaaccgcaaacggcaaaaaagccggcggcaagaacgggttgcaacacccgcgcaatggcactccaaagaaatcagcaattgtatgcaatgaggattttgagcctgatcaattgattccggcgtacttagagacgatgaccgagttgttccacatccaacgccccagacaaatgacaaagaggccaaatggcgccaaaggcagcgcgaaggccaatggacagaagaagcccgaaagtgacggcactgaagatatgaacgaggctaaactccttgcgagaactgtccgcattgaggaagatgttctgttcgacaagattgaggccgagcatatttggcgaggccgcaagattgaattggaaaaggagtttgccgcaaatgcgaagaaagcccagcaagaaaaggaggaaagagagacaagagaggccactgattcgaatgatgcaagtgaatcgggagacgacataaccaaagaagctgagagagtcgctgcagagattctgaaccaggacgatggtgatgatgaacaattgctgtctgatttgtttggcgatctcccagtcctcgaagccgatgctacgggcaaattgaacactgtcgtgaacggacccgatggcatcaaggtaacaatccgagacttcggcaagtggtcaggtgtgagccctacgagggctctagaagaggcctgtcgatcaagagattcatccgctaggattatctacagccttgtgtctgagagtccattttctaacaggcatatggcgaccatctcttggtccaaagcacaagagaccgatggcctgcctactataccgtccattgaatctagcatattccccctacaattcgctttcaaaatgactaccatctctactcccgacaagaagcaatcggaggcctacgttgctaccgttgccatgttcgctattttcggatctacaaaggaagagaagatattcatgagactgcccgctgtctggagagaactgtggtcagaaatggcagaagagcgaaagaatcaactagatgccgccgataggctcgagatcaaagacatacgcgccctcatccgacagaaagaagataaagagttagaagatggtgtcattttatcaacagctttccgtggccgcggggttcagcgtccggccaaagacggaagcgacgaatccgttaccgatcgcgctggtagcagtggtttggcactcgagtactaccagaagatatggtatgataagtgcacaaccccgaaattccaagcgatgctacagaagcggatgcagcttcctatgtgggacttcaggcagcaggtcctggagaccgttgagcgagagcaggttgtgattgtttgcggtgagactggatgtggtaagagtacccaagtgccttcattcttactggagcaccagctatctcagggtcgcccgtgcaaaatctactgcactgagccccgacgtatctctgccatatcccttgcgcgtcgtgtaagcgacgagctcggtgaggggcgtaatgatcttggtaccgcacgatccctagttggttactcgatccgaggtgagccgaatacttccaaagagacgcggctggtttttgcgactactggtatcgtcatgcgaatgcttgagggttcgaacgatcttcgagagatcacccatctcgttctcgacgaagtacacgaacgcacgattgactcagatttcttactcatcgtgctcaaaaatcttctagaaaagaggaaagacctcaaggttattctcatgtccgcgaccgttgacgccgagaggttctctaattacttgggtcgtgcgcctgttttgaatgttccagggcggactttccccgtccaagtcaaatacctggaggacgcacttgagcttacaggttatacccttgaccagcagagccatgagaaggagatagagattgacgatgatccgcttgacaccgagaatgatggttcctccggcgcagctgccgcaaaggagcttcgacaatactcggctaagactcgaaatactctgacccagattgacgagtatcaaatcgagtttaacttgatcgttcgactcatattgcagatagcaaacgacccggcctacgagttctacagcaaggcaattctaatattcctaccaggtatagcggatatcaggacactaaatgattttatacttggtgaaccattctttcagagacaatgggacgtgatccccttacattctagctttgcaactgaagaccaagagcgagcgttccttatcccacccctcggaacgaggaagatcgtgttagccaccaatattgcggaaacgggcatcaccatccctgatgtaacttgcgtcatcgacactggaaaacaccgcgaaatgcgattcgtcgagaaacgacagatgtctaagctcatcgacacattcatctctagagccaatgccaaacaacggcgtggcagagcaggccgtgttcaggagggcctttgcttccacatgttcacaaagtaccggcatgatcagctgatgagtgatcaacaaactcctgaaatgctgcgcttgtctctacaagaacttgctattcgcgtcaagatttacggtcttggtggaatagaggatacgcttggacaagctctcgacccgccatctgccaagaacattcgtagagcagtagacgctctaattgacgtgagagcactcactgcagcagaagatctcacaccacttggtcatcaattggctaaactcccccttgacgtatttttaggcaaattggttttacagggcactatattcaagtgtctggatatggctgtcactgttgctgctattttacaatctaaatcgccattcactgcgcctttcggccaacgtacccaggccgaccaggcacgtaaggcgtttaggagagccgactcagatcttctcactgcgtacaacgcctatttaggctggaagaaagtgtgtcagacatctagccacgacttccagtactgcaaaaagaactttctatcttcacaaaatctatccaacatcgaggacgcaaaaggacagctgcttctggaattagcagatgctgagtctctgcaactgaccaaggaagagtaccagaatattaagcgtctccgatactcgaaccggcgaagacaattctttgacttgccccaacgtgttaacatcaatagtgacaacgacttcgtcaattgctctgtcattgcttggagcttctatcctaaactacttctcaaggagaacaagggcttccgtaatattggaaacaaccagagcatcagtctccaccctacaagcgtgaacaagggacatccggagctgaaatggctttcatattattatatcatgcaatccaaacaatttctcaatgcccatgagacaactgccgtcgacacttttgccattgcactgctctgcggtgacgtgcgtgttgatatgtacgcaggcgtaattatcctggacggtaacagagcgcgtttcagcgctccagactggaagactatgcttgtaatcaagaccttgcgcgcacgactccgcgatattctcacgaggagcttcgggaagccgggcaaggggctaacggctcagcaagagaagtggttggatgtctggaacaagattttcagccaggatttcacgaaggcttag

SEQ ID NO: 32788 - protein, 1486 aa, Muscodor strobelii
  misc_feature: SGI Peptide ID NO. 571302
  misc_feature (702)..(867): Pfam Id: PF00270 Pfam Desc: DEAD/DEAH box helicase
  misc_feature (1284)..(1413): Pfam Id: PF07717 Pfam Desc: Domain of function (DUF1605)
  misc_feature (1156)..(1246): Pfam Id: PF04408 Pfam Desc: Helicase associated domain (HA2)
  misc_feature (999)..(1093): Pfam Id: PF00271 Pfam Desc: Helicase conserved C-terminal domain
  misc_feature (1)..(1480): NCBI GI: 85095331 Blast Desc: NCU05802 [Neurospora crassa OR74A] gi|28921521|gb|EAA30826.1| conserved [Neurospora crassa OR74A]
  misc_feature (1)..(1479): NCBI GI: 171677410 Blast Desc: protein product [Podospora anserina] gi|170936773|emb|CAP61431.1| protein product [Podospora anserina]
  misc_feature (17)..(1480): NCBI GI: 116201091 Blast Desc: CHGG_08430 [Chaetomium globosum CBS 148.51] gi|88176948|gb|EAQ84416.1| CHGG_08430 [Chaetomium globosum CBS 148.51]
  misc_feature (7)..(1485): NCBI GI: 261358514 Blast Desc: pre-mRNA-splicing factor ATP-dependent RNA helicase PRP22 [Verticillium albo-atrum VaMs.102]
  misc_feature (11)..(1483): NCBI GI: 156059440 Blast Desc: SS1G_03732 [Sclerotinia sclerotiorum 1980] gi|154701519|gb|EDO01258.1| SS1G_03732 [Sclerotinia sclerotiorum 1980]
  misc_feature (1)..(1483): NCBI GI: 46136719 Blast Desc: FG09875.1 [Gibberella zeae PH-1]
  misc_feature (11)..(1238): NCBI GI: 145602923 Blast Desc: MGG_04709 [Magnaporthe grisea 70-15] gi|145011273|gb|EDJ95929.1| MGG_04709 [Magnaporthe grisea 70-15]
  misc_feature (11)..(1288): NCBI GI: 154310252 Blast Desc: BC1G_07046 [Botryotinia fuckeliana B05.10] gi|150851607|gb|EDN26800.1| BC1G_07046 [Botryotinia fuckeliana B05.10]
  misc_feature (17)..(1481): NCBI GI: 169784010 Blast Desc: [Aspergillus oryzae RIB40] gi|83775211|dbj|BAE65334.1| protein product [Aspergillus oryzae]
  misc_feature (1)..(1480): NCBI GI: 121698146 Blast Desc: ATP dependent RNA helicase, [Aspergillus clavatus NRRL 1] gi|119395871|gb|EAW06303.1| ATP dependent RNA helicase, [Aspergillus clavatus NRRL 1]
MAGAKKKKTKPAANPARGFATTSVASKPRLDSDAPSGTQTPNALDSPAKKPDAPGASSAATQSTTIAPQPEKEKEKELSPEEFEKQLQESELQLLVEKHAQKVKRDAQRQKGRLETDRRLLRGQAEPLNTRKWLPQEIMDQVLDLIHAESRFSPSSIGSEKLAEKALSEEELTVRLWTLQQTLAGLPFPEEKMPAVIKHVLGLTPNVSSNNKDYIWGLDEALDWLAKQCTREELREYDYRGNKTIKSQLDPLDTPGDSPLPSGASTPRFPEATANGKKAGGKNGLQHPRNGTPKKSAIVCNEDFEPDQLIPAYLETMTELFHIQRPRQMTKRPNGAKGSAKANGQKKPESDGTEDMNEAKLLARTVRIEEDVLFDKIEAEHIWRGRKIELEKEFAANAKKAQQEKEERETREATDSNDASESGDDITKEAERVAAEILNQDDGDDEQLLSDLFGDLPVLEADATGKLNTVVNGPDGIKVTIRDFGKWSGVSPTRALEEACRSRDSSARIIYSLVSESPFSNRHMATISWSKAQETDGLPTIPSIESSIFPLQFAFKMTTISTPDKKQSEAYVATVAMFAIFGSTKEEKIFMRLPAVWRELWSEMAEERKNQLDAADRLEIKDIRALIRQKEDKELEDGVILSTAFRGRGVQRPAKDGSDESVTDRAGSSGLALEYYQKIWYDKCTTPKFQAMLQKRMQLPMWDFRQQVLETVEREQVVIVCGETGCGKSTQVPSFLLEHQLSQGRPCKIYCTEPRRISAISLARRVSDELGEGRNDLGTARSLVGYSIRGEPNTSKETRLVFATTGIVMRMLEGSNDLREITHLVLDEVHERTIDSDFLLIVLKNLLEKRKDLKVILMSATVDAERFSNYLGRAPVLNVPGRTFPVQVKYLEDALELTGYTLDQQSHEKEIEIDDDPLDTENDGSSGAAAAKELRQYSAKTRNTLTQIDEYQIEFNLIVRLILQIANDPAYEFYSKAILIFLPGIADIRTLNDFILGEPFFQRQWDVIPLHSSFATEDQERAFLIPPLGTRKIVLATNIAETGITIPDVTCVIDTGKHREMRFVEKRQMSKLIDTFISRANAKQRRGRAGRVQEGLCFHMFTKYRHDQLMSDQQTPEMLRLSLQELAIRVKIYGLGGIEDTLGQALDPPSAKNIRRAVDALIDVRALTAAEDLTPLGHQLAKLPLDVFLGKLVLQGTIFKCLDMAVTVAAILQSKSPFTAPFGQRTQADQARKAFRRADSDLLTAYNAYLGWKKVCQTSSHDFQYCKKNFLSSQNLSNIEDAKGQLLLELADAESLQLTKEEYQNIKRLRYSNRRRQFFDLPQRVNINSDNDFVNCSVIAWSFYPKLLLKENKGFRNIGNNQSISLHPTSVNKGHPELKWLSYYYIMQSKQFLNAHETTAVDTFAIALLCGDVRVDMYAGVIILDGNRARFSAPDWKTMLVIKTLRARLRDILTRSFGKPGKGLTAQQEKWLDVWNKIFSQDFTKA

SEQ ID NO: 32789 - DNA, 5306 bp, Muscodor strobelii; identical to SEQ ID NO: 32786
  misc_feature: SGI EST ID NO. CUFF.77867.0
  misc_feature: Variant of the nucleotide sequence at SEQ ID NO 32787

SEQ ID NO: 32790 - DNA, 3114 bp, Muscodor strobelii
  misc_feature: SGI cDNA ID NO. 571303
  misc_feature: Reduced expression when VOC is produced
  misc_feature: Encodes the peptide sequence at SEQ ID NO 32791
atggcgaaacccgccggggagaaggactggctggcctacatcgacgagcagcgtcgccacgcggacgatctcgaggcccgcgtcaagctgatcgagttctacaaggccgccctcgccgacgagcccgcctctctcgagctctggctggcctactgcgagtacttctggtctctcttcaccgagtcccagtcgcccgacaccaagtggcccgaggaagagcagctgctcgcccgcgagctcttcaccttcgatgccgccctgagcctctggagcgatggctacgccgccaccaagttccgcatcgccgacagccaccgcttctggaaccgctgggtcgccatcgagcaggaccagctcgcccgcacccgcaccccgagcggcgtcaagcgcatctcccacctcttccgcgaccgtctgcaggtcccgcacaccacctgggaccagacctcccagatgttctccgagttccttagcacctacaacaacaccgcctacgagcaggagatgctcgaggtcacgcgcactgcccaggatgccaagaaggcctacgaaccgagagagaagttcgagctcgatctggcgcgcgcccagcgtgagggcgaccgcgatgccgagtgcgcccagatgcgcctctatctcgacttcgagatggcccagactgcccatgcgcctgtcaacgataccctcacgatatctctcggcctgggtctgtatgcgcgcgccttgacgggcatcttctccatcgacgacgacgtttggaacaactgtgccgtctatctgtccactcttcatcgccagagtaaggcgctctcccagacgtatgccgaactgcccgacatgctcgacttcttgaagcgcgccacggaacactgcccttggtctggcccgctgtggggaaggtacatccttcatgctgagagcgcgggattatcattccagagcgtcgaggccatcaagcatgctgcgaccaacacaaaggctctggacaagaatggcatgaccagcgtgcttgacatgtacacggcctggtgcggcttcctcaaacgtaccgccatggaccccaatgcctccgaggacgctgctgatgtcgccgagcttggtcttaccgctgcgttggaagatgtacagctttgggggaagcgtctgtatcaagatgcctatcaaggagacccgaattatcgacttgaacgcatcctcatacagtttctatccgaagtgagaggcgaccatgatcatgctcggagtttctggaacaagatgactcagcaacctctccttgccaatagttacgacttttggttgaactattatctatgggagatggtcgtctttgcctcgaaacccaggggcccaccgcctactaaccctcctacacccacgattggagtgaaggccactcgtgtacctaccacagccacaagtgttttgcagaaagctatcgcacagaagacattggactggccggaacgagtaatggaggtctatctccagcattgcaatgactacgagcagccagatgttttgcagtttgctcttgataccgtacacaagactcgtcgaatggtagccaagcgtcgtgaacgccaaaatgcagaggctcaagctgcttatgccgcacaagccgagcaacaagctcagagtcatcttgccgcgaccgctacagaaccaggttcgccttcgagtgccaagaggaaacgagacgaagcggccgaggacgcaggcgagagcgcaagtaagaaggtcaggagtacggctgcgagcgtcgatggtggagatggatcccaggactcgaagccaacgcgagatcgcgagcatacttccgttatggtcaaaaatttgcccggtgatgtcacgcagacggcgatcaagaagtggttcaaagaatatggtcatatcaataacttgactacccttcacgaaaaggatggttcatgctctgccctgatcgagtttagatctacggaagatgctcagtccgcacttttacgagatcagaaatattttggtcaatcacagattagcgtcacgccgggtataaatctcaccgttttcgtgtccaattaccccccgaccgctgatgaagcttatatgcgcaacctgtacaagcactgcggcgaaatcttcagcatccgcatgccatcgctcaaattcaacactcatcgacgcttctgctatgtctcgttcaaaacttccgatgctgcatatcaggccacgctcatggatggcaatcttctcgaaggcaaattcaaacttcagtccaaattttctaatcccaacaagaagaaggaccgcgaaggcgccgtagcagaaggccgcgagattcggctcagagatttacacccctcgactaaagatcaagatctgcatgacgtatttagtaaatacggcaaagttctggatgtccgactcatcacgaacatgaaaggtgcggtcgtaggaacagcctacgttgtgttcgagagtaagggtcaggccgagaaagcgatggaacttgataagacgaagttcaagaacaacattatatctgttgaattgtgcaaggagacgaatttcaaaccgactgcttctacaaggggggagcacgcttcgcctgcgccctcttcagcggatggagatacgccgatgcaggatggcggcgaaacggcgacgaatggtaagggcccgacgccgggggagatacaagagaggagtattgccattatggatgtacctgatacggtcaacgatgcgagggtcagagctctggtcgagaaacatgggactgtgagcaaactgactctccgtcctgaccgggctggtgcgattattcaatttagcgatgccgcgacggctggcagagcggcgctggcgcttgatgggctggagattgcggagggacagaaaatccgaacgggcgcagtcaaagagctattccagcagaagaaacatgaaggagagtctgaagggagtgggaaagctgcaggcgcagcgcccaagggcccggcgttcatggctccgccgccacaagtcagaagacctgtccttggtggtgggaggggaagaagaggaggtctgggatttaaggctgcgaagatacccaaggaggaggggaatactaatgaggataaggcatga

SEQ ID NO: 32791 - protein, 1037 aa, Muscodor strobelii
  misc_feature: SGI Peptide ID NO. 571303
  misc_feature (774)..(843): Pfam Id: PF00076 Pfam Desc: RNA recognition motif. (a.k.a. RRM, RBD, or RNP domain)
  misc_feature (608)..(675): Pfam Id: PF00076 Pfam Desc: RNA recognition motif. (a.k.a. RRM, RBD, or RNP domain)
  misc_feature (683)..(753): Pfam Id: PF00076 Pfam Desc: RNA recognition motif. (a.k.a. RRM, RBD, or RNP domain)
  misc_feature (683)..(748): Pfam Id: PF00076 Pfam Desc: RNA recognition motif. (a.k.a. RRM, RBD, or RNP domain)
  misc_feature (1)..(1034): NCBI GI: 256732021 Blast Desc: NECHADRAFT_10800 [Nectria haematococca mpVI 77-13-4]
  misc_feature (6)..(1020): NCBI GI: 145602892 Blast Desc: MGG_04727 [Magnaporthe grisea 70-15] gi|145011253|gb|EDJ95909.1| MGG_04727 [Magnaporthe grisea 70-15]
  misc_feature (1)..(1029): NCBI GI: 85090720 Blast Desc: NCU09048 [Neurospora crassa OR74A] gi|28919924|gb|EAA29316.1| conserved [Neurospora crassa OR74A]
  misc_feature (1)..(974): NCBI GI: 116201147 Blast Desc: CHGG_08458 [Chaetomium globosum CBS 148.51] gi|88176976|gb|EAQ84444.1| CHGG_08458 [Chaetomium globosum CBS 148.51]
  misc_feature (1)..(1021): NCBI GI: 171677404 Blast Desc: protein product [Podospora anserina] gi|170936770|emb|CAP61428.1| protein product [Podospora anserina]
  misc_feature (4)..(1024): NCBI GI: 261358515 Blast Desc: conserved [Verticillium albo-atrum VaMs.102]
  misc_feature (6)..(1023): NCBI GI: 145237936 Blast Desc: An07g05350 [Aspergillus niger] gi|134076092|emb|CAK39451.1| protein product [Aspergillus niger]
  misc_feature (6)..(1026): NCBI GI: 115398692 Blast Desc: conserved [Aspergillus terreus NIH2624] gi|114191818|gb|EAU33518.1| conserved [Aspergillus terreus NIH2624]
  misc_feature (6)..(1021): NCBI GI: 258564845 Blast Desc: conserved [Uncinocarpus reesii 1704] gi|237906868|gb|EEP81269.1| conserved [Uncinocarpus reesii 1704]
  misc_feature (6)..(1021): NCBI GI: 259482511 Blast Desc: TPA: pre-mRNA splicing factor (Prp24), (AFU_orthologue; AFUA_2G01820) [Aspergillus nidulans FGSC A4]
  misc_feature: Useful for introducing or modulating the production of volatile compounds
MAKPAGEKDWLAYIDEQRRHADDLEARVKLIEFYKAALADEPASLELWLAYCEYFWSLFTESQSPDTKWPEEEQLLARELFTFDAALSLWSDGYAATKFRIADSHRFWNRWVAIEQDQLARTRTPSGVKRISHLFRDRLQVPHTTWDQTSQMFSEFLSTYNNTAYEQEMLEVTRTAQDAKKAYEPREKFELDLARAQREGDRDAECAQMRLYLDFEMAQTAHAPVNDTLTISLGLGLYARALTGIFSIDDDVWNNCAVYLSTLHRQSKALSQTYAELPDMLDFLKRATEHCPWSGPLWGRYILHAESAGLSFQSVEAIKHAATNTKALDKNGMTSVLDMYTAWCGFLKRTAMDPNASEDAADVAELGLTAALEDVQLWGKRLYQDAYQGDPNYRLERILIQFLSEVRGDHDHARSFWNKMTQQPLLANSYDFWLNYYLWEMVVFASKPRGPPPTNPPTPTIGVKATRVPTTATSVLQKAIAQKTLDWPERVMEVYLQHCNDYEQPDVLQFALDTVHKTRRMVAKRRERQNAEAQAAYAAQAEQQAQSHLAATATEPGSPSSAKRKRDEAAEDAGESASKKVRSTAASVDGGDGSQDSKPTRDREHTSVMVKNLPGDVTQTAIKKWFKEYGHINNLTTLHEKDGSCSALIEFRSTEDAQSALLRDQKYFGQSQISVTPGINLTVFVSNYPPTADEAYMRNLYKHCGEIFSIRMPSLKFNTHRRFCYVSFKTSDAAYQATLMDGNLLEGKFKLQSKFSNPNKKKDREGAVAEGREIRLRDLHPSTKDQDLHDVFSKYGKVLDVRLITNMKGAVVGTAYVVFESKGQAEKAMELDKTKFKNNIISVELCKETNFKPTASTRGEHASPAPSSADGDTPMQDGGETATNGKGPTPGEIQERSIAIMDVPDTVNDARVRALVEKHGTVSKLTLRPDRAGAIIQFSDAATAGRAALALDGLEIAEGQKIRTGAVKELFQQKKHEGESEGSGKAAGAAPKGPAFMAPPPQVRRPVLGGGRGRRGGLGFKAAKIPKEEGNTNEDKA

SEQ ID NO: 32792 - DNA, 4155 bp, Muscodor strobelii
  misc_feature: SGI EST ID NO. CUFF.77467.0
  misc_feature: Variant of the nucleotide sequence at SEQ ID NO 32790
acccaggccggagaaatgaaaccggggactgaacagtgggaatacatgcagatcccactcttagccagcccgctctaaagtagaggacaggtattgttgtgtgcagaggtacatgtcgcaagagctagaggggggatagcagctggtctggggtcgtccgatgcgcctgggagcttcctgcagcatgtcatgacggtaacaattttcattttcgaggaagtagagagtccactgtagcaaaagcaaacaagtggcagcgccgcaaaatcacaccaccactcattcagttaatcaaatcctaccaaacggtgacacgcgctccttaccaccaccacaccccgtcgccgcccttactgctgtcgtcgtcattctgcattgcgacacctacggacgctaggcacgtacctggagtcagacagaaggctattaggcacttttgacggcaacgaccggctctctacacgtcgctcacctagccttgacctgatctgtagctacctatgcgccgaggtcgacgattgcagcctgctgaaacacatgacgacgaaacgacagaccccgacttgtaccccagcagcatcccaccccgtttagcaccagcatcatggcgaaacccgccggggagaaggactggctggcctacatcgacgagcagcgtcgccacgcggacgatctcgaggcccgcgtcaagctgatcgagttctacaaggccgccctcgccgacgagcccgcctctctcgagctctggctggcctactgcgagtacttctggtctctcttcaccgagtcccagtcgcccgacaccaagtggcccgaggaagagcagctgctcgcccgcgagctcttcaccttcgatgccgccctgagcctctggagcgatggctacgccgccaccaagttccgcatcgccgacagccaccgcttctggaaccgctgggtcgccatcgagcaggaccagctcgcccgcacccgcaccccgagcggcgtcaagcgcatctcccacctcttccgcgaccgtctgcaggtcccgcacaccacctgggaccagacctcccagatgttctccgagttccttagcacctacaacaacaccgcctacgagcaggagatgctcgaggtcacgcgcactgcccaggatgccaagaaggcctacgaaccgagagagaagttcgagctcgatctggcgcgcgcccagcgtgagggcgaccgcgatgccgagtgcgcccagatgcgcctctatctcgacttcgagatggcccagactgcccatgcgcctgtcaacgataccctcacgatatctctcggcctgggtctgtatgcgcgcgccttgacgggcatcttctccatcgacgacgacgtttggaacaactgtgccgtctatctgtccactcttcatcgccagagtaaggcgctctcccagacgtatgccgaactgcccgacatgctcgacttcttgaagcgcgccacggaacactgcccttggtctggcccgctgtggggaaggtacatccttcatgctgagagcgcgggattatcattccagagcgtcgaggccatcaagcatgctgcgaccaacacaaaggctctggacaagaatggcatgaccagcgtgcttgacatgtacacggcctggtgcggcttcctcaaacgtaccgccatggaccccaatgcctccgaggacgctgctgatgtcgccgagcttggtcttaccgctgcgttggaagatgtacagctttgggggaagcgtctgtatcaagatgcctatcaaggagacccgaattatcgacttgaacgcatcctcatacagtttctatccgaagtgagaggcgaccatgatcatgctcggagtttctggaacaagatgactcagcaacctctccttgccaatagttacgacttttggttgaactattatctatgggagatggtcgtctttgcctcgaaacccaggggcccaccgcctactaaccctcctacacccacgattggagtgaaggccactcgtgtacctaccacagccacaagtgttttgcagaaagctatcgcacagaagacattggactggccggaacgagtaatggaggtctatctccagcattgcaatgactacgagcagccagatgttttgcagtttgctcttgataccgtacacaagactcgtcgaatggtagccaagcgtcgtgaacgccaaaatgcagaggctcaagctgcttatgccgcacaagccgagcaacaagctcagagtcatcttgccgcgaccgctacagaaccaggttcgccttcgagtgccaagaggaaacgagacgaagcggccgaggacgcaggcgagagcgcaagtaagaaggtcaggagtacggctgcgagcgtcgatggtggagatggatcccaggactcgaagccaacgcgagatcgcgagcatacttccgttatggtcaaaaatttgcccggtgatgtcacgcagacggcgatcaagaagtggttcaaagaatatggtcatatcaataacttgactacccttcacgaaaaggatggttcatgctctgccctgatcgagtttagatctacggaagatgctcagtccgcacttttacgagatcagaaatattttggtcaatcacagattagcgtcacgccgggtataaatctcaccgttttcgtgtccaattaccccccgaccgctgatgaagcttatatgcgcaacctgtacaagcactgcggcgaaatcttcagcatccgcatgccatcgctcaaattcaacactcatcgacgcttctgctatgtctcgttcaaaacttccgatgctgcatatcaggccacgctcatggatggcaatcttctcgaaggcaaattcaaacttcagtccaaattttctaatcccaacaagaagaaggaccgcgaaggcgccgtagcagaaggccgcgagattcggctcagagatttacacccctcgactaaagatcaagatctgcatgacgtatttagtaaatacggcaaagttctggatgtccgactcatcacgaacatgaaaggtgcggtcgtaggaacagcctacgttgtgttcgagagtaagggtcaggccgagaaagcgatggaacttgataagacgaagttcaagaacaacattatatctgttgaattgtgcaaggagacgaatttcaaaccgactgcttctacaaggggggagcacgcttcgcctgcgccctcttcagcggatggagatacgccgatgcaggatggcggcgaaacggcgacgaatggtaagggcccgacgccgggggagatacaagagaggagtattgccattatggatgtacctgatacggtcaacgatgcgagggtcagagctctggtcgagaaacatgggactgtgagcaaactgactctccgtcctgaccgggctggtgcgattattcaatttagcgatgccgcgacggctggcagagcggcgctggcgcttgatgggctggagattgcggagggacagaaaatccgaacgggcgcagtcaaagagctattccagcagaagaaacatgaaggagagtctgaagggagtgggaaagctgcaggcgcagcgcccaagggcccggcgttcatggctccgccgccacaagtcagaagacctgtccttggtggtgggaggggaagaagaggaggtctgggatttaaggctgcgaagatacccaaggaggaggggaatactaatgaggataaggcatgaccgtgagactgagaggggatgaatacccacgaggacgaagattaggtcaaccacagataaagaatgtgtgtacaataaggggaaggatggggattcatttgcattattctggagttttcggctttgaggctcgacatggaaatggcatggtgtgctgctgctagctacttgctggtggcttgatgacagatacgtaattaatacctcgacatcgaaaaagatgggagacgaggcatggggaggcagcctggtgatgaagtggatgaataacggcatacctacggtcactggtttgctaggtagctaggtagctaggtagctaggtagctatggctagtagacatttgctacatatgaatgaggctcattgaaagaaatagactcatgtgcttgtctcatgtggtgagcatgggaatgagaatgatggtggaacgggg

SEQ ID NO: 32793 - DNA, 1737 bp, Muscodor strobelii
  misc_feature: SGI cDNA ID NO. 571304
  misc_feature: Encodes the peptide sequence at SEQ ID NO 32794
atggaggagaagggcttataccggcgtcctggccgcccggtcttggcgcggacgaactggtcgctgttcttggctggatttctcatcaccttaatactctttcgcttattcacgcccatatcactatcaaacatcttgaaaaaaccatctgacaagagtgaaatacacacataccccggagaaacgatcctgtggacggcatgcggtcaatttccaaatggccgcccgctcgaatgcggcgccatcacggtgcctatggaccaattcaactcatccaactcacgtagtaagaccttcacgattcccttgattcgcctgcgtagccctcacgcgaacgcgacgcaaaaccttctcatcaaccccggaggcccaggatcctcgggaataggagcagtatacagactgggagaacaaatcagcacgatagtaggccccgagtttcacctcgtaggctttgatcctaggggcgtaggtgcaagcgcaccacgcgcaacatgttatcatgatgaggaaacaagacatgctctgggccccgtgagggactatcacgtattagaagacagcgtcgagctctacacgtggtcgaagaacttcgtccgcgcctgcgcagagacaatgggcgaacatggatcatacctcaacacgccgcaaactgcagcagatctgaactccatcctcgacgctctagggcaagaagatatgatatactggggcttcagctacgggacaatcctgggccaaacctatgccgccctgtttccaaagcggtcaaagcgcgtcattatcgatggcgtgaataacgtttatgactggtatctcgggacactagattttgaggatctaacagacgccgacgcagtctttgacggctttcttgaagaatgcatggaagccggaccctcctgcccactaacaaccttcgcaactacaaaatcatcactaaagtcccaactcctaacactctcttccaatgtccgctccaacccacttagcgtttacataaacagcacgacacacggccgtctagacgacacacacatcctctacaccggaatctaccgaggacttatgaagccgtccacctggcccatactaactgccaacctcgcctccctactccacggcaatgcaacatcgtcattcctagcctacggccaacgcaagccctgggccgagcaaggcgatgccttctccggcgacgcattccgcttcatctacaacaacgacggggcctctgggcgctctcactggccccaagaccgcgagacactactcaatatgttgatccccttcataaaccgctctctattcggaccgacggagcatgggatatactacagcaaacaacaatggataataccgaaaactcacactttcattccgccggcgaagacggagactgctcatcctatactgatattgacgacgagtaaagatccggtttgtccgctcataagtgccaagagtgcacagggtgcgtttgagggaagtcagatagttgaggttatggggtatggtcattgttctacctctgtgccgagtttgtgtttagcgcggcacgttaggaactttctggggaatgggacgatgccggatgggcatacgagatgtgaggttgatgggccatatttccctggggatggggagggtaaaggcctaagaacgagggatagggggtgggacgaggaggactggaaggtgtatgaggcgcaggttaagctggctgagttgtggtag

SEQ ID NO: 32794 - protein, 578 aa, Muscodor strobelii
  misc_feature: SGI Peptide ID NO. 571304
  misc_feature (147)..(523): Pfam Id: PF00561 Pfam Desc: alpha/beta hydrolase fold
  misc_feature (443)..(537): Pfam Id: PF08386 Pfam Desc: TAP-like protein
  misc_feature (147)..(264): Pfam Id: PF00561 Pfam Desc: alpha/beta hydrolase fold
  misc_feature (465)..(537): Pfam Id: PF08386 Pfam Desc: TAP-like protein
  misc_feature (17)..(578): NCBI GI: 115400395 Blast Desc: conserved [Aspergillus terreus NIH2624] gi|114191452|gb|EAU33152.1| conserved [Aspergillus terreus NIH2624]
  misc_feature (58)..(575): NCBI GI: 116204305 Blast Desc: CHGG_10036 [Chaetomium globosum CBS 148.51] gi|88176164|gb|EAQ83632.1| CHGG_10036 [Chaetomium globosum CBS 148.51]
  misc_feature (12)..(575): NCBI GI: 46113633 Blast Desc: FG02937.1 [Gibberella zeae PH-1]
  misc_feature (57)..(575): NCBI GI: 256722237 Blast Desc: NECHADRAFT_72773 [Nectria haematococca mpVI 77-13-4]
  misc_feature (51)..(552): NCBI GI: 171678657 Blast Desc: protein product [Podospora anserina] gi|170937398|emb|CAP62056.1| protein product [Podospora anserina]
  misc_feature (78)..(514): NCBI GI: 145241810 Blast Desc: An09g02370 [Aspergillus niger] gi|134078092|emb|CAK40174.1| protein product [Aspergillus niger]
  misc_feature (13)..(545): NCBI GI: 170106257 Blast Desc: [Laccaria bicolor S238N-H82] gi|164640686|gb|EDR04950.1| [Laccaria bicolor S238N-H82]
  misc_feature (48)..(545): NCBI GI: 71007720 Blast Desc: UM01994.1 [Ustilago maydis 521] gi|46097423|gb|EAK82656.1| UM01994.1 [Ustilago maydis 521]
  misc_feature (77)..(561): NCBI GI: 169865692 Blast Desc: CC1G_06657 [Coprinopsis cinerea okayama7#130] gi|116499452|gb|EAU82347.1| CC1G_06657 [Coprinopsis cinerea okayama7#130]
  misc_feature (63)..(547): NCBI GI: 238492397 Blast Desc: conserved [Aspergillus flavus NRRL3357] gi|220695929|gb|EED52271.1| conserved [Aspergillus flavus NRRL3357]
MEEKGLYRRPGRPVLARTNWSLFLAGFLITLILFRLFTPISLSNILKKPSDKSEIHTYPGETILWTACGQFPNGRPLECGAITVPMDQFNSSNSRSKTFTIPLIRLRSPHANATQNLLINPGGPGSSGIGAVYRLGEQISTIVGPEFHLVGFDPRGVGASAPRATCYHDEETRHALGPVRDYHVLEDSVELYTWSKNFVRACAETMGEHGSYLNTPQTAADLNSILDALGQEDMIYWGFSYGTILGQTYAALFPKRSKRVIIDGVNNVYDWYLGTLDFEDLTDADAVFDGFLEECMEAGPSCPLTTFATTKSSLKSQLLTLSSNVRSNPLSVYINSTTHGRLDDTHILYTGIYRGLMKPSTWPILTANLASLLHGNATSSFLAYGQRKPWAEQGDAFSGDAFRFIYNNDGASGRSHWPQDRETLLNMLIPFINRSLFGPTEHGIYYSKQQWIIPKTHTFIPPAKTETAHPILILTTSKDPVCPLISAKSAQGAFEGSQIVEVMGYGHCSTSVPSLCLARHVRNFLGNGTMPDGHTRCEVDGPYFPGDGEGKGLRTRDRGWDEEDWKVYEAQVKLAELW

SEQ ID NO: 32795 - DNA, 2955 bp, Muscodor strobelii
  misc_feature: SGI EST ID NO. CUFF.77479.0
  misc_feature: Variant of the nucleotide sequence at SEQ ID NO 32793
ccgagctatacggactgatgcccacaatatcaatatctacgtcttcatgccttcatttcgtctttggaatctttcatattttgtttatgaccatgatcacattcaaggcttagctgtgagtatgtgcgagaattgatatcccctgtggtcgcctttcgctcgcaaacgaaacatttcaattcctctaagctaggtcgcgaaacataaggatagaaaatgaacaagttgtctggaacttcaacgaggtatcgtaacatttaagcggattcctgttgcctgacccaactagtattttggttcggtgtactgcctaattgagtaataccttcaaaggagtgattccacttctaaatgacttaccatatctctagcgtgtggcaatccctcataaatgtgctcacatttgtaggcatacatctatcactggaagacaagcgacgcttgagaagtgaagcaagcgatggaggagaagggcttataccggcgtcctggccgcccggtcttggcgcggacgaactggtcgctgttcttggctggatttctcatcaccttaatactctttcgcttattcacgcccatatcactatcaaacatcttgaaaaaaccatctgacaagagtgaaatacacacataccccggagaaacgatcctgtggacggcatgcggtcaatttccaaatggccgcccgctcgaatgcggcgccatcacggtgcctatggaccaattcaactcatccaactcacgtagtaagaccttcacgattcccttgattcgcctgcgtagccctcacgcgaacgcgacgcaaaaccttctcatcaaccccggaggcccaggatcctcgggaataggagcagtatacagactgggagaacaaatcagcacgatagtaggccccgagtttcacctcgtaggctttgatcctaggggcgtaggtgcaagcgcaccacgcgcaacatgttatcatgatgaggaaacaagacatgctctgggccccgtgagggactatcacgtattagaagacagcgtcgagctctacacgtggtcgaagaacttcgtccgcgcctgcgcagagacaatgggcgaacatggatcatacctcaacacgccgcaaactgcagcagatctgaactccatcctcgacgctctagggcaagaagatatgatatactggggcttcagctacgggacaatcctgggccaaacctatgccgccctgtttccaaagcggtcaaagcgcgtcattatcgatggcgtgaataacgtttatgactggtatctcgggacactagattttgaggatctaacagacgccgacgcagtctttgacggctttcttgaagaatgcatggaagccggaccctcctgcccactaacaaccttcgcaactacaaaatcatcactaaagtcccaactcctaacactctcttccaatgtccgctccaacccacttagcgtttacataaacagcacgacacacggccgtctagacgacacacacatcctctacaccggaatctaccgaggacttatgaagccgtccacctggcccatactaactgccaacctcgcctccctactccacggcaatgcaacatcgtcattcctagcctacggccaacgcaagccctgggccgagcaaggcgatgccttctccggcgacgcattccgcttcatctacaacaacgacggggcctctgggcgctctcactggccccaagaccgcgagacactactcaatatgttgatccccttcataaaccgctctctattcggaccgacggagcatgggatatactacagcaaacaacaatggataataccgaaaactcacactttcattccgccggcgaagacggagactgctcatcctatactgatattgacgacgagtaaagatccggtttgtccgctcataagtgccaagagtgcacagggtgcgtttgagggaagtcagatagttgaggttatggggtatggtcattgttctacctctgtgccgagtttgtgtttagcgcggcacgttaggaactttctggggaatgggacgatgccggatgggcatacgagatgtgaggttgatgggccatatttccctggggatggggagggtaaaggcctaagaacgagggatagggggtgggacgaggaggactggaaggtgtatgaggcgcaggttaagctggctgagttgtggtagctggttattagactttgaatgctgttctactacatcatggcgcgatgttatatgatccagaagacaacactaattgcttctacatgtaagcagtacgtgacattgctaggctcgcgcttgatgaattgataatcttgcaattgaagaaggtcacagtttggtcacatgttggtcacattatgccgtctattttacccattgttagaaacaggtaatcactaatcactcgtgccagaagattggctcaatgcattggattatccacagaatctaatgaaggtatatatctgacacccatggtctttgtctttaaggcgaaagtgaggctgaccattgacgaattcttatggttctaatttgcctgatcaagctcaattccaaaacgtcgagcaagggcaacgtaatccacgagaatgtcacctgggacatcggatttagaacttttgtgattatcaaatacctgaaatttgaaaatgcgaagtcagggaatgcaacaccatctcacgtggtaggggattctttgcaggactctcaggcgattcaggcgtgttttagggtaagccgggacgggtagaaatgaaggctcgtcatcgtgcagtaaatcaggagtggggtggcctgttctgacaggcgcaggcgcagcaggaaccgaaagccgaaagggttggtagtggcctgggggctggaacgaatgagcgagtgtccgggagaaggaccagggctctgtcccaaatagaaggactttccttccatggggc

SEQ ID NO: 32796 - DNA, 1173 bp, Muscodor strobelii
  misc_feature: SGI cDNA ID NO. 571305
  misc_feature: Reduced expression when VOC is produced
  misc_feature: Encodes the peptide sequence at SEQ ID NO 32797
atggcagatccttctacgagtcttcccctatgtagggactcggtgatcgaagcccataaactgatcaagccgttcgtgcatcacacaccaacgctgacgaatgcgacgctgtcaaggcttgcttctgagtcaaggggtgaggggaaagcgaaaccgaagatgagattgtatttcaagtgtgagaatttgcagaggattggggcgttcaagattaggggcgcgttccatgcgcttgaacggttgaaattagagccagggtgggttgagggagggggacgggagaggggcgtcgttacgcatagtagtggaaaccacgcacaagctctctcactcgcagcgagagacaacggcatacccgcacacgtcgttatgccgtccatctcgcctgcgcccaaaatcgcagcgacgaaagggtatggagcgaacgtcgtgttctctggtagtacttccgttgagcgagaaaaagtaacgatggaagtcatcgagaagacgggcgcgagacttataccaccttacgatcaccctgatattatacttggtcagggaacgctagggttagaactgcaggatgatgccgcgaagatgattcagcttgcggctagtggagaagcagagaagacaggaggtttcaacttcacagcacccgtcgccacgccgaagattcctgctgggaagaaagggctagacgccattcttgcaccatgtggcggaggcggtatgctaagcggtgttgccctgtcatgtgagggtacggggatacgtgtcttcggatgcgaaccttcattccaaggcggcgacgacgcgaaaagggggtttgaatcgggaaagagagtcgagagtgtgagtacacttaccattgccgatggactgcggacgccacttggtaaatatccctgggaggttatcttcgagaggaagttggtaaaagggttcttcagcgtgacggaggaggagattgtggacgcgctgagattgatctatgagagatttaagatggttgttgaaccttctagtgcggtacctttggctgtcgcgctgtataatgaggagtttagaagtttggttgagagggaggcgggtgaggacgggtgggatgtcggaattgtgttttcgggcgggaatgttagtttggaggcttttgggaagttgtttgccccaagggagaacccttga

SEQ ID NO: 32797 - protein, 390 aa, Muscodor strobelii
  misc_feature: SGI Peptide ID NO. 571305
  misc_feature (22)..(360): Pfam Id: PF00291 Pfam Desc: Pyridoxal-phosphate dependent enzyme
  misc_feature (49)..(191): Pfam Id: PF00291 Pfam Desc: Pyridoxal-phosphate dependent enzyme
  misc_feature (224)..(346): Pfam Id: PF00291 Pfam Desc: Pyridoxal-phosphate dependent enzyme
  misc_feature (1)..(385): NCBI GI: 46137207 Blast Desc: FG10119.1 [Gibberella zeae PH-1]
  misc_feature (1)..(384): NCBI GI: 39961097 Blast Desc: MGG_09501 [Magnaporthe grisea 70-15] gi|145011000|gb|EDJ95656.1| MGG_09501 [Magnaporthe grisea 70-15]
  misc_feature (1)..(384): NCBI GI: 85102473 Blast Desc: NCU03607 [Neurospora crassa OR74A] gi|18376394|emb|CAD21283.1| related to threonine dehydratase [Neurospora crassa] gi|28922878|gb|EAA32098.1| conserved crassa
  misc_feature (1)..(384): NCBI GI: 46114610 Blast Desc: FG03147.1 [Gibberella zeae PH-1]
  misc_feature (1)..(386): NCBI GI: 256723366 Blast Desc: NECHADRAFT_86586 [Nectria haematococca mpVI 77-13-4]
  misc_feature (1)..(385): NCBI GI: 119490284 Blast Desc: Pyridoxal-phosphate dependent enzyme, [Neosartorya fischeri NRRL 181] gi|119411174|gb|EAW21117.1| Pyridoxal-phosphate dependent enzyme, [Neosartorya fischeri NRRL
  misc_feature (4)..(385): NCBI GI: 189188568 Blast Desc: threonine dehydratase catabolic [Pyrenophora tritici-repentis Pt-1C-BFP] gi|187972229|gb|EDU39728.1| threonine dehydratase catabolic [Pyrenophora tritici-repentis Pt-1C-BFP]
  misc_feature (1)..(385): NCBI GI: 70998915 Blast Desc: Pyridoxal-phosphate dependent enzyme [Aspergillus fumigatus Af293] gi|66851816|gb|EAL92141.1| Pyridoxal-phosphate dependent enzyme, [Aspergillus fumigatus Af293] dependent enzyme,
  misc_feature (1)..(385): NCBI GI: 145242132 Blast Desc: An09g03960 [Aspergillus niger] gi|134078257|emb|CAK96838.1| protein product [Aspergillus niger]
  misc_feature (1)..(384): NCBI GI: 212546853 Blast Desc: Pyridoxal-phosphate dependent enzyme, [Penicillium marneffei ATCC 18224] gi|210065100|gb|EEA19195.1| Pyridoxal-phosphate dependent enzyme, [Penicillium marneffei ATCC
  misc_feature (17)..(384): SWISSPROT Homolog: EC 5.1.1.18 Serine racemase
  misc_feature: Useful for introducing or modulating the production of volatile compounds
MADPSTSLPLCRDSVIEAHKLIKPFVHHTPTLTNATLSRLASESRGEGKAKPKMRLYFKCENLQRIGAFKIRGAFHALERLKLEPGWVEGGGRERGVVTHSSGNHAQALSLAARDNGIPAHVVMPSISPAPKIAATKGYGANVVFSGSTSVEREKVTMEVIEKTGARLIPPYDHPDIILGQGTLGLELQDDAAKMIQLAASGEAEKTGGFNFTAPVATPKIPAGKKGLDAILAPCGGGGMLSGVALSCEGTGIRVFGCEPSFQGGDDAKRGFESGKRVESVSTLTIADGLRTPLGKYPWEVIFERKLVKGFFSVTEEEIVDALRLIYERFKMVVEPSSAVPLAVALYNEEFRSLVEREAGEDGWDVGIVFSGGNVSLEAFGKLFAPRENP

SEQ ID NO: 32798 - DNA, 1215 bp, Muscodor strobelii
  misc_feature: SGI cDNA ID NO. 571306
  misc_feature: Reduced expression when VOC is produced
  misc_feature: Encodes the peptide sequence at SEQ ID NO 32799
atggcttcgagaggattcacaaaggctctgcgccctctggcccgccaattggccacgcctgctgtccagcagcgcactttcgttgctgctgccggcgccgtgagggcttctttcgttcaggctcgccctgccgctgctggtgtctctcagcagcaggttcgtggtgtcaagaccattgacttcgctggtgtccccgaggaagtatacgagcgtgccgactggcccaaggagaagctcttggaatacttcaagaacgataccctggctctcatcggttacggttcccagggtcacggtcagggtcttaacctccgcgacaatggcttgaatgtgatcattggtgtacgaaagaatggtcagtcatggaaggacgctcagcaggatggctgggttcctggcaagaacctcttcgaggtcgacgaggccatcaacagaggtaccatcgtcatgaacctcctctcagatgctgcccagtccgagacttggcccgccatcaagccccagcttaccaagggaaagactttgtacttctcccacggtttctcccccgtcttcaaggatgtcaccaaggtcgatgttcccacggacattgacgtcatcctcgtcgctcccaagggctctggccgcaccgtccgatcccttttccgtgagggccgcggtatcaactcctcttacgccgtctaccaggacgtcactggcaaggccgaggagaaagctcaggccctcggtgttgccgtcggcagtggttatctctacaagaccaccttcgagaaggaggtctactctgacctttacggtgagcgtggttgcttgatgggtggtatccacggtatgttcctcgctcagtacgaggttctccgtgagcgtggtcacagccccagcgaggccttcaacgagaccgtcgaggaggctactcagtctctgtaccccctgatcggtgccaacggtatggactggatgtacgaggcttgctccaccaccgctcgccgtggtgcgatcgactggagcccgcgcttcaaggatgctctgaagcccgtcttcaacgacctctacgactccgtcaaggatggttccgagaccaagcgctcgctcgagtacaacagccaaaaggattaccgtgagaagtatgaggctgagatggaggagatccgcaacttggagatctggagagctggccgatccgtcagatctctccgccccgagaaccagaaataa

SEQ ID NO: 32799 - protein, 404 aa, Muscodor strobelii
  misc_feature: SGI Peptide ID NO. 571306
  misc_feature (256)..(403): Pfam Id: PF01450 Pfam Desc: Acetohydroxy acid isomeroreductase, catalytic domain
  misc_feature (82)..(249): Pfam Id: PF07991 Pfam Desc: Acetohydroxy acid isomeroreductase, catalytic domain
  misc_feature (1)..(404): NCBI GI: 225877956 Blast Desc: acetohydroxy-acid isomeroreductase,mitochondrial precursor [Gibberella fujikuroi]
  misc_feature (1)..(404): NCBI GI: 46137205 Blast Desc: ILV5_NEUCR Ketol-acid reductoisomerase, mitochondrial precursor (Acetohydroxy-acid reductoisomerase) (Alpha-keto-beta-hydroxylacil reductoisomerase) [Gibberella zeae
  misc_feature (1)..(404): NCBI GI: 85102477 Blast Desc: ketol-acid reductoisomerase, mitochondrial precursor [Neurospora crassa OR74A] gi|30316359|sp|P38674.2|ILV5_NEUCR RecName: Full=Ketol-acid reductoisomerase, mitochondrial; Flags:
  misc_feature (1)..(404): NCBI GI: 168822 Blast Desc: alpha-keto-beta-hydroxylacyl reductoisomerase [Neurospora crassa]
  misc_feature (2)..(404): NCBI GI: 171691849 Blast Desc: protein product [Podospora anserina] gi|170945873|emb|CAP72674.1| protein product [Podospora anserina]
  misc_feature (1)..(402): NCBI GI: 154315742 Blast Desc: ketol-acid reductoisomerase, mitochondrial precursor [Botryotinia fuckeliana B05.10] gi|150846839|gb|EDN22032.1| ketol-acid reductoisomerase, mitochondrial precursor [Botryotinia
  misc_feature (1)..(402): NCBI GI: 156059686 Blast Desc: ketol-acid reductoisomerase, mitochondrial precursor [Sclerotinia sclerotiorum 1980] gi|154701642|gb|EDO01381.1| ketol-acid reductoisomerase, mitochondrial precursor [Sclerotinia
  misc_feature (9)..(404): NCBI GI: 238841541 Blast Desc: ketol-acid reductoisomerase [Microsporum canis CBS 113480]
  misc_feature (1)..(404): NCBI GI: 119191187 Blast Desc: ketol-acid reductoisomerase, mitochondrial precursor [Coccidioides immitis RS]
  misc_feature (1)..(404): NCBI GI: 242822237 Blast Desc: Ketol-acid reductoisomerase [Talaromyces stipitatus ATCC 10500] gi|218712766|gb|EED12191.1| Ketol-acid reductoisomerase [Talaromyces stipitatus ATCC 10500]
  misc_feature (1)..(404): SWISSPROT Homolog: EC 1.1.1.86 Ketol-acid reductoisomerase
  misc_feature: Useful for introducing or modulating the production of volatile compounds
MASRGFTKALRPLARQLATPAVQQRTFVAAAGAVRASFVQARPAAAGVSQQQVRGVKTIDFAGVPEEVYERADWPKEKLLEYFKNDTLALIGYGSQGHGQGLNLRDNGLNVIIGVRKNGQSWKDAQQDGWVPGKNLFEVDEAINRGTIVMNLLSDAAQSETWPAIKPQLTKGKTLYFSHGFSPVFKDVTKVDVPTDIDVILVAPKGSGRTVRSLFREGRGINSSYAVYQDVTGKAEEKAQALGVAVGSGYLYKTTFEKEVYSDLYGERGCLMGGIHGMFLAQYEVLRERGHSPSEAFNETVEEATQSLYPLIGANGMDWMYEACSTTARRGAIDWSPRFKDALKPVFNDLYDSVKDGSETKRSLEYNSQKDYREKYEAEMEEIRNLEIWRAGRSVRSLRPENQK

SEQ ID NO: 32800 - DNA, 2800 bp, Muscodor strobelii
  misc_feature: SGI EST ID NO. CUFF.77498.0
  misc_feature: Variant of the nucleotide sequence at SEQ ID NO 32798
gtcatccctgagcatccacccactccccaccaatagccacgcagttttcgactcaccgccgccgagatcgctccaacgtaagctagttgcaacccgtagctcttcaacccacgccagggaagctccagcgcaagtgtccgttggccggctagattcgctcaaatccccagaaaaatttcgataaattcaattcaactcttcgactctctgttaaaaacaccaacacctcatattgctggccaatattcatctctcacatattgcctgccgtcaattgactcctccgtgtcgacagctctcctcttcctctccactcaaccacttttcacacatctctgtcgcaatggcttcgagaggattcacaaaggctctgcgccctctggcccgccaattggccacgcctgctgtccagcagcgcactttcgttgctgctgccggcgccgtgagggcttctttcgttcaggctcgccctgccgctgctggtgtctctcagcagcaggttcgtggtgtcaagaccattgacttcgctggtgtccccgaggaagtatacgagcgtgccgactggcccaaggagaagctcttggaatacttcaagaacgataccctggctctcatcggttacggttcccagggtcacggtcagggtcttaacctccgcgacaatggcttgaatgtgatcattggtgtacgaaagaatggtcagtcatggaaggacgctcagcaggatggctgggttcctggcaagaacctcttcgaggtcgacgaggccatcaacagaggtaccatcgtcatgaacctcctctcagatgctgcccagtccgagacttggcccgccatcaagccccagcttaccaagggaaagactttgtacttctcccacggtttctcccccgtcttcaaggatgtcaccaaggtcgatgttcccacggacattgacgtcatcctcgtcgctcccaagggctctggccgcaccgtccgatcccttttccgtgagggccgcggtatcaactcctcttacgccgtctaccaggacgtcactggcaaggccgaggagaaagctcaggccctcggtgttgccgtcggcagtggttatctctacaagaccaccttcgagaaggaggtctactctgacctttacggtgagcgtggttgcttgatgggtggtatccacggtatgttcctcgctcagtacgaggttctccgtgagcgtggtcacagccccagcgaggccttcaacgagaccgtcgaggaggctactcagtctctgtaccccctgatcggtgccaacggtatggactggatgtacgaggcttgctccaccaccgctcgccgtggtgcgatcgactggagcccgcgcttcaaggatgctctgaagcccgtcttcaacgacctctacgactccgtcaaggatggttccgagaccaagcgctcgctcgagtacaacagccaaaaggattaccgtgagaagtatgaggctgagatggaggagatccgcaacttggagatctggagagctggccgatccgtcagatctctccgccccgagaaccagaaataagtgcatcacagcaagtgtttagttgttcggcgttctgatctaacgggatggtaactaaaaaggtcgcgacacatgttcgaatgtggaaaaagagaggaagaggagctatctgtcgtttgtacttgtaattcaggattcccccagataccatcacactctcacgagggtcaataagaattcatccaaatttatctgatggttcaatgatgtctatgcttggatcttcttttgtcaattgtagtaatccagagatgatgcaaaagcttcacgtgaaaatgttgggtgctctccgtcatcggacgtagatagctccgagtggatttggagatgttggagaagtttgagtcgcttctggatgcccgattcatgatccacttaatcagggcgtcgaatgactaggtgcgcatttcgtagcgaaaggcgtatcgttccattgggttctttacggaacgtgttcgatatacttaccttctgcatttagacatattctaaccccgacgagatactgcggaagacctgctctatacaggtgatatagatgactcatccgtcaacttacgaggccgtgccagacgatatatatatgagcatttatgagaaagtattgaggatatatacataacactacgacgactatcacgaatagaagttagaggagaagggcaaaagggacactattccatatcaccatcaccaaattcgcgacgacacaaaacaaaaatggcagatccttctacgagtcttcccctatgtagggactcggtgatcgaagcccataaactgatcaagccgttcgtgcatcacacaccaacgctgacgaatgcgacgctgtcaaggcttgcttctgagtcaaggggtgaggggaaagcgaaaccgaagatgagattgtatttcaagtgtgagaatttgcagaggattggggcgttcaagattaggggcgcgttccatgcgcttgaacggttgaaattagagccagggtgggttgagggagggggacgggagaggggcgtcgttacgcatagtagtggtgagtctcctttcgtttataggataatggggatggagtagtgagggacaggttggagataaggagaagggggcgatagcataagaacgagagagatgtccgtaagaaactgacaacaacccaggaaaccacgcacaagctctctcactcgcagcgagagacaacggcatacccgcacacgtcgttatgccgtccatctcgcctgcgcccaaaat

SEQ ID NO: 32801 - DNA, 573 bp, Muscodor strobelii
  misc_feature: SGI cDNA ID NO. 571307
  misc_feature: Reduced expression when VOC is produced
  misc_feature: Encodes the peptide sequence at SEQ ID NO 32802
atgttgaaaatctggtctatgaaaaaggagcagcagaagcaggagagtctcgatgccgccggaggcaagaaaaagaaggtcacagcagcccaactgcgggtacagaaagatctgtctgagctatcactaggcaccacgatgaagaccgacttccccgaccccgacgacattctcaacttcatcctcgagatcaagcccgacgagggagtctactacggcggcaaattcacattcaccttctccatgagccagaactacccgcacgagcccccgaaagtccagtgccagcagaagatctaccaccccaacatcgacctccagggcaaggtctgcctcaacatcctgcgcgaggattggaagcccgttctcaacctcaacgccgtcatcgtcggcctccagtttctgtttctcgagcccaacgcctccgatcccctcaacaaggaagccgccgatgatctacgcgccagtcgggacaacttcaagaggaacgtcaagtcgtctatgggcggcggctcgatacggggcactacatatgacgttgtcgttccttcaggatcctcttcccggcgctag

SEQ ID NO: 32802 - protein, 190 aa, Muscodor strobelii
  misc_feature: SGI Peptide ID NO. 571307
  misc_feature (33)..(168): Pfam Id: PF00179 Pfam Desc: Ubiquitin-conjugating enzyme
  misc_feature (1)..(182): NCBI GI: 85102486 Blast Desc: NEDD8-conjugating enzyme UBC12 [Neurospora crassa OR74A] gi|18376396|emb|CAD21285.1| E2 ubiquitin-conjugating enzyme [Neurospora crassa] gi|28922881|gb|EAA32101.1| enzyme
  misc_feature (1)..(182): NCBI GI: 145613205 Blast Desc: E2 ubiquitin-conjugating enzyme [Magnaporthe grisea 70-15] gi|145020334|gb|EDK04463.1| E2 ubiquitin-conjugating enzyme [Magnaporthe grisea 70-15]
  misc_feature (1)..(182): NCBI GI: 46137203 Blast Desc: FG10117.1 [Gibberella zeae PH-1]
  misc_feature (1)..(182): NCBI GI: 256732180 Blast Desc: [Nectria haematococca mpVI 77-13-4]
  misc_feature (1)..(182): NCBI GI: 261351768 Blast Desc: NEDD8-conjugating enzyme UBC12 [Verticillium albo-atrum VaMs.102]
  misc_feature (1)..(182): NCBI GI: 119191197 Blast Desc: CIMG_05646 [Coccidioides immitis RS] gi|240107477|gb|EER25662.1| Ubiquitin-conjugating enzyme E2, [Coccidioides posadasii C735 delta SOWgp]
  misc_feature (1)..(182): NCBI GI: 258564785 Blast Desc: NEDD8-conjugating enzyme Ubc12 [Uncinocarpus reesii 1704] gi|237906838|gb|EEP81239.1| NEDD8-conjugating enzyme Ubc12 [Uncinocarpus reesii 1704]
  misc_feature (1)..(182): NCBI GI: 154315740 Blast Desc: BC1G_04442 [Botryotinia fuckeliana B05.10] gi|150846838|gb|EDN22031.1| BC1G_04442 [Botryotinia fuckeliana B05.10]
  misc_feature (1)..(182): NCBI GI: 242822251 Blast Desc: NEDD8 conjugating enzyme (UbcL), [Talaromyces stipitatus ATCC 10500] gi|218712769|gb|EED12194.1| NEDD8 conjugating enzyme (UbcL), [Talaromyces stipitatus ATCC 10500]
  misc_feature (1)..(182): NCBI GI: 212546849 Blast Desc: NEDD8 conjugating enzyme (UbcL), [Penicillium marneffei ATCC 18224] gi|210065098|gb|EEA19193.1| NEDD8 conjugating enzyme (UbcL), [Penicillium marneffei ATCC 18224]
  misc_feature (33)..(162): SWISSPROT Homolog: EC 6.3.2.19 Ubiquitin--protein ligase
  misc_feature: Useful for introducing or modulating the production of volatile compounds
MLKIWSMKKEQQKQESLDAAGGKKKKVTAAQLRVQKDLSELSLGTTMKTDFPDPDDILNFILEIKPDEGVYYGGKFTFTFSMSQNYPHEPPKVQCQQKIYHPNIDLQGKVCLNILREDWKPVLNLNAVIVGLQFLFLEPNASDPLNKEAADDLRASRDNFKRNVKSSMGGGSIRGTTYDVVVPSGSSSRR

SEQ ID NO: 32803 - DNA, 1711 bp, Muscodor strobelii
  misc_feature: SGI EST ID NO. CUFF.77486.0
  misc_feature: Variant of the nucleotide sequence at SEQ ID NO 32801
tcgagtcaggtaccgatgagtgggcatgcacccagcaatggcgtgacattgcctatcgcaacctgataatcttaaattctcaagtaccgccactctgcctgaatgttagtaatctcgtctgagagtggttgccgacattgtatcagcgaaagagcgaagccaacacactaacgacctatcttcccctaacccaacacaaacctgccacgcgctcaacctcgtcactcttcgccgtttttcctttgtttggcgcgcgtctccctcgacacatctctcctgcgtgtctctccctcgccgccctgcacagaccccttcctccctatttcaccgggcgacacgtgccgtgtctcgctgcctatctcgtgccgagtgtcctcgcttttcatctcttgccgaccacacgtgccgactgctgcggtatagagcagaacaccgccaccatgttgaaaatctggtctatgaaaaaggagcagcagaagcaggagagtctcgatgccgccggaggcaagaaaaagaaggtcacagcagcccaactgcgggtacagaaagatctgtctgagctatcactaggcaccacgatgaagaccgacttccccgaccccgacgacattctcaacttcatcctcgagatcaagcccgacgagggagtctactacggcggcaaattcacattcaccttctccatgagccagaactacccgcacgagcccccgaaagtccagtgccagcagaagatctaccaccccaacatcgacctccagggcaaggtctgcctcaacatcctgcgcgaggattggaagcccgttctcaacctcaacgccgtcatcgtcggcctccagtttctgtttctcgagcccaacgcctccgatcccctcaacaaggaagccgccgatgatctacgcgccagtcgggacaacttcaagaggaacgtcaagtcgtctatgggcggcggctcgatacggggcactacatatgacgttgtcgttccttcaggatcctcttcccggcgctagactcctggtctacgagtgcgacagacctggatcattttgtgctatgcgccaaaactaagaacgacgttgtcccatctacacagcacatacggggaatcacacgacgacaagaaggcaggcccagcggtgcaatacaagttggcagggccggcaattgtgaaatgatgatacatgggcacagacacgatagacttgggcgacgcagattgtgatttcttctttcatcccagcatggcgttctcttcatccttctcctttgcagttcccgttcgcgaaggagcatttcctcgttttagcttcgatttagaccgcgtcttcgatgaggcaaatttgatgagaagcacgcgacgcactgtcggagcaggacgctactcatcgggggaggcaggctcggattgttcgcctttgggcggcggacgaacatggatcacggggccttcttattgtttcctcatcctagaccacgccgtgatagatttcggctcaacgtaccaatatgaccctgatgaaatgatgaacgctcaaacatgttactcgcgtgtgctgtgtggtttagtatattgattaaagcaattcaccatatcttctcgatgtggagtacatcttccgtgaaatatatgctgaagctacgtcatacaatcgatttcacgcgaagtgttcgaatgggtattcttatgaaatataaagtgcaatgctta

SEQ ID NO: 32804 - DNA, 876 bp, Muscodor strobelii
  misc_feature: SGI cDNA ID NO. 571308
  misc_feature: Encodes the peptide sequence at SEQ ID NO 32805
atggcaattggtctgaggttggcgttggtgatagccagctccttgctggcattggtatctggcgagtgcaccaagttcaacttcaatccagatgatcattgggaccctgacgacaccaacccttatacacagcccagtgctatatacagggtgacagctgcgataaattgcaccgccgagtttgcgcgaagccaaggagggaatggcagcacttgtacctttcatcgatactctatgggattattcgacgccgcgctcgtagcgaaccagacagtcaacgagccaaacacaagcaaaattgaacccctggatttcgacgacgacacaacggttcacatcttctcactcgtccaagcagccaatcccaccaatatcaccatggttgacttcaacaggactgttgttgtcaactacacgaccaatacagttgaccaaccggattttgttgttcccgaccaagggttttatcagttctcggtatattcgctgtgttacaacgggacactgaccggatgtgatgacggcgataatctggaagggaaacgcatacaggtttgcggtgtgaaatggatcgacgacaagcaatctttcctgcctccaggacagcagcaatatgagggctactcatatcatcaaagggcccttccgtatgatttcgactctaaccgcaccaaatacggtcaagatcctcggccgacatatgccgaatctgcaggaaacgcgactgtgaatcaaatcagtaattcgacgaacaactcgatgggtaatggcgacgacgatgggaatgaggatgacacgggtgccgcgtgggttcagcgagtcaatattttcacactcgcagctctgttcagctgcgccgccgctgtcattctgtga

SEQ ID NO: 32805 - protein, 291 aa, Muscodor strobelii
  misc_feature: SGI Peptide ID NO. 571308
MAIGLRLALVIASSLLALVSGECTKFNFNPDDHWDPDDTNPYTQPSAIYRVTAAINCTAEFARSQGGNGSTCTFHRYSMGLFDAALVANQTVNEPNTSKIEPLDFDDDTTVHIFSLVQAANPTNITMVDFNRTVVVNYTTNTVDQPDFVVPDQGFYQFSVYSLCYNGTLTGCDDGDNLEGKRIQVCGVKWIDDKQSFLPPGQQQYEGYSYHQRALPYDFDSNRTKYGQDPRPTYAESAGNATVNQISNSTNNSMGNGDDDGNEDDTGAAWVQRVNIFTLAALFSCAAAVIL

SEQ ID NO: 32806 - DNA, 546 bp, Muscodor strobelii
  misc_feature: SGI EST ID NO. CUFF.77488.0
  misc_feature: Variant of the nucleotide sequence at SEQ ID NO 32804
gcgcaattcacagcagtactgaaaaccatggcaattggtctgaggttggcgttggtgatagccagctccttgctggcattggtatctggcgagtgcaccaagttcaacttcaatccagatgatcattgggaccctgacgacaccaacccttatacacagcccagtgctatatacagggtgacagctgcgataaattgcaccgccgagtttgcgcgaagccaaggagggaatggcagcacttgtacctttcatcgatactctatgggattattcgacgccgcgctcgtagcgaaccagacagtcaacgagccaaacacaagcaaaattgaacccctggatttcgacgacgacacaacggttcacatcttctcactcgtccaagcagccaatcccaccaatatcaccatggttgacttcaacaggactgttgttgtcaactacacgaccaatacagttgaccaaccggattttgttgttcccgaccaagggttttatcagttctcggtatattcgctgtgttacaacgggacactgaccggatgtgat

SEQ ID NO: 32807 - DNA, 807 bp, Muscodor strobelii
  misc_feature: SGI cDNA ID NO. 571309
  misc_feature: Elevated expression when VOC is produced
  misc_feature: Encodes the peptide sequence at SEQ ID NO 32808
atgaaattccatcgggttgacggagaggtggtccaactaagcgactcaggcataagcccaaacgacatctcaacaacccttctcggtgtcttacaagacaacccgcctgacgacaaagatgcgcggaaaagagatttaccatttcaaccacggtcctatcgtgacttcatgcttttcgagcgtcattacaacggcgcggcaatcggcatgacgaagctctacatgcccatggcaaacaagctcggccagctatatcaatcggtcactggctgggatttccccctattcaagccagatgctttatggtacaagcagcccatattttaccaatcgaatcaccttgctttctatgcggatggtgcttcaattacttatccggcgttctccgaatatcttgacgttgagctagagctaggagtcgtgcttggcaagcctctttataacgctactcctgaggaagctactaatgcgattgctggcttttgcgtcttcaacgatttctcttcgcgaaataggcagatggaagagatgtctagtgggtttgggcctcaacatagtaaagcgtttgcaaatagtatctcgtctgtagtcgtatctgcggatgaggttttaccccatatcaatcggctatctggacgtatcacgatcaacggcaaggtcgtgcaagaacccaaggtcgaccggtggcaattctccatcggagaggctcttgcgcacgtatcgaagagtacacgccttcatcccggagaattctttggcagtggcacgttccccaatggtgctggcattgagcgtatgttatcctga

SEQ ID NO: 32808 - protein, 268 aa, Muscodor strobelii
  misc_feature: SGI Peptide ID NO. 571309
  misc_feature (98)..(266): Pfam Id: PF01557 Pfam Desc: Fumarylacetoacetate (FAA) hydrolase family
  misc_feature (98)..(256): Pfam Id: PF01557 Pfam Desc: Fumarylacetoacetate (FAA) hydrolase family
  misc_feature (46)..(264): NCBI GI: 120405484 Blast Desc: fumarylacetoacetate (FAA) hydrolase [Mycobacterium vanbaalenii PYR-1] gi|119958302|gb|ABM15307.1| fumarylacetoacetate (FAA) hydrolase [Mycobacterium vanbaalenii
  misc_feature (46)..(264): NCBI GI: 118467400 Blast Desc: fumarylacetoacetate [Mycobacterium smegmatis str. MC2 155] gi|118168687|gb|ABK69583.1| fumarylacetoacetate [Mycobacterium smegmatis str. MC2 155]
  misc_feature (40)..(264): NCBI GI: 145222756 Blast Desc: fumarylacetoacetate (FAA) hydrolase [Mycobacterium gilvum PYR-GCK] gi|145215242|gb|ABP44646.1| fumarylacetoacetate (FAA) hydrolase [Mycobacterium gilvum PYR-GCK]
  misc_feature (38)..(264): NCBI GI: 255528281 Blast Desc: fumarylacetoacetate (FAA) hydrolase [Clostridium carboxidivorans P7] gi|255508033|gb|EET84458.1| fumarylacetoacetate (FAA) hydrolase [Clostridium carboxidivorans
  misc_feature (21)..(264): NCBI GI: 84701537 Blast Desc: isomerase/decarboxylase [Parvularcula bermudensis HTCC2503] gi|84690783|gb|EAQ16623.1| isomerase/decarboxylase [Parvularcula bermudensis HTCC2503]
  misc_feature (46)..(268): NCBI GI: 284096004 Blast Desc: fumarylacetoacetate hydrolase [Naegleria gruberi]
  misc_feature (46)..(264): NCBI GI: 89054530 Blast Desc: fumarylacetoacetate (FAA) hydrolase [Jannaschia sp. CCS1] gi|88864079|gb|ABD54956.1| fumarylacetoacetate (FAA) hydrolase [Jannaschia sp. CCS1]
  misc_feature (49)..(264): NCBI GI: 76802827 Blast Desc: 2-hydroxyhepta-2,4-diene-1,7-dioate isomerase [Natronomonas pharaonis DSM 2160] gi|76558692|emb|CAI50284.1| 2-hydroxyhepta-2,4-diene-1,7-dioate isomerase 2; decarboxylase 2
  misc_feature (46)..(266): NCBI GI: 119503043 Blast Desc: fumarylacetoacetate (FAA) hydrolase [marine gamma proteobacterium HTCC2080] gi|119461389|gb|EAW42479.1| fumarylacetoacetate (FAA) hydrolase [marine gamma proteobacterium
  misc_feature (49)..(264): NCBI GI: 284166714 Blast Desc: fumarylacetoacetate (FAA) hydrolase [Haloterrigena turkmenica DSM 5511] gi|284016369|gb|ADB62320.1| fumarylacetoacetate (FAA) hydrolase [Haloterrigena turkmenica DSM
  misc_feature: Useful for introducing or modulating the production of volatile compounds
MKFHRVDGEVVQLSDSGISPNDISTTLLGVLQDNPPDDKDARKRDLPFQPRSYRDFMLFERHYNGAAIGMTKLYMPMANKLGQLYQSVTGWDFPLFKPDALWYKQPIFYQSNHLAFYADGASITYPAFSEYLDVELELGVVLGKPLYNATPEEATNAIAGFCVFNDFSSRNRQMEEMSSGFGPQHSKAFANSISSVVVSADEVLPHINRLSGRITINGKVVQEPKVDRWQFSIGEALAHVSKSTRLHPGEFFGSGTFPNGAGIERMLS

SEQ ID NO: 32809 - DNA, 3714 bp, Muscodor strobelii
  misc_feature: SGI EST ID NO. CUFF.77522.0
  misc_feature: Variant of the nucleotide sequence at SEQ ID NO 32807
aaaaacttcatcgcagaagatatatcctacagaacttctttgcattgagttcaacttccaaatcgatacacttttggccgattttgaatgcacttgagctttcacaatgaaattccatcgggttgacggagaggtggtccaactaagcgactcaggcataagcccaaacgacatctcaacaacccttctcggtgtcttacaagacaacccgcctgacgacaaagatgcgcggaaaagagatttaccatttcaaccacggtcctatcgtgacttcatgcttttcgagcgtcattacaacggcgcggcaatcggcatgacgaagctctacatgcccatggcaaacaagctcggccagctatatcaatcggtcactggctgggatttccccctattcaagccagatgctttatggtacaagcagcccatattttaccaatcgaatcaccttgctttctatgcggatggtgcttcaattacttatccggcgttctccgaatatcttgacgttgagctagagctaggagtcgtgcttggcaagcctctttataacgctactcctgaggaagctactaatgcgattgctggcttttgcgtcttcaacgatttctcttcgcgaaataggcagatggaagagatgtctagtgggtttgggcctcaacatagtaaagcgtttgcaaatagtatctcgtctgtagtcgtatctgcggatgaggttttaccccatatcaatcggctatctggacgtatcacgatcaacggcaaggtcgtgcaagaacccaaggtcgaccggtggcaattctccatcggagaggctcttgcgcacgtatcgaagagtacacgccttcatcccggagaattctttggcagtggcacgttccccaatggtgctggcattgagcgtatgttatcctgactacttgacaatgaagaatttccttctccgatctccagatcgaggaactcgttcaaactctaactttcgacagatacacatttccaactaagagtaggcgacgtagtcacactcgaaatcgacggtatcggatctgtaacaaataggatcgtaggcgaagagtaactccgatgcgtacagctagatattaatacttgaactgtttcccactccttaatgctggatatcacgaatggaaactgatcatgtgtgagactcgatactgattgtccgcggtttgaaggtacctaactatgtacacactaggagaagacctttacttgatgggagaagacctgcctcacttctttgcttcttaaagcgctaatttgttgtcctaccttgacagtaatgcaaccttacattgctactgcacgaacagtgggctactcaaagctattgtatcgtaattcacaacgcatggcaggactgtacactgataggccacctacgacaggagtgataaatgactgggggaaacgcgctcgccaaagatgtcaaattattcagccagttgccttcaatccccatgggcatacaccaagtcctatccaagtatcataaataacttggcgtacggactacgcctctccaagatatttggattatgctttcgacttttatcaaattgcaagcacgttaatccatgatacactacttgtcaccatctgtattagattttacggacgcaagcagacttgatcatctgtagaacatgaagtgtgtgataaggcctcctatatactgcgaaggtaactttattcacgttttctgatgctctgtagtttcgattgataaaaactgtgttggtcaggttgagctcaccgtgtttttgatcttctccgaagcccactctgcgacgccatatagcacagccattgagtgtccagcaacctgaaatgggagaactcctaggtcgacgacgcgcacattttctgtcccgtacaccttgaaatcattatcaactactccacccatcgacttcggcaacattgcagtcgtgcctaaatggtggctgttcggccctattgggatcgatttcagccacgtcgcccactgctcatccgtcgcatcttcagggaccaagtcgaagccagggtagagggtatccatatcgacgatgtcggcaagtggtgcagtcgtgtagaatttacgaacgaacttggacgtctccacggccatttggacgtcgaagtccaattggaaaaacttgccatcaattactggtgccactgttgcatctgtgctgttgatgtgaatgctgcctcgactgagcggttgcagaggccaatacacggcagtaagcgagttatcggaaacaatgggtgcgatttctgatgctggagtgttggaattcaggagcagatccagttgggttcgtaaaaggtgctcttgtacgtcggcactgcttgctccaccgttctgtgctgcgatcacagctgcatagtcaggaagcttggagagcgccgagtcataaaatgactgcgtgcttgagccgaacagatctcgcaatgatgcgtgagccacaaatgcagggaatcctgtaaaattccgtttgagattggctgtcatgaaaagcacactttgatcttggaagttttcgccaacagcaggcagatcaactctgacatcaacagatttttgagctaacacggtcggattgccgactcctgagtgctctaagatggctggacttcggattgcacccgcggacagaataatctcgttgttggcgtggaccagagatgtcgctccatgttggtcgaccacttcgatagctgaagcaatagcttttccgctggcgcatttcttagaccatattattcgagttccagtagtattgaccatcactacgagattgtcgcgatcggcaaaagggtagtaatacgcccgagcagcgtcatctctgatgccaagatcacgatcgattgttgcagtttggtaaccaaaacctctcaggtcgccatcgttaaattcaaacctgggaggtgttcctattgcctgaaacgtagtgttgaagatgtcgtgaagattgctagtcgagatgttcgggtttacacaagttttgacagggccatcgtaaccatgagcaagtggctcgtagctaactcccatgtcgaagagagcctgcgatgggatttggtagtgttccccgtgagtggaggaattgaagaggatattccaatcgatctccagcccaagagagggccatagatccatttgcgaactggaaggtcgtatataggtcattccgttgatgagacttgagccaccaagacctttgccggaactccagaggatactctgattattcgcgtatatctgaggcacgctgtggtactgccagtcaatgctcgtacctctacccactccaggttctgtcgtggtagtgacattgaagttgtctttctcgaaattgccagcctcaatgacagcaaccgaaattcgcggatcctcggataaccttgatgctattaccagaccagccgtaccaccacccacaatgacatagtcaaatgaggagttacccgcgacgacatgttgtcccttaactgtcgtcagtccagacacgagtgaagacaacaggacggtcccagagaaccaagtgcagctgtgtttgaccatggtgagagtgggcagatctccggacgtacttacggtcagaggaattggcaaggaatgtcatttcttattgtcgatatataagaacttcggtgagccgggctacgcgtggcacataatcttacttgcgcgaaggatca

SEQ ID NO: 32810 - DNA, 1815 bp, Muscodor strobelii
  misc_feature: SGI cDNA ID NO. 571310
  misc_feature: Encodes the peptide sequence at SEQ ID NO 32811
atggtcaaacacagctgcacttggttctctgggaccgtcctgttgtcttcactcgtgtctggactgacgacagttaagggacaacatgtcgtcgcgggtaactcctcatttgactatgtcattgtgggtggtggtacggctggtctggtaatagcatcaaggttatccgaggatccgcgaatttcggttgctgtcattgaggctggcaatttcgagaaagacaacttcaatgtcactaccacgacagaacctggagtgggtagaggtacgagcattgactggcagtaccacagcgtgcctcagatatacgcgaataatcagagtatcctctggagttccggcaaaggtcttggtggctcaagtctcatcaacggaatgacctatatacgaccttccagttcgcaaatggatctatggccctctcttgggctggagatcgattggaatatcctcttcaattcctccactcacggggaacactaccaaatcccatcgcaggctctcttcgacatgggagttagctacgagccacttgctcatggttacgatggccctgtcaaaacttgtgtaaacccgaacatctcgactagcaatcttcacgacatcttcaacactacgtttcaggcaataggaacacctcccaggtttgaatttaacgatggcgacctgagaggttttggttaccaaactgcaacaatcgatcgtgatcttggcatcagagatgacgctgctcgggcgtattactacccttttgccgatcgcgacaatctcgtagtgatggtcaatactactggaactcgaataatatggtctaagaaatgcgccagcggaaaagctattgcttcagctatcgaagtggtcgaccaacatggagcgacatctctggtccacgccaacaacgagattattctgtccgcgggtgcaatccgaagtccagccatcttagagcactcaggagtcggcaatccgaccgtgttagctcaaaaatctgttgatgtcagagttgatctgcctgctgttggcgaaaacttccaagatcaaagtgtgcttttcatgacagccaatctcaaacggaattttacaggattccctgcatttgtggctcacgcatcattgcgagatctgttcggctcaagcacgcagtcattttatgactcggcgctctccaagcttcctgactatgcagctgtgatcgcagcacagaacggtggagcaagcagtgccgacgtacaagagcaccttttacgaacccaactggatctgctcctgaattccaacactccagcatcagaaatcgcacccattgtttccgataactcgcttactgccgtgtattggcctctgcaaccgctcagtcgaggcagcattcacatcaacagcacagatgcaacagtggcaccagtaattgatggcaagtttttccaattggacttcgacgtccaaatggccgtggagacgtccaagttcgttcgtaaattctacacgactgcaccacttgccgacatcgtcgatatggataccctctaccctggcttcgacttggtccctgaagatgcgacggatgagcagtgggcgacgtggctgaaatcgatcccaatagggccgaacagccaccatttaggcacgactgcaatgttgccgaagtcgatgggtggagtagttgataatgatttcaaggtgtacgggacagaaaatgtgcgcgtcgtcgacctaggagttctcccatttcaggttgctggacactcaatggctgtgctatatggcgtcgcagagtgggcttcggagaagatcaaaaacacggtgagctcaacctga

SEQ ID NO: 32811 - protein, 604 aa, Muscodor strobelii
  misc_feature: SGI Peptide ID NO. 571310
  misc_feature (443)..(593): Pfam Id: PF05199 Pfam Desc: GMC oxidoreductase
  misc_feature (37)..(362): Pfam Id: PF00732 Pfam Desc: GMC oxidoreductase
  misc_feature (38)..(69): Pfam Id: PF01266 Pfam Desc: FAD dependent oxidoreductase
  misc_feature (521)..(593): Pfam Id: PF05199 Pfam Desc: GMC oxidoreductase
  misc_feature (37)..(146): Pfam Id: PF00732 Pfam Desc: GMC oxidoreductase
  misc_feature (238)..(362): Pfam Id: PF00732 Pfam Desc: GMC oxidoreductase
  misc_feature (38)..(69): Pfam Id: PF05834 Pfam Desc: Lycopene cyclase protein
  misc_feature (38)..(68): Pfam Id: PF07992 Pfam Desc: Pyridine nucleotide-disulphide oxidoreductase
  misc_feature (35)..(598): NCBI GI: 115433558 Blast Desc: ATEG_08295 [Aspergillus terreus NIH2624] gi|114189768|gb|EAU31468.1| ATEG_08295 [Aspergillus terreus NIH2624]
  misc_feature (35)..(603): NCBI GI: 238482721 Blast Desc: glucose oxidase, [Aspergillus flavus NRRL3357] gi|220700649|gb|EED56987.1| glucose oxidase, [Aspergillus flavus NRRL3357]
  misc_feature (35)..(603): NCBI GI: 169766088 Blast Desc: [Aspergillus oryzae RIB40] gi|83765370|dbj|BAE55513.1| protein product [Aspergillus oryzae]
  misc_feature (37)..(598): NCBI GI: 145236982 Blast Desc: An07g00450 [Aspergillus niger] gi|134075603|emb|CAK39269.1| protein product [Aspergillus niger]
  misc_feature (37)..(600): NCBI GI: 145244074 Blast Desc: An11g05580 [Aspergillus niger] gi|134079232|emb|CAK40715.1| protein product [Aspergillus niger]
  misc_feature (37)..(600): NCBI GI: 212534024 Blast Desc: glucose oxidase, [Penicillium marneffei ATCC 18224] gi|210069567|gb|EEA23657.1| glucose oxidase, [Penicillium marneffei ATCC 18224]
  misc_feature (35)..(598): NCBI GI: 169784690 Blast Desc: [Aspergillus oryzae RIB40] gi|83775553|dbj|BAE65673.1| protein product [Aspergillus oryzae]
  misc_feature (36)..(598): NCBI GI: 156036500 Blast Desc: SS1G_12939 [Sclerotinia sclerotiorum 1980] gi|154698344|gb|EDN98082.1| SS1G_12939 [Sclerotinia sclerotiorum 1980]
  misc_feature (36)..(601): NCBI GI: 40642966 Blast Desc: glucose oxidase [Botryotinia fuckeliana]
  misc_feature (34)..(601): NCBI GI: 156030708 Blast Desc: SS1G_14293 [Sclerotinia sclerotiorum 1980] gi|154700684|gb|EDO00423.1| SS1G_14293 [Sclerotinia sclerotiorum 1980]
  misc_feature (31)..(590): SWISSPROT Homolog: EC 1.1.3.4 Glucose oxidase
MVKHSCTWFSGTVLLSSLVSGLTTVKGQHVVAGNSSFDYVIVGGGTAGLVIASRLSEDPRISVAVIEAGNFEKDNFNVTTTTEPGVGRGTSIDWQYHSVPQIYANNQSILWSSGKGLGGSSLINGMTYIRPSSSQMDLWPSLGLEIDWNILFNSSTHGEHYQIPSQALFDMGVSYEPLAHGYDGPVKTCVNPNISTSNLHDIFNTTFQAIGTPPRFEFNDGDLRGFGYQTATIDRDLGIRDDAARAYYYPFADRDNLVVMVNTTGTRIIWSKKCASGKAIASAIEVVDQHGATSLVHANNEIILSAGAIRSPAILEHSGVGNPTVLAQKSVDVRVDLPAVGENFQDQSVLFMTANLKRNFTGFPAFVAHASLRDLFGSSTQSFYDSALSKLPDYAAVIAAQNGGASSADVQEHLLRTQLDLLLNSNTPASEIAPIVSDNSLTAVYWPLQPLSRGSIHINSTDATVAPVIDGKFFQLDFDVQMAVETSKFVRKFYTTAPLADIVDMDTLYPGFDLVPEDATDEQWATWLKSIPIGPNSHHLGTTAMLPKSMGGVVDNDFKVYGTENVRVVDLGVLPFQVAGHSMAVLYGVAEWASEKIKNTVSST

SEQ ID NO: 32812 - DNA, 2657 bp, Muscodor strobelii
  misc_feature: SGI EST ID NO. CUFF.77523.2
  misc_feature: Variant of the nucleotide sequence at SEQ ID NO 32810
ccacgcgtagcccggctcaccgaagttcttatatatcgacaataagaaatgacattccttgccaattcctctgaccggacaacatgtcgtcgcgggtaactcctcatttgactatgtcattgtgggtggtggtacggctggtctggtaatagcatcaaggttatccgaggatccgcgaatttcggttgctgtcattgaggctggcaatttcgagaaagacaacttcaatgtcactaccacgacagaacctggagtgggtagaggtacgagcattgactggcagtaccacagcgtgcctcagatatacgcgaataatcagagtatcctctggagttccggcaaaggtcttggtggctcaagtctcatcaacggaatgacctatatacgaccttccagttcgcaaatggatctatggccctctcttgggctggagatcgattggaatatcctcttcaattcctccactcacggggaacactaccaaatcccatcgcaggctctcttcgacatgggagttagctacgagccacttgctcatggttacgatggccctgtcaaaacttgtgtaaacccgaacatctcgactagcaatcttcacgacatcttcaacactacgtttcaggcaataggaacacctcccaggtttgaatttaacgatggcgacctgagaggttttggttaccaaactgcaacaatcgatcgtgatcttggcatcagagatgacgctgctcgggcgtattactacccttttgccgatcgcgacaatctcgtagtgatggtcaatactactggaactcgaataatatggtctaagaaatgcgccagcggaaaagctattgcttcagctatcgaagtggtcgaccaacatggagcgacatctctggtccacgccaacaacgagattattctgtccgcgggtgcaatccgaagtccagccatcttagagcactcaggagtcggcaatccgaccgtgttagctcaaaaatctgttgatgtcagagttgatctgcctgctgttggcgaaaacttccaagatcaaagtgtgcttttcatgacagccaatctcaaacggaattttacaggattccctgcatttgtggctcacgcatcattgcgagatctgttcggctcaagcacgcagtcattttatgactcggcgctctccaagcttcctgactatgcagctgtgatcgcagcacagaacggtggagcaagcagtgccgacgtacaagagcaccttttacgaacccaactggatctgctcctgaattccaacactccagcatcagaaatcgcacccattgtttccgataactcgcttactgccgtgtattggcctctgcaaccgctcagtcgaggcagcattcacatcaacagcacagatgcaacagtggcaccagtaattgatggcaagtttttccaattggacttcgacgtccaaatggccgtggagacgtccaagttcgttcgtaaattctacacgactgcaccacttgccgacatcgtcgatatggataccctctaccctggcttcgacttggtccctgaagatgcgacggatgagcagtgggcgacgtggctgaaatcgatcccaatagggccgaacagccaccatttaggcacgactgcaatgttgccgaagtcgatgggtggagtagttgataatgatttcaaggtgtacgggacagaaaatgtgcgcgtcgtcgacctaggagttctcccatttcaggttgctggacactcaatggctgtgctatatggcgtcgcagagtgggcttcggagaagatcaaaaacacggtgagctcaacctgaccaacacagtttttatcaatcgaaactacagagcatcagaaaacgtgaataaagttaccttcgcagtatataggaggccttatcacacacttcatgttctacagatgatcaagtctgcttgcgtccgtaaaatctaatacagatggtgacaagtagtgtatcatggattaacgtgcttgcaatttgataaaagtcgaaagcataatccaaatatcttggagaggcgtagtccgtacgccaagttatttatgatacttggataggacttggtgtatgcccatggggattgaaggcaactggctgaataatttgacatctttggcgagcgcgtttcccccagtcatttatcactcctgtcgtaggtggcctatcagtgtacagtcctgccatgcgttgtgaattacgatacaatagctttgagtagcccactgttcgtgcagtagcaatgtaaggttgcattactgtcaaggtaggacaacaaattagcgctttaagaagcaaagaagtgaggcaggtcttctcccatcaagtaaaggtcttctcctagtgtgtacatagttaggtaccttcaaaccgcggacaatcagtatcgagtctcacacatgatcagtttccattcgtgatatccagcattaaggagtgggaaacagttcaagtattaatatctagctgtacgcatcggagttactcttcgcctacgatcctatttgttacagatccgataccgtcgatttcgagtgtgactacgtcgcctactcttagttggaaatgtgtatctgtcgaaagttagagtttgaacgagttcctcgatctggagatcggagaaggaaattcttcattgtca

SEQ ID NO: 32813 - DNA, 1038 bp, Muscodor strobelii
  misc_feature: SGI cDNA ID NO. 571311
  misc_feature: Encodes the peptide sequence at SEQ ID NO 32814
atggtcaatactactggaactcgaataatatggtctaagaaatgcgccagcggaaaagctattgcttcagctatcgaagtggtcgaccaacatggagcgacatctctggtccacgccaacaacgagattattctgtccgcgggtgcaatccgaagtccagccatcttagagcactcaggagtcggcaatccgaccgtgttagctcaaaaatctgttgatgtcagagttgatctgcctgctgttggcgaaaacttccaagatcaaagtgtgcttttcatgacagccaatctcaaacggaattttacaggattccctgcatttgtggctcacgcatcattgcgagatctgttcggctcaagcacgcagtcattttatgactcggcgctctccaagcttcctgactatgcagctgtgatcgcagcacagaacggtggagcaagcagtgccgacgtacaagagcaccttttacgaacccaactggatctgctcctgaattccaacactccagcatcagaaatcgcacccattgtttccgataactcgcttactgccgtgtattggcctctgcaaccgctcagtcgaggcagcattcacatcaacagcacagatgcaacagtggcaccagtaattgatggcaagtttttccaattggacttcgacgtccaaatggccgtggagacgtccaagttcgttcgtaaattctacacgactgcaccacttgccgacatcgtcgatatggataccctctaccctggcttcgacttggtccctgaagatgcgacggatgagcagtgggcgacgtggctgaaatcgatcccaatagggccgaacagccaccatttaggcacgactgcaatgttgccgaagtcgatgggtggagtagttgataatgatttcaaggtgtacgggacagaaaatgtgcgcgtcgtcgacctaggagttctcccatttcaggttgctggacactcaatggctgtgctatatggcgtcgcagagtgggcttcggagaagatcaaaaacacggtgagctcaacctga

SEQ ID NO: 32814 - protein, 345 aa, Muscodor strobelii
  misc_feature: SGI Peptide ID NO. 571311
  misc_feature (184)..(334): Pfam Id: PF05199 Pfam Desc: GMC oxidoreductase
  misc_feature (262)..(334): Pfam Id: PF05199 Pfam Desc: GMC oxidoreductase
  misc_feature (7)..(103): Pfam Id: PF00732 Pfam Desc: GMC oxidoreductase
  misc_feature (1)..(339): NCBI GI: 115433558 Blast Desc: ATEG_08295 [Aspergillus terreus NIH2624] gi|114189768|gb|EAU31468.1| ATEG_08295 [Aspergillus terreus NIH2624]
  misc_feature (2)..(339): NCBI GI: 159129873 Blast Desc: glucose oxidase, [Aspergillus fumigatus A1163]
  misc_feature (2)..(339): NCBI GI: 71002270 Blast Desc: glucose oxidase [Aspergillus fumigatus Af293] gi|66853454|gb|EAL93778.1| glucose oxidase, [Aspergillus fumigatus Af293]
  misc_feature (1)..(344): NCBI GI: 169766088 Blast Desc: [Aspergillus oryzae RIB40] gi|83765370|dbj|BAE55513.1| protein product [Aspergillus oryzae]
  misc_feature (1)..(344): NCBI GI: 238482721 Blast Desc: glucose oxidase, [Aspergillus flavus NRRL3357] gi|220700649|gb|EED56987.1| glucose oxidase, [Aspergillus flavus NRRL3357]
  misc_feature (3)..(341): NCBI GI: 145244074 Blast Desc: An11g05580 [Aspergillus niger] gi|134079232|emb|CAK40715.1| protein product [Aspergillus niger]
  misc_feature (1)..(339): NCBI GI: 145236982 Blast Desc: An07g00450 [Aspergillus niger] gi|134075603|emb|CAK39269.1| protein product [Aspergillus niger]
  misc_feature (3)..(339): NCBI GI: 169784690 Blast Desc: [Aspergillus oryzae RIB40] gi|83775553|dbj|BAE65673.1| protein product [Aspergillus oryzae]
  misc_feature (3)..(341): NCBI GI: 212534024 Blast Desc: glucose oxidase, [Penicillium marneffei ATCC 18224] gi|210069567|gb|EEA23657.1| glucose oxidase, [Penicillium marneffei ATCC 18224]
  misc_feature (1)..(339): NCBI GI: 156036500 Blast Desc: SS1G_12939 [Sclerotinia sclerotiorum 1980] gi|154698344|gb|EDN98082.1| SS1G_12939 [Sclerotinia sclerotiorum 1980]
  misc_feature (37)..(331): SWISSPROT Homolog: EC 1.1.3.4 Glucose oxidase
MVNTTGTRIIWSKKCASGKAIASAIEVVDQHGATSLVHANNEIILSAGAIRSPAILEHSGVGNPTVLAQKSVDVRVDLPAVGENFQDQSVLFMTANLKRNFTGFPAFVAHASLRDLFGSSTQSFYDSALSKLPDYAAVIAAQNGGASSADVQEHLLRTQLDLLLNSNTPASEIAPIVSDNSLTAVYWPLQPLSRGSIHINSTDATVAPVIDGKFFQLDFDVQMAVETSKFVRKFYTTAPLADIVDMDTLYPGFDLVPEDATDEQWATWLKSIPIGPNSHHLGTTAMLPKSMGGVVDNDFKVYGTENVRVVDLGVLPFQVAGHSMAVLYGVAEWASEKIKNTVSST

SEQ ID NO: 32815 - DNA, 2657 bp, Muscodor strobelii; identical to SEQ ID NO: 32812
  misc_feature: SGI EST ID NO. CUFF.77523.2
  misc_feature: Variant of the nucleotide sequence at SEQ ID NO 32813

SEQ ID NO: 32816 - DNA, 1341 bp, Muscodor strobelii
  misc_feature: SGI cDNA ID NO. 571312
  misc_feature: Encodes the peptide sequence at SEQ ID NO 32817
atgggctcagccattttctatccatcgcttggcgaaatctcgaaagacctccatgtatccaaaacagtcgtgaatctatcagtagcggtgtatatgctgtccatgtccattttccctctctggtggtcatcgttctctgaaacgttagggcggcgcaatatctacctggtctccttctcgctgaatgcggtcttcacagtggcatcaggtgtaagtgccaacatcggccagcttattgtgttccgaattttcgccggtggcgccgcggcatcagttcaagctgtaggagccggcaccattgctgatatttgggaatctcgagaacgcggtcgagctatggggttgttctatcttggacctctttgtggccccttgttggcacccatcattggcggtgcactggcagatggctttggctggcgaagtacaatgtatttcctcgctgtatatggcgcgctgatcttttttctcgtcctctttgcactcccggagactctcgcgcgtcgacgacaagaagaagccgctgcagccgcaataccagatttgtcttcaggcggcgatcccctttcccgcatgtcgacccgaaggtccgtcatacaaacccgcacgaaggttgccggagtctggttcaaacgagcgctcatcgacccattatcaatcctgaaatatctccgattccccgcggtgactttgattgtctcgtacgccgcaatcacgtttggctcgctgtacgtgcttaacatttgcgtacagtctgccttcgcggctccgccgtacaattatcagccgctcatcgtcggtatcttgtacatcccctcatcattggggtacgtcatagcatcattattgggaggaccgtggctagaccggatcatggaacgcgaagcacgtaaagcagggcgatttgacgaacgaggtcgccttgttgtgtatcccgaagatcgaatgcgagagaatgcctggatatccgctacactctacccaggagctctcatttggttcggctggtctatccaaaatcaattacactgggccgtaccctcagtcgccaacttcttctttggcgctggtagtatgttggtgttcagcatggctaccacaatgctgacggagttcatgccgaagaaagcaagttctggagttgctcttaataactttgtgcgtaatattcttagcgcgactggtgctgttgtgggccagccccttatcgaagctattggttacggttggctctgcactggcctggcactcattgccttcattgctggcaactcaattttgttcgctataagaaagaatagcacgaaatggaggatacgaatgaacacagaattggattag

SEQ ID NO: 32817 - protein, 446 aa, Muscodor strobelii
  misc_feature: SGI Peptide ID NO. 571312
  misc_feature (1)..(396): Pfam Id: PF07690 Pfam Desc: Major Facilitator Superfamily
  misc_feature (2)..(446): NCBI GI: 85099709 Blast Desc: NCU01411 [Neurospora crassa OR74A] gi|28922361|gb|EAA31598.1| conserved [Neurospora crassa OR74A] gi|28950000|emb|CAD70885.1| related to dityrosine transporter
  misc_feature (1)..(446): NCBI GI: 261197315 Blast Desc: MFS multidrug resistance transporter [Ajellomyces dermatitidis SLH14081] gi|239595690|gb|EEQ78271.1| MFS multidrug resistance transporter [Ajellomyces dermatitidis SLH14081]
  misc_feature (1)..(446): NCBI GI: 239606683 Blast Desc: MFS multidrug resistance transporter [Ajellomyces dermatitidis ER-3]
  misc_feature (1)..(442): NCBI GI: 119499856 Blast Desc: MFS multidrug resistance transporter, [Neosartorya fischeri NRRL 181] gi|119414850|gb|EAW24788.1| MFS multidrug resistance transporter, [Neosartorya fischeri NRRL 181]
  misc_feature (1)..(442): NCBI GI: 70993236 Blast Desc: MFS multidrug resistance transporter [Aspergillus fumigatus Af293] gi|66849099|gb|EAL89427.1| MFS multidrug resistance transporter, [Aspergillus fumigatus Af293] MFS A1163]
  misc_feature (1)..(442): NCBI GI: 121708667 Blast Desc: MFS multidrug resistance transporter, [Aspergillus clavatus NRRL 1] gi|119400355|gb|EAW10781.1| MFS multidrug resistance transporter, [Aspergillus clavatus NRRL 1]
  misc_feature (1)..(442): NCBI GI: 145230093 Blast Desc: An01g09350 [Aspergillus niger] gi|134055470|emb|CAK43985.1| protein product [Aspergillus niger]
  misc_feature (1)..(442): NCBI GI: 238504280 Blast Desc: MFS multidrug resistance transporter, [Aspergillus flavus NRRL3357] gi|220690842|gb|EED47191.1| MFS multidrug resistance transporter, [Aspergillus flavus NRRL3357]
  misc_feature (1)..(442): NCBI GI: 169764469 Blast Desc: [Aspergillus oryzae RIB40] gi|83764560|dbj|BAE54704.1| protein product [Aspergillus oryzae]
  misc_feature (1)..(438): NCBI GI: 212534758 Blast Desc: MFS multidrug resistance transporter, [Penicillium marneffei ATCC 18224] gi|210069934|gb|EEA24024.1| MFS multidrug resistance transporter, [Penicillium marneffei ATCC 18224]
MGSAIFYPSLGEISKDLHVSKTVVNLSVAVYMLSMSIFPLWWSSFSETLGRRNIYLVSFSLNAVFTVASGVSANIGQLIVFRIFAGGAAASVQAVGAGTIADIWESRERGRAMGLFYLGPLCGPLLAPIIGGALADGFGWRSTMYFLAVYGALIFFLVLFALPETLARRRQEEAAAAAIPDLSSGGDPLSRMSTRRSVIQTRTKVAGVWFKRALIDPLSILKYLRFPAVTLIVSYAAITFGSLYVLNICVQSAFAAPPYNYQPLIVGILYIPSSLGYVIASLLGGPWLDRIMEREARKAGRFDERGRLVVYPEDRMRENAWISATLYPGALIWFGWSIQNQLHWAVPSVANFFFGAGSMLVFSMATTMLTEFMPKKASSGVALNNFVRNILSATGAVVGQPLIEAIGYGWLCTGLALIAFIAGNSILFAIRKNSTKWRIRMNTELD

SEQ ID NO: 32818 - DNA, 2552 bp, Muscodor strobelii
  misc_feature: SGI EST ID NO. CUFF.77513.1
  misc_feature: Variant of the nucleotide sequence at SEQ ID NO 32816
tgccgcttccgggacctacaactcacgaatcacgggatcattatcattcatcgtgcttcggaacagacatcctagttcactttcccattcacacatgtctatactaatctgttttcataccaaatttgtatctagggcattgtgtttgactccggtaatcgtcggtcgtgtatcttataaatcaaaatggcgttggccatgatgccaacaccacaaaactatttcttgtccgccttatcgcttcccattttctgagcattgactgaacagtctattggtatctgatttttgacaaaagttctctggtttgtagatacgtctattatagtatccacatctaaaaaaaccttctgatccaactactgctatcagttcacgcttgtcactaggcccgataacggttaatcccgctgtctctagcaacgcctgccactaaagcgttagaagacgaaacgagatttggtagacatggcgagcgaaaattatattatcggcgactttttcccggatcctcaagcatcaaacggcgaggacaggcgcagaaggtcaaacgaaacagacaagagtcataggacaaccagttctatagatgacataccaatatcctctgctatcgagtcgccgcgggcagctcaccttagcgagtgcgacgagaaggctgtcggtgatggccaattccggccagtgcagtccagagcttcatcgaggagaccaaggcatgtagtgccagtctcccgagaaaagcagagagggttcttatcatggctttctgtaatccctgaagtcgatcggccttacgattatcaaaatggaacgaagtggtttataacactagttgttgccgttgcggcggccgctgcaccaatgggctcagccattttctatccatcgcttggcgaaatctcgaaagacctccatgtatccaaaacagtcgtgaatctatcagtagcggtgtatatgctgtccatgtccattttccctctctggtggtcatcgttctctgaaacgttagggcggcgcaatatctacctggtctccttctcgctgaatgcggtcttcacagtggcatcaggtgtaagtgccaacatcggccagcttattgtgttccgaattttcgccggtggcgccgcggcatcagttcaagctgtaggagccggcaccattgctgatatttgggaatctcgagaacgcggtcgagctatggggttgttctatcttggacctctttgtggccccttgttggcacccatcattggcggtgcactggcagatggctttggctggcgaagtacaatgtatttcctcgctgtatatggcgcgctgatcttttttctcgtcctctttgcactcccggagactctcgcgcgtcgacgacaagaagaagccgctgcagccgcaataccagatttgtcttcaggcggcgatcccctttcccgcatgtcgacccgaaggtccgtcatacaaacccgcacgaaggttgccggagtctggttcaaacgagcgctcatcgacccattatcaatcctgaaatatctccgattccccgcggtgactttgattgtctcgtacgccgcaatcacgtttggctcgctgtacgtgcttaacatttgcgtacagtctgccttcgcggctccgccgtacaattatcagccgctcatcgtcggtatcttgtacatcccctcatcattggggtacgtcatagcatcattattgggaggaccgtggctagaccggatcatggaacgcgaagcacgtaaagcagggcgatttgacgaacgaggtcgccttgttgtgtatcccgaagatcgaatgcgagagaatgcctggatatccgctacactctacccaggagctctcatttggttcggctggtctatccaaaatcaattacactgggccgtaccctcagtcgccaacttcttctttggcgctggtagtatgttggtgttcagcatggctaccacaatgctgacggagttcatgccgaagaaagcaagttctggagttgctcttaataactttgtgcgtaatattcttagcgcgactggtgctgttgtgggccagccccttatcgaagctattggttacggttggctctgcactggcctggcactcattgccttcattgctggcaactcaattttgttcgctataagaaagaatagcacgaaatggaggatacgaatgaacacagaattggattagatatggtcgtattacattatcatgcaaagggctagcatggacatgagaccaacaaccggatatatatgtctttttactttacgcagattagtgaaaatacgggagtcgcttggcgtttatgatctagatatctttaccccatgaatgaatgaaatcattgctttataacgattgcttcaaatactgcatggagacatcacatgtagtgctcaaaagccatgatcgtcttacccgcaaaatttgtaacgaaagggttcgtatagcactggtgctgcggcaactctggtcgcgtaagaccctaagtaaatggttactagaagacgattgagcactgaaatatggaaacg

SEQ ID NO: 32819 - DNA, 1020 bp, Muscodor strobelii
  misc_feature: SGI cDNA ID NO. 571313
  misc_feature: Encodes the peptide sequence at SEQ ID NO 32820
atggcgtcgtcaccttcattcgagtttcggtggtcgttcatcaggagcgccacagtgctgcatcttggcaattttgttgcggcgcaaaatactacggtaacgcccagcatagttcatcaatatgcacccatgacttatgtcgagagctcagccatacgcccaaatggccatatcttaccaatcacaacaacatcgtcaattctcaatgagttggatccagatactgggactctaacgcctgtctacgacttgagcgcagtgggcaatgcaatccagggcatcgtggcattgccaggcgacgtagtcctcgtaaatgtattgacatgcaacatctcagagttgagttgtacacaagggagtgtccacacgtggcgcatcgacttccaaggtcgcgggggtgcagacgcacaggagatagtgacatggccagaggccggctttctcaatggtatgacggctctcaacgcgcgcacagccttgatcgcggatagcttcttgggagggatctggagcatcgatgcgtactcgggcgactctcgcctacttttcacagatgatagcatggcgccatccgagactattggaacaggagtgaatggcatacgggtcgttaagggatcagaaggcgcaacattatacttcactaactctgcgctcggcactctgaacaaaatacctatcaacggttgcaccggaatcaaagctggaaatgctacggtcatagccagcgggctgagtggcccggatgactttgcacttgacttcgaaacggaatatggatttgcgtatctcgcaaatggagcagtcaatcaagtcttgaaaatcgatttgaatagcggcgactcctcggttttggcatctttgcccggcccaacctccctacgctggagtgagaccgatgagtatggtcagaggagaggcaagcaaagtgtgttgtatgcttcgactatcggtggtctcttgcaatacattgcgcataacgtcacccttggtggagctgtgtatgggttgaaagtctga

SEQ ID NO: 32820 - protein, 339 aa, Muscodor strobelii
  misc_feature: SGI Peptide ID NO. 571313
  misc_feature (24)..(334): NCBI GI: 156053892 Blast Desc: SS1G_05794 [Sclerotinia sclerotiorum 1980] gi|154703574|gb|EDO03313.1| SS1G_05794 [Sclerotinia sclerotiorum 1980]
  misc_feature (37)..(318): NCBI GI: 255955199 Blast Desc: Pc21g13340 [Penicillium chrysogenum Wisconsin 54-1255] gi|211590063|emb|CAP96231.1| Pc21g13340 [Penicillium chrysogenum Wisconsin 54-1255]
  misc_feature (7)..(318): NCBI GI: 256722322 Blast Desc: NECHADRAFT_54333 [Nectria haematococca mpVI 77-13-4]
  misc_feature (40)..(319): NCBI GI: 70994304 Blast Desc: conserved [Aspergillus fumigatus Af293] gi|66849615|gb|EAL89943.1| conserved [Aspergillus fumigatus Af293]
  misc_feature (33)..(339): NCBI GI: 259480636 Blast Desc: TPA: conserved [Aspergillus nidulans FGSC A4]
  misc_feature (33)..(339): NCBI GI: 67901802 Blast Desc: AN7888.2 [Aspergillus nidulans FGSC A4] gi|40740352|gb|EAA59542.1| AN7888.2 [Aspergillus nidulans FGSC A4]
  misc_feature (29)..(275): NCBI GI: 115397413 Blast Desc: [Aspergillus terreus NIH2624] gi|114192489|gb|EAU34189.1| [Aspergillus terreus NIH2624]
  misc_feature (38)..(339): NCBI GI: 169772533 Blast Desc: [Aspergillus oryzae RIB40] gi|83768596|dbj|BAE58733.1| protein product [Aspergillus oryzae]
  misc_feature (45)..(339): NCBI GI: 256721057 Blast Desc: NECHADRAFT_55444 [Nectria haematococca mpVI 77-13-4]
  misc_feature (37)..(307): NCBI GI: 154298356 Blast Desc: BC1G_11633 [Botryotinia fuckeliana B05.10] gi|150858086|gb|EDN33278.1| BC1G_11633 [Botryotinia fuckeliana B05.10]
MASSPSFEFRWSFIRSATVLHLGNFVAAQNTTVTPSIVHQYAPMTYVESSAIRPNGHILPITTTSSILNELDPDTGTLTPVYDLSAVGNAIQGIVALPGDVVLVNVLTCNISELSCTQGSVHTWRIDFQGRGGADAQEIVTWPEAGFLNGMTALNARTALIADSFLGGIWSIDAYSGDSRLLFTDDSMAPSETIGTGVNGIRVVKGSEGATLYFTNSALGTLNKIPINGCTGIKAGNATVIASGLSGPDDFALDFETEYGFAYLANGAVNQVLKIDLNSGDSSVLASLPGPTSLRWSETDEYGQRRGKQSVLYASTIGGLLQYIAHNVTLGGAVYGLKV

SEQ ID NO: 32821 - DNA, 1422 bp, Muscodor strobelii
  misc_feature: SGI EST ID NO. CUFF.77506.0
  misc_feature: Variant of the nucleotide sequence at SEQ ID NO 32819
gttggatccagatactgggactctaacgcctgtctacgacttgagcgcagtgggcaatgcaatccagggcatcgtggcattgccaggcgacgtagtcctcgtaaatgtattgacatgcaacatctcagagttgagttgtacacaagggagtgtccacacgtggcgcatcgacttccaaggtcgcgggggtgcagacgcacaggagatagtgacatggccagaggccggctttctcaatggtatgacggctctcaacgcgcgcacagccttgatcgcggatagcttcttgggagggatctggagcatcgatgcgtactcgggcgactctcgcctacttttcacagatgatagcatggcgccatccgagactattggaacaggagtgaatggcatacgggtcgttaagggatcagaaggcgcaacattatacttcactaactctgcgctcggcactctgaacaaaatacctatcaacggttgcaccggaatcaaagctggaaatgctacggtcatagccagcgggctgagtggcccggatgactttgcacttgacttcgaaacggaatatggatttgcgtatctcgcaaatggagcagtcaatcaagtcttgaaaatcgatttgaatagcggcgactcctcggttttggcatctttgcccggcccaacctccctacgctggagtgagaccgatgagtatggtcagaggagaggcaagcaaagtgtgttgtatgcttcgactatcggtggtctcttgcaatacattgcgcataacgtcacccttggtggagctgtgtatgggttgaaagtctgagtagtatctcatcaatagtactcttcattgcctccgtctaatgaaatctcattggcaacacgtcatgctctggcatgcgataggaggctcgcgaccatgatctctgattcttgcgataagtccagcttgattatataagataatgagaccttcaagttgaagactttcggaccttcaggattacaaacaatgctgtgtgccgctatagaaaaggatcgtgatcctggtcaacttgtgcgatctctgaggggcaaattgatctggaaaccagaaactcgagatgaatgtatgatcgtcattgactgtagacccattctctcagcaatacataaagtgcgacatttccattaactaccctcataatcaggctctccccgactgataatgttaaaatgtaagtgcaaacgagtgaagtttatcttaacgacgaaccataccatcggagtcgcctctaaacttccgatccgaaaagccgagatctgccagtatcgtatcgccgtatcaagatggtctcggttgtctccgatcccaatctttcttagccgagatagataaacgaaacagacgaatgaagaactcaaacttatttatcagggctcgcaagaaagcgt

SEQ ID NO: 32822 - DNA, 1398 bp, Muscodor strobelii
  misc_feature: SGI cDNA ID NO. 571314
  misc_feature: Encodes the peptide sequence at SEQ ID NO 32823
atgtctgctcccgaggagcctatcacggtcaggatagttccgggggccgaagacgatcctcccgtcttcaacctagccatgaacacccttttcgcgacagagaacattcgcattctggatctctcggggtacccaattcgcgcgctgcccgacaactttaccaggtttcagaacctcgttgaggttatgtttgaccattgccagctcactgtcctcccaccccagttgggccaatgcgagagccttcgatacatcagcgtcatgcacagtggaatggcgtggattccagaggactcattgcctaggggactacgtcgcttggacctggcgaataaccgtctcatgcacatccccccaagtatcggtaattgcacgaatctcgagatctgcgatctcagaaacaacttcctctcatacttgcccgccgagatgagcagatgcacacgcctcaacatcctgtgtctcagattcaacaggttccggatccgccactactggttgttccatatgccaagactcggtcatctagacttttccgaaaatccatgctctcgagatctgtcgaatcctccgcggcgacatggtagaacctttaccagagattgggatgactcggatgtcactggctatcgagtgctcctcgtgatgactaccagaaatcttcccagagcctctctcgcagtcattgaaggcacatcctctgcataccagcgtcaaccttcggaggacatgaaggacgatttggactttgtccatatccagggtaccctatgtcaatccctggcagatacctggaatctcccagcagctggagtcgagccgaacaatactgggacgcactccagtctggtcggtcaaatcgaacatgacgaaatcttggagcttgagcatctttgggcacgaaagccaggatcgatgagtctccgagatagcctgagaatcctggtagacgtagcgaaggcatcgcaatatttccatcagaaccactgcactttcccatcattgaccgaggagcgcattttctcttatcgagggaagacagtcctgttggtggacgaggccatgatgatccccgacgaccaacgccaaatacgaaccgacaagatagaagttaaggcaatgggtgacctcatgggagaagtccttagcctggcaaagtacaaaaacagcgactacatcatcctgtacaaggttgcccgatttcggttgcgtctgatccatcgcatacctcgacgacgaccttcctgggtcgaggttatcgagaccttagagctactctacgacatgtcatatcgtggcgaaatatcaaccctccgtcgcaaagccagccaactagctcatagcttcaaatacgcaatcaagcatcgcatcacttcccgcaacgatacacgagattaa

SEQ ID NO: 32823 - protein, 465 aa, Muscodor strobelii
  misc_feature: SGI Peptide ID NO. 571314
  misc_feature (34)..(384): NCBI GI: 156054566 Blast Desc: SS1G_06131 [Sclerotinia sclerotiorum 1980] gi|154703911|gb|EDO03650.1| SS1G_06131 [Sclerotinia sclerotiorum 1980]
  misc_feature (34)..(184): NCBI GI: 154321011 Blast Desc: BC1G_01380 [Botryotinia fuckeliana B05.10] gi|150851918|gb|EDN27110.1| BC1G_01380 [Botryotinia fuckeliana B05.10]
  misc_feature (22)..(187): NCBI GI: 170690658 Blast Desc: serine/threonine protein kinase [Burkholderia graminis C4D1M] gi|170143907|gb|EDT12069.1| serine/threonine protein kinase [Burkholderia graminis C4D1M]
  misc_feature (33)..(183): NCBI GI: 238024479 Blast Desc: Protein kinase [Burkholderia glumae BGR1] gi|237879144|gb|ACR31476.1| Protein kinase [Burkholderia glumae BGR1]
  misc_feature (92)..(426): NCBI GI: 145602897 Blast Desc: MGG_04725 [Magnaporthe grisea 70-15] gi|145011255|gb|EDJ95911.1| MGG_04725 [Magnaporthe grisea 70-15]
  misc_feature (30)..(208): NCBI GI: 71907483 Blast Desc: serine/threonine protein kinase [Dechloromonas aromatica RCB] gi|71847104|gb|AAZ46600.1| serine/threonine protein kinase [Dechloromonas aromatica RCB]
  misc_feature (35)..(207): NCBI GI: 116201081 Blast Desc: CHGG_08425 [Chaetomium globosum CBS 148.51] gi|88176943|gb|EAQ84411.1| CHGG_08425 [Chaetomium globosum CBS 148.51]
  misc_feature (22)..(382): NCBI GI: 209517943 Blast Desc: serine/threonine protein kinase [Burkholderia sp. H160] gi|209501659|gb|EEA01682.1| serine/threonine protein kinase [Burkholderia sp. H160]
  misc_feature (21)..(189): NCBI GI: 91793008 Blast Desc: protein kinase [Shewanella denitrificans OS217] gi|91715010|gb|ABE54936.1| serine/threonine protein kinase [Shewanella denitrificans OS217]
  misc_feature (33)..(187): NCBI GI: 282886150 Blast Desc: serine/threonine protein kinase [Burkholderia sp. CCGE1001] gi|281327926|gb|EFB09697.1| serine/threonine protein kinase [Burkholderia sp. CCGE1001]
MSAPEEPITVRIVPGAEDDPPVFNLAMNTLFATENIRILDLSGYPIRALPDNFTRFQNLVEVMFDHCQLTVLPPQLGQCESLRYISVMHSGMAWIPEDSLPRGLRRLDLANNRLMHIPPSIGNCTNLEICDLRNNFLSYLPAEMSRCTRLNILCLRFNRFRIRHYWLFHMPRLGHLDFSENPCSRDLSNPPRRHGRTFTRDWDDSDVTGYRVLLVMTTRNLPRASLAVIEGTSSAYQRQPSEDMKDDLDFVHIQGTLCQSLADTWNLPAAGVEPNNTGTHSSLVGQIEHDEILELEHLWARKPGSMSLRDSLRILVDVAKASQYFHQNHCTFPSLTEERIFSYRGKTVLLVDEAMMIPDDQRQIRTDKIEVKAMGDLMGEVLSLAKYKNSDYIILYKVARFRLRLIHRIPRRRPSWVEVIETLELLYDMSYRGEISTLRRKASQLAHSFKYAIKHRITSRNDTRD

SEQ ID NO: 32824 - DNA, 2874 bp, Muscodor strobelii
  misc_feature: SGI cDNA ID NO. 571315
  misc_feature: Encodes the peptide sequence at SEQ ID NO 32825
atgacgacttcgcccgccgactctcgaaagagctcatcggcgagcgacgtgaagccggcaccgcctcgcatcccaccgcgcaagccccttcctcctacgagtcgcgctcttgcgagcggtacgcagcaccagactcagccgagccactccacggctactgttcagactccggcagatatcagtactcatgtctcagtatcagatatcggcctggccttcggtgagccacccacatccggacacaccctcaagtcatcagtttcgacatttgagactcgcgatgtcatcaagaacggtgaaactaccatcacgcagcagccagatacttcggccagaacccaccagagtaagattcctcgattgattggaagtaaagtgtctgcccagctcgaagaaaataccagtaacaagcatactactcctccgcactggtctctgaaggacccttacagtgccgacaagcttacattcaatacggagactccatttggtcctcatcagaagtccaggattcctgtcacggtgaatcattcgttcccatcgactccgaataacaagtttcacccaacaagcgctacaactgacggagaaaactattccctcaatgatcctttcgtttcggagacaacaggacgcaaatctgcgtcattcaccagtccaatcctaggaaatgcattgaatatcaaggagcgacgtaaaacattcgagcagggaaattctggcatgactatgcccattcctgccctcgcagacctgagacagcctaatccaaccttggaacagggcaacccaaccccttcaaagtccatatcccgacaggaatctgccaattccttctggacggccaagtctaagccctcgaacgagaagttacagcagctacggggtcttgttggagacccgacgaagtgtacgccaactcctgtgaagcttgagtcaagtcctagcgtttccgaactgtgcaaatcatttgaaaggactcctgaacatacagagcaaccaaaggatgaaggtggcagtggattccatcgcaacactgctggtctcacattcgaccatcagaccagcccaggcttcaggtctgggtcaattcatccatcaaagttgcccatcagaagtggttcaactcttcgacgaagtatggattctccgattcatcctgatcaagtccgccgtgttgcattaaagggcgaatgtcgtacgtcaatcggtctgcctgagggtgtgaagagcaatagggcctctgttgcatccttttcgtcgaagacccaaacacgtcttcaggaccacgttcaagaacaaagctcatcgccttcaacgtctatgaaacgggagacctcatattcagcgtttccaccaggaatttcgcagccatcgcgcaacatcttaccggcactcgatggagcagatgacgagcgagtcttcgtgatccaagagaacaaaatggcaccgcctacttccgccgctcaggataacattcacccaactattgagaccgattctagctcagatcgtaagtttctcggaagtaagaaatttggtgagcttctcaatttgtttgagcaacacaacaattgcatcgccatccacaaatctcgccctcagaagctgtcagacgaatcaggcaccagtggagctatttcacagaataatccgtctacagaatctgctgagattgcttcggagttcaagcgcatatctggaatccctccatcaatctcaacgcacatagatacggatgatttcatcgtcgacttcggcgaaatttgcaccgaaggagaacacaacacctcgctacccaacagagaggagatcaccaaagttgagtctcctgtaaaagaaaggatcagacactttgaaaatctcagccgcagagcttctatggtgactaagcacctctccatcaggcatcgagagtccgggaaccgcgattcggagcgcgtgcctagattgcaacgatgccaagcagtttggagaaagatctctgattcaatcaagacttctttgaatggttggaagactagacagagcggagaacattcgaccgataagtctgatgcagttggcggaacagatgacccctcatctaaggcatcgagtccaagtactgcaaacaggggaccaagccctttcggtttccctctatatcgtacgaaacacaagacggagtcgttgagcgaacgtcttacttcccctggaggaagccacaaggagtcttttggcacccgtatcgtgggtggtcttacccacatgaatggcttcgctttcggattagatggccatcatcactcgcgtcctgtagtagacgaaggctccgcaacatcccatccaggaacgccagcatctgaaagccctgctgtcgttgaccccaatgctttgcagaaaataatctcaaagcaatctgctgcggagcgtcacagacgccgacaagaggcgcgccgagagaagaccgaccgtgttcggtccctgtttaagggtaaagagaaggagtccgtagagaagagcggtgcgaaagaggataaagggaagggaaaagagaaagaaatctccaatgcaaagacgcaggtaagctcaaacgtcgaggggaaaacggaatccgggtttgtcgtatacgagtccgacaatgtcaaccttcgacatccgagaccccgtcgtcccggcccggttcgaaagatcgctaacctgtataaagacaagtccctgagtggaatcataaacaccaacgcaagcaagggtgggagtgctatgtctctgagaggaaaggagaaggatgacgcagtagataggatgagaacgactcctggaggtttaggatggagtctatggaacagaagaggtgaagagatgacacacatgggaaaagaacaggaatga

SEQ ID NO: 32825 - protein, 957 aa, Muscodor strobelii
  misc_feature: SGI Peptide ID NO. 571315
MTTSPADSRKSSSASDVKPAPPRIPPRKPLPPTSRALASGTQHQTQPSHSTATVQTPADISTHVSVSDIGLAFGEPPTSGHTLKSSVSTFETRDVIKNGETTITQQPDTSARTHQSKIPRLIGSKVSAQLEENTSNKHTTPPHWSLKDPYSADKLTFNTETPFGPHQKSRIPVTVNHSFPSTPNNKFHPTSATTDGENYSLNDPFVSETTGRKSASFTSPILGNALNIKERRKTFEQGNSGMTMPIPALADLRQPNPTLEQGNPTPSKSISRQESANSFWTAKSKPSNEKLQQLRGLVGDPTKCTPTPVKLESSPSVSELCKSFERTPEHTEQPKDEGGSGFHRNTAGLTFDHQTSPGFRSGSIHPSKLPIRSGSTLRRSMDSPIHPDQVRRVALKGECRTSIGLPEGVKSNRASVASFSSKTQTRLQDHVQEQSSSPSTSMKRETSYSAFPPGISQPSRNILPALDGADDERVFVIQENKMAPPTSAAQDNIHPTIETDSSSDRKFLGSKKFGELLNLFEQHNNCIAIHKSRPQKLSDESGTSGAISQNNPSTESAEIASEFKRISGIPPSISTHIDTDDFIVDFGEICTEGEHNTSLPNREEITKVESPVKERIRHFENLSRRASMVTKHLSIRHRESGNRDSERVPRLQRCQAVWRKISDSIKTSLNGWKTRQSGEHSTDKSDAVGGTDDPSSKASSPSTANRGPSPFGFPLYRTKHKTESLSERLTSPGGSHKESFGTRIVGGLTHMNGFAFGLDGHHHSRPVVDEGSATSHPGTPASESPAVVDPNALQKIISKQSAAERHRRRQEARREKTDRVRSLFKGKEKESVEKSGAKEDKGKGKEKEISNAKTQVSSNVEGKTESGFVVYESDNVNLRHPRPRRPGPVRKIANLYKDKSLSGIINTNASKGGSAMSLRGKEKDDAVDRMRTTPGGLGWSLWNRRGEEMTHMGKEQE

SEQ ID NO: 32826 - DNA, 1638 bp, Muscodor strobelii
  misc_feature: SGI cDNA ID NO. 571316
  misc_feature: Encodes the peptide sequence at SEQ ID NO 32827
atggtggtccagcagcacgtcctcaactggctgtacagcgttctgacaagcgaatatcacgatgtgaaccgcacctacaacgatgtagcccaggcgctgtcccagtatccaaccttgtcgccgcgcaccgacgtccacacgtttgacaatggcgtctcggccctcctcgtccacatcaccggcacgctgcccgtcgtcttccgcggcaccacctaccgcttccccgtgtccttctgggtgcctcacgcctacccgcgcgaagctcccctcggctatgtcacgcccaccgacaccatggctgtgaggcccggccagcacgtcgaccccgtcggccgcatataccaccccctacctcgtgcgatgggccgacttctgggatatttccttgccattttgagagatgtcttctccaaggagccccccgttgtctcgcgccaacagcttcgcccagcccagcagcaatccaactcgcccacaccgccgcctgtaccgcctctccctctcgacttgactcggccgagtccacagccaacaccctcagtccatccgaccgattcgcgacctcctcctccgccacccaaaaccagcgatctgccccaagtagtctccagtcctggtgcaagatctgacggtccccctctgcctccacttccccatgacgcacaccagaactataggggatacaccgtcgaacctccccatcatgacccatcaacatcacaccgcatgtctcgctacgactcggcacctccattaccgcctcagatgtcccagcagcaagcccaacccatgccacgagcagaagcgccacctcacccgcacgcttttgtccagtcgcctcccaatgcgcagtttcaggcccagcaacagcagcctggctatcccaatggcccaccaccaattccgtaccagcaatcacaggaccaccgccgtccatcgtatggatcaggacctgctcccggacccccgccgtatcaaggaggacagccaccaaactggcagcagcctcagccacctccccaacaccaacaaccgccaccgcagccgaagcccagacctccgcctccacctgatctaatggacgagcccctaactctgtccttaccgggcccttcagatcttgccccaccccctatcccgcccaaccccgagaaagacgccctcctgcgccagctcgcctcgacactgtacgtcatgcgccagcgcgcccggcaacagaacgaatcctccctcgccggcctgagcgcccaacgcaccgccatgctcgacgccctacaaaatctacagaacgactcagcggcgacagcacccttatcctcgctcctcgcctccaacacagcgattctgcagtcctcgctccaagaagccgatgcggtcataacgaagagcaagacgcagaagccccccgccatcgacgacttgttagtcgcgtcgacagtggtcgggaatcagctgtatgatgttgtggctgaggagagggcgctgggtgatgcgatttttattctaggaagggcggtggaaagaggcaggataagtcctgccgtgtttgctaagacgacgcgcgggttggcgagggagtggtacttgaagaaggcgcttgctaggaagattggacgggggatgggactcgctgggtag

SEQ ID NO: 32827 - protein, 545 aa, Muscodor strobelii
  misc_feature: SGI Peptide ID NO. 571316
  misc_feature (25)..(142): Pfam Id: PF05743 Pfam Desc: UEV domain
  misc_feature (472)..(536): Pfam Id: PF09454 Pfam Desc: Vps23 core domain
  misc_feature (25)..(117): Pfam Id: PF05743 Pfam Desc: UEV domain
  misc_feature (3)..(545): NCBI GI: 261355776 Blast Desc: ESCRT-I component [Verticillium albo-atrum VaMs.102]
  misc_feature (3)..(544): NCBI GI: 225685300 Blast Desc: conserved [Paracoccidioides brasiliensis Pb03]
  misc_feature (3)..(544): NCBI GI: 226294635 Blast Desc: ESCRT-I component [Paracoccidioides brasiliensis Pb18]
  misc_feature (2)..(544): NCBI GI: 240106448 Blast Desc: CPC735_060110 [Coccidioides posadasii C735 delta SOWgp]
  misc_feature (3)..(544): NCBI GI: 226279244 Blast Desc: endosomal sorting complex protein TSG101 [Paracoccidioides brasiliensis Pb01]
  misc_feature (2)..(544): NCBI GI: 119191500 Blast Desc: CIMG_00127 [Coccidioides immitis RS]
  misc_feature (5)..(543): NCBI GI: 242782936 Blast Desc: endosomal sorting complex protein TSG101, [Talaromyces stipitatus ATCC 10500] gi|218720245|gb|EED19664.1| endosomal sorting complex protein TSG101, [Talaromyces stipitatus ATCC
  misc_feature (5)..(543): NCBI GI: 212527186 Blast Desc: endosomal sorting complex protein TSG101, [Penicillium marneffei ATCC 18224] gi|210073148|gb|EEA27235.1| endosomal sorting complex protein TSG101, [Penicillium marneffei ATCC
  misc_feature (358)..(545): NCBI GI: 46111549 Blast Desc: FG02656.1 [Gibberella zeae PH-1]
  misc_feature (358)..(544): NCBI GI: 171677594 Blast Desc: protein product [Podospora anserina] gi|170936865|emb|CAP61523.1| protein product [Podospora anserina]
MVVQQHVLNWLYSVLTSEYHDVNRTYNDVAQALSQYPTLSPRTDVHTFDNGVSALLVHITGTLPVVFRGTTYRFPVSFWVPHAYPREAPLGYVTPTDTMAVRPGQHVDPVGRIYHPLPRAMGRLLGYFLAILRDVFSKEPPVVSRQQLRPAQQQSNSPTPPPVPPLPLDLTRPSPQPTPSVHPTDSRPPPPPPKTSDLPQVVSSPGARSDGPPLPPLPHDAHQNYRGYTVEPPHHDPSTSHRMSRYDSAPPLPPQMSQQQAQPMPRAEAPPHPHAFVQSPPNAQFQAQQQQPGYPNGPPPIPYQQSQDHRRPSYGSGPAPGPPPYQGGQPPNWQQPQPPPQHQQPPPQPKPRPPPPPDLMDEPLTLSLPGPSDLAPPPIPPNPEKDALLRQLASTLYVMRQRARQQNESSLAGLSAQRTAMLDALQNLQNDSAATAPLSSLLASNTAILQSSLQEADAVITKSKTQKPPAIDDLLVASTVVGNQLYDVVAEERALGDAIFILGRAVERGRISPAVFAKTTRGLAREWYLKKALARKIGRGMGLAG

SEQ ID NO: 32828 - DNA, 2335 bp, Muscodor strobelii
  misc_feature: SGI EST ID NO. CUFF.77636.3
  misc_feature: Variant of the nucleotide sequence at SEQ ID NO 32826
tcgaaaacgactgaatgtgggggtttccagctccttttgtcagtaaaactagttatctgcaaattgttagctcatagagggaagatattgtgcaacacagctatatctgcataagccatcatcttagatcagtgatcagcaccccactagtttgcttggcgggccgcatcacgagcctcccaagcctcccaagctttccttgtcgacgtaatcaactccaagagctcgtctccaggtctagctctggtctaggtgtctcagcttcagaccgccttccatactccaactcagcacaatgccactctcgccgcggtagctggctacctgcatgtctgtatcggcaacatggtggtccagcagcacgtcctcaactggctgtacagcgttctgacaagcgaatatcacgatgtgaaccgcacctacaacgatgtagcccaggcgctgtcccagtatccaaccttgtcgccgcgcaccgacgtccacacgtttgacaatggcgtctcggccctcctcgtccacatcaccggcacgctgcccgtcgtcttccgcggcaccacctaccgcttccccgtgtccttctgggtgcctcacgcctacccgcgcgaagctcccctcggctatgtcacgcccaccgacaccatggctgtgaggcccggccagcacgtcgaccccgtcggccgcatataccaccccctacctcgtgcgatgggccgacttctgggataaatcatcactgctagatttccttgccattttgagagatgtcttctccaaggagccccccgttgtctcgcgccaacagcttcgcccagcccagcagcaatccaactcgcccacaccgccgcctgtaccgcctctccctctcgacttgactcggccgagtccacagccaacaccctcagtccatccgaccgattcgcgacctcctcctccgccacccaaaaccagcgatctgccccaagtagtctccagtcctggtgcaagatctgacggtccccctctgcctccacttccccatgacgcacaccagaactataggggatacaccgtcgaacctccccatcatgacccatcaacatcacaccgcatgtctcgctacgactcggcacctccattaccgcctcagatgtcccagcagcaagcccaacccatgccacgagcagaagcgccacctcacccgcacgcttttgtccagtcgcctcccaatgcgcagtttcaggcccagcaacagcagcctggctatcccaatggcccaccaccaattccgtaccagcaatcacaggaccaccgccgtccatcgtatggatcaggacctgctcccggacccccgccgtatcaaggaggacagccaccaaactggcagcagcctcagccacctccccaacaccaacaaccgccaccgcagccgaagcccagacctccgcctccacctgatctaatggacgagcccctaactctgtccttaccgggcccttcagatcttgccccaccccctatcccgcccaaccccgagaaagacgccctcctgcgccagctcgcctcgacactgtacgtcatgcgccagcgcgcccggcaacagaacgaatcctccctcgccggcctgagcgcccaacgcaccgccatgctcgacgccctacaaaatctacagaacgactcagcggcgacagcacccttatcctcgctcctcgcctccaacacagcgattctgcagtcctcgctccaagaagccgatgcggtcataacgaagagcaagacgcagaagccccccgccatcgacgacttgttagtcgcgtcgacagtggtcgggaatcagctgtatgatgttgtggctgaggagagggcgctgggtgatgcgatttttattctaggaagggcggtggaaagaggcaggataagtcctgccgtgtttgctaagacgacgcgcgggttggcgagggagtggtacttgaagaaggcgcttgctaggaagattggacgggggatgggactcgctgggtagtccgaggtcggggttagtgttgattgggaagagggagagcgaagggacgaggtggagataccacattttcgagggtatgggatgaggataggggaatatgtatggtttgtccacaagactatgattgatgaaatggcaataagaagatatggagcttgagcgatgatttgaacgtggttcgtgatttttcctgagcaaggtgatttttgtgatttgtcgcgatcctggggaggaagaagaggtgaggtgagaggctgagatgttgaggatgatgtactggatggactccgacttcattgtggaggtcactggctgtgtttatggagtgcatcattg

SEQ ID NO: 32829 - DNA, 1491 bp, Muscodor strobelii
  misc_feature: SGI cDNA ID NO. 571317
  misc_feature: Reduced expression when VOC is produced
  misc_feature: Encodes the peptide sequence at SEQ ID NO 32830
atgagacctcccatccctaatctttccgactatggaatctcgccaactcacggcttcttgcctgatgtcctgccgttgacgagacttcctgatccatactacaataagtgggaggccattgcctccaacctgcagaacctcatcctcagcaagcgacttcgaggagtcattgaccgtttacctgttctctccaccattggtctggaacatgacgcagaatggcggagggcctacatgatcctcacctttttcgcccatggctacatctggggaggtgacactccctgtgatcgtgtgcctccgtgcatctccgctccgctgcttgatatctgcaaccatctcgaagttcctcccgtgtcgacctatgccgcctcggttctctggaacttcaagcccctctttttcgacgaggatatcgatgacctcgacaacctcgccactttggtcactttcaccggatccatggatgaatcctggttctacctggtttctgtggccattgaagctcgaggtggtcccatcatcaccctaatgctaactgccgtcgctgctgctcgcgaaggagatagcgcaaccgtgatacgttgcctgcatcgctttgccgagcgtctcgacgaccttggcgcgatgttgcgtcgcatgcacgagaagtgcgaccccaactacttctacaatcgcatccgcactttcctcgctggtagcaagaatatggccgaagccggactgccccatggtgtcatctacgacgatggcaaaggcgattccgactacgttcagtatagtggccctagcaatgcccagagcagcctcatccagttctttgacatcattcttggtattgaacatcgtccaaccggtgagaaagccgacggagccggtgagttggagcgtggccggagcggtccacctcaacacaacttcatccgcgatatgcgacgctacatgcctggacctcacgctcgtttcctcaatgacgtcagtaccgtcgccaacattcgcgactttgtcgaagagcgccgcagcacggataagcccctgagcatcgcctacgatgcctgcctcgccatgctgcgagctttccgcgacatccacatcgccatcgtcactcgttacatcgttctcccatcccgcgagaatcgtgctcgcagtcgctctcgcagccccgaggctgtgcgacaccgcgcggcgaatatggtcaccaatcttgctaccgcctcacgccagcaacagtttaagaaggttaaaggcacgggtgggaccgccttgattccattcctcaagcaggcacgggatgaaaccggtgaacctgctgttgaggactgggccaagaagttcatgagtcgacagaccaaggtttctggtcaaaatgactttttcctgggtaaggccgaggaggaagttcatcttgatgatgagcccattgtcgagcatggcttggcggggacttggagtatggattgggagtatgagggtgggatttgccactcttga

SEQ ID NO: 32830 - protein, 496 aa, Muscodor strobelii
  misc_feature: SGI Peptide ID NO. 571317
  misc_feature (4)..(438): Pfam Id: PF01231 Pfam Desc: Indoleamine 2,3-dioxygenase
  misc_feature (1)..(495): NCBI GI: 85093615 Blast Desc: NCU05752 [Neurospora crassa OR74A] gi|28921178|gb|EAA30491.1| NCU05752 [Neurospora crassa OR74A]
  misc_feature (1)..(495): NCBI GI: 116201175 Blast Desc: CHGG_08472 [Chaetomium globosum CBS 148.51] gi|88176990|gb|EAQ84458.1| CHGG_08472 [Chaetomium globosum CBS 148.51]
  misc_feature (1)..(495): NCBI GI: 171677592 Blast Desc: protein product [Podospora anserina] gi|170936864|emb|CAP61522.1| protein product [Podospora anserina]
  misc_feature (1)..(488): NCBI GI: 46111551 Blast Desc: FG02657.1 [Gibberella zeae PH-1]
  misc_feature (1)..(494): NCBI GI: 256726246 Blast Desc: [Nectria haematococca mpVI 77-13-4]
  misc_feature (1)..(495): NCBI GI: 156044408 Blast Desc: SS1G_10307 [Sclerotinia sclerotiorum 1980] gi|154694696|gb|EDN94434.1| SS1G_10307 [Sclerotinia sclerotiorum 1980]
  misc_feature (1)..(394): NCBI GI: 261355777 Blast Desc: indoleamine 2,3-dioxygenase family protein [Verticillium albo-atrum VaMs.102]
  misc_feature (1)..(495): NCBI GI: 189207715 Blast Desc: indoleamine 2,3-dioxygenase family protein [Pyrenophora tritici-repentis Pt-1C-BFP] gi|187976284|gb|EDU42910.1| indoleamine 2,3-dioxygenase family
  misc_feature (1)..(495): NCBI GI: 212527196 Blast Desc: Indoleamine 2,3-dioxygenase subfamily [Penicillium marneffei ATCC 18224] gi|210073153|gb|EEA27240.1| Indoleamine 2,3-dioxygenase subfamily [Penicillium marneffei ATCC 18224]
  misc_feature (1)..(495): NCBI GI: 121706230 Blast Desc: Indoleamine 2,3-dioxygenase subfamily [Aspergillus clavatus NRRL 1] gi|119399524|gb|EAW09952.1| Indoleamine 2,3-dioxygenase subfamily [Aspergillus clavatus NRRL 1]
  misc_feature (8)..(441): SWISSPROT Homolog: EC 1.13.11.52 Indoleamine 2,3-dioxygenase
  misc_feature: Useful for introducing or modulating the production of volatile compounds
MRPPIPNLSDYGISPTHGFLPDVLPLTRLPDPYYNKWEAIASNLQNLILSKRLRGVIDRLPVLSTIGLEHDAEWRRAYMILTFFAHGYIWGGDTPCDRVPPCISAPLLDICNHLEVPPVSTYAASVLWNFKPLFFDEDIDDLDNLATLVTFTGSMDESWFYLVSVAIEARGGPIITLMLTAVAAAREGDSATVIRCLHRFAERLDDLGAMLRRMHEKCDPNYFYNRIRTFLAGSKNMAEAGLPHGVIYDDGKGDSDYVQYSGPSNAQSSLIQFFDIILGIEHRPTGEKADGAGELERGRSGPPQHNFIRDMRRYMPGPHARFLNDVSTVANIRDFVEERRSTDKPLSIAYDACLAMLRAFRDIHIAIVTRYIVLPSRENRARSRSRSPEAVRHRAANMVTNLATASRQQQFKKVKGTGGTALIPFLKQARDETGEPAVEDWAKKFMSRQTKVSGQNDFFLGKAEEEVHLDDEPIVEHGLAGTWSMDWEYEGGICHS

SEQ ID NO: 32831 - DNA, 2262 bp, Muscodor strobelii
  misc_feature: SGI EST ID NO. CUFF.77547.0
  misc_feature: Variant of the nucleotide sequence at SEQ ID NO 32829
aaaatcttcaactttgtttaaaagaggcgcacctccatcgcgagtcgcctttctctttctctttttcctcagtttcaatcatctcgaaacactaccaattgcttctatcagttttgcaactgcatgcgcgtttctcaacagatcttcgcacggctgaggagtattacaggattcactgtatactccttgcgtcaggaattaacttcttaatcacctaaactaccgttgctcaccactacctgagcccagcagcctcgcctagtgacgagtagccccgtcactcctgtacctgagcattgctagacagtatcattattgctagattgaaagctcggtccttctttgttttccaggagacttgatcaaccgagtcagaattgttggagtgtggcaacttcgcctgaagacaaagaacagcctcgtcatgagacctcccatccctaatctttccgactatggaatctcgccaactcacggcttcttgcctgatgtcctgccgttgacgagacttcctgatccatactacaataagtgggaggccattgcctccaacctgcagaacctcatcctcagcaagcgacttcgaggagtcattgaccgtttacctgttctctccaccattggtctggaacatgacgcagaatggcggagggcctacatgatcctcacctttttcgcccatggctacatctggggaggtgacactccctgtgatcgtgtgcctccgtgcatctccgctccgctgcttgatatctgcaaccatctcgaagttcctcccgtgtcgacctatgccgcctcggttctctggaacttcaagcccctctttttcgacgaggatatcgatgacctcgacaacctcgccactttggtcactttcaccggatccatggatgaatcctggttctacctggtttctgtggccattgaagctcgaggtggtcccatcatcaccctaatgctaactgccgtcgctgctgctcgcgaaggagatagcgcaaccgtgatacgttgcctgcatcgctttgccgagcgtctcgacgaccttggcgcgatgttgcgtcgcatgcacgagaagtgcgaccccaactacttctacaatcgcatccgcactttcctcgctggtagcaagaatatggccgaagccggactgccccatggtgtcatctacgacgatggcaaaggcgattccgactacgttcagtatagtggccctagcaatgcccagagcagcctcatccagttctttgacatcattcttggtattgaacatcgtccaaccggtgagaaagccgacggagccggtgagttggagcgtggccggagcggtccacctcaacacaacttcatccgcgatatgcgacgctacatgcctggacctcacgctcgtttcctcaatgacgtcagtaccgtcgccaacattcgcgactttgtcgaagagcgccgcagcacggataagcccctgagcatcgcctacgatgcctgcctcgccatgctgcgagctttccgcgacatccacatcgccatcgtcactcgttacatcgttctcccatcccgcgagaatcgtgctcgcagtcgctctcgcagccccgaggctgtgcgacaccgcgcggcgaatatggtcaccaatcttgctaccgcctcacgccagcaacagtttaagaaggttaaaggcacgggtgggaccgccttgattccattcctcaagcaggcacgggatgaaaccggtgaacctgctgttgaggactgggccaagaagttcatgagtcgacagaccaaggtttctggtcaaaatgactttttcctgggtaaggccgaggaggaagttcatcttgatgatgagcccattgtcgagcatggcttggcggggacttggagtatggattgggagtatgagggtgggatttgccactcttgatttaggatgagaagatagacctgtgataaaacattcttggacaatcttcaatacgctcttttgatgtagccagaagattttggccaagtgagacagacacatcacaatacagacatcagaaaattaaaaaaggaacacaagtgtactaaattgacggatcccgtgatcacgcgcaagagtttgcccctcatcaaaataattggaatgacttggaccacaatactctgttacacaatgtttcccaccaatgatgtatcctgagatcggcaaacattgcccttgtcacctagcactgcgaacagatcatatagatatgtcagtgagatgtatatgttgacacatgctag

SEQ ID NO: 32832 - DNA, 345 bp, Muscodor strobelii
  misc_feature: SGI cDNA ID NO. 571318
  misc_feature: Encodes the peptide sequence at SEQ ID NO 32833
atgatggtcggatatctagatttggtcttcatgccgaaggatacgtacagccaagggatcaaaaaggagacggttcctatccgacactggcccggtttcaccattgagcagcggtgggctaacttggacaaaaatcgcttcgatttccttcccaacgtcactcgtaccacggacttccgctccaagatgaaccccaaagagaacgagaaccagaagcatcatccaggtcgccagtcccgtccttctggttcgtttagtgaaggcactgtcgagcttactgtcaagattcatcggcttgagagtgacgatgacaatctcgccggcgtcgtgaataccggactgtag

SEQ ID NO: 32833 - protein, 114 aa, Muscodor strobelii
  misc_feature: SGI Peptide ID NO. 571318
MMVGYLDLVFMPKDTYSQGIKKETVPIRHWPGFTIEQRWANLDKNRFDFLPNVTRTTDFRSKMNPKENENQKHHPGRQSRPSGSFSEGTVELTVKIHRLESDDDNLAGVVNTGL

SEQ ID NO: 32834 - DNA, 843 bp, Muscodor strobelii
  misc_feature: SGI cDNA ID NO. 571319
  misc_feature: Encodes the peptide sequence at SEQ ID NO 32835
atggcgccgcacttcgccaacggtgacgacaagggtacgagctatccgtgggatgatagccagccacctggtggctatggctcaacctcaacggctatggtgtgggctggatctcagtggatctcgggcgattcaagccaatatcctgtgaatggcttcaagacatcgtcttacgacgtcctcgaccgtattgttcgctggtacggcgacaagtcaatgttcccgaatctcaaaacagttgtgctggcaggccactccgccggtgcgcaaaccgtgcaacgctatgccgcagttggcagagatcttacggacgcattgaacggaacacgactcatttactctataagcaatccaaacagtttcgtgtggctcaacagtagccgaccattggacacgtcgtcctgtcctgactacaacgactggcgcgagggtcttgacaacttcaacgtgccttataacacggagatcgtcgcccagggccccgaagccgttgcggccaattatggcaaaaagggcattgcgtacggccgcgggctgcttgacgttggcggttttaatgatagctgcagagacaacactcaaggcgcaaaccggcatgagcgctttttgaacttcattgccgccttcacacccacttgcgatgaaccgaccagccctgactgcgacacagttgactacgtcaataccacgcataacgaggctgaaatgtgggctgcggactcgggaaaagcacgtctctttctggataatttcgatggcgacaacattcgcgcgcctgacttctggtgccctcgcatatctcccagcgacgatccgtacccagatccgaaatgccacagctag

SEQ ID NO: 32835 - protein, 280 aa, Muscodor strobelii
  misc_feature: SGI Peptide ID NO. 571319
  misc_feature (1)..(253): NCBI GI: 71004158 Blast Desc: UM00598.1 [Ustilago maydis 521] gi|46096014|gb|EAK81247.1| UM00598.1 [Ustilago maydis 521]
  misc_feature (33)..(249): NCBI GI: 71023461 Blast Desc: UM05813.1 [Ustilago maydis 521] gi|46101525|gb|EAK86758.1| UM05813.1 [Ustilago maydis 521]
  misc_feature (31)..(247): NCBI GI: 66047517 Blast Desc: Psyr_4290 [Pseudomonas syringae pv. syringae B728a] gi|63258224|gb|AAY39320.1| conserved domain protein [Pseudomonas syringae pv. syringae B728a]
  misc_feature (30)..(247): NCBI GI: 28871790 Blast Desc: PSPTO_4658 [Pseudomonas syringae pv. tomato str. DC3000] gi|28855042|gb|AAO58104.1| conserved domain protein [Pseudomonas syringae pv. tomato str. DC3000]
  misc_feature (30)..(247): NCBI GI: 213966779 Blast Desc: conserved [Pseudomonas syringae pv. tomato T1] gi|213928629|gb|EEB62173.1| conserved [Pseudomonas syringae pv. tomato T1]
  misc_feature (30)..(247): NCBI GI: 257482164 Blast Desc: PsyrptA_02782 [Pseudomonas syringae pv. tabaci ATCC 11528]
  misc_feature (30)..(247): NCBI GI: 237801469 Blast Desc: Psyrpo1_21746 [Pseudomonas syringae pv. oryzae str. 1_6]
  misc_feature (1)..(252): NCBI GI: 71006758 Blast Desc: UM01897.1 [Ustilago maydis 521] gi|46097545|gb|EAK82778.1| UM01897.1 [Ustilago maydis 521]
  misc_feature (30)..(247): NCBI GI: 71737904 Blast Desc: PSPPH_4348 [Pseudomonas syringae pv. phaseolicola 1448A] gi|71558457|gb|AAZ37668.1| conserved [Pseudomonas syringae pv. phaseolicola 1448A] gi|115265673|dbj|BAF32934.1| conserved
  misc_feature (33)..(201): NCBI GI: 91777529 Blast Desc: Bxe_B2606 [Burkholderia xenovorans LB400] gi|91690189|gb|ABE33387.1| Conserved [Burkholderia xenovorans LB400]
MAPHFANGDDKGTSYPWDDSQPPGGYGSTSTAMVWAGSQWISGDSSQYPVNGFKTSSYDVLDRIVRWYGDKSMFPNLKTVVLAGHSAGAQTVQRYAAVGRDLTDALNGTRLIYSISNPNSFVWLNSSRPLDTSSCPDYNDWREGLDNFNVPYNTEIVAQGPEAVAANYGKKGIAYGRGLLDVGGFNDSCRDNTQGANRHERFLNFIAAFTPTCDEPTSPDCDTVDYVNTTHNEAEMWAADSGKARLFLDNFDGDNIRAPDFWCPRISPSDDPYPDPKCHS

SEQ ID NO: 32836 - DNA, 404 bp, Muscodor strobelii
  misc_feature: SGI EST ID NO. CUFF.77559.0
  misc_feature: Variant of the nucleotide sequence at SEQ ID NO 32834
ctggatctcagtggatctcgggcgattcaagccaatatcctgtgaatggcttcaagacatcgtcttacgacgtcctcgaccgtattgttcgctggtacggcgacaagtcaatgttcccgaatctcaaaacagttgtgctggcaggccactccgccggtgcgcaaaccgtgcaacgctatgccgcagttggcagagatcttacggacgcattgaacggaacacgactcatttactctataagcaatccaaacagtttcgtgtggctcaacagtagccgaccattggacacgtcgtcctgtcctgactacaacgactggcgcgagggtcttgacaacttcaacgtgccttataacacggagatcgtcgcccagggccccgaagccgttgcggccaattatggcaaa

SEQ ID NO: 32837 - DNA, 750 bp, Muscodor strobelii
  misc_feature: SGI cDNA ID NO. 571320
  misc_feature: Elevated expression when VOC is produced
  misc_feature: Encodes the peptide sequence at SEQ ID NO 32838
atgaattatagcacggcggaatggggcttgggcttctttccgccaaatattgtcgcattgcccggtgcatggaatagttcttcgcatgttcctaataattcactcgtgatcgaatacgccggacgagcagacactgatagcagggcaaccgaggcaattgtgtttggcgtcgtctctgccgtagccatctctcttcttatcgtctggctctacttcaaccggaaaaccttattccatcctctcaactcacaaagagaaaatcaacaacaacgagcgagtatccacacggccgatgctacggtcaattccacagcatcaactgagctgaactctctgctggataacaaagataacaaattctggggggctgatgaattcaaagaccagcttttcaacttctattacgaggccgtctactctgagattgaatctgcagaaaagagtctgaacgacggcatcgactccgacgatattgaagctgccacagaccttgtacgcaagatgtacgggctacagctctatctttggtcgcaccaaaatagccaaaatttcaccgagcaacagacgaacgagatcatgtcaaagatcgctgccatccaagaagccgttgggaaccaaataaggcactgggctgcggacagtcgcaatccgatgtcaacgacagcatggacggaagaggagagaaatatgttgggccagctttacaacttggtagaaggagtacatcacgagcaatattttgcacaatga

SEQ ID NO: 32838 - protein, 249 aa, Muscodor strobelii
  misc_feature: SGI Peptide ID NO. 571320
  misc_feature (1)..(238): NCBI GI: 170940082 Blast Desc: protein product [Podospora anserina]
  misc_feature: Useful for introducing or modulating the production of volatile compounds
MNYSTAEWGLGFFPPNIVALPGAWNSSSHVPNNSLVIEYAGRADTDSRATEAIVFGVVSAVAISLLIVWLYFNRKTLFHPLNSQRENQQQRASIHTADATVNSTASTELNSLLDNKDNKFWGADEFKDQLFNFYYEAVYSEIESAEKSLNDGIDSDDIEAATDLVRKMYGLQLYLWSHQNSQNFTEQQTNEIMSKIAAIQEAVGNQIRHWAADSRNPMSTTAWTEEERNMLGQLYNLVEGVHHEQYFAQ

SEQ ID NO: 32839 - DNA, 1128 bp, Muscodor strobelii
  misc_feature: SGI EST ID NO. CUFF.77565.1
  misc_feature: Variant of the nucleotide sequence at SEQ ID NO 32837
gtttgattcatcaacttgtactgctcaaggagctggaaatcttttcctcattatgcatcaactgtttccttgttttgctgtcgaattctaaatcccaacctttttctccaaaagacgtcctagatggaatcgtgggggaattacaactactatacaacgaattcgacacgatgggtcgagctcatgaattatagcacggcggaatggggcttgggcttctttccgccaaatattgtcgcattgcccggtgcatggaatagttcttcgcatgttcctaataattcactcgtgatcgaatacgccggacgagcagacactgatagcagggcaaccgaggcaattgtgtttggcgtcgtctctgccgtagccatctctcttcttatcgtctggctctacttcaaccggaaaaccttattccatcctctcaactcacaaagagaaaatcaacaacaacgagcgagtatccacacggccgatgctacggtcaattccacagcatcaactgagctgaactctctgctggataacaaagataacaaattctggggggctgatgaattcaaagaccagcttttcaacttctattacgaggccgtctactctgagattgaatctgcagaaaagagtctgaacgacggcatcgactccgacgatattgaagctgccacagaccttgtacgcaagatgtacgggctacagctctatctttggtcgcaccaaaatagccaaaatttcaccgagcaacagacgaacgagatcatgtcaaagatcgctgccatccaagaagccgttgggaaccaaataaggcactgggctgcggacagtcgcaatccgatgtcaacgacagcatggacggaagaggagagaaatatgttgggccagctttacaacttggtagaaggagtacatcacgagcaatattttgcacaatgatccttggaagaattgatggaagctctatatacccaatcatagttcatttggggttactaatataaggtcatgagcacaacttgttctaggaagcacaacttgttccaggcgagattgtaccatttaatatattatgtgatgatgcagatagcgttgcatacgtctcttgatgtatgtgatcaatagaaatggctc

SEQ ID NO: 32840 - DNA, 810 bp, Muscodor strobelii
  misc_feature: SGI cDNA ID NO. 571321
  misc_feature: Encodes the peptide sequence at SEQ ID NO 32841
atggaatcgtgggggaattacaactactatacaacgaattcgacacgatgggtcgagctcatgaattatagcacggcggaatggggcttgggcttctttccgccaaatattgtcgcattgcccggtgcatggaatagttcttcgcatgttcctaataattcactcgtgatcgaatacgccggacgagcagacactgatagcagggcaaccgaggcaattgtgtttggcgtcgtctctgccgtagccatctctcttcttatcgtctggctctacttcaaccggaaaaccttattccatcctctcaactcacaaagagaaaatcaacaacaacgagcgagtatccacacggccgatgctacggtcaattccacagcatcaactgagctgaactctctgctggataacaaagataacaaattctggggggctgatgaattcaaagaccagcttttcaacttctattacgaggccgtctactctgagattgaatctgcagaaaagagtctgaacgacggcatcgactccgacgatattgaagctgccacagaccttgtacgcaagatgtacgggctacagctctatctttggtcgcaccaaaatagccaaaatttcaccgagcaacagacgaacgagatcatgtcaaagatcgctgccatccaagaagccgttgggaaccaaataaggcactgggctgcggacagtcgcaatccgatgtcaacgacagcatggacggaagaggagagaaatatgttgggccagctttacaacttggtagaaggagtacatcacgagcaatattttgcacaatga

SEQ ID NO: 32841 - protein, 269 aa, Muscodor strobelii
  misc_feature: SGI Peptide ID NO. 571321
  misc_feature (12)..(258): NCBI GI: 170940082 Blast Desc: protein product [Podospora anserina]
MESWGNYNYYTTNSTRWVELMNYSTAEWGLGFFPPNIVALPGAWNSSSHVPNNSLVIEYAGRADTDSRATEAIVFGVVSAVAISLLIVWLYFNRKTLFHPLNSQRENQQQRASIHTADATVNSTASTELNSLLDNKDNKFWGADEFKDQLFNFYYEAVYSEIESAEKSLNDGIDSDDIEAATDLVRKMYGLQLYLWSHQNSQNFTEQQTNEIMSKIAAIQEAVGNQIRHWAADSRNPMSTTAWTEEERNMLGQLYNLVEGVHHEQYFAQ

SEQ ID NO: 32842 - DNA, 1128 bp, Muscodor strobelii; identical to SEQ ID NO: 32839
  misc_feature: SGI EST ID NO. CUFF.77565.1
  misc_feature: Variant of the nucleotide sequence at SEQ ID NO 32840

SEQ ID NO: 32843 - DNA, 1944 bp, Muscodor strobelii
  misc_feature: SGI cDNA ID NO. 571322
  misc_feature: Elevated expression when VOC is produced
  misc_feature: Encodes the peptide sequence at SEQ ID NO 32844
atggcaattccaccgcgcgcaccacacaattccaacagccctcgcttgataatcagcattgattatgggacaacatatactggtgcggcatgggttcttacaacagccgatgcaccgaaactggacgacatcaatgttgtgatgaaatggccaggcgggaacgagcctaaagtgccatctgttttcacatactctgacaatgccggcgaccaatggggttatggtattggagataatgcatacgtaatcgagtggactaagatgcaattggagaaacccaataaactagacgctcttgagtcattatggcaaacactccgcgaggccgaacagctagacttcactcagaggtcgatggcaagacgtataccacgccatttaattaaaacgccaccagatatcatgacagactatctaactcgagttgctgccgtcgttcgccatgatattcgtaacaaaaaaatggaagaagttctcaggaagtttccaatcgatttaatcatcacacatcccgctatatgggatgcgcgggcccgaaacgccacttctcgtgctgtcatgaaagctttcgagtatgagttttcgatgtctgacttgccccgcggggatgtcagactggtcactgaacctgaggcttgtgcgaggtatactattgcttttgaaaaggggaaggaaatgctcaaaaagagagactgtttcatcgttgtggatgctggcgggggcactgttgatctagtctcataccgcgttgactcagtcaatccgagcctcagtgtgtcaatggtgacagatgtgtccagtggaagatacggcgcgactttgatcgaccagtatttcctgaagaggtttttgcccgaatgcctaggcgaagaagagcatgcaagatttcttgcagttggcgcctccggagaacacggaagcggagcacacatggtgcttcgtcgaggcgagagaatcgtgctacctaaattccaaactttcaagcactctttcaaggggcggctttctccgaatgagtctggtctaaaacaagtaaacattgagcttccggaaggtattggcgaattcgagaagccggagcgcaacatttactacgggaaaattcgggtcacaaccgaacacatggaggaaatgttcaaagtatcggttgatggaacgcttgatctgattgacaagcagatcgtacaaatagatcacgcggggctacggccaaaggcaatctttctctcgggcggcttctcacgaagcgaatatctctttcgtcgagtcactgaatacgcacgtaaccggagaatacatgttctccgcggggaggacagctggacagcagttgtaaagggtgcaacactaatgggattaggaatggactgcgagaggccaccagctaacgcaagttgcccttaccacattggagtcctcctagcggaacgattcacaacatattctcaccaggaatgccagagatacaaagacacttttgatacagtgtcccgtgcaaaggacaacatcaaatgggtagtggacaaagatgacctgattacgcctgaggaaggaattgagaagaaagttaaaataatccaaagagtaactcgagcaggcaaaaaagccggcagagtagtggttgtgctttcgaagcatgaaggccgaaaagacgagttttgtcgcctaagtgatctactaaagtccgaagacgcgacacgccaagtcatcaatctggattatgagcttgagagcattcccgaggcagcgcgcagagagtgctacaagagcgtcacagatccgcagtcgggtataacctaccacaaagttgagatgcaattggaggtgtctgttacgattgctgaaggaattcgccttgatctcatggcaggtgccagggaggattatttaggtggcacagctagaattggacatagactagcatcgcaggcatttccaatgtag

SEQ ID NO: 32844 - protein, 647 aa, Muscodor strobelii
  misc_feature: SGI Peptide ID NO. 571322
  misc_feature (10)..(611): NCBI GI: 170940081 Blast Desc: protein product [Podospora anserina]
  misc_feature (13)..(543): NCBI GI: 256730500 Blast Desc: NECHADRAFT_74085 [Nectria haematococca mpVI 77-13-4]
  misc_feature (4)..(515): NCBI GI: 85110078 Blast Desc: NCU09471 [Neurospora crassa OR74A] gi|28924896|gb|EAA33990.1| [Neurospora crassa OR74A] gi|38524254|emb|CAE75719.1| conserved [Neurospora crassa]
  misc_feature (42)..(517): NCBI GI: 171689760 Blast Desc: protein product [Podospora anserina] gi|170944842|emb|CAP70954.1| protein product [Podospora anserina]
  misc_feature (4)..(534): NCBI GI: 256725387 Blast Desc: NECHADRAFT_83217 [Nectria haematococca mpVI 77-13-4]
  misc_feature (13)..(618): NCBI GI: 189192993 Blast Desc: Hsp70 family protein [Pyrenophora tritici-repentis Pt-1C-BFP] gi|187978399|gb|EDU45025.1| Hsp70 family protein [Pyrenophora tritici-repentis Pt-1C-BFP]
  misc_feature (13)..(618): NCBI GI: 189206526 Blast Desc: Hsp70 family protein [Pyrenophora tritici-repentis Pt-1C-BFP] gi|187975690|gb|EDU42316.1| Hsp70 family protein [Pyrenophora tritici-repentis Pt-1C-BFP]
  misc_feature (11)..(621): NCBI GI: 119497699 Blast Desc: NFIA_032750 [Neosartorya fischeri NRRL 181] gi|119413771|gb|EAW23710.1| NFIA_032750 [Neosartorya fischeri NRRL 181]
  misc_feature (15)..(509): NCBI GI: 169606540 Blast Desc: SNOG_06313 [Phaeosphaeria nodorum SN15] gi|160707020|gb|EAT86144.2| SNOG_06313 [Phaeosphaeria nodorum SN15]
  misc_feature (16)..(453): NCBI GI: 67900766 Blast Desc: AN7370.2 [Aspergillus nidulans FGSC A4] gi|40742551|gb|EAA61741.1| AN7370.2 [Aspergillus nidulans FGSC A4] gi|259483271|tpe|CBF78521.1| TPA: conserved [Aspergillus FGSC
  misc_feature: Useful for introducing or modulating the production of volatile compounds
MAIPPRAPHNSNSPRLIISIDYGTTYTGAAWVLTTADAPKLDDINVVMKWPGGNEPKVPSVFTYSDNAGDQWGYGIGDNAYVIEWTKMQLEKPNKLDALESLWQTLREAEQLDFTQRSMARRIPRHLIKTPPDIMTDYLTRVAAVVRHDIRNKKMEEVLRKFPIDLIITHPAIWDARARNATSRAVMKAFEYEFSMSDLPRGDVRLVTEPEACARYTIAFEKGKEMLKKRDCFIVVDAGGGTVDLVSYRVDSVNPSLSVSMVTDVSSGRYGATLIDQYFLKRFLPECLGEEEHARFLAVGASGEHGSGAHMVLRRGERIVLPKFQTFKHSFKGRLSPNESGLKQVNIELPEGIGEFEKPERNIYYGKIRVTTEHMEEMFKVSVDGTLDLIDKQIVQIDHAGLRPKAIFLSGGFSRSEYLFRRVTEYARNRRIHVLRGEDSWTAVVKGATLMGLGMDCERPPANASCPYHIGVLLAERFTTYSHQECQRYKDTFDTVSRAKDNIKWVVDKDDLITPEEGIEKKVKIIQRVTRAGKKAGRVVVVLSKHEGRKDEFCRLSDLLKSEDATRQVINLDYELESIPEAARRECYKSVTDPQSGITYHKVEMQLEVSVTIAEGIRLDLMAGAREDYLGGTARIGHRLASQAFPM

SEQ ID NO: 32845 - DNA, 1423 bp, Muscodor strobelii
  misc_feature: SGI EST ID NO. CUFF.77566.2
  misc_feature: Variant of the nucleotide sequence at SEQ ID NO 32843
gggcactgttgatctagtctcataccgcgttgactcagtcaatccgagcctcagtgtgtcaatggtgacagatgtgtccagtggaagatacggcgcgactttgatcgaccagtatttcctgaagaggtttttgcccgaatgcctaggcgaagaagagcatgcaagatttcttgcagttggcgcctccggagaacacggaagcggagcacacatggtgcttcgtcgaggcgagagaatcgtgctacctaaattccaaactttcaagcactctttcaaggggcggctttctccgaatgagtctggtctaaaacaagtaaacattgagcttccggaaggtattggcgaattcgagaagccggagcgcaacatttactacgggaaaattcgggtcacaaccgaacacatggaggaaatgttcaaagtatcggttgatggaacgcttgatctgattgacaagcagatcgtacaaatagatcacgcggggctacggccaaaggtaacgaaaaattcgtcaatttcagcgatccgcaatctttctctcgggcggcttctcacgaagcgaatatctctttcgtcgagtcactgaatacgcacgtaaccggagaatacatgttctccgcggggaggacagctggacagcagttgtaaagggtgcaacactaatgggattaggaatggactgcgagaggccaccagctaacgcaagttgcccttaccacattggagtcctcctagcggaacgattcacaacatattctcaccaggaatgccagagatacaaagacacttttgatacagtgtcccgtgcaaaggacaacatcaaatgggtagtggacaaagatgacctgattacgcctgaggaaggaattgagaagaaagttaaaataatccaaagagtaactcgagcaggcaaaaaagccggcagagtagtggttgtgctttcgaagcatgaaggccgaaaagacgagttttgtcgcctaagtgatctactaaagtccgaagacgcgacacgccaagtcatcaatctggattatgagcttgagagcattcccgaggcagcgcgcagagagtgctacaagagcgtcacagatccgcagtcgggtataacctaccacaaagttgagatgcaattggaggtgtctgttacgattgctgaaggaattcgccttgatctcatggcaggtgccagggaggattatttaggtggcacagctagaattggacatagactagcatcgcaggcatttccaatgtagataacttaagaaactggaacacatgagatgacgaggctgttgaatagaacgtctagatttcaaaaaaaagaaagaagaaaaaaactccacttggttaagtagcatggggtccgtatcaattgttttagttattgtgaagagtctatatgtgtgtatggggggtgaaa

SEQ ID NO: 32846 - DNA, 3696 bp, Muscodor strobelii
  misc_feature: SGI cDNA ID NO. 571323
  misc_feature: Encodes the peptide sequence at SEQ ID NO 32847
atggggggtaacacctcagcttcaaatgaagacgttgggcaaatcaaggatgatcagcacactccagctatgtcagagaccggcgtaggaagtgtagcgtctataacggaaccatttcaccagttcgatggaacaactctgatgggacataaacttacaccactcgatcccgggcgcacatactcttacggagacaatcacaccctactagatgtaactaagaacgagaacaacttcccttcagagacctcacagcacgaccatcgcttctcggatgcaagctcggccattcgagccaagcatacagagcatacaacgcagcactcaggcttcgtgcaccgtccgttgccatcagagctttcggcagatgagacacagaagcaaatcccgagagttgagctaccggcagacgatgcaaagatcaaggagccagggccacttgttgttgagagtttgcctagagttagcccagagcatggagtgtattcgtcagaagtccacgaagagtcgtttttggatgatcagtcggtgaatggtgatctctcgttgaccttcccggaaacgaggacattgtcttcaagctctaaaattcagtccaatcttgacaacgacagaagtcagagaccggaaattaatgaaagatttgatcttattcaagctgaccatatgaaagatactgtgcctgattttctggtcccaggccaacgtcaaaggtcatttccgttatctgatcacagtccagagcaccagaacagctcaccacgaaccaattcatcccatattcaatccaagagattgccaatctcaaggcaagcagcgcctaacacagaagcagatgtcccatttcatgcagactctgctgctgttaagaggcatcctcaacgcagtgacatgagatggacgaacggtgaagggtctgaagaaatgcctgtgctatattcatatcctgctaccgcaaccactgagctgcaaagcctgacttctcgcatacaaaaggctttacaagataatcatgtgcaaagggtgcagggagccgatgacctttccaccttgctgtgttggttctcagcggagatggagaggcttaataaacagcaaaaggacgccaataccccaatctctcctgaagacatgaaaattcgggacaagaaatcgcttcagaaagagctgggaaaattgacaaaggagaatcaatcattgtcctcttataagtctaaatatgacgacgccaaacagagggtaaacaccgcccaaaagaaaaccactacactcgagcaagagctggcacggtcgcgaaaagagcaaacccgaactcaccttgaagctacacagctaaaggaaaagctgagtcagacactcaccaatctggatcaggttaaaggagaattttcttctaggctgaatgcaacagagtgcgagcgtgacaacattagacaaaaactctctgatgcgacggcggatttagagaagtctgcgatccagcatgatcaattacgtcagcagatcaatcagttcagacgtaccgtggaccatctgcagcaaatgaactcagatattgtacgaaaggcagaacaggacatgtttgctgccacttctaggcacgaagacgaggtatataaattgaaacagaaggcgagtcacgacattcttactattaatatgaagcatgaagaagagatatcacgtataaaatccgaacattcccacgctattgcgacagtaacgtcaaaacttgaacacaaggtcaagcaacaatatcaggaaatgcagacaacgattgacgagaaagagcgaactattgcagatcaggacatgcggatcgcgacgtacagtagaccatcacacgggctgatctcggatggtgacttgaaccaccgatttcgagatctatcgatgaagctagatgatctagttgagtcatttcctcgaccaaggcaatatgcagtagacagcatacttgaccccaataacttcctaggccgaaacgcggcccgtggacataggatatggcctcagttcgtacgcatggtctgttgggacgtagttattaatggattcttcaagcaccagccaggcttcggtgcctttggcaaccagggcgagggtcattcaactttgatgcatctgtaccgactttttgcccctactattacacatgaaacaaatgatgtagtatgcattttccctaatgataagaagtctaacgattggagggctgctatgttttctgctatttcaaaagaaatcaatgctacactaacagagtctaccgtcgtcggcttcccacgatttttccgcgaaaacgcacgggcagttgctagtgacctagctacggctcttgaacatacatgtcaaaaagcgcctaatgtgcaatgcactcgcagcatccttgagctttgtaacgagtttggagtcttatcagtagagatgggctcccaacaatcactaatagtgcttgagacatgccatcatcggcaatggatcaagtctggcctttcattcaaagatgataatagctacagcgagggtgacttgcaagttgacataatggttcaaccatcgctgaagcgcattggcgacggaactgatactaccaaagaaaaggtcctggctgtcggtgacattgtctccctgcgagcggggaccattttgattggaactgctctgctctcattctggtatttctttgcagtcctcgatagatggcttcattacgaccagcgagacgtggtttacggttacattttcgtcatgccaatctttgagaccacgcgcgtagcatcaagcgtgtactacctatggggcacgtacacagtaatctggcgagagttagaagagcgcttcgagagaaaacaacaaggatattggtggtttgccgcgaaattcttcattggcatagtcggacttgtatcaacctactatgttattctccaaatcgcacaagccggggtatgggtcgatttccgaagcctcaacactatagccgacatcgctactaagaggacaggcttcgaaattgccatgaatgtcttcttcttcgttttcggccttattacattggccgctgctagtgcttctttactctggaaggctagaagaatagatggaggagtaccaaaaaatcgagttttcctgctcctctccgcactcatacttctcgtgcgttccatattcgaactggcacttaccgccaaagccgcgggccccgatgctacacgccaaagtcttttgccggccaaagacgtcggttacggcattatcactgtcttatacttaggcttcatgtacattacagcacgcgtggtatctaccgacttcgatcgcggcggaagacaggcgcgtcttatcgaatccgacgtgcgacttgcagttctgaagcagctacaacaagcgacagaagggggtcgtcgagagtcgccaccatttttgcaggtcatagaccaaatcagcaatgatctggatacggtccttcgagatggtcccctatctgcgaagtctagtcttagcattgcccataaacatcaagcagcagcttcttgctttcagaagcttcgtgaacaatatagtagcctagatcccagagaaggaagagattatgcaggcggacttcaaaccaatccatacgagaacatgcgtctcgaaggcacgtatcagcaggtcaccccccaagacctccctctaccgtgcctaccatga

SEQ ID NO: 32847 - protein, 1231 aa, Muscodor strobelii
  misc_feature: SGI Peptide ID NO. 571323
  misc_feature (328)..(881): NCBI GI: 256730714 Blast Desc: NECHADRAFT_74084 [Nectria haematococca mpVI 77-13-4]
  misc_feature (524)..(879): NCBI GI: 170940079 Blast Desc: protein product [Podospora anserina]
  misc_feature (1069)..(1207): NCBI GI: 170940078 Blast Desc: protein product [Podospora anserina]
  misc_feature (324)..(877): NCBI GI: 85110080 Blast Desc: NCU09472 [Neurospora crassa OR74A] gi|28924897|gb|EAA33991.1| [Neurospora crassa OR74A] gi|38524255|emb|CAE75720.1| related to interaptin (abpD) crassa]
  misc_feature (382)..(875): NCBI GI: 171689762 Blast Desc: protein product [Podospora anserina] gi|170944843|emb|CAP70955.1| protein product [Podospora anserina]
  misc_feature (533)..(876): NCBI GI: 171677384 Blast Desc: protein product [Podospora anserina] gi|170936760|emb|CAP61418.1| protein product [Podospora anserina]
MGGNTSASNEDVGQIKDDQHTPAMSETGVGSVASITEPFHQFDGTTLMGHKLTPLDPGRTYSYGDNHTLLDVTKNENNFPSETSQHDHRFSDASSAIRAKHTEHTTQHSGFVHRPLPSELSADETQKQIPRVELPADDAKIKEPGPLVVESLPRVSPEHGVYSSEVHEESFLDDQSVNGDLSLTFPETRTLSSSSKIQSNLDNDRSQRPEINERFDLIQADHMKDTVPDFLVPGQRQRSFPLSDHSPEHQNSSPRTNSSHIQSKRLPISRQAAPNTEADVPFHADSAAVKRHPQRSDMRWTNGEGSEEMPVLYSYPATATTELQSLTSRIQKALQDNHVQRVQGADDLSTLLCWFSAEMERLNKQQKDANTPISPEDMKIRDKKSLQKELGKLTKENQSLSSYKSKYDDAKQRVNTAQKKTTTLEQELARSRKEQTRTHLEATQLKEKLSQTLTNLDQVKGEFSSRLNATECERDNIRQKLSDATADLEKSAIQHDQLRQQINQFRRTVDHLQQMNSDIVRKAEQDMFAATSRHEDEVYKLKQKASHDILTINMKHEEEISRIKSEHSHAIATVTSKLEHKVKQQYQEMQTTIDEKERTIADQDMRIATYSRPSHGLISDGDLNHRFRDLSMKLDDLVESFPRPRQYAVDSILDPNNFLGRNAARGHRIWPQFVRMVCWDVVINGFFKHQPGFGAFGNQGEGHSTLMHLYRLFAPTITHETNDVVCIFPNDKKSNDWRAAMFSAISKEINATLTESTVVGFPRFFRENARAVASDLATALEHTCQKAPNVQCTRSILELCNEFGVLSVEMGSQQSLIVLETCHHRQWIKSGLSFKDDNSYSEGDLQVDIMVQPSLKRIGDGTDTTKEKVLAVGDIVSLRAGTILIGTALLSFWYFFAVLDRWLHYDQRDVVYGYIFVMPIFETTRVASSVYYLWGTYTVIWRELEERFERKQQGYWWFAAKFFIGIVGLVSTYYVILQIAQAGVWVDFRSLNTIADIATKRTGFEIAMNVFFFVFGLITLAAASASLLWKARRIDGGVPKNRVFLLLSALILLVRSIFELALTAKAAGPDATRQSLLPAKDVGYGIITVLYLGFMYITARVVSTDFDRGGRQARLIESDVRLAVLKQLQQATEGGRRESPPFLQVIDQISNDLDTVLRDGPLSAKSSLSIAHKHQAAASCFQKLREQYSSLDPREGRDYAGGLQTNPYENMRLEGTYQQVTPQDLPLPCLP

SEQ ID NO: 32848 - DNA, 2128 bp, Muscodor strobelii
  misc_feature: SGI EST ID NO. CUFF.77587.0
  misc_feature: Variant of the nucleotide sequence at SEQ ID NO 32846
ggaacacctgcatcagctcgccttgatcttccaattggaagccaactcagtcagccaccgcattttaaccccggattatattggacagcaatgcagcacaagagtgagacaacccggagaagcctgagacagcttgagtaaggttaacagcttagagaacccgagaaagacttcaagtgacatgccggtacaaatctcttgagccgctctctcgtgttcggtgggctgtttgtcaatagaccgccatgaggcgcattcggccgagtacataggcgttctcggccttcgcgaacccatgaggaactcctgcaatggtgaaaataaagacatgagctggtttctgttgttcgttactactggagctcatggtaaacgaaacacatcgcaatgtcgaagacggttgtgattttgaaactcccagaatcagcattgccgaagacgggccttgtgcagcctgtctctttgacaatatggttctttctatgtttggggtttgcggtagctttttattttctattacacagaaggaagccagcaacctggcctgaattcaggaccattttgattggaactgctctgctctcattctggtatttctttgcagtcctcgatagatggcttcattacgaccagcgagacgtggtttacggttacattttcgtcatgccaatctttgagaccacgcgcgtagcatcaagcgtgtactacctatggggcacgtacacagtaatctggcgagagttagaagagcgcttcgagagaaaacaacaaggatattggtggtttgccgcgaaattcttcattggcatagtcggacttgtatcaacctactatgttattctccaaatcgcacaagccggggtatgggtcgatttccgaagcctcaacactatagccgacatcgctactaagaggacaggcttcgaaattgccatgaatgtcttcttcttcgttttcggccttattacattggccgctgctagtgcttctttactctggaaggctagaagaatagatggaggagtaccaaaaaatcgagttttcctgctcctctccgcactcatacttctcgtgcgttccatattcgaactggcacttaccgccaaagccgcgggccccgatgctacacgccaaagtcttttgccggccaaagacgtcggttacggcattatcactgtcttatacttaggcttcatgtacattacagcacgcgtggtatctaccgacttcgatcgcggcggaagacaggcgcgtcttatcgaatccgacgtgcgacttgcagttctgaagcagctacaacaagcgacagaagggggtcgtcgagagtcgccaccatttttgcaggtcatagaccaaatcagcaatgatctggatacggtccttcgagatggtcccctatctgcgaagtctagtcttagcattgcccataaacatcaagcagcagcttcttgctttcagaagcttcgtgaacaatatagtagcctagatcccagagaaggaagagattatgcaggttcgcgaagtgcctcgggtatatctagcttcttcggacgaatgagtggcctgagtcgtcctcgtctctcgtctacaaacacccctttgagtgccatgacgggagaccggcgatcttctgatccattgactcaaggctcgctcaggcggacttcaaaccaatccatacgagaacatgcgtctcgaaggcacgtatcagcaggtcaccccccaagacctccctctaccgtgcctaccatgaattcgatgccgtctcgctgggctccacaggtcaatgcctatccggaatcagtctctgaaggaccaggtatgccgcacagtggaaatccgtatggtggcggatctgggcggatgcgtcccccgtatcacacgtatcaatataatgattgagttcgctggtatcaggtcttggtgttattgttgttgttttgttttaaataattaagtgctcaagtgtataggacaggggtagtgccagctttaacgacctattttactttgggattgtcattcattatttgtaaaaagatactaaagattcaggttgaagatccctcgaaccaaagctgccgtcctgtggacgctgatcatagcacaccaaatcgctcttacaagc

SEQ ID NO: 32849 - DNA, 1035 bp, Muscodor strobelii
  misc_feature: SGI cDNA ID NO. 571324
  misc_feature: Encodes the peptide sequence at SEQ ID NO 32850
atgctgacccgagtccccgcagaagttgaaaccgaaaggagcatcgcagagaccagtcgagttagtgacagcgtgagagattggcatttcgccttcttgattgatagactctgtgcccgtcctgttcagtcctctcctctcataaaaccccagaccagcccccagtctgagcatcctatctggacgatgaacctagatctagaccgcaatcgacttcgtcaaatgttgagcaagatggataagatcgatcgtaatgtgaccacaacatgcgtcgagagatcagtcgatgaaagtgaccgctttatccaggagctttccactttcatcaatgatgatacggacttggtttgtgtcaacctggcgaggtatcttggccctctgacttcaagaccaggcggcctaaatccttgctggaaggacttacttatgggcatgatgcgccgaagacctaacggccttctggatcgtctaggggaagatattgaacctgttgaatcttggcaagaatggctgaacaatttaggtcgtctctacggtgacgggtacctagaccccaaaggacagctaggctttaccaaaacgaagattttgagatggtcacggcaccgaatgtctttgaatcgacagccaagcgatgctagcacagcaacgagcacaagcagtctccccacgcctggggacgtaccgcagcactatagtttagggcatatgcgatactcgtttgcagatactgtcggaccgttccacgatgaagcgtctccaggaaacatacatgagcccaacaagcctgagactagaatagctgccacgatgcctgcccaccactctcgctccctgcgtaaaggatccggcgtttctccatcacaaccaccacgtatagagattgcaaactctaatgagagccaatcggacattccatggtatgagcgacaaagtgaggtacttcgtgtcctcaacccctacgccacgtcggatcatggtatgccccaaggcagcggtacattacctagcgaagatgagaatatctacgattga

SEQ ID NO: 32850 - protein, 344 aa, Muscodor strobelii
  misc_feature: SGI Peptide ID NO. 571324
MLTRVPAEVETERSIAETSRVSDSVRDWHFAFLIDRLCARPVQSSPLIKPQTSPQSEHPIWTMNLDLDRNRLRQMLSKMDKIDRNVTTTCVERSVDESDRFIQELSTFINDDTDLVCVNLARYLGPLTSRPGGLNPCWKDLLMGMMRRRPNGLLDRLGEDIEPVESWQEWLNNLGRLYGDGYLDPKGQLGFTKTKILRWSRHRMSLNRQPSDASTATSTSSLPTPGDVPQHYSLGHMRYSFADTVGPFHDEASPGNIHEPNKPETRIAATMPAHHSRSLRKGSGVSPSQPPRIEIANSNESQSDIPWYERQSEVLRVLNPYATSDHGMPQGSGTLPSEDENIYD

SEQ ID NO: 32851 - DNA, 2769 bp, Muscodor strobelii
  misc_feature: SGI EST ID NO. CUFF.77590.0
  misc_feature: Variant of the nucleotide sequence at SEQ ID NO 32849
tttgaattgttgaccgtttttgatctttcacaaatccattctagcggattgagcttaagtttgtcatttccgccactggtcggacgtaatgaacatttacaagtagtcgctacaggaagcttttattcccagtatgcttaaagggtggtgtaatgccgatctgcgtgggtacgacatcgctgcgcaagagactcgcgaccaccgacgcagcccagcaactcgaacttggccgcccagaccggttcccattacagacagtccaaaagattacgaatgagctcttgaagtcgcgcggtatcgagaacgacatccagaaatgcaatgacttattaattgcagagctggatcggtgcaaaggcgaagtctggattcacgaagcaacaatcatcgcgtcctgccatgttctttgccacgaccgccgccgcgaccgcgtccatgagcagatcgcgtcaattcgtcccgatgctgacgacctccacgaactttttccatgcaagcttaaggcttttgttcaatgtgtcttcctctgtcgtacggccaagaaaagccttttcaatgattttgaggaagcagttatctgcgatcttatccatgttgtgttgccagcaagatcaccgaatcttcaaaacatatggcagatacttcgtgcggttggagatagacgcgtagaaggtttattcccgttcgaattcattaagcagacactgtcctgctgcgactattggttcaagctaaactctgaactcaagaacttcctgtcttctcgagaatgggccgatgcgtgggcctttgtcaaaggcatacaccatatgaatggctatccgctaatccaagagatgctacgggagcagttacctcaatatgctatgtgggcagcttggcggccaaacagagaccgtgttagcaaatggaaaaccccggttctgtcaaaatacgcacagcacctgggattaattttagatctcgagggcccggatcggacgggacagcagcatactagccttcgaggtgctcttcatcatgcagacttggtcttcagtcgtgctatacagtcagtttcggatgcgatcgcaattggagaagagggagttcgttgtttagtcgagctatgcgcaaataatagttgtcttacggaagagaacgtctctctcctcgcggctattctcgacctcaattctccggggaatgtggcatacgcaagaaggcttctaaggatgtcacatgattacaaactagcaacgtcagttcacgatcgcgtatatctgcttgcgtccacgctatcggtcttgcgtgattcgccccgcttgcagcaggcattcagccggaccattgacttgccagtatgctgccatgagacactgacagctgcacaaaatgagcttcacgtccagcttttgaataggcgaccagacaaatgtttggcaattcagatctccacacttgctcgggctctagcatcagcgtgttggcttcaagaaagttggacggctgagtatttcgacatgctgacccgagtccccgcagaagttgaaaccgaaaggagcatcgcagagaccagtcgagttagtgacagcgtgagagattggcatttcgccttcttgattgatagactctgtgcccgtcctgttcagtcctctcctctcataaaaccccagaccagcccccagtctgagcatcctatctggacgatgaacctagatctagaccgcaatcgacttcgtcaaatgttgagcaagatggataagatcgatcgtaatgtgaccacaacatgcgtcgagagatcagtcgatgaaagtgaccgctttatccaggagctttccactttcatcaatgatgatacggacttggtttgtgtcaacctggcgaggtatcttggccctctgacttcaagaccaggcggcctaaatccttgctggaaggacttacttatgggcatgatgcgccgaagacctaacggccttctggatcgtctaggggaagatattgaacctgttgaatcttggcaagaatggctgaacaatttaggtcgtctctacggtgacgggtacctagaccccaaaggacagctaggctttaccaaaacgaagattttgagatggtcacggcaccgaatgtctttgaatcgacagccaagcgatgctagcacagcaacgagcacaagcagtctccccacgcctggggacgtaccgcagcactatagtttagggcatatgcgatactcgtttgcagatactgtcggaccgttccacgatgaagcgtctccaggaaacatacatgagcccaacaagcctgagactagaatagctgccacgatgcctgcccaccactctcgctccctgcgtaaaggatccggcgtttctccatcacaaccaccacgtatagagattgcaaactctaatgagagccaatcggacattccatggtatgagcgacaaagtgaggtacttcgtgtcctcaacccctacgccacgtcggatcatggtatgccccaaggcagcggtacattacctagcgaagatgagaatatctacgattgactcacgggtaacttcctttactcatcacagcgtggttgataaaactataatatggcagtttttgacgtgatatgatataatgttataggactggaatgctttttcggagtttttatcatagcgacagggacttggaggatgttgggcgtctaaccttggtgttggctataggatcatgagaaagaatagcatcgttatcgagtaataccgcaattaataatatctagccaag

SEQ ID NO: 32852 - DNA, 2223 bp, Muscodor strobelii
  misc_feature: SGI cDNA ID NO. 571325
  misc_feature: Encodes the peptide sequence at SEQ ID NO 32853
atgcgattactcaacacctccaccctaaagttggaaaaggttcctgacaccgagatcacaacgggacgatgtcaatacgccatcttctcagaaagatcccggtccagagagcagggggcagaggatgaggtgactcaccgagatccgtgctcagtcaattcaatatgtgatgaagaacgagagaagattacgagattctgtgaagtggccaagtcagcagcgtgcgggtatgcttggatcgagacttgctgcgtcaacaaggacagctcgacagagcaggttgaggccttcaacagtctgtacgtgtggtatggctgcagtaagatatgcatcacctacctcaatgatgttgccggcccttcgaaatcacttgaaaatagcgattggttcgacagcgcatggacattacaggcactcattgcgccgaaagacgtcgctttcttcgaccgcaattgggttaaactaggaacgaagggcgaactcctcgagagattgtcactcaaaacgcaaataccgaaaacagtactcagtgaccccaataaagtaactaactactccgtcgcccaacgaatgtcgtgggcatcgcggcgcatcgttgagagaagtgaagacctagcgtatagcttaatgggtttatttaatatcaacatgtccatactctacggagaacgcgagaaggcattcgtgcggttgcagcagcatatagcccagaaaactagggatgagtccttgtttgcgtggtcaatgggatcttacatagacaatccgacaacttatactggcttgtacgcaccatctccctcatacttttgcgaatgcggagacatcgtcttggtcaaaggatcgaagggcttctcagagcagaatggagagttgtcaatcgagcttccccgtttccttcatagtcctgggctgtatcaagccatgctccactgttcgtctcgatcctcgccccagggtagagtgtacatcgtcctggcgaagaccgaaaaggcaaatgagtatgtgagagtgcgcgattgtacggatttgagcctaggatattcttcgctcgaaccgacggcatcggattggacacccatgaccttgccgcttgaaccaagtgctgcagcccctgaagctgttttcttcggattctggctgcgcacgctcaagcctccaggctataaggagagccagataggtattctatctaactccgcatcgtctgagagtgaatatatccggcaggtaaatcggcatgacaggaacacgggagtcatccggttcaggtccaaattcgagccggacagtcctcccgacgacctcaagatacgatggatcaaactcggatttgacgattgcttcaatcctattgtttggctggcgaatgggagtcaatcagatagacttgaggccccctttgagcgtgctacagcccataagcagctgccgacgactgtgccttgtgatagtcacgagattatgaagtgtgacattgagagcgacatttcgtatgaaaagggcaaaccctacttcaaaagcaacgatatcccattcggatggcctcatggaagagctgtgatcaaaattgataggaacaaaggcctgaaggatcacgccattcggggtttgaatgtacgaatttctgttgtgttgaggccttatcgaagtcccgcaaaccccatctccaatcatggccaggaggatagatcacaaccaagacccacaaaggtctggactgtcgatatcaccacctattccgaagaagtagaaggatctgccttctctgaccattttgtcgaagtgccaaatttctcttgggctcgctggttatggctactaccgtcgtatcattgcgggttaatgtgctgctcggtccccgacgagccgaatccgtgttatgccgtgtgctgtgggttttatgtcccaaaggatacgaagggaccaacatacttggatctatgctatccttgttacagaaagcgttttgctcggaagatggtcgccgaattgaaccaacagcagaaagaactacaagcttcgtgcgaaagagctgcagataaagaaataccgctgttggtatcttgggacgagttaccgaaaggaactcaaggctatggtaacgtcaccaattccctgatgtatcgcattgtgccgtctgggacgaaacatcctagcggtaaggatcccattaaggtaccgaaaccgatgtttgatatgtggtcagagtgctttgggtag

SEQ ID NO: 32853 - protein, 740 aa, Muscodor strobelii
  misc_feature: SGI Peptide ID NO. 571325
  misc_feature (1)..(453): NCBI GI: 239611724 Blast Desc: HET domain-containing protein [Ajellomyces dermatitidis ER-3]
  misc_feature (1)..(453): NCBI GI: 261201308 Blast Desc: HET domain-containing protein [Ajellomyces dermatitidis SLH14081] gi|239592113|gb|EEQ74694.1| HET domain-containing protein [Ajellomyces dermatitidis SLH14081]
  misc_feature (1)..(462): NCBI GI: 119481395 Blast Desc: HET domain protein [Neosartorya fischeri NRRL 181] gi|119408880|gb|EAW18829.1| HET domain protein [Neosartorya fischeri NRRL 181]
  misc_feature (61)..(452): NCBI GI: 238841528 Blast Desc: HET domain-containing protein [Microsporum canis CBS 113480]
  misc_feature (1)..(452): NCBI GI: 256720502 Blast Desc: NECHADRAFT_55867 [Nectria haematococca mpVI 77-13-4]
  misc_feature (1)..(462): NCBI GI: 71001840 Blast Desc: HET domain protein [Aspergillus fumigatus Af293] gi|66853239|gb|EAL93563.1| HET domain protein [Aspergillus fumigatus Af293] gi|159129660|gb|EDP54774.1| HET domain protein
  misc_feature (1)..(453): NCBI GI: 121715886 Blast Desc: HET domain protein [Aspergillus clavatus NRRL 1] gi|119403709|gb|EAW14126.1| HET domain protein [Aspergillus clavatus NRRL 1]
  misc_feature (1)..(346): NCBI GI: 238486510 Blast Desc: ankyrin 2,3/unc44, [Aspergillus flavus NRRL3357] gi|220699372|gb|EED55711.1| ankyrin 2,3/unc44, [Aspergillus flavus NRRL3357]
  misc_feature (1)..(277): NCBI GI: 46139867 Blast Desc: FG11448.1 [Gibberella zeae PH-1]
  misc_feature (1)..(330): NCBI GI: 169782792 Blast Desc: [Aspergillus oryzae RIB40] gi|83774602|dbj|BAE64725.1| protein product [Aspergillus oryzae]
MRLLNTSTLKLEKVPDTEITTGRCQYAIFSERSRSREQGAEDEVTHRDPCSVNSICDEEREKITRFCEVAKSAACGYAWIETCCVNKDSSTEQVEAFNSLYVWYGCSKICITYLNDVAGPSKSLENSDWFDSAWTLQALIAPKDVAFFDRNWVKLGTKGELLERLSLKTQIPKTVLSDPNKVTNYSVAQRMSWASRRIVERSEDLAYSLMGLFNINMSILYGEREKAFVRLQQHIAQKTRDESLFAWSMGSYIDNPTTYTGLYAPSPSYFCECGDIVLVKGSKGFSEQNGELSIELPRFLHSPGLYQAMLHCSSRSSPQGRVYIVLAKTEKANEYVRVRDCTDLSLGYSSLEPTASDWTPMTLPLEPSAAAPEAVFFGFWLRTLKPPGYKESQIGILSNSASSESEYIRQVNRHDRNTGVIRFRSKFEPDSPPDDLKIRWIKLGFDDCFNPIVWLANGSQSDRLEAPFERATAHKQLPTTVPCDSHEIMKCDIESDISYEKGKPYFKSNDIPFGWPHGRAVIKIDRNKGLKDHAIRGLNVRISVVLRPYRSPANPISNHGQEDRSQPRPTKVWTVDITTYSEEVEGSAFSDHFVEVPNFSWARWLWLLPSYHCGLMCCSVPDEPNPCYAVCCGFYVPKDTKGPTYLDLCYPCYRKRFARKMVAELNQQQKELQASCERAADKEIPLLVSWDELPKGTQGYGNVTNSLMYRIVPSGTKHPSGKDPIKVPKPMFDMWSECFG

SEQ ID NO: 32854 - DNA, 1473 bp, Muscodor strobelii
  misc_feature: SGI EST ID NO. CUFF.77599.0
  misc_feature: Variant of the nucleotide sequence at SEQ ID NO 32852
ctgaaacgagtcttaataagtaactgcacgcgtgactttacgagggtgcttagattctctgaccgcacgcaaggcgtctttagacggacgtggtttggtctgacccgtgagtgtcgggtgttctcaatcaatatggtggtttcgaatccgtcagatttttgcaccggcgaaccctctacatcacctctgattgacgcacctcaatttgctagtgggagaatctggtgatctatcgactcggaaatggccccggggaacaatacaacagtccgataataccggatttggacgtgcagattgaggcaattgagatttggcccccagttccaacccctccaacattgcattgtatagtaacgtcatcgcgtctcgaacttcgagcatttgaatttggtcactcctcgcatcacatcacaaaagtcggcttcaagtctctttggctctgatgcgattactcaacacctccaccctaaagttggaaaaggttcctgacaccgagatcacaacgggacgatgtcaatacgccatcttctcagaaagatcccggtccagagagcagggggcagaggatgaggtgactcaccgagatccgtgctcagtcaattcaatatgtgatgaagaacgagagaagattacgagattctgtgaagtggccaagtcagcagcgtgcgggtatgcttggatcgagacttgctgcgtcaacaaggacagctcgacagagcaggttgaggccttcaacagtctgtacgtgtggtatggctgcagtaagatatgcatcacctacctcaatgatgttgccggcccttcgaaatcacttgaaaatagcgattggttcgacagcgcatggacattacaggcactcattgcgccgaaagacgtcgctttcttcgaccgcaattgggttaaactaggaacgaagggcgaactcctcgagagattgtcactcaaaacgcaaataccgaaaacagtactcagtgaccccaataaagtaactaactactccgtcgcccaacgaatgtcgtgggcatcgcggcgcatcgttgagagaagtgaagacctagcgtatagcttaatgggtttatttaatatcaacatgtccatactctacggagaacgcgagaaggcattcgtgcggttgcagcagcatatagcccagaaaactagggatgagtccttgtttgcgtggtcaatgggatcttacatagacaatccgacaacttatactggcttgtacgcaccatctccctcatacttttgcgaatgcggagacatcgtcttggtcaaaggatcgaagggcttctcagagcagaatggagagttgtcaatcgagcttccccgtttccttcatagtcctgggctgtatcaagccatgctccactgttcgtctcgatcctcgccccagggtagagtgtacatcgtcctggcgaagaccgaaaaggcaaatgagtatgtgagagtgcgcgattgtacgga

SEQ ID NO: 32855 - DNA, 1197 bp, Muscodor strobelii
  misc_feature: SGI cDNA ID NO. 571326
  misc_feature: Encodes the peptide sequence at SEQ ID NO 32856
atgtgtcgcaggtactcttcgaagatgtacaggcgcaagcttaatcgcaaagacgtcaaagatctagacatatggtggagaatcatactcgatgggttgattcgctgtctgctcctacatagggatttgcttctggagcaggaagtctgcaaatggctagccgtcaagaatctcatcgaaaactctaaatcaattaatctaggattgaaatatggatcatcctcctcgctcgaacacattctcattcgtctgcaagctacaccgagagttggcgagcctttgcgtttcatccaaagcacatacatggccctccccacgagtctctataagagggcatttgcatgcttatcgcacggcgataacatgagtccctgtgaaattgaggcaattcgatcgtggcttgagtacttctttctcgagtttccgacacggctttcgcaagaatccaagtggtgtatctctgacaaggagtaccgtaactggctggacattgagctcctgatccttggaaatcaggataatctcaagtctcgcagtatctcgctacagtctctgttgacaaaaaccgatgcaccgcagaagggaggaggccctcgcgatttggcattattccagtggacttatatgaggggattagttattgaaagcaacatatcaagcacccctcttggtgtttcctgtaccccctcgcgagattccagattaagtctcagcacggcgggtgcgtttgatggcattcaatcttggatgttaccacaaaaagtctacgacgtcgtcaagagtgtaccatggagaagctgttggaaatatgctgccaacgccacgactcaatcgcgtcgctcgttgatggcatctttcacttggggcaaggatgcgctccttgacttcactactccgatctcaccaaaagagccatctccggacacggcgactcctctcggctccgctcccaggtctaattatgatttagttccacagtaccgtgatccctctatggacggcccaccagcatatccaatattcctcaaagtactcgcgaaacaagagctagcatgcggagctgagaaaccaagcgagcaagcacactgccaagtccgctttacaatggcaagcaaggatggagctgtctcagccgagggtactaagtcagatcctgtcgctgaagctgatcgcgctttcgacatttggcgacgttga

SEQ ID NO: 32856 - protein, 398 aa, Muscodor strobelii
  misc_feature: SGI Peptide ID NO. 571326
MCRRYSSKMYRRKLNRKDVKDLDIWWRIILDGLIRCLLLHRDLLLEQEVCKWLAVKNLIENSKSINLGLKYGSSSSLEHILIRLQATPRVGEPLRFIQSTYMALPTSLYKRAFACLSHGDNMSPCEIEAIRSWLEYFFLEFPTRLSQESKWCISDKEYRNWLDIELLILGNQDNLKSRSISLQSLLTKTDAPQKGGGPRDLALFQWTYMRGLVIESNISSTPLGVSCTPSRDSRLSLSTAGAFDGIQSWMLPQKVYDVVKSVPWRSCWKYAANATTQSRRSLMASFTWGKDALLDFTTPISPKEPSPDTATPLGSAPRSNYDLVPQYRDPSMDGPPAYPIFLKVLAKQELACGAEKPSEQAHCQVRFTMASKDGAVSAEGTKSDPVAEADRAFDIWRR

SEQ ID NO: 32857 - DNA, 439 bp, Muscodor strobelii
  misc_feature: SGI EST ID NO. CUFF.77608.0
  misc_feature: Variant of the nucleotide sequence at SEQ ID NO 32855
atggcatctttcacttggggcaaggatgcgctccttgacttcactactccgatctcaccaaaagagccatctccggacacggcgactcctctcggctccgctcccaggtctaattatgatttagttccacagtaccgtgatccctctatggacggcccaccagcatatccaatattcctcaaagtactcgcgaaacaagagctagcatgcggagctgagaaaccaagcgagcaagcacactgccaagtccgctttacaatggcaagcaaggatggagctgtctcagccgagggtactaagtcagatcctgtcgctgaagctgatcgcgctttcgacatttggcgacgttgaaataggcgctggcggcagccggccattcgtcaacattagaagtgagatataaattatatacattgaaaaccgtcgcacagcatccggc

SEQ ID NO: 32858 - DNA, 1605 bp, Muscodor strobelii
  misc_feature: SGI cDNA ID NO. 571328
  misc_feature: Encodes the peptide sequence at SEQ ID NO 32859
atggcatcagcagaaaacatcacgtttggtgtcgaaatagagttcatcgttttctataggcgcgggtcgtcctcatacatagaaacggacaacaatagtttatatggacctgttccgatcgtctccgatgccaaatttgaagactactgtgactttgacgagtctcgtagagacgaaatgaataaagaaagggaagaagagaacgttcaacaacaagtcgcggaagtcatcaaatcgactggtgttccagttaggtggtcatcaaccaagtatggcgactcttctgaaggtcctaccaacgataacgcatacgaaaatacggcgggcaacgacatatacaagacctggagagttataccagacgactctctccgcctatccgatgtgcttgaggatagctacaagcccttggaatatgtcggggttgaaatcacttcacccgtattcagcctggtcgatgaagcctttgaagagatcactcgagtgattggagcgatcaaagccaacttccgaaccgctgtgcctcctgtctcaggcctccacgtacacattgggaggggccggaagccattctcgctgctcgcaatgcagcgaatcgctagcttgctctggatggccgagccgctcctcgacaatcttcatcccggatgccgcttggacaatatgcactgcttggggatgcgcaccttcagctcgttggctaccggttggacctgggagtgtgaaactcctgtcctggatgctaagcaggatatgaaacatcccgaccctatgcaatataccttcaaggagcagagaaagccgctgaatttgactcacgccggatgcactcgtgttacaactatgtctccgtcgcgcgagcgagccgttctggatgagagtgcaccacttcttgacctaaaagactggtctgagcgttggtatgaaaacgccatgtatgaagccagagatatactccaaactacagaagcggtagatattgctcacctcatgcgttgctactacgatggtgaccgtgtccgcggtgcatacaactttgacaacctcgctatccttggccgttccgaagactgggagcactcgttacagtggccaaagccgacgatcgaattccgccaagccgccggatctctcgacgagcactggattgccctatacattcgtatttgcgcagcattgtgcggacaagccgtagtagaggctaccaacgacgactttttccaacttctgtataactgccagcgcggagaaaccagtctgcagctctataacctcttcgatctcctacacgaccttggaatggatcctggagacatcaaggccctacacaccaggctgagcaacaaggaacatgagctcgagcctcaactccatttctgtcgggctgttacttgcccattgagcaagatctccatagaagagcttgaaagcattctgccccagcatgaggtctgtaatctggattctactggcagtgccaccagtggagaggatgtgtcacaggacgatgcgccagcttggagttcagatgagaaggataccactttcccaattccttctgttggcgttggtaatgactcttggtcagcactggctgaatggtga

SEQ ID NO: 32859 - protein, 534 aa, Muscodor strobelii
  misc_feature: SGI Peptide ID NO. 571328
  misc_feature (7)..(240): NCBI GI: 261357625 Blast Desc: conserved [Verticillium albo-atrum VaMs.102]
  misc_feature (7)..(234): NCBI GI: 154303412 Blast Desc: [Botryotinia fuckeliana B05.10] gi|150854588|gb|EDN29780.1| [Botryotinia fuckeliana B05.10]
  misc_feature (139)..(394): NCBI GI: 156062222 Blast Desc: [Sclerotinia sclerotiorum 1980] gi|154696563|gb|EDN96301.1| [Sclerotinia sclerotiorum 1980]
  misc_feature (103)..(266): NCBI GI: 46108596 Blast Desc: FG01180.1 [Gibberella zeae PH-1]
  misc_feature (138)..(233): NCBI GI: 156044971 Blast Desc: [Sclerotinia sclerotiorum 1980] gi|154694069|gb|EDN93807.1| [Sclerotinia sclerotiorum 1980]
  misc_feature (5)..(237): NCBI GI: 156045762 Blast Desc: SS1G_09157 [Sclerotinia sclerotiorum 1980] gi|154693553|gb|EDN93291.1| SS1G_09157 [Sclerotinia sclerotiorum 1980]
  misc_feature (111)..(235): NCBI GI: 154317553 Blast Desc: [Botryotinia fuckeliana B05.10] gi|150844302|gb|EDN19495.1| [Botryotinia fuckeliana B05.10]
  misc_feature (112)..(219): NCBI GI: 156049459 Blast Desc: [Sclerotinia sclerotiorum 1980] gi|154692835|gb|EDN92573.1| [Sclerotinia sclerotiorum 1980]
  misc_feature (6)..(215): NCBI GI: 46125211 Blast Desc: FG06983.1 [Gibberella zeae PH-1]
  misc_feature (5)..(237): NCBI GI: 154321872 Blast Desc: [Botryotinia fuckeliana B05.10] gi|150850330|gb|EDN25523.1| [Botryotinia fuckeliana B05.10]
MASAENITFGVEIEFIVFYRRGSSSYIETDNNSLYGPVPIVSDAKFEDYCDFDESRRDEMNKEREEENVQQQVAEVIKSTGVPVRWSSTKYGDSSEGPTNDNAYENTAGNDIYKTWRVIPDDSLRLSDVLEDSYKPLEYVGVEITSPVFSLVDEAFEEITRVIGAIKANFRTAVPPVSGLHVHIGRGRKPFSLLAMQRIASLLWMAEPLLDNLHPGCRLDNMHCLGMRTFSSLATGWTWECETPVLDAKQDMKHPDPMQYTFKEQRKPLNLTHAGCTRVTTMSPSRERAVLDESAPLLDLKDWSERWYENAMYEARDILQTTEAVDIAHLMRCYYDGDRVRGAYNFDNLAILGRSEDWEHSLQWPKPTIEFRQAAGSLDEHWIALYIRICAALCGQAVVEATNDDFFQLLYNCQRGETSLQLYNLFDLLHDLGMDPGDIKALHTRLSNKEHELEPQLHFCRAVTCPLSKISIEELESILPQHEVCNLDSTGSATSGEDVSQDDAPAWSSDEKDTTFPIPSVGVGNDSWSALAEW

SEQ ID NO: 32860 - DNA, 306 bp, Muscodor strobelii
  misc_feature: SGI EST ID NO. CUFF.77620.0
  misc_feature: Variant of the nucleotide sequence at SEQ ID NO 32858
cgcgggtcgtcctcatacatagaaacggacaacaatagtttatatggacctgttccgatcgtctccgatgccaaatttgaagactactgtgactttgacgagtctcgtagagacgaaatgaataaagaaagggaagaagagaacgttcaacaacaagtcgcggaagtcatcaaatcgactggtgttccagttaggtggtcatcaaccaagtatggcgactcttctgaaggtcctaccaacgataacgcatacgaaaatacggcgggcaacgacatatacaagacctggagagttataccagacgac

SEQ ID NO: 32861 - DNA, 3885 bp, Muscodor strobelii
  misc_feature: SGI cDNA ID NO. 571329
  misc_feature: Reduced expression when VOC is produced
  misc_feature: Encodes the peptide sequence at SEQ ID NO 32862
atggctggcggccctaatccgtacgggtatggctacggccactatcctttcatctctccgccgatggactcgatgcagtcgcagccgccgtcgcagccgccgcagcaacaaccctactatcatcccgcccctggcgccatcaacccatctccttccagcagcgcccacccgccgccctttcataccaatgcccagagcgcgtacgactacaatgcctcgaggataccgggtctaggtctcggtggccatcagatgcccatgccctcattcccacccggcgtctcgataccttggccggccccggtgccaacaccaccacaactgccacaacaaccgcaaccactgcaaccaccgcaacagctgcaagccaacacgcatcttctgatccagccccgtcctaccgaagcgagtccggctcagcaacagccacccaaaccaatgccgcaccagcagccggatcaaaatctcgaggagggtgaatggagcgagggcgagtatgggtttgaggatctctacgaacccaacccaaccacagctgcccctcccgttgctcccgctcctgtttcggcagccctccaaaaggacaacggcgatagaggggctaaaacccacaacacccacgctccgcagcgggataatcttgtacccaccccttcaaaacctccgccagccgtggagcaggacaaccagcaggacaatcttgcagacgacgagtgggagccttcatatcaggatcgcgagagatcagggtcttactcgccctatctctcccccagagaagtccaccgcaggatgtcctttgcaggcaagactgccaccggggagcacaaagctaccaacctggccaacccggccaaccctaccaaccccactacttcggcataccctcctgcttcacggccaatcccgacatcaggtcctgcaaaccatgcagctaagagtgccactaccactaaacccacaatggttcctcagcagaaggggagtgctccctccgctcccgagaaggaaaaagagaaggaggaggaacaggccggtagtaccatgtcaatagccgaagcaaagaagaaagcacaggaggccattcttggccttgtacctctcaaggttcgctatcaagactacatcagcgaaggcatcaatcccgatgttgtcaaagcgctcttcaccgagctgggattagacacgtcgatgccaaagcccgctgctgctgcgacgaagcttgcgaaagcttccaaccttgctcctgtcccggctgtgagccaggccgcaccaaacggtgggccaaaacatatctccttgccaagactgaccaaaccggccacttcagtagataccaagacgaaggatcacaaggaaacaagcaatgctcccaaagcggcggaaaaatcggctgccgaggagcgcaaagacaagattgcgcggaaactggcagccatggcggctcagaaaaccaccactgccctgacctctgcatctatggcgagcgcccccaaacctgtgcctgtgcccccgcccgcgtccgaagcaaagcccatctctgaaccagaagcgcccgtcttgtccaaatccgatgtgcctgccacaactccttccgccccttctgctcctgttgtgcccaaggacgtggccccaacgggagtacaacccagcaccagcaacactccgaccggtgtgcctaagacgagggctgaaaacaatgctttgttgcaacaaaagcttgcggctcttaagaagcaacaagcccagaaggctgccgacaaagcgaaagcggatgcaagcactactcagaatgagagcgcaaattcattcaaagtaatcgctgagccgccccaaccagagaccaaagccggaagtgattcgacggccaatgctacccctgttggcaatggccatcaaagtcctagcaggcaatctccctttccggcacaacggaatggaacagagaaggaaagcactcctcttccacccatttccgccgcgctgtcttctcaacccaaaccgacgcccaatcggggtgtcaagcggccggtagcctcagactttgatagctatacaccacgttttgacagtttgaaacgtacccgcaccgaggatactttgatcatcgatgttagtgacgacgaggatgtggagatggatatgggctctcccacagacgacggccctgcaaactcggatccgttcagcggacctcctcgacaggtactgggcacgttccctccactgtccgacacaccgggtcgacgacagccgttcagtccagcttcaagcgctgccgctacccctcctgtgcaaaatatacaatcggactctttgcacaagcgaattgagaaggccaaacgtgagattgctgagcgcgaggctaaattagccgctaagagagccatccagaatgcatcaccaagacctaaactacctacacaggactcaccgaagtcacctaccgtcaacggatccgccggcccagcgagcggtactggcactgttaggcgagatcggattgtgagctacgagttacctcgtgttagtgcatctctccgagagaaacaacatcagttgcaacttatcattgctcaagcccaaaagctcgagcttgaagtgcaagctgaagtagatgagcaacaaagacttcaggccgagatcgaattactttctagtcttgttgtggttgatactccttcgactcaggccgtcaatagcacacttggtaactctgcagtgtctccggccccctctgctcataatggtgcagtttcgacggatgttggccaagtttcaagcgagacaatgcagactgaagagccagaaaacgcatcaaaggagtcattgccagctgagaaacgcgatactcctcttgatgacagtcaaaataacgaggtcaataacgatgaggcactgcaaacagcaattttgcaggacaatacccccagctcggatgcagagatcaatggggacgaaatgctaagtaagaaggatgagccttccgctaacgaggtggtttcagacagtcctttgaaagatgtgaacattctccaagaggagagcggcaagatagagttgatttcacaggagactgttcagagaggtcctagtgacgctgcctccggttctgagcgagatatacttcctgtcactgacgtcgaaattactgagaccgacagcgtagctgacgaagctgaggaagccggcgaaatcgacgaacgtgacgtgtctatgcagtcagacagcccgaagccatctctaggcaatgatgagtcgttcgaaccgacagctgaccaagtttccgtatccgtcgacacaccaatggacgtggatgaccagccaagcgccgagatcgtcgacgtagcagagcagcccaatctcaccgaagctgcgcacaatgtggcaacccccaatctggtggataccagcaaagaagtacaagaccgctccatcaaggagcccctcctactaacagccctgcaggccgaacagaacgaccaggttgactcatttcatccaaagtacttggaagatgtcccagggggtctgagatcgatgacgttcagctcaaagattgaccccatgcgggcattgtgcccgcaagtgctggctggtgaagagtgttccaaaggcgctgcttgcgaataccagcactttgacagtatggtcttgtcagatggcgagatcatcacacagctcggctctgcggacatgttcgttggggagacgagagccaagtttatcgatggccttaagaaggtgttggccgagctcaagacgaaccgcgcgcgtgacttcgatcgcattacccaagctattgtcaagcacagacaggattttctagaggacaagtccaaagtgctcgcgctcgacgacagcgccaatgaggtgacttcgtag

SEQ ID NO: 32862 - protein, 1294 aa, Muscodor strobelii
  misc_feature: SGI Peptide ID NO. 571329
  misc_feature (1166)..(1286): NCBI GI: 85114539 Blast Desc: NCU00550 [Neurospora crassa OR74A] gi|28926503|gb|EAA35475.1| [Neurospora crassa OR74A]
  misc_feature (1166)..(1285): NCBI GI: 256733597 Blast Desc: NECHADRAFT_20598 [Nectria haematococca mpVI 77-13-4]
  misc_feature (222)..(893): NCBI GI: 46128685 Blast Desc: FG08720.1 [Gibberella zeae PH-1]
  misc_feature (1166)..(1285): NCBI GI: 255952785 Blast Desc: Pc21g00720 [Penicillium chrysogenum Wisconsin 54-1255] gi|211588856|emb|CAP94969.1| Pc21g00720 [Penicillium chrysogenum Wisconsin 54-1255]
  misc_feature (8)..(559): NCBI GI: 256733597 Blast Desc: NECHADRAFT_20598 [Nectria haematococca mpVI 77-13-4]
  misc_feature (1166)..(1285): NCBI GI: 67537070 Blast Desc: AN4705.2 [Aspergillus nidulans FGSC A4] gi|40741557|gb|EAA60747.1| AN4705.2 [Aspergillus nidulans FGSC A4] gi|259482457|tpe|CBF76959.1| TPA: conserved [Aspergillus FGSC
  misc_feature (64)..(796): NCBI GI: 85114539 Blast Desc: NCU00550 [Neurospora crassa OR74A] gi|28926503|gb|EAA35475.1| [Neurospora crassa OR74A]
  misc_feature (1166)..(1285): NCBI GI: 121713138 Blast Desc: ACLA_011810 [Aspergillus clavatus NRRL 1] gi|119402333|gb|EAW12754.1| ACLA_011810 [Aspergillus clavatus NRRL 1]
  misc_feature (1166)..(1285): NCBI GI: 226287006 Blast Desc: conserved [Paracoccidioides brasiliensis Pb18]
  misc_feature (1166)..(1285): NCBI GI: 261202074 Blast Desc: conserved [Ajellomyces dermatitidis SLH14081] gi|239590348|gb|EEQ72929.1| conserved [Ajellomyces dermatitidis SLH14081]
  misc_feature: Useful for introducing or modulating the production of volatile compounds
MAGGPNPYGYGYGHYPFISPPMDSMQSQPPSQPPQQQPYYHPAPGAINPSPSSSAHPPPFHTNAQSAYDYNASRIPGLGLGGHQMPMPSFPPGVSIPWPAPVPTPPQLPQQPQPLQPPQQLQANTHLLIQPRPTEASPAQQQPPKPMPHQQPDQNLEEGEWSEGEYGFEDLYEPNPTTAAPPVAPAPVSAALQKDNGDRGAKTHNTHAPQRDNLVPTPSKPPPAVEQDNQQDNLADDEWEPSYQDRERSGSYSPYLSPREVHRRMSFAGKTATGEHKATNLANPANPTNPTTSAYPPASRPIPTSGPANHAAKSATTTKPTMVPQQKGSAPSAPEKEKEKEEEQAGSTMSIAEAKKKAQEAILGLVPLKVRYQDYISEGINPDVVKALFTELGLDTSMPKPAAAATKLAKASNLAPVPAVSQAAPNGGPKHISLPRLTKPATSVDTKTKDHKETSNAPKAAEKSAAEERKDKIARKLAAMAAQKTTTALTSASMASAPKPVPVPPPASEAKPISEPEAPVLSKSDVPATTPSAPSAPVVPKDVAPTGVQPSTSNTPTGVPKTRAENNALLQQKLAALKKQQAQKAADKAKADASTTQNESANSFKVIAEPPQPETKAGSDSTANATPVGNGHQSPSRQSPFPAQRNGTEKESTPLPPISAALSSQPKPTPNRGVKRPVASDFDSYTPRFDSLKRTRTEDTLIIDVSDDEDVEMDMGSPTDDGPANSDPFSGPPRQVLGTFPPLSDTPGRRQPFSPASSAAATPPVQNIQSDSLHKRIEKAKREIAEREAKLAAKRAIQNASPRPKLPTQDSPKSPTVNGSAGPASGTGTVRRDRIVSYELPRVSASLREKQHQLQLIIAQAQKLELEVQAEVDEQQRLQAEIELLSSLVVVDTPSTQAVNSTLGNSAVSPAPSAHNGAVSTDVGQVSSETMQTEEPENASKESLPAEKRDTPLDDSQNNEVNNDEALQTAILQDNTPSSDAEINGDEMLSKKDEPSANEVVSDSPLKDVNILQEESGKIELISQETVQRGPSDAASGSERDILPVTDVEITETDSVADEAEEAGEIDERDVSMQSDSPKPSLGNDESFEPTADQVSVSVDTPMDVDDQPSAEIVDVAEQPNLTEAAHNVATPNLVDTSKEVQDRSIKEPLLLTALQAEQNDQVDSFHPKYLEDVPGGLRSMTFSSKIDPMRALCPQVLAGEECSKGAACEYQHFDSMVLSDGEIITQLGSADMFVGETRAKFIDGLKKVLAELKTNRARDFDRITQAIVKHRQDFLEDKSKVLALDDSANEVTS

SEQ ID NO: 32863 - DNA, 4842 bp, Muscodor strobelii
  misc_feature: SGI EST ID NO. CUFF.77793.1
  misc_feature: Variant of the nucleotide sequence at SEQ ID NO 32861
gcaatttgcgcatcattctttctcttccatcttcctcaacatccaatacccgaccctattgcagcaccaccccgtgcctacctccatacatactatgattgctttgtgattgaggagagttacaaaggcgcccgccttattatttctttagcgcctgtgcgacacgctggtcacgtttgtctattgccaccgcacgcttcgtgccactttaccccgtggtcctccaacttacttctacttcacataccttcatcaccatcgcaacactacctgaaaaccgcgttgatttatgttcgctgtgaatagttgaagaagcgtgaactccccatcaacattccgttagcatggctggcggccctaatccgtacgggtatggctacggccactatcctttcatctctccgccgatggactcgatgcagtcgcagccgccgtcgcagccgccgcagcaacaaccctactatcatcccgcccctggcgccatcaacccatctccttccagcagcgcccacccgccgccctttcataccaatgcccagagcgcgtacgactacaatgcctcgaggataccgggtctaggtctcggtggccatcagatgcccatgccctcattcccacccggcgtctcgataccttggccggccccggtgccaacaccaccacaactgccacaacaaccgcaaccactgcaaccaccgcaacagctgcaagccaacacgcatcttctgatccagccccgtcctaccgaagcgagtccggctcagcaacagccacccaaaccaatgccgcaccagcagccggatcaaaatctcgaggagggtgaatggagcgagggcgagtatgggtttgaggatctctacgaacccaacccaaccacagctgcccctcccgttgctcccgctcctgtttcggcagccctccaaaaggacaacggcgatagaggggctaaaacccacaacacccacgctccgcagcgggataatcttgtacccaccccttcaaaacctccgccagccgtggagcaggacaaccagcaggacaatcttgcagacgacgagtgggagccttcatatcaggatcgcgagagatcagggtcttactcgccctatctctcccccagagaagtccaccgcaggatgtcctttgcaggcaagactgccaccggggagcacaaagctaccaacctggccaacccggccaaccctaccaaccccactacttcggcataccctcctgcttcacggccaatcccgacatcaggtcctgcaaaccatgcagctaagagtgccactaccactaaacccacaatggttcctcagcagaaggggagtgctccctccgctcccgagaaggaaaaagagaaggaggaggaacaggccggtagtaccatgtcaatagccgaagcaaagaagaaagcacaggaggccattcttggccttgtacctctcaaggttcgctatcaagactacatcagcgaaggcatcaatcccgatgttgtcaaagcgctcttcaccgagctgggattagacacgtcgatgccaaagcccgctgctgctgcgacgaagcttgcgaaagcttccaaccttgctcctgtcccggctgtgagccaggccgcaccaaacggtgggccaaaacatatctccttgccaagactgaccaaaccggccacttcagtagataccaagacgaaggatcacaaggaaacaagcaatgctcccaaagcggcggaaaaatcggctgccgaggagcgcaaagacaagattgcgcggaaactggcagccatggcggctcagaaaaccaccactgccctgacctctgcatctatggcgagcgcccccaaacctgtgcctgtgcccccgcccgcgtccgaagcaaagcccatctctgaaccagaagcgcccgtcttgtccaaatccgatgtgcctgccacaactccttccgccccttctgctcctgttgtgcccaaggacgtggccccaacgggagtacaacccagcaccagcaacactccgaccggtgtgcctaagacgagggctgaaaacaatgctttgttgcaacaaaagcttgcggctcttaagaagcaacaagcccagaaggctgccgacaaagcgaaagcggatgcaagcactactcagaatgagagcgcaaattcattcaaagtaatcgctgagccgccccaaccagagaccaaagccggaagtgattcgacggccaatgctacccctgttggcaatggccatcaaagtcctagcaggcaatctccctttccggcacaacggaatggaacagagaaggaaagcactcctcttccacccatttccgccgcgctgtcttctcaacccaaaccgacgcccaatcggggtgtcaagcggccggtagcctcagactttgatagctatacaccacgttttgacagtttgaaacgtacccgcaccgaggatactttgatcatcgatgttagtgacgacgaggatgtggagatggatatgggctctcccacagacgacggccctgcaaactcggatccgttcagcggacctcctcgacaggtactgggcacgttccctccactgtccgacacaccgggtcgacgacagccgttcagtccagcttcaagcgctgccgctacccctcctgtgcaaaatatacaatcggactctttgcacaagcgaattgagaaggccaaacgtgagattgctgagcgcgaggctaaattagccgctaagagagccatccagaatgcatcaccaagacctaaactacctacacaggactcaccgaagtcacctaccgtcaacggatccgccggcccagcgagcggtactggcactgttaggcgagatcggattgtgagctacgagttacctcgtgttagtgcatctctccgagagaaacaacatcagttgcaacttatcattgctcaagcccaaaagctcgagcttgaagtgcaagctgaagtagatgagcaacaaagacttcaggccgagatcgaattactttctagtcttgttgtggttgatactccttcgactcaggccgtcaatagcacacttggtaactctgcagtgtctccggccccctctgctcataatggtgcagtttcgacggatgttggccaagtttcaagcgagacaatgcagactgaagagccagaaaacgcatcaaaggagtcattgccagctgagaaacgcgatactcctcttgatgacagtcaaaataacgaggtcaataacgatgaggcactgcaaacagcaattttgcaggacaatacccccagctcggatgcagagatcaatggggacgaaatgctaagtaagaaggatgagccttccgctaacgaggtggtttcagacagtcctttgaaagatgtgaacattctccaagaggagagcggcaagatagagttgatttcacaggagactgttcagagaggtcctagtgacgctgcctccggttctgagcgagatatacttcctgtcactgacgtcgaaattactgagaccgacagcgtagctgacgaagctgaggaagccggcgaaatcgacgaacgtgacgtgtctatgcagtcagacagcccgaagccatctctaggcaatgatgagtcgttcgaaccgacagctgaccaagtttccgtatccgtcgacacaccaatggacgtggatgaccagccaagcgccgagatcgtcgacgtagcagagcagcccaatctcaccgaagctgcgcacaatgtggcaacccccaatctggtggataccagcaaagaagccgaacagaacgaccaggttgactcgtcacctttggatgatttactctcctataaaagcccactttcatactttcgtgcctacagatttcatccaaagtacttggaagatgtcccagggggtctgagatcgatgacgttcagctcaaagattgaccccatgcgggcattgtgcccgcaagtgctggctggtgaagagtgttccaaaggcgctgcttgcgaataccagcactttgacagtatggtcttgtcagatggcgagatcatcacacagctcggctctgcggacatgttcgttggggagacgagagccaagtttatcgatggccttaagaaggtgttggccgagctcaagacgaaccgcgcgcgtgacttcgatcgcattacccaagctattgtcaagcacagacaggattttctagaggacaagtccaaagtgctcgcgctcgacgacagcgccaatgaggtgacttcgtagtatccccgtccctgtgcaactgattaggccttgcctatctacaactgtagacatttcccttcctcatgttccaatatagcttgctacgttgcatcggcatttgcaccagcaatggtagcccatcggcttcgctcgttcttcagatctttctgcaccaggtgctggcagtgtcgctagctatctgaagaaaaagctctggcttgctttgtcgaactcggcgtcttgattttcggagtacacgatacccattgcttcaagttttgatatccaagctggctttggtccgcccaccagctgttgtcgacaatagttgcatagatacagatattgtaagagtgtgggatgcttgtggggacaagaaaaaacaaaggaatggcctggccacgacacatggagatgtcggtaagagccacctgaagatttgggccatcatcataaagagatgagttaccgttggttgagcggtttgcgcacaccaaatagccaacgtcgtatattagtagttccgatgctagtgagctagtaattgagttaaaatgatccatgtctgagcctgcctccgaattcacgagtctacatgatttgccaatgtccccttgcg

SEQ ID NO: 32864 - DNA, 2223 bp, Muscodor strobelii
  misc_feature: SGI cDNA ID NO. 571330
  misc_feature: Encodes the peptide sequence at SEQ ID NO 32865
atgtcttgcttcggattgtgtggcggggacgaggatcccgagcgccaacccctgctccctcaatatgagcaagagactcatctgcagcgagagctgtatcgaaaacttcacagctaccagatgtttcgtgccttgtcgaaggggtacatgccgagtaccgagcaagctatcatcaatctacgcacactcctcgctgccgatatcttgaacccggcggaacacacagagctatctgatgatggcaggagattggtgagactggtgaagctatggctacagcaattcatcacgctgctgcaacataagaacgataaggatcagctgcaggacctgatttggttcctcacgaagagcaggatatctgtcgatgtcgatgatctgagtgcgagagcttccaaagcaaaggtgaaagccgatactgctgcggcatacgaaagcttgcgcaccgttggctcgttacttcttaccaatcaagacttccgcactttcctaagcgacctaaatgttgtgggaagagaggtcttcaaggattccgcttttgcgctacgagatgctgctgaggaagctgggaagcaacttgagccttctgccgaggaacaggagagtctagtcaaagccgatggaaacggacatccgcccacggcgcagacactcgaggatgagttccaagatgtcgccaaggttgtgaaggatggcggcgctgatgttgccagtgctgctattgaaagtgcgaaggacaaggtttccggagatgagggcaaaacgcttttgaaacgactgcaggctactgtcctgaatctgaggaagagaaaggactattccgagtctgtgtcgacgctttccctcctcataaaacgatatgcccttgtctattcgcgagcacttgaggaggtcaccgacgctgcacagaacgacgtcaatgagaaccgcgagactgatcgcgcactgactaacctgtgggagtttgtcaagagcttcggcgagcaacgggactgggagaagtgcgaggagttattgcagaaagtcgtcagtcacaaggatcaggaccccgagtttgaggatttgatgcaggaggttggaaatagtctgcagaaactactcacggatcctgacttctttactgacgcggagaggaaaattcaggaattaagagagaagagcaagaaagtcggaacagagagcagcttgaagtatgacgtcgaccagctgctacatcaactatccatcacattccagagcgtacttaaagacgaggatatccataagctcatcacgacgacactgcgagtctttggggtcctctcacctacaactgccatcaccaatcccgatcttattcacgacgccctaaatgtcttcatacccctcataatctccgccatccaatacctacctattccgcgtctcgaagtcagcacgcccgccatcgacctcctgctcgagaacctcatcatcgagccaggcgtcacagtaaacaacacgtcattcctgccataccgactcaagatcgagacctacaacgacctcgagatccggaaagcaagattcagaaccgcagccagcacgaagaatctaatgctcatcaagatcgacggactatcagctcgcgcagacgaaatcggattctggctgagagcacacagcggacttttccgcctagcggaccaaggaattgcgagtttcgcacttgatgaacggggtatcgacatccacctcgaagtcgaaatctgccgagagcgactcgagcagatcttgacgttgaagggtgttaaagtgcgagtccacaaattgaattacaagcttcgaaaaagcaaattctcctggctgggatggctcatcaagccactccttcgtccgatcctgaaggctactatggaggtccaacttgcgaaagcaatcggtgatctattgcatgctgggaatagagaattactctatgcgagggaacggcttagagcgacgcggattgcgaatccgaatgatctttacacgtttctcagagcggtggcggcgagacttatgccggaggaggatccggatttggaggttaggattggtgttgatcagccgggtgagggggtgtttaagggtgtttatacacctggtagtgtggtcaaggtttggagggaggaggcgatgagggcgggggatagggtggaggagtttgaaacggggggttggaggaatgaggtttttgatacgcatgttaggaatttgacctaa

SEQ ID NO: 32865 - protein, 740 aa, Muscodor strobelii
  misc_feature: SGI Peptide ID NO. 571330
  misc_feature (2)..(739): NCBI GI: 169600581 Blast Desc: SNOG_03131 [Phaeosphaeria nodorum SN15] gi|160705470|gb|EAT89862.2| SNOG_03131 [Phaeosphaeria nodorum SN15]
  misc_feature (2)..(739): NCBI GI: 189191680 Blast Desc: conserved [Pyrenophora tritici-repentis Pt-1C-BFP] gi|187973785|gb|EDU41284.1| conserved [Pyrenophora tritici-repentis Pt-1C-BFP]
  misc_feature (2)..(737): NCBI GI: 116179742 Blast Desc: CHGG_00499 [Chaetomium globosum CBS 148.51] gi|88184796|gb|EAQ92264.1| CHGG_00499 [Chaetomium globosum CBS 148.51]
  misc_feature (1)..(739): NCBI GI: 261358382 Blast Desc: conserved [Verticillium albo-atrum VaMs.102]
  misc_feature (1)..(735): NCBI GI: 39975103 Blast Desc: MGG_00302 [Magnaporthe grisea 70-15] gi|145018818|gb|EDK03097.1| MGG_00302 [Magnaporthe grisea 70-15]
  misc_feature (2)..(739): NCBI GI: 171691661 Blast Desc: protein product [Podospora anserina] gi|170945779|emb|CAP72579.1| protein product [Podospora anserina]
  misc_feature (1)..(737): NCBI GI: 256726103 Blast Desc: [Nectria haematococca mpVI 77-13-4]
  misc_feature (2)..(740): NCBI GI: 85092070 Blast Desc: NCU04669 [Neurospora crassa OR74A] gi|28920614|gb|EAA29976.1| conserved [Neurospora crassa OR74A] gi|28950057|emb|CAD70811.1| conserved [Neurospora crassa]
  misc_feature (1)..(739): NCBI GI: 46111655 Blast Desc: FG02709.1 [Gibberella zeae PH-1]
  misc_feature (2)..(735): NCBI GI: 156058882 Blast Desc: SS1G_03453 [Sclerotinia sclerotiorum 1980] gi|154701240|gb|EDO00979.1| SS1G_03453 [Sclerotinia sclerotiorum 1980]
MSCFGLCGGDEDPERQPLLPQYEQETHLQRELYRKLHSYQMFRALSKGYMPSTEQAIINLRTLLAADILNPAEHTELSDDGRRLVRLVKLWLQQFITLLQHKNDKDQLQDLIWFLTKSRISVDVDDLSARASKAKVKADTAAAYESLRTVGSLLLTNQDFRTFLSDLNVVGREVFKDSAFALRDAAEEAGKQLEPSAEEQESLVKADGNGHPPTAQTLEDEFQDVAKVVKDGGADVASAAIESAKDKVSGDEGKTLLKRLQATVLNLRKRKDYSESVSTLSLLIKRYALVYSRALEEVTDAAQNDVNENRETDRALTNLWEFVKSFGEQRDWEKCEELLQKVVSHKDQDPEFEDLMQEVGNSLQKLLTDPDFFTDAERKIQELREKSKKVGTESSLKYDVDQLLHQLSITFQSVLKDEDIHKLITTTLRVFGVLSPTTAITNPDLIHDALNVFIPLIISAIQYLPIPRLEVSTPAIDLLLENLIIEPGVTVNNTSFLPYRLKIETYNDLEIRKARFRTAASTKNLMLIKIDGLSARADEIGFWLRAHSGLFRLADQGIASFALDERGIDIHLEVEICRERLEQILTLKGVKVRVHKLNYKLRKSKFSWLGWLIKPLLRPILKATMEVQLAKAIGDLLHAGNRELLYARERLRATRIANPNDLYTFLRAVAARLMPEEDPDLEVRIGVDQPGEGVFKGVYTPGSVVKVWREEAMRAGDRVEEFETGGWRNEVFDTHVRNLT

SEQ ID NO: 32866 - DNA, 2699 bp, Muscodor strobelii
  misc_feature: SGI EST ID NO. CUFF.77638.0
  misc_feature: Variant of the nucleotide sequence at SEQ ID NO 32864
cacgacttagaccttaaagtcactggtcaacagggtgacaggcaacagcgcgtgctgtcgttgtcaacatgcaaaatacatgacatttgcggtgatccttcaaaagaattgaccttgcatgagtttgtcaattgagacacatttgccacattacctgaggatcaatcagtacatcatttccccattccaacttaggtacttgccaaaacaaacatccaagtcactatcgtgatgtcttgcttcggattgtgtggcggggacgaggatcccgagcgccaacccctgctccctcaatatgagcaagagactcatctgcagcgagagctgtatcgaaaacttcacagctaccagatgtttcgtgccttgtcgaaggggtacatgccgagtaccgagcaagctatcatcaatctacgcacactcctcgctgccgatatcttgaacccggcggaacacacagagctatctgatgatggcaggagattggtgagactggtgaagctatggctacagcaattcatcacgctgctgcaacataagaacgataaggatcagctgcaggacctgatttggttcctcacgaagagcaggatatctgtcgatgtcgatgatctgagtgcgagagcttccaaagcaaaggtgaaagccgatactgctgcggcatacgaaagcttgcgcaccgttggctcgttacttcttaccaatcaagacttccgcactttcctaagcgacctaaatgttgtgggaagagaggtcttcaaggattccgcttttgcgctacgagatgctgctgaggaagctgggaagcaacttgagccttctgccgaggaacaggagagtctagtcaaagccgatggaaacggacatccgcccacggcgcagacactcgaggatgagttccaagatgtcgccaaggttgtgaaggatggcggcgctgatgttgccagtgctgctattgaaagtgcgaaggacaaggtttccggagatgagggcaaaacgcttttgaaacgactgcaggctactgtcctgaatctgaggaagagaaaggactattccgagtctgtgtcgacgctttccctcctcataaaacgatatgcccttgtctattcgcgagcacttgaggaggtcaccgacgctgcacagaacgacgtcaatgagaaccgcgagactgatcgcgcactgactaacctgtgggagtttgtcaagagcttcggcgagcaacgggactgggagaagtgcgaggagttattgcagaaagtcgtcagtcacaaggatcaggaccccgagtttgaggatttgatgcaggaggttggaaatagtctgcagaaactactcacggatcctgacttctttactgacgcggagaggaaaattcaggaattaagagagaagagcaagaaagtcggaacagagagcagcttgaagtatgacgtcgaccagctgctacatcaactatccatcacattccagagcgtacttaaagacgaggatatccataagctcatcacgacgacactgcgagtctttggggtcctctcacctacaactgccatcaccaatcccgatcttattcacgacgccctaaatgtcttcatacccctcataatctccgccatccaatacctacctattccgcgtctcgaagtcagcacgcccgccatcgacctcctgctcgagaacctcatcatcgagccaggcgtcacagtaaacaacacgtcattcctgccataccgactcaagatcgagacctacaacgacctcgagatccggaaagcaagattcagaaccgcagccagcacgaagaatctaatgctcatcaagatcgacggactatcagctcgcgcagacgaaatcggattctggctgagagcacacagcggacttttccgcctagcggaccaaggaattgcgagtttcgcacttgatgaacggggtatcgacatccacctcgaagtcgaaatctgccgagagcgactcgagcagatcttgacgttgaagggtgttaaagtgcgagtccacaaattgaattacaagcttcgaaaaagcaaattctcctggctgggatggctcatcaagccactccttcgtccgatcctgaaggctactatggaggtccaacttgcgaaagcaatcggtgatctattgcatgctgggaatagagaattactctatgcgagggaacggcttagagcgacgcggattgcgaatccgaatgatctttacacgtttctcagagcggtggcggcgagacttatgccggaggaggatccggatttggaggttaggattggtgttgatcagccgggtgagggggtgtttaagggtgtttatacacctggtagtgtggtcaaggtttggagggaggaggcgatgagggcgggggatagggtggaggagtttgaaacggggggttggaggaatgaggtttttgatacgcatgttaggaatttgacctaatgcgcgcttggcaactaatagggggacaagggtggattttgtttgacggagagtttagaggccagagtaagagagagtaaggaggatgagagaaaattgtgtacgagtatggctatggagcgcttgctgctcgttgctttacggtggtaataagtatgaaaggtctagtttggcgttcggtagggcctcagcttatggcataaggatggtattgttaatacatgaaatttttgtccttgcctgca

SEQ ID NO: 32867 - DNA, 864 bp, Muscodor strobelii
  misc_feature: SGI cDNA ID NO. 571331
  misc_feature: Elevated expression when VOC is produced
  misc_feature: Encodes the peptide sequence at SEQ ID NO 32868
atgggttcacaccaacctcaacatccgagcttacccctccccgattacttttccaagttcgccagcatttatgtccgccaaacaggccattcgacgtttgatattcttggagacgtcatcgtcgacaatgttcaaacttccgcaaatccaattggggcggattcgattgtccatgacactgctgcggggcctggtgtaggcgccgctgccctcgttgcgcgtctgcccaaagagcagctgcctaaagagatactagtcaccgacaacgttccaatgatggtttctgcagcccgtgagtccctgacggcttcagactccccgctctcacatgttgaatgtaaagaactcgactcccaggatctctcgtccatatcggacaattacttcacccactccatcaataacttcagcattttcactttcatgcgcccccaggccgccatcagtgagtcgtaccggactcttcgccctggcggtcttgctattgtgacgtgctggcgccgttttgcgcctatctttatcatacaagccgcacagaagaaaatccgtccagatctgccactgatgcccattccaaaccctcagtttcttgaggaaggtgagttacagaaggtcgtcgaagcaggcggctttgtcaaggaaaacatcaaattggttgagaagcgtttagtcgtttcagatgttgaaaatattgctggcctgactacgttcatgtgtggtcctttgatggttcaagcgcgcgctggatatacggaggaagagcaagctaggtggccggaggccatcactcaatccgtcaaagaggagacagacgagttcggcggcattcaatttgatgcctacatcctattggctacgaagtaa

SEQ ID NO: 32868 - protein, 287 aa, Muscodor strobelii
  misc_feature: SGI Peptide ID NO. 571331
  misc_feature (58)..(163): Pfam Id: PF08241 Pfam Desc: Methyltransferase domain
  misc_feature (7)..(284): NCBI GI: 46137641 Blast Desc: FG10336.1 [Gibberella zeae PH-1]
  misc_feature (7)..(287): NCBI GI: 256731860 Blast Desc: NECHADRAFT_40894 [Nectria haematococca mpVI 77-13-4]
  misc_feature (33)..(274): NCBI GI: 46115658 Blast Desc: FG03671.1 [Gibberella zeae PH-1]
  misc_feature (9)..(287): NCBI GI: 46117997 Blast Desc: FG04675.1 [Gibberella zeae PH-1]
  misc_feature (48)..(269): NCBI GI: 169610868 Blast Desc: SNOG_08542 [Phaeosphaeria nodorum SN15] gi|111062590|gb|EAT83710.1| SNOG_08542 [Phaeosphaeria nodorum SN15]
  misc_feature (12)..(224): NCBI GI: 156052535 Blast Desc: SS1G_06433 [Sclerotinia sclerotiorum 1980] gi|154704213|gb|EDO03952.1| SS1G_06433 [Sclerotinia sclerotiorum 1980]
  misc_feature (7)..(273): NCBI GI: 256725322 Blast Desc: NECHADRAFT_45683 [Nectria haematococca mpVI 77-13-4]
  misc_feature (17)..(211): NCBI GI: 39977401 Blast Desc: MGG_06603 [Magnaporthe grisea 70-15] gi|145015951|gb|EDK00441.1| MGG_06603 [Magnaporthe grisea 70-15]
  misc_feature (12)..(287): NCBI GI: 256723977 Blast Desc: NECHADRAFT_86261 [Nectria haematococca mpVI 77-13-4]
  misc_feature (13)..(287): NCBI GI: 156057603 Blast Desc: SS1G_04533 [Sclerotinia sclerotiorum 1980] gi|154702318|gb|EDO02057.1| SS1G_04533 [Sclerotinia sclerotiorum 1980]
  misc_feature: Useful for introducing or modulating the production of volatile compounds
MGSHQPQHPSLPLPDYFSKFASIYVRQTGHSTFDILGDVIVDNVQTSANPIGADSIVHDTAAGPGVGAAALVARLPKEQLPKEILVTDNVPMMVSAARESLTASDSPLSHVECKELDSQDLSSISDNYFTHSINNFSIFTFMRPQAAISESYRTLRPGGLAIVTCWRRFAPIFIIQAAQKKIRPDLPLMPIPNPQFLEEGELQKVVEAGGFVKENIKLVEKRLVVSDVENIAGLTTFMCGPLMVQARAGYTEEEQARWPEAITQSVKEETDEFGGIQFDAYILLATK

SEQ ID NO: 32869 - DNA, 1391 bp, Muscodor strobelii
  misc_feature: SGI EST ID NO. CUFF.77673.0
  misc_feature: Variant of the nucleotide sequence at SEQ ID NO 32867
gcggcaatgaattgcgctataattcttcgtatattagcgcgaagaaggctgacgggacccagtgagattgtttgctattctgagaaccacctgggcatagacgaagatgccaagcctacggagcgctgtaagggcagtatggcccacacgtcacggcaagtcccaggtcaactccttgcagtgggcggtcagcgcatgttgatggagcagactagtctgtcctttatagaattaatctctttcctcgatctattagcgatactgttttcaccctttgctcgctcggatcagctttcaacttgacttgcaagtcactgtgcacgaagaactgactatttggctcctgttaaccaccacccaccgcctacaacattgtagcgtagcattatcactgggcatcatgggttcacaccaacctcaacatccgagcttacccctccccgattacttttccaagttcgccagcatttatgtccgccaaacaggccattcgacgtttgatattcttggagacgtcatcgtcgacaatgttcaaacttccgcaaatccaattggggcggattcgattgtccatgacactgctgcggggcctggtgtaggcgccgctgccctcgttgcgcgtctgcccaaagagcagctgcctaaagagatactagtcaccgacaacgttccaatgatggtttctgcagcccgtgagtccctgacggcttcagactccccgctctcacatgttgaatgtaaagaactcgactcccaggatctctcgtccatatcggacaattacttcacccactccatcaataacttcagcattttcactttcatgcgcccccaggccgccatcagtgagtcgtaccggactcttcgccctggcggtcttgctattgtgacgtgctggcgccgttttgcgcctatctttatcatacaagccgcacagaagaaaatccgtccagatctgccactgatgcccattccaaaccctcagtttcttgaggaaggtgagttacagaaggtcgtcgaagcaggcggctttgtcaaggaaaacatcaaattggttgagaagcgtttagtcgtttcagatgttgaaaatattgctggcctgactacgttcatgtgtggtcctttgatggttcaagcgcgcgctggatatacggaggaagagcaagctaggtggccggaggccatcactcaatccgtcaaagaggagacagacgagttcggcggcattcaatttgatgcctacatcctattggctacgaagtaaggagacgatgacatctatttgtgcgcgcacaaattctggtcacgtacatgcttgcaaagaacagaccgattcgtagtatagtagtatgcgaacaaaatcaagacttgcaactattgagcgagccaga

SEQ ID NO: 32870 - DNA, 1026 bp, Muscodor strobelii
  misc_feature: SGI cDNA ID NO. 571332
  misc_feature: Encodes the peptide sequence at SEQ ID NO 32871
atgaagcattgtacaaacaaccacatggctacacccaggatcatttttggcactagccccctcacgcctgaatttggatacaactcggccgaggacacgagaccatggctcgacgtcttgaaagagacttcagatgtcgtcaaatcaattgatacagcggttttccacgaacgctcggatatctacctaggccagctcaagtttggagagcattttggaattggtactaagcttccgagtatcaccaatcctgaccgtccatccacgaaggaaaatgtcatcgctattaccgaagagtgcttaagcaccctagacatagataaacttgattatcttttgatgcactgtccggacccgcgtgtccccatcgaagaaaccatatccggcttcgacgctctttacaaggagggtaaaatcaaaagatggggattatctaactactctactgccgaaacggcagcagtcatcaaagcatgtcacgaaaagggattcgtgccgccagcggtatacgaaggaaactacagtgccgtcgcgcgattagtagaagacgatctccttcccctcctacgtgaacatcatatcgccttctatgcgtactccccgattgcgggtggcttccttgctaagacatcagagcaatttcgtcgccgcggatccctccaaggccgatgggccgaggattcacttattggcgaggtttatcattacatgtacaaccgccccgaattcctcgacgcccttgacaagtggcacgagatcgcgaagaccgaaggcatttcgcccgtggagatggggtaccgatggattgcttacaactctgcgctatcgccggatgacggcgtcattgttggcgcgatggctattgagcaatggcgcagtaatatggcagcaatccagaagggtcctcttaagccagagacagcggcaaagattgatgcactgtggggacctttgcataacggctctgttttctctaactttgaaggtgggatgaaagtcaatgccttcaaaattgaaaaagcctga

SEQ ID NO: 32871 - protein, 341 aa, Muscodor strobelii
  misc_feature: SGI Peptide ID NO. 571332
  misc_feature (5)..(316): Pfam Id: PF00248 Pfam Desc: Aldo/keto reductase family
  misc_feature (89)..(207): Pfam Id: PF00248 Pfam Desc: Aldo/keto reductase family
  misc_feature (4)..(327): NCBI GI: 119499147 Blast Desc: aldehyde reductase (GliO), [Neosartorya fischeri NRRL 181] gi|119414495|gb|EAW24434.1| aldehyde reductase (GliO), [Neosartorya fischeri NRRL 181]
  misc_feature (4)..(327): NCBI GI: 159125936 Blast Desc: aldehyde reductase (GliO), [Aspergillus fumigatus A1163]
  misc_feature (4)..(327): NCBI GI: 70985268 Blast Desc: aldehyde reductase (GliO) [Aspergillus fumigatus Af293] gi|66845768|gb|EAL86102.1| aldehyde reductase (GliO), [Aspergillus fumigatus Af293]
  misc_feature (14)..(327): NCBI GI: 115443044 Blast Desc: conserved [Aspergillus terreus NIH2624] gi|114188198|gb|EAU29898.1| conserved [Aspergillus terreus NIH2624]
  misc_feature (9)..(327): NCBI GI: 255943257 Blast Desc: Pc18g05700 [Penicillium chrysogenum Wisconsin 54-1255] gi|211587130|emb|CAP94794.1| Pc18g05700 [Penicillium chrysogenum Wisconsin 54-1255]
  misc_feature (9)..(327): NCBI GI: 255944591 Blast Desc: Pc20g05270 [Penicillium chrysogenum Wisconsin 54-1255] gi|211587798|emb|CAP85856.1| Pc20g05270 [Penicillium chrysogenum Wisconsin 54-1255]
  misc_feature (12)..(327): NCBI GI: 115385765 Blast Desc: conserved [Aspergillus terreus NIH2624] gi|114187876|gb|EAU29576.1| conserved [Aspergillus terreus NIH2624]
  misc_feature (15)..(327): NCBI GI: 121719270 Blast Desc: aldehyde reductase (GliO), [Aspergillus clavatus NRRL 1] gi|119404537|gb|EAW14913.1| aldehyde reductase (GliO), [Aspergillus clavatus NRRL 1]
  misc_feature (47)..(327): NCBI GI: 238508022 Blast Desc: aldehyde reductase (GliO), [Aspergillus flavus NRRL3357] gi|220688731|gb|EED45083.1| aldehyde reductase (GliO), [Aspergillus flavus NRRL3357]
  misc_feature (13)..(334): NCBI GI: 115402295 Blast Desc: [Aspergillus terreus NIH2624] gi|114189070|gb|EAU30770.1| [Aspergillus terreus NIH2624]
  misc_feature (83)..(306): SWISSPROT Homolog: EC 1.1.1.65 Pyridoxine 4-dehydrogenase
MKHCTNNHMATPRIIFGTSPLTPEFGYNSAEDTRPWLDVLKETSDVVKSIDTAVFHERSDIYLGQLKFGEHFGIGTKLPSITNPDRPSTKENVIAITEECLSTLDIDKLDYLLMHCPDPRVPIEETISGFDALYKEGKIKRWGLSNYSTAETAAVIKACHEKGFVPPAVYEGNYSAVARLVEDDLLPLLREHHIAFYAYSPIAGGFLAKTSEQFRRRGSLQGRWAEDSLIGEVYHYMYNRPEFLDALDKWHEIAKTEGISPVEMGYRWIAYNSALSPDDGVIVGAMAIEQWRSNMAAIQKGPLKPETAAKIDALWGPLHNGSVFSNFEGGMKVNAFKIEKA

SEQ ID NO: 32872 - DNA, 1691 bp, Muscodor strobelii
  misc_feature: SGI EST ID NO. CUFF.77714.0
  misc_feature: Variant of the nucleotide sequence at SEQ ID NO 32870
cgaatattgattttcccctgctgcatgttcaacctcccggatcctatctactattgcaatgcctttagctggacaggcgcgacaggatggtgtcgactagcaaccaacctgagacttgccatctgtttgcctcatagcatgcgttcctctggggaaacccgttgatttgagagctcgaggtcaaatgtggccaaggagtagagtgcaacaattgagtcgtggcctgagtattgatatcatataccaagaataaagacagattatctcatcagctcacgcttgtattgatctaacatcatatatgtgtgagattatgcacagcaatccttcgtttgatatacggcaaatgtacctctgtcccccttgctttgctctgtaccctatataaatgacgtggttaatcggtcgaatatttgaggcattacgccgtatatgaagcattgtacaaacaaccacatggctacacccaggatcatttttggcactagccccctcacgcctgaatttggatacaactcggccgaggacacgagaccatggctcgacgtcttgaaagagacttcagatgtcgtcaaatcaattgatacagcggttttccacgaacgctcggatatctacctaggccagctcaagtttggagagcattttggaattggtactaagcttccgagtatcaccaatcctgaccgtccatccacgaaggaaaatgtcatcgctattaccgaagagtgcttaagcaccctagacatagataaacttgattatcttttgatgcactgtccggacccgcgtgtccccatcgaagaaaccatatccggcttcgacgctctttacaaggagggtaaaatcaaaagatggggattatctaactactctactgccgaaacggcagcagtcatcaaagcatgtcacgaaaagggattcgtgccgccagcggtatacgaaggaaactacagtgccgtcgcgcgattagtagaagacgatctccttcccctcctacgtgaacatcatatcgccttctatgcgtactccccgattgcgggtggcttccttgctaagacatcagagcaatttcgtcgccgcggatccctccaaggccgatgggccgaggattcacttattggcgaggtttatcattacatgtacaaccgccccgaattcctcgacgcccttgacaagtggcacgagatcgcgaagaccgaaggcatttcgcccgtggagatggggtaccgatggattgcttacaactctgcgctatcgccggatgacggcgtcattgttggcgcgatggctattgagcaatggcgcagtaatatggcagcaatccagaagggtcctcttaagccagagacagcggcaaagattgatgcactgtggggacctttgcataacggctctgttttctctaactttgaaggtgggatgaaagtcaatgccttcaaaattgaaaaagcctgatgcattgagtgatagatgcaggaattcatgatatagaggggagtccgtggtcatgacatagggagatgaaaccagcttctgttttattatcattgccaaaattgggtcttttcatagcaacgagttatactccgaaacccttcagaaatgtgagtgcatcgccgaagtgctgtagtgacatatttaacgaatggaaatccaaaagatgggctctcgattcggagagctttttc

SEQ ID NO: 32873 - DNA, 402 bp, Muscodor strobelii
  misc_feature: SGI cDNA ID NO. 571333
  misc_feature: Encodes the peptide sequence at SEQ ID NO 32874
atgagcgaaacatacaacatcactgcggcaactgtcgacttgacttctccagaagagggagataacgtatggaaggtggggcagactgatgcgacaggagacggtcttgagttgagtcagagtgcgaaggagatagagtgggcattcggaccaaatagaataacaggattcgttgacacggacaccttggagctcactatcaagccagtggtcgcagggcattatcttggtatcatcagcggtaacctcaaggatggcgttcaagtaaagcttgacctgttcatcttgaaaggttttatgaattggtatctaaagaacggcaacgaggtctggattcatcttgatgagaaggttgtcttcaatgggtcttacaatggagattacaaaatcatgaccatctaa

SEQ ID NO: 32874 - protein, 133 aa, Muscodor strobelii
  misc_feature: SGI Peptide ID NO. 571333
  misc_feature (9)..(133): NCBI GI: 46127453 Blast Desc: FG08104.1 [Gibberella zeae PH-1]
  misc_feature (1)..(133): NCBI GI: 261361038 Blast Desc: conserved [Verticillium albo-atrum VaMs.102]
  misc_feature (9)..(132): NCBI GI: 261359178 Blast Desc: conserved [Verticillium albo-atrum VaMs.102]
  misc_feature (25)..(133): NCBI GI: 119470987 Blast Desc: NFIA_055610 [Neosartorya fischeri NRRL 181] gi|119406261|gb|EAW16212.1| NFIA_055610 [Neosartorya fischeri NRRL 181]
MSETYNITAATVDLTSPEEGDNVWKVGQTDATGDGLELSQSAKEIEWAFGPNRITGFVDTDTLELTIKPVVAGHYLGIISGNLKDGVQVKLDLFILKGFMNWYLKNGNEVWIHLDEKVVFNGSYNGDYKIMTI

SEQ ID NO: 32875 - DNA, 368 bp, Muscodor strobelii
  misc_feature: SGI EST ID NO. CUFF.77686.0
  misc_feature: Variant of the nucleotide sequence at SEQ ID NO 32873
ggacgacaactcatctcaacatagcgaattgtggattttagttgcctggcaagtatggaatatagtgacccataagacagctggaactgggcaatgagactgagtgatgctttctgaattttctataaaggagatgcttcttccaccccaatgtgcccgatacatcccgcatcgcaaagcagttcaggcacacaacagttattgaaactaccctacattgtcatttgatatcaatcgacgacaactgtcaaaatgagcgaaacatacaacatcactgcggcaactgtcgacttgacttctccagaagagggagataacgtatggaaggtggggcagactgatgcgacaggagacggtcttgagttgag

SEQ ID NO: 32876 - DNA, 4071 bp, Muscodor strobelii
  misc_feature: SGI cDNA ID NO. 571334
  misc_feature: Encodes the peptide sequence at SEQ ID NO 32877
atgcggcttctgaaacgccgagaggatggcagtattggttttactcaggatctcgttaccgagattccagagtatgccatactatcgcacacctggggatatgctgagcaggagatcgtcttcgacgaaatcctatcaggttttgcccatcaaaaggaacgttatcagaagattgatttctgtctgaaacaagccgcattagacggtatccaatatgtttgggttgacacatgctgcattaacaagtcaaatcttaccgagttgtctgaagctattaactccatgttccaatggtaccgaaatgccacgaagtgttatgtttacttggtcgatgtcgccaacaacgataacaatgacacggaatcagaccttcgacgaagcagatggttctcacgtggatggactttacaagaactcattgccccatcatcagttgattttttcggtgcagatggccggcgacttggggacaagggctcgttagaacgcgtcatacacgaaatcactggaatcccacttgctgctattcgagggactacgctgtccgcatttagcattgaagagagaatgtcttggtcgaaaggtcgcgaaacgagaaaggaggaggatcaggcgtattcgctcatgggtatgtttgatgttcatatgcctctcatctacggagagggcaaggaaaatgcattcaaccgtttatacagggagattgactttcagcttggcacaccgctactgcgcaaactgccaatagcagcgggcgctgcattcgactccaaggttgaagaaaatagccctatctgcttgcctgacacgcgtgtcgacctcctccaagctgtcacacagtgggcagaggatccggcaggaaagggcttattctggctcaatggcatggccggtaccggcaagtccaccatctcgcgcacgttagcccgtcggtttgcggataggggttacctaggcgccactttcttctttaaaaggggcgagggtgatcgtgatggggtatccaagctctttaccacgatcgctgcacagttggttcgacggaagccagccattgccaaatacgttcaacatgcaatagacacgaaccctgagatattcaatgacgacgtggtaacacaattcaagcgactcgtcgtcgaaccattgtcgagtttatcgttatcagatggagtacgtggcgggcgagacccaacaggcggcggcgtcgtgatattcatcatcgacgccttagatgaatgcagccgagaggaacatatcaggcaaatcattcatttgttctctagatcggatgttctgaagctatcccgactacgagtatttttgaccagtcggccggaactgtctattcgtcttggtttcaacaggattagcaatgcctcttatcaagaccttatccttcatgaaatcgaggaatcagtaactgaacatgaccttctcgtctaccttaagtataaacttgccagaatcaaggaagaatttaacgattctgtacctcaatatcgacgactaccaccaggctggcccgagagctctcagacacaagctctcttaaagatggcaagtcctctcttcatcttcgccgcaactgcctgccgatttattggcgaccgaaggactggcgcgccggatacgaaacttcggaagatcctcgagcaaagtacacaccatggatcgaaacttttcgcaacatacctccctacactgaactatttacttgatagctacccgaatcaatccgaacaagaaaagaatgaagttttagagattttcagagtaatcattggatcagtggtcctccttgctagccctttgtctactttggctctatctcggctacttcatttacctcgaacggacatcgagagccaacttgatttcctccactccgttcttcaagtacctcactcatcggaggagcctatacggctgcttcacttatcgttccgagacttcctcattgatcccacagagaaaaccccgttttggatagatcaggaacaagtgcacaagcagttagtagccaaatgcattcgtctcatgagtgaaagccttcaaacaaacatatgtcaagtaaaatggccggggacccgtcgttcggctattgagcccgaagtaatcaagaacgcattgcccccggaagtacaatacgcctgccagtactgggtttatcacgccaagcaagcgggagagcgcgtgtatgatgatggtttaattcatcagttccttgagcggcattttcttcattggttagaagccttgggtcttctagggaggatcacagagactctcgtaactataagactattacaaacccaacttcagcctgaccaatgccccaagttgtggcgatttctcgatgatgccattcgcttcgctcgcgggaacgtttctgcaattgaaattggaccactccaactatactattcggcgattctattcacacctaggaatagcctcgttcgtggcgtgttccaaaacgtgataccgaaatggatatctctcctaacttgtgacacgtattcaaaatctacaggcgaagcccttggagctcatagcgcatgggtcaattcagttacattcttatctaacgatgtgctagtgtccgggtcagacgattacacggtacgtatatggtcagtggaccagcgcaaatgcacacaaaaattcgagggtcatggcggaatcgtccgctcagttgccctttcgcctgaccacaatattattgcatctggatcagacgaccaaacgatatgtctttggtcaacaaagttggatacaggctcgtatatacacagacttaaagatcacaacgccccggtgtgttcggttgcgttttctccaattggcactgttcttgcatccgggtcgatggacaagactgtccgattatggtcaatgaccacgccctcgcctgtatgcacacatatactcgatggtcacagcggctggattaattcagtgaggttctcacctgatggcgctatcgttgcgtcagcgtccgaagacaaaacagtacgactctggtccgtagcaactggcacatgtatggatatccttaggggtcacagtggctgggttaacaaagtcgcattttcgcccagcggctccttcatcgcgtcagcgtcagaggataaggtagtgcgactatggttgacgtccacgggacaatgcatacagacgttagagggtcacgaaaaactagtctggtgcgtatcgttctcacgagatagcactattgtcgcatcggcgtccgaagatcggaacgtgcggctttgggaaataaccacagggaattgtttccgaatactggagggtcatagtgggcctgtgtattctgtcacattctcgccagataacactcgaattgcatcgggctctgaagataactcgatgcggctttggtcagtaagctcgggcgcatgtacgcatatattcgaacagcgccacacgcccgtccaatcgatggccgtttcaccggatggtacaattattgcagcggtcatcgacgataatactgtacggctctggtcactagctagtggcacatatttgcagacactagacagtcgccacactaagctggtttgctcaatatgcttttcctctgacggagcattgctcgcatctgggtctatggacaatacagtacgactctggtccttggctacaggtagatgccttcagtgtatcgatatgggcgctattgtcgataatttgtacttcgatcgtgatgatgtgaaccttataactaacgccggcactgttcctgtcagtcaaatttaccagcaagcatccagcctaggtctcaattacagtgacttgtctaccttaccatcgggttctatgctgcctcactccaaacctaaagagtcatttgggtatgcacttagtgaagatctagactggataacctataaaggcaggaacctgatttggctgccaatgaactatcgaccagggcagtctgcagtctttggatctacgatagcgattggcacttcttttgggaacatcgttgttctgaaattccatgaagcgggacatgactggcccgttgcatgtggttga

SEQ ID NO: 32877 - protein, 1356 aa, Muscodor strobelii
  misc_feature: SGI Peptide ID NO. 571334
  misc_feature (972)..(1010): Pfam Id: PF00400 Pfam Desc: WD domain, G-beta repeat
  misc_feature (1098)..(1136): Pfam Id: PF00400 Pfam Desc: WD domain, G-beta repeat
  misc_feature (1056)..(1094): Pfam Id: PF00400 Pfam Desc: WD domain, G-beta repeat
  misc_feature (1014)..(1052): Pfam Id: PF00400 Pfam Desc: WD domain, G-beta repeat
  misc_feature (884)..(922): Pfam Id: PF00400 Pfam Desc: WD domain, G-beta repeat
  misc_feature (928)..(966): Pfam Id: PF00400 Pfam Desc: WD domain, G-beta repeat
  misc_feature (1182)..(1221): Pfam Id: PF00400 Pfam Desc: WD domain, G-beta repeat
  misc_feature (843)..(880): Pfam Id: PF00400 Pfam Desc: WD domain, G-beta repeat
  misc_feature (1140)..(1178): Pfam Id: PF00400 Pfam Desc: WD domain, G-beta repeat
  misc_feature (25)..(138): Pfam Id: PF06985 Pfam Desc: Heterokaryon incompatibility protein (HET)
  misc_feature (244)..(1075): NCBI GI: 116191741 Blast Desc: CHGG_05588 [Chaetomium globosum CBS 148.51] gi|88181501|gb|EAQ88969.1| CHGG_05588 [Chaetomium globosum CBS 148.51]
  misc_feature (1)..(1344): NCBI GI: 222356394 Blast Desc: HET-R [Podospora anserina]
  misc_feature (244)..(1344): NCBI GI: 242825103 Blast Desc: WD-repeat protein, [Talaromyces stipitatus ATCC 10500] gi|218712189|gb|EED11615.1| WD-repeat protein, [Talaromyces stipitatus ATCC 10500]
  misc_feature (246)..(1168): NCBI GI: 256723335 Blast Desc: NECHADRAFT_51778 [Nectria haematococca mpVI 77-13-4]
  misc_feature (243)..(1109): NCBI GI: 154310178 Blast Desc: BC1G_07009 [Botryotinia fuckeliana B05.10] gi|150851570|gb|EDN26763.1| BC1G_07009 [Botryotinia fuckeliana B05.10]
  misc_feature (244)..(1251): NCBI GI: 67902962 Blast Desc: AN8468.2 [Aspergillus nidulans FGSC A4] gi|40747934|gb|EAA67090.1| AN8468.2 [Aspergillus nidulans FGSC A4] gi|259484414|tpe|CBF80614.1| TPA: NACHT and WD40 domain FGSC
  misc_feature (1)..(1232): NCBI GI: 154936836 Blast Desc: HNWD1 [Podospora anserina]
  misc_feature (244)..(1117): NCBI GI: 242816686 Blast Desc: WD-repeat protein, [Talaromyces stipitatus ATCC 10500] gi|218713260|gb|EED12684.1| WD-repeat protein, [Talaromyces stipitatus ATCC 10500]
  misc_feature (1)..(1231): NCBI GI: 171677548 Blast Desc: protein product [Podospora anserina] gi|170936842|emb|CAP61500.1| protein product [Podospora anserina]
  misc_feature (244)..(1225): NCBI GI: 212545450 Blast Desc: WD-repeat protein, [Penicillium marneffei ATCC 18224] gi|210065848|gb|EEA19942.1| WD-repeat protein, [Penicillium marneffei ATCC 18224]
MRLLKRREDGSIGFTQDLVTEIPEYAILSHTWGYAEQEIVFDEILSGFAHQKERYQKIDFCLKQAALDGIQYVWVDTCCINKSNLTELSEAINSMFQWYRNATKCYVYLVDVANNDNNDTESDLRRSRWFSRGWTLQELIAPSSVDFFGADGRRLGDKGSLERVIHEITGIPLAAIRGTTLSAFSIEERMSWSKGRETRKEEDQAYSLMGMFDVHMPLIYGEGKENAFNRLYREIDFQLGTPLLRKLPIAAGAAFDSKVEENSPICLPDTRVDLLQAVTQWAEDPAGKGLFWLNGMAGTGKSTISRTLARRFADRGYLGATFFFKRGEGDRDGVSKLFTTIAAQLVRRKPAIAKYVQHAIDTNPEIFNDDVVTQFKRLVVEPLSSLSLSDGVRGGRDPTGGGVVIFIIDALDECSREEHIRQIIHLFSRSDVLKLSRLRVFLTSRPELSIRLGFNRISNASYQDLILHEIEESVTEHDLLVYLKYKLARIKEEFNDSVPQYRRLPPGWPESSQTQALLKMASPLFIFAATACRFIGDRRTGAPDTKLRKILEQSTHHGSKLFATYLPTLNYLLDSYPNQSEQEKNEVLEIFRVIIGSVVLLASPLSTLALSRLLHLPRTDIESQLDFLHSVLQVPHSSEEPIRLLHLSFRDFLIDPTEKTPFWIDQEQVHKQLVAKCIRLMSESLQTNICQVKWPGTRRSAIEPEVIKNALPPEVQYACQYWVYHAKQAGERVYDDGLIHQFLERHFLHWLEALGLLGRITETLVTIRLLQTQLQPDQCPKLWRFLDDAIRFARGNVSAIEIGPLQLYYSAILFTPRNSLVRGVFQNVIPKWISLLTCDTYSKSTGEALGAHSAWVNSVTFLSNDVLVSGSDDYTVRIWSVDQRKCTQKFEGHGGIVRSVALSPDHNIIASGSDDQTICLWSTKLDTGSYIHRLKDHNAPVCSVAFSPIGTVLASGSMDKTVRLWSMTTPSPVCTHILDGHSGWINSVRFSPDGAIVASASEDKTVRLWSVATGTCMDILRGHSGWVNKVAFSPSGSFIASASEDKVVRLWLTSTGQCIQTLEGHEKLVWCVSFSRDSTIVASASEDRNVRLWEITTGNCFRILEGHSGPVYSVTFSPDNTRIASGSEDNSMRLWSVSSGACTHIFEQRHTPVQSMAVSPDGTIIAAVIDDNTVRLWSLASGTYLQTLDSRHTKLVCSICFSSDGALLASGSMDNTVRLWSLATGRCLQCIDMGAIVDNLYFDRDDVNLITNAGTVPVSQIYQQASSLGLNYSDLSTLPSGSMLPHSKPKESFGYALSEDLDWITYKGRNLIWLPMNYRPGQSAVFGSTIAIGTSFGNIVVLKFHEAGHDWPVACG

SEQ ID NO: 32878 - DNA, 1830 bp, Muscodor strobelii
  misc_feature: SGI EST ID NO. CUFF.77693.0
  misc_feature: Variant of the nucleotide sequence at SEQ ID NO 32876
gaacaagtgcacaagcagttagtagccaaatgcattcgtctcatgagtgaaagccttcaaacaaacatatgtcaagtaaaatggccggggacccgtcgttcggctattgagcccgaagtaatcaagaacgcattgcccccggaagtacaatacgcctgccagtactgggtttatcacgccaagcaagcgggagagcgcgtgtatgatgatggtttaattcatcagttccttgagcggcattttcttcattggttagaagccttgggtcttctagggaggatcacagagactctcgtaactataagactattacaaacccaacttcagcctgaccaatgccccaagttgtggcgatttctcgatgatgccattcgcttcgctcgcgggaacgtttctgcaattgaaattggaccactccaactatactattcggcgattctattcacacctaggaatagcctcgttcgtggcgtgttccaaaacgtgataccgaaatggatatctctcctaacttgtgacacgtattcaaaatctacaggcgaagcccttggagctcatagcgcatgggtcaattcagttacattcttatctaacgatgtgctagtgtccgggtcagacgattacacggtacgtatatggtcagtggaccagcgcaaatgcacacaaaaattcgagggtcatggcggaatcgtccgctcagttgccctttcgcctgaccacaatattattgcatctggatcagacgaccaaacgatatgtctttggtcaacaaagttggatacaggctcgtatatacacagacttaaagatcacaacgccccggtgtgttcggttgcgttttctccaattggcactgttcttgcatccgggtcgatggacaagactgtccgattatggtcaatgaccacgccctcgcctgtatgcacacatatactcgatggtcacagcggctggattaattcagtgaggttctcacctgatggcgctatcgttgcgtcagcgtccgaagacaaaacagtacgactctggtccgtagcaactggcacatgtatggatatccttaggggtcacagtggctgggttaacaaagtcgcattttcgcccagcggctccttcatcgcgtcagcgtcagaggataaggtagtgcgactatggttgacgtccacgggacaatgcatacagacgttagagggtcacgaaaaactagtctggtgcgtatcgttctcacgagatagcactattgtcgcatcggcgtccgaagatcggaacgtgcggctttgggaaataaccacagggaattgtttccgaatactggagggtcatagtgggcctgtgtattctgtcacattctcgccagataacactcgaattgcatcgggctctgaagataactcgatgcggctttggtcagtaagctcgggcgcatgtacgcatatattcgaacagcgccacacgcccgtccaatcgatggccgtttcaccggatggtacaattattgcagcggtcatcgacgataatactgtacggctctggtcactagctagtggcacatatttgcagacactagacagtcgccacactaagctggtttgctcaatatgcttttcctctgacggagcattgctcgcatctgggtctatggacaatacagtacgactctggtccttggctacaggtagatgccttcagtgtatcgatatgggcgctattgtcgataatttgtacttcgatcgtgatgatgtgaaccttataactaacgccggcactgttcctgtcagtcaaatttaccagcaagcatccagcctaggtctcaattacagtgacttgtct

SEQ ID NO: 32879 - DNA, 588 bp, Muscodor strobelii
  misc_feature: SGI cDNA ID NO. 571335
  misc_feature: Encodes the peptide sequence at SEQ ID NO 32880
atgccaactatcaggcacgcctttggcggtgatctcgctgcacaggctgcaggtaccatcatggctgtaatgttcatttctgcgcagataatagcatatgtaaacattaagcaacgccagatcaagcttcaccgtgcttggatgatgcgatcttgggtctatgcgtcatgcatcataacaatgcgcatcatcatgtttgccgccgcgatcctcgtctcgattgacggcggttattacatggcacagccctgcgataagattgatcaggtcctgaggggtcatgagcgaacgcttgagctttatcctacctgcgaagctttctactcgggcaacaatttgagacagcatgtggccgctcgtgcaaaactacgaagtcgcgatatcgtagaggtacttacggccttcaatgtcacgtattccatgagcagctggctagctcttgtcattcatgcagctaccattgaactctatttgtattatgaggcagttggtgaacggccaccgaaaatctcacacagcggcagcagcgatctcggcgcagtaatctcgaacatagggaatggcggaactatgaagaaacaagtgtaa

SEQ ID NO: 32880 - protein, 195 aa, Muscodor strobelii
  misc_feature: SGI Peptide ID NO. 571335
  misc_feature (5)..(189): NCBI GI: 258576531 Blast Desc: conserved [Uncinocarpus reesii 1704] gi|237902713|gb|EEP77114.1| conserved [Uncinocarpus reesii 1704]
  misc_feature (5)..(189): NCBI GI: 261204894 Blast Desc: conserved [Ajellomyces dermatitidis SLH14081] gi|239592243|gb|EEQ74824.1| conserved [Ajellomyces dermatitidis SLH14081] gi|239611600|gb|EEQ88587.1| conserved [Ajellomyces
  misc_feature (5)..(158): NCBI GI: 256723217 Blast Desc: NECHADRAFT_97190 [Nectria haematococca mpVI 77-13-4]
  misc_feature (4)..(158): NCBI GI: 171685362 Blast Desc: protein product [Podospora anserina] gi|170942642|emb|CAP68294.1| protein product [Podospora anserina]
  misc_feature (5)..(189): NCBI GI: 39970837 Blast Desc: MGG_02885 [Magnaporthe grisea 70-15] gi|145017292|gb|EDK01655.1| MGG_02885 [Magnaporthe grisea 70-15]
  misc_feature (7)..(189): NCBI GI: 149210339 Blast Desc: MGCH7_ch7g647 [Magnaporthe grisea 70-15] gi|86196602|gb|EAQ71240.1| MGCH7_ch7g647 [Magnaporthe grisea 70-15]
  misc_feature (5)..(195): NCBI GI: 169598280 Blast Desc: SNOG_01941 [Phaeosphaeria nodorum SN15] gi|160704367|gb|EAT90153.2| SNOG_01941 [Phaeosphaeria nodorum SN15]
  misc_feature (5)..(159): NCBI GI: 189208899 Blast Desc: conserved [Pyrenophora tritici-repentis Pt-1C-BFP] gi|187976875|gb|EDU43501.1| conserved [Pyrenophora tritici-repentis Pt-1C-BFP]
  misc_feature (5)..(172): NCBI GI: 46111491 Blast Desc: FG02627.1 [Gibberella zeae PH-1]
  misc_feature (7)..(189): NCBI GI: 46115334 Blast Desc: FG03509.1 [Gibberella zeae PH-1]
MPTIRHAFGGDLAAQAAGTIMAVMFISAQIIAYVNIKQRQIKLHRAWMMRSWVYASCIITMRIIMFAAAILVSIDGGYYMAQPCDKIDQVLRGHERTLELYPTCEAFYSGNNLRQHVAARAKLRSRDIVEVLTAFNVTYSMSSWLALVIHAATIELYLYYEAVGERPPKISHSGSSDLGAVISNIGNGGTMKKQV

SEQ ID NO: 32881 - DNA, 1111 bp, Muscodor strobelii
  misc_feature: SGI EST ID NO. CUFF.77720.1
  misc_feature: Variant of the nucleotide sequence at SEQ ID NO 32879
catcaatccaggcccagcacctcaaatacatctggatgcaagaagagttctaatgaaaatgtttcgcgtgtgctcgacgtaccttcaattctccagtcctactcattttgtcgcgtggttcactctctgtggctctctcgctgcttttagcgtcgctcatttgggctttaataacttctatggcaagttttgtcgtaatgagggtcgaccgccaggccaaggcgccctgcctggtgaatgcttctattttctgcgatccacaagtgcgaaaataggcatccgcacacatcttgctctaatcctcccggctgcactactagcatgcgtccagttcgtacccagaataaggcacaaagccattctctggcaccgtattggcggttatctatccatcactttggggctcgtaggtaccataggtgcgatgccaactatcaggcacgcctttggcggtgatctcgctgcacaggctgcaggtaccatcatggctgtaatgttcatttctgcgcagataatagcatatgtaaacattaagcaacgccagatcaagcttcaccgtgcttggatgatgcgatcttgggtctatgcgtcatgcatcataacaatgcgcatcatcatgtttgccgccgcgatcctcgtctcgattgacggcggttattacatggcacagccctgcgataagattgatcaggtcctgaggggtcatgagcgaacgcttgagctttatcctacctgcgaagctttctactcgggcaacaatttgagacagcatgtggccgctcgtgcaaaactacgaagtcgcgatatcgtagaggtacttacggccttcaatgtcacgtattccatgagcagctggctagctcttgtcattcatgcagctaccattgaactctatttggtgaacggccaccgaaaatctcacacagcggcagcagcgatctcggcgcagtaatctcgaacatagggaatggcggaactatgaagaaacaagtgtaatatttctcagcaagaaactgtgatgactttgaccagcgtatagacatatacaactatagatgagttaccgatttaccgtttgcgtgagtagagtcattatccaatctacagtagc

SEQ ID NO: 32882 - DNA, 531 bp, Muscodor strobelii
  misc_feature: SGI cDNA ID NO. 571336
  misc_feature: Reduced expression when VOC is produced
  misc_feature: Encodes the peptide sequence at SEQ ID NO 32883
atgcccgccacgacgaccatgttccgcgccgcccggcccatgttcaaccagaccacccgcgctgctttccggagtcaattcgcccgccccatcggacggcgcttccagagcaccgctgccggtgagagccctacagcccaacagcaggctggctggttcaagcgcatgtgggattcgcccattggtttcaagactgtccacttctgggctcccgtcatgaaatgggccatcgtcatcgccggtgtcggtgacttcttccgtcccgccgagaagctttccctcacccagaacgccgccctgaccgccaccggtaccctctggactcgctggtgcttcgtcatcactcccaagaactacctgctcgccgccgtcaacttcttcctcgcctgtgtcggtgtcgcccaggtcacccgtatcctcatgtggcaaaagtcgcaagagaagctgacccctgccgagaaggccgagcagaaggttgaagaggcggttgaggccgccaaggatgctgtcaaggaggtcaccaagtcctaa

SEQ ID NO: 32883 - protein, 176 aa, Muscodor strobelii
  misc_feature: SGI Peptide ID NO. 571336
  misc_feature (48)..(170): Pfam Id: PF03650 Pfam Desc: Uncharacterised protein family (UPF0041)
  misc_feature (53)..(170): Pfam Id: PF03650 Pfam Desc: Uncharacterised protein family (UPF0041)
  misc_feature (1)..(150): NCBI GI: 85113679 Blast Desc: NCU03155 [Neurospora crassa OR74A] gi|28926348|gb|EAA35325.1| [Neurospora crassa OR74A]
  misc_feature (15)..(170): NCBI GI: 119467364 Blast Desc: UPF0041 domain protein [Neosartorya fischeri NRRL 181] gi|119405640|gb|EAW15591.1| UPF0041 domain protein [Neosartorya fischeri NRRL 181]
  misc_feature (1)..(176): NCBI GI: 261353520 Blast Desc: conserved [Verticillium albo-atrum VaMs.102]
  misc_feature (32)..(172): NCBI GI: 39970403 Blast Desc: MGG_02668 [Magnaporthe grisea 70-15] gi|149209839|ref|XP_001522294.1| MGCH7_ch7g401 [Magnaporthe grisea 70-15] gi|86196356|gb|EAQ70994.1| MGCH7_ch7g401 grisea
  misc_feature (15)..(170): NCBI GI: 70984545 Blast Desc: UPF0041 domain protein [Aspergillus fumigatus Af293] gi|66845406|gb|EAL85741.1| UPF0041 domain protein [Aspergillus fumigatus Af293] gi|159122562|gb|EDP47683.1| UPF0041 domain
  misc_feature (15)..(176): NCBI GI: 121703934 Blast Desc: UPF0041 domain protein [Aspergillus clavatus NRRL 1] gi|119398375|gb|EAW08805.1| UPF0041 domain protein [Aspergillus clavatus NRRL 1]
  misc_feature (3)..(173): NCBI GI: 256734101 Blast Desc: [Nectria haematococca mpVI 77-13-4]
  misc_feature (15)..(170): NCBI GI: 169775447 Blast Desc: [Aspergillus oryzae RIB40] gi|83770054|dbj|BAE60189.1| protein product [Aspergillus oryzae]
  misc_feature (15)..(176): NCBI GI: 242780681 Blast Desc: UPF0041 domain protein [Talaromyces stipitatus ATCC 10500] gi|242780686|ref|XP_002479648.1| UPF0041 domain protein [Talaromyces stipitatus ATCC 10500] gi|218719794|gb|EED19213.1|
  misc_feature (15)..(170): NCBI GI: 238495909 Blast Desc: UPF0041 domain protein [Aspergillus flavus NRRL3357] gi|220694070|gb|EED50414.1| UPF0041 domain protein [Aspergillus flavus NRRL3357]
  misc_feature: Useful for introducing or modulating the production of volatile compounds
MPATTTMFRAARPMFNQTTRAAFRSQFARPIGRRFQSTAAGESPTAQQQAGWFKRMWDSPIGFKTVHFWAPVMKWAIVIAGVGDFFRPAEKLSLTQNAALTATGTLWTRWCFVITPKNYLLAAVNFFLACVGVAQVTRILMWQKSQEKLTPAEKAEQKVEEAVEAAKDAVKEVTKS

SEQ ID NO: 32884 - DNA, 1329 bp, Muscodor strobelii
  misc_feature: SGI EST ID NO. CUFF.77767.0
  misc_feature: Variant of the nucleotide sequence at SEQ ID NO 32882
cgacatgtcgcagtttatgcaactacgcagacgacacgggaagctgcaggggtgggctccgattatctccgggctgccccaaacttctcttttcgtggtccgccgacataatcactgttccttaatcaactcacgcatcgcgacccgaagcccgacacctctcccctcctcgctctttcttcttgtccgcgtgtattcgacgactctccagacaccccttcgagtccgatcctgatacaccgacaacataagacaagatgcccgccacgacgaccatgttccgcgccgcccggcccatgttcaaccagaccacccgcgctgctttccggagtcaattcgcccgccccatcggacggcgcttccagagcaccgctgccggtgagagccctacagcccaacagcaggctggctggttcaagcgcatgtgggattcgcccattggtttcaagactgtccacttctgggctcccgtcatgaaatgggccatcgtcatcgccggtgtcggtgacttcttccgtcccgccgagaagctttccctcacccagaacgccgccctgaccgccaccggtaccctctggactcgctggtgcttcgtcatcactcccaagaactacctgctcgccgccgtcaacttcttcctcgcctgtgtcggtgtcgcccaggtcacccgtatcctcatgtggcaaaagtcgcaagagaagctgacccctgccgagaaggccgagcagaaggttgaagaggcggttgaggccgccaaggatgctgtcaaggaggtcaccaagtcctaagcgaaattctgagtgacgggccgtgaattgagagagcacgtgacgacgtgatggaacgtggcaaggtgcaatacccggtgatataggcgatgctgggtcgatagacgcatgtcagcagtgcggctgcatatagacgaatgctgaggcgcaagcacgaactggagttgcataccaccggttagtccgagatgcgcaagatgggcgaaaactacatgaaagcaaatggacacaattgcttcactgatatgctaccatggggcaggattatgtgtcttaaggccatgtagtatggtactgttgattttcttgtcccgagaagcggacagggaaatagagagacactgtatattactcggagcacttacaggctgtcctgcatccaggctgcattcctcatctatattatatactacttccttaaacttcatatctatgtcatacccatgcatactcttgccttcttgcattgtgagttgccagggtcaatatatcttgtgtctcctgtgagctgtggcaacctacctctagctgtgaacgtcca

SEQ ID NO: 32885 - DNA, 288 bp, Muscodor strobelii
  misc_feature: SGI cDNA ID NO. 571337
  misc_feature: Encodes the peptide sequence at SEQ ID NO 32886
atgtcgagcaaatacgccttcaccaagaccctgaaggaggtccgcttcctcttctgccagggcgaagccagcgctgccaccagaacattcctcacgcgcgcctacccaacgatgaagaagaacaacccacacactcccatcctcctgcgcgaagctgccggcacattacccaagatctatgctcgatatgagttcggaaaggagaagagccagtcgttagaaggattatccgacaagcagatcgaagacgccgtcacaaccctcgtcaagaacgatgtagcatcatga

SEQ ID NO: 32886 - protein, 95 aa, Muscodor strobelii
  misc_feature: SGI Peptide ID NO. 571337
  misc_feature (19)..(92): Pfam Id: PF05047 Pfam Desc: Mitochondrial ribosomal protein L51 / S25 / CI-B8 domain
  misc_feature (1)..(94): NCBI GI: 171683889 Blast Desc: protein product [Podospora anserina] gi|170941905|emb|CAP67557.1| protein product [Podospora anserina]
  misc_feature (1)..(91): NCBI GI: 149209841 Blast Desc: MGCH7_ch7g402 [Magnaporthe grisea 70-15] gi|86196357|gb|EAQ70995.1| MGCH7_ch7g402 [Magnaporthe grisea 70-15]
  misc_feature (1)..(91): NCBI GI: 145610171 Blast Desc: MGG_02669 [Magnaporthe grisea 70-15] gi|145017536|gb|EDK01899.1| MGG_02669 [Magnaporthe grisea 70-15]
  misc_feature (1)..(91): NCBI GI: 261353519 Blast Desc: NADH-ubiquinone oxidoreductase 10.5 kDa subunit [Verticillium albo-atrum VaMs.102]
  misc_feature (1)..(92): NCBI GI: 85113684 Blast Desc: NADH:ubiquinone oxidoreductase 10.5kD subunit [Neurospora crassa OR74A] gi|2833211|sp|Q07842.1|NDUA2_NEUCR RecName: Full=NADH-ubiquinone oxidoreductase 10.5 kDa subunit; I;
  misc_feature (1)..(92): NCBI GI: 70984547 Blast Desc: NADH-ubiquinone oxidoreductase 105 kDa subunit [Aspergillus fumigatus Af293] gi|66845407|gb|EAL85742.1| NADH-ubiquinone oxidoreductase 105 kDa subunit [Aspergillus 105
  misc_feature (1)..(92): NCBI GI: 119467362 Blast Desc: NADH-ubiquinone oxidoreductase 105 kDa subunit [Neosartorya fischeri NRRL 181] gi|119405639|gb|EAW15590.1| NADH-ubiquinone oxidoreductase 105 kDa subunit [Neosartorya NRRL
  misc_feature (1)..(90): NCBI GI: 46128377 Blast Desc: FG08566.1 [Gibberella zeae PH-1]
  misc_feature (1)..(91): NCBI GI: 121703936 Blast Desc: NADH-ubiquinone oxidoreductase 105 kDa subunit [Aspergillus clavatus NRRL 1] gi|119398376|gb|EAW08806.1| NADH-ubiquinone oxidoreductase 105 kDa subunit [Aspergillus NRRL
  misc_feature (1)..(90): NCBI GI: 145247104 Blast Desc: An12g07520 [Aspergillus niger] gi|134080529|emb|CAK46376.1| protein product [Aspergillus niger]
MSSKYAFTKTLKEVRFLFCQGEASAATRTFLTRAYPTMKKNNPHTPILLREAAGTLPKIYARYEFGKEKSQSLEGLSDKQIEDAVTTLVKNDVAS

SEQ ID NO: 32887 - DNA, 437 bp, Muscodor strobelii
  misc_feature: SGI EST ID NO. CUFF.77834.0
  misc_feature: Variant of the nucleotide sequence at SEQ ID NO 32885
cgggaagctcaagcctcgactttcccaaacgtcaacctctcacgacagcctcgacacacccctccacccccggcgacaccgccaacatgtcgagcaaatacgccttcaccaagaccctgaaggaggtccgcttcctcttctgccagggcgaagccagcgctgccaccagaacattcctcacgcgcgcctacccaacgatgaagaagaacaacccacacactcccatcctcctgcgcgaagctgccggcacattacccaagatctatgctcgatatgagttcggaaaggagaagagccagtcgttagaaggattatccgacaagcagatcgaagacgccgtcacaaccctcgtcaagaacgatgtagcatcatgatgtttccctgtacatataccgattcctcataccaatagacttgtgaaccaaatcgcttcgatg

SEQ ID NO: 32888 - DNA, 1035 bp, Muscodor strobelii
  misc_feature: SGI cDNA ID NO. 571338
  misc_feature: Elevated expression when VOC is produced
  misc_feature: Encodes the peptide sequence at SEQ ID NO 32889
atggcctcagagaatctgtttagagacatcccaccctttcccgatgatgtacccattgcgtcaatggccaccatctcattgaaactcttgcgtctgggagacagcttatgtgagaggcagctcctcgatgcatgcaaagaagttggcttcttccttctcgatttacgtgatgacgagacgggtagagcggtcatagacgagattgatcagctctttctcctgtgtcatgagacgatgaacctcacacgggatgtcaaacagcagtatgagcacgatatcccaaagtcattcctaggatttaaacctcctggtcaggcaaagacagagaaagatgaaccagatcggtacgaatctttcaactttgggcaagacggacttattggcattgcagatacgcctctacaagcgctgccgccctcgctcagcaatcatattccgctcgtcatttcatacttaaggcattgccaaacaattaaccacatcctgaacgtggctcttgctaagcaattagatctaccttatgatacatttacctccttacagcctcccgaaaaagcggctggtacggttcttcggtttctaaaggcctatgccagtcctagtcaacaggatctccgtaccgtcttgattcatcacactgactttgggactattacgctgctcgcgaacattgttgggggtcttcaaatacttcaagttggtggttccccacatgacgaaaggtcctggctatgggctcgtccgcagccaggctgtctagttgtgaatattggcgatgctatggctcagtggaccggaggcattctacgaagttgcatgcataggatatcgtatgcgcctgggagtcaacgctttgtcgataaatacagcgtcgtatatttagctcggccggagcgcaacgcaagtatgaagaggttgcttcattccaacgaccacagtactaaagacgacaatggtgagaatctaactgcatgggaatgggaagtgaaaaaggcaatggctatggcaagagatatcaaaccaacaacggagtga

SEQ ID NO: 32889 - protein, 344 aa, Muscodor strobelii
  misc_feature: SGI Peptide ID NO. 571338
  misc_feature (184)..(297): Pfam Id: PF03171 Pfam Desc: 2OG-Fe(II) oxygenase superfamily
  misc_feature (209)..(297): Pfam Id: PF03171 Pfam Desc: 2OG-Fe(II) oxygenase superfamily
  misc_feature (1)..(335): NCBI GI: 156065687 Blast Desc: SS1G_00854 [Sclerotinia sclerotiorum 1980] gi|154691713|gb|EDN91451.1| SS1G_00854 [Sclerotinia sclerotiorum 1980]
  misc_feature (1)..(306): NCBI GI: 238490780 Blast Desc: oxidoreductase, 2OG-Fe(II) oxygenase family, [Aspergillus flavus NRRL3357] gi|220697040|gb|EED53381.1| oxidoreductase, 2OG-Fe(II) oxygenase family, [Aspergillus flavus
  misc_feature (1)..(306): NCBI GI: 169772875 Blast Desc: [Aspergillus oryzae RIB40] gi|83768767|dbj|BAE58904.1| protein product [Aspergillus oryzae]
  misc_feature (7)..(340): NCBI GI: 115401474 Blast Desc: conserved [Aspergillus terreus NIH2624] gi|114190266|gb|EAU31966.1| conserved [Aspergillus terreus NIH2624]
  misc_feature (1)..(331): NCBI GI: 156043910 Blast Desc: SS1G_10058 [Sclerotinia sclerotiorum 1980] gi|154694447|gb|EDN94185.1| SS1G_10058 [Sclerotinia sclerotiorum 1980]
  misc_feature (1)..(334): NCBI GI: 261201914 Blast Desc: oxidoreductase [Ajellomyces dermatitidis SLH14081] gi|239590268|gb|EEQ72849.1| oxidoreductase [Ajellomyces dermatitidis SLH14081]
  misc_feature (1)..(334): NCBI GI: 239611981 Blast Desc: oxidoreductase [Ajellomyces dermatitidis ER-3]
  misc_feature (7)..(339): NCBI GI: 259489603 Blast Desc: TPA: oxidoreductase, 2OG-Fe(II) oxygenase family, (AFU_orthologue; AFUA_5G11160) [Aspergillus nidulans FGSC A4]
  misc_feature (7)..(339): NCBI GI: 67515813 Blast Desc: AN0188.2 [Aspergillus nidulans FGSC A4] gi|40746905|gb|EAA66061.1| AN0188.2 [Aspergillus nidulans FGSC A4]
  misc_feature (1)..(306): NCBI GI: 119192568 Blast Desc: CIMG_00661 [Coccidioides immitis RS]
  misc_feature: Useful for introducing or modulating the production of volatile compounds
MASENLFRDIPPFPDDVPIASMATISLKLLRLGDSLCERQLLDACKEVGFFLLDLRDDETGRAVIDEIDQLFLLCHETMNLTRDVKQQYEHDIPKSFLGFKPPGQAKTEKDEPDRYESFNFGQDGLIGIADTPLQALPPSLSNHIPLVISYLRHCQTINHILNVALAKQLDLPYDTFTSLQPPEKAAGTVLRFLKAYASPSQQDLRTVLIHHTDFGTITLLANIVGGLQILQVGGSPHDERSWLWARPQPGCLVVNIGDAMAQWTGGILRSCMHRISYAPGSQRFVDKYSVVYLARPERNASMKRLLHSNDHSTKDDNGENLTAWEWEVKKAMAMARDIKPTTE

SEQ ID NO: 32890 - DNA, 1284 bp, Muscodor strobelii
  misc_feature: SGI EST ID NO. CUFF.77769.0
  misc_feature: Variant of the nucleotide sequence at SEQ ID NO 32888
tttacggttgacatttgacatcttgcctgcagtaaatatggcctcagagaatctgtttagagacatcccaccctttcccgatgatgtacccattgcgtcaatggccaccatctcattgaaactcttgcgtctgggagacagcttatgtgagaggcagctcctcgatgcatgcaaagaagttggcttcttccttctcgatttacgtgatgacgagacgggtagagcggtcatagacgagattgatcagctctttctcctgtgtcatgagacgatgaacctcacacgggatgtcaaacagcagtatgagcacgatatcccaaagtcattcctaggatttaaacctcctggtcaggcaaagacagagaaagatgaaccagatcggtacgaatctttcaactttgggcaagacggacttattggcattgcagatacgcctctacaagcgctgccgccctcgctcagcaatcatattccgctcgtcatttcatacttaaggcattgccaaacaattaaccacatcctgaacgtggctcttgctaagcaattagatctaccttatgatacatttacctccttacagcctcccgaaaaagcggctggtacggttcttcggtttctaaaggcctatgccagtcctagtcaacaggatctccgtaccgtcttgattcatcacactgactttgggactattacgctgctcgcgaacattgttgggggtcttcaaatacttcaagttggtggttccccacatgacgaaaggtcctggctatgggctcgtccgcagccaggctgtctagttgtgaatattggcgatgctatggctcagtggaccggaggcattctacgaagttgcatgcataggatatcgtatgcgcctgggagtcaacgctttgtcgataaatacagcgtcgtatatttagctcggccggagcgcaacgcaagtatgaagaggttgcttcattccaacgaccacagtactaaagacgacaatggtgagaatctaactgcatgggaatgggaagtgaaaaaggcaatggctatggcaagagatatcaaaccaacaacggagtgatattaaggtgcacatgagccaaagggctggcacgaagcacaaagactgcgtctctaattttcttgaggagagctatcgcagccccagcgctattatttgttttggtatttttaatgagtaactgctccttataactggtcactgtgccatagatttgtctgtaaactgtcatttgtgtggcagatcagtattccagtgaactagaagtctct

SEQ ID NO: 32891 - DNA, 1578 bp, Muscodor strobelii
  misc_feature: SGI cDNA ID NO. 571339
  misc_feature: Encodes the peptide sequence at SEQ ID NO 32892
atgtacttacgcatcatgtggcaaggtgttgcgttgaatttgacgacgcgtgttcggttagccacccgaagtttacgactcgaatcgctaaagcttctcaatgcgctgtgtaacaatcgaatcgatagctctttgcagaactcatatgtgccgtggacgatcttgttcgtcgccttcaatctgttgccagctgctctctgggcaggagcaattacgcctgctttgaagaccacttcgtggcagcttggtctccctgtaccagactactctgatccacaaggcctcgtgagcgagggtgtagtctttagcaatagtagctcattgctagtgacagatttggggacattcgccttctttccccagcgcgaatttgccggctacctcatagcgaatgcccgagaagccatcagtccctctgggaacattactccccatgccaaactggacaaatcggggttcatttacactacgagaagctttggcatagcctcgtccgtgggcttgactgatacatttcctctgcccgtacaggcgtattcctatcacgaaattgggttccaggtctcggcaagctgtattcataatcaatcagcacgggtctggttacaaaagctcaataccagtgactcagggttgtctttcaatatctacaatataaaggcatgctttccgccaaactggggtatggactgggaaaatccttgcggcgcaagtgcagctactgccatgagggacgatctagcgttcgcaacagcggtcactgcaggtcaggataatcctgccatgagtttggcgggcgggtcttatgtcggcttcgcaacatacggcaaccaaagtaactatgcgggcctcagtcacgttcaatgtgaaatcgctttcaatccgttcaactttctcgtgtcggtcgacactatttcgaagacaattgccgtagagccgcaaaacaagacgaatgcgttcccgaatgctttaccttgggcatcacagacattgtggcgactaagcgatctaggtaataccatggcaatgacacaatggacttcagtctggggagatacttttctgaatacggctgcgataagtagcatcaacgagagaactaaggcaacgatcctccatggggttggcacagccctagagtctatgttcgatgacatattacaagccacctcagcggcgaagctcatgatcttgcagcacaaccagaccattccggcagaggtgcagttgttgagctttgtgcttggccatggcatctacatctatggcatcttgacggtgaatatgctggtcacttttgtcttcgtcatcgagctaattcgcacgcggatgtggcgggacgcacctcgcttcgattttgccgacatcaaagccgtgatattaaatgctgcttcctcacatagcagcatatcggacgaagtcgaagctatctcgcgcattcataagccagacagttctacaattttgccggggcaggtgaggatagcctttaaaagctgcacctgtgaaggcactcgtttaaacatatcgtatccttctgttgatgcgcctcgggcagaagagaagccaccttattaa

SEQ ID NO: 32892 - protein, 525 aa, Muscodor strobelii
  misc_feature: SGI Peptide ID NO. 571339
  misc_feature (12)..(481): NCBI GI: 256729032 Blast Desc: NECHADRAFT_93222 [Nectria haematococca mpVI 77-13-4]
  misc_feature (12)..(479): NCBI GI: 156048738 Blast Desc: SS1G_09101 [Sclerotinia sclerotiorum 1980] gi|154693497|gb|EDN93235.1| SS1G_09101 [Sclerotinia sclerotiorum 1980]
  misc_feature (12)..(489): NCBI GI: 154294695 Blast Desc: BC1G_13474 [Botryotinia fuckeliana B05.10] gi|150844609|gb|EDN19802.1| BC1G_13474 [Botryotinia fuckeliana B05.10]
  misc_feature (12)..(477): NCBI GI: 189191170 Blast Desc: [Pyrenophora tritici-repentis Pt-1C-BFP] gi|187973530|gb|EDU41029.1| [Pyrenophora tritici-repentis Pt-1C-BFP]
  misc_feature (12)..(471): NCBI GI: 46138845 Blast Desc: FG10937.1 [Gibberella zeae PH-1]
  misc_feature (12)..(475): NCBI GI: 255948896 Blast Desc: Pc22g12720 [Penicillium chrysogenum Wisconsin 54-1255] gi|211592232|emb|CAP98560.1| Pc22g12720 [Penicillium chrysogenum Wisconsin 54-1255]
  misc_feature (13)..(475): NCBI GI: 115390597 Blast Desc: [Aspergillus terreus NIH2624] gi|114193727|gb|EAU35427.1| [Aspergillus terreus NIH2624]
  misc_feature (12)..(472): NCBI GI: 159125199 Blast Desc: conserved [Aspergillus fumigatus A1163]
  misc_feature (145)..(488): NCBI GI: 169622218 Blast Desc: SNOG_14326 [Phaeosphaeria nodorum SN15] gi|160704725|gb|EAT78197.2| SNOG_14326 [Phaeosphaeria nodorum SN15]
  misc_feature (64)..(473): NCBI GI: 145257671 Blast Desc: An04g04500 [Aspergillus niger] gi|134058730|emb|CAK38714.1| protein product [Aspergillus niger]
MYLRIMWQGVALNLTTRVRLATRSLRLESLKLLNALCNNRIDSSLQNSYVPWTILFVAFNLLPAALWAGAITPALKTTSWQLGLPVPDYSDPQGLVSEGVVFSNSSSLLVTDLGTFAFFPQREFAGYLIANAREAISPSGNITPHAKLDKSGFIYTTRSFGIASSVGLTDTFPLPVQAYSYHEIGFQVSASCIHNQSARVWLQKLNTSDSGLSFNIYNIKACFPPNWGMDWENPCGASAATAMRDDLAFATAVTAGQDNPAMSLAGGSYVGFATYGNQSNYAGLSHVQCEIAFNPFNFLVSVDTISKTIAVEPQNKTNAFPNALPWASQTLWRLSDLGNTMAMTQWTSVWGDTFLNTAAISSINERTKATILHGVGTALESMFDDILQATSAAKLMILQHNQTIPAEVQLLSFVLGHGIYIYGILTVNMLVTFVFVIELIRTRMWRDAPRFDFADIKAVILNAASSHSSISDEVEAISRIHKPDSSTILPGQVRIAFKSCTCEGTRLNISYPSVDAPRAEEKPPY

SEQ ID NO: 32893 - DNA, 866 bp, Muscodor strobelii
  misc_feature: SGI EST ID NO. CUFF.77775.0
  misc_feature: Variant of the nucleotide sequence at SEQ ID NO 32891
ctgggaacattactccccatgccaaactggacaaatcggggttcatttacactacgagaagctttggcatagcctcgtccgtgggcttgactgatacatttcctctgcccgtacaggcgtattcctatcacgaaattgggttccaggtctcggcaagctgtattcataatcaatcagcacgggtctggttacaaaagctcaataccagtgactcagggttgtctttcaatatctacaatataaaggcatgctttccgccaaactggggtatggactgggaaaatccttgcggcgcaagtgcagctactgccatgagggacgatctagcgttcgcaacagcggtcactgcaggtcaggataatcctgccatgagtttggcgggcgggtcttatgtcggcttcgcaacatacggcaaccaaagtaactatgcgggcctcagtcacgttcaatgtgaaatcgctttcaatccgttcaactttctcgtgtcggtcgacactatttcgaagacaattgccgtagagccgcaaaacaagacgaatgcgttcccgaatgctttaccttgggcatcacagacattgtggcgactaagcgatctaggtaataccatggcaatgacacaatggacttcagtctggggagatacttttctgaatacggctgcgataagtagcatcaacgagagaactaaggcaacgatcctccatggggttggcacagccctagagtctatgttcgatgacatattacaagccacctcagcggcgaagctcatgatcttgcagcacaaccagaccattccggcagaggtgcagttgttgagctttgtgcttggccatggcatctacatctatggcatcttgacggtg

SEQ ID NO: 32894 - DNA, 1548 bp, Muscodor strobelii
  misc_feature: SGI cDNA ID NO. 571340
  misc_feature: Encodes the peptide sequence at SEQ ID NO 32895
atgcctcccaaatacgaaattttgaagggctatactatcaaggacgctctgcaggccgctggcccacccatgtccgggcctgagtgcttcagcaaccgtgaaccacctatcgccttcttcacggatctgcctcaagagagggccgcactattctcaacggagaatgagaccaagccgtttcgcaatgttaaacatccaacgcacaaacgtccgggattcttgtggtggcccgctcagatccagctcgttgctgacatgaccagacgggattatccgggcatatgctggcgccttcgtccgcttaaagactattcagatctatacaagttttgggatgctcatgacatctatcataaaggagcccagaacctgtggaatgtcatcaacacactgatcttcgagaacgagctggtatgggcatcaatcgatgagggtgatcccaaaatttggttgctgaaagacgacctcactttgttcatggagagattcaatcttgtcaagcagtctgatttgaacgtggctatggaggcgaataagttgacggctcctgttcacaacgattttgtggatacaatgaacgagaatggcacgaatcacaacgccgttcaggagacgatcgataccattgtacacagtgttcccagtcgagatatcgctgaactttgttataagacatcatcaaacgccgatacgaaggactcaagagccaccttctacgctcatcgagccatgctcctacagcagttcaaggataccctcacgtccacaccggcaacgagcaacacttcattccgatacgatcccgacatgttccctcccctcccttccacatctgattctgcccttgcaaccgagcccgacaatcctcagccaatgcattcagatactgcaatgatgcaagatgatgttcaggatcctgattttagcgacgaggttgaagatcaccatgcatcacttgatgcctctatactgaaggaatacaagatggaaggtctgagttatgggccaatcaccacaatcgaatgcgccaatagaggcaaggagctcagcgtcgtcaccaaatttaggccttgcgtgtgcaaggactgcacagaaagagagcggacgttgtatgttagcgtttgcgctgcaccagtcaccgtaaacactctctttgttgggagcaacccgcatatcggcctctatgctgccatactagcgtacttcagtacattcggacaagtagaggagattttgacagcagatcgtgacgcgacacttcctcagagagcccttcacgtaaaattctctgatctgacgtctatgcttcaagcatggcatgagggtgcaaatgcgcatctcgacgtgccgggacttggcagcgtcatattgaaagtctatcctcgtaccggttcccaattcttcaatcccagaaacattcgcagtgtccgccagcgcctgtcaaagcctgtaaagagccccgtggctctacagaccggctccaacctaggccactccaaggatgttaagctcaatcctagcgcaagtgaattcgtcccattgaaatga

SEQ ID NO: 32895 - protein, 515 aa, Muscodor strobelii
  misc_feature: SGI Peptide ID NO. 571340
  misc_feature (36)..(142): NCBI GI: 256734102 Blast Desc: NECHADRAFT_77883 [Nectria haematococca mpVI 77-13-4]
  misc_feature (36)..(146): NCBI GI: 46128375 Blast Desc: FG08565.1 [Gibberella zeae PH-1]
  misc_feature (33)..(159): NCBI GI: 39970407 Blast Desc: [Magnaporthe grisea 70-15] gi|145017535|gb|EDK01898.1| [Magnaporthe grisea 70-15]
  misc_feature (33)..(159): NCBI GI: 149209843 Blast Desc: MGCH7_ch7g403 [Magnaporthe grisea 70-15] gi|86196358|gb|EAQ70996.1| MGCH7_ch7g403 [Magnaporthe grisea 70-15]
MPPKYEILKGYTIKDALQAAGPPMSGPECFSNREPPIAFFTDLPQERAALFSTENETKPFRNVKHPTHKRPGFLWWPAQIQLVADMTRRDYPGICWRLRPLKDYSDLYKFWDAHDIYHKGAQNLWNVINTLIFENELVWASIDEGDPKIWLLKDDLTLFMERFNLVKQSDLNVAMEANKLTAPVHNDFVDTMNENGTNHNAVQETIDTIVHSVPSRDIAELCYKTSSNADTKDSRATFYAHRAMLLQQFKDTLTSTPATSNTSFRYDPDMFPPLPSTSDSALATEPDNPQPMHSDTAMMQDDVQDPDFSDEVEDHHASLDASILKEYKMEGLSYGPITTIECANRGKELSVVTKFRPCVCKDCTERERTLYVSVCAAPVTVNTLFVGSNPHIGLYAAILAYFSTFGQVEEILTADRDATLPQRALHVKFSDLTSMLQAWHEGANAHLDVPGLGSVILKVYPRTGSQFFNPRNIRSVRQRLSKPVKSPVALQTGSNLGHSKDVKLNPSASEFVPLK

SEQ ID NO: 32896 - DNA, 4134 bp, Muscodor strobelii
  misc_feature: SGI cDNA ID NO. 571341
  misc_feature: Encodes the peptide sequence at SEQ ID NO 32897
atggagacgcctccaaaatcgccctcgcccgaacctgtgtatgagatggacaaattgggggaagagatcgtgctggaaacggctggtgtgagcaccacagataatcttatagactttgccttggacaaagctcagaagatattcttgattctcgcatatatcgggaatccagcagcactgaacgactttcaggcggcggacttccatgatgaacatttgccccttggagttgaagagaccaaaaacaatgatggaaagcggcgtaagatatatggcccgctgaatgaagcgactctgcatcagtcgagccaaacactcaaaacaaatattcgcttctcactgtccactctgagacctcaggagataaggcagttcatgcacgaacaatggttttttctcgccccaatgtatggaagatccagattttaccaaaatttccacgagtcacgcccacttcctttcatcaatcaaactggtcctagcaggaatgggcattttagctcagtctatcaggttgaactccatccggctcataaggagcacgagaattttggtaacggttgggttgcagtcaaagagtttaaagacacaacgaaagagcattttcgcaaagaacttgaagcactccaaataatcaaaaatctagtcgatcctcacttaatcacgccgatcgcagcatttcaaagggggtcacaacaatgcttcgtatttccttgggctgagggaggaaatcttcgtgattattggacaaaaagcggctcgttagactctgccactactagggatgatagactgttgtcatggacacttgcccagatgaacggcctctgtagatgtttgaagagactctgggaccttaattgtcgacacggcgatatcaagcccgaaaatattctttacacaggcggaggcggtaacctgctcattgcggacgttggtttggcaaaagttcacacggaggtcacatataaacgccaaatgagctcttcgaccaaatatggaacacgccgctatgaagcgccggagatttacatgaaagagcaaggccacaaggctatctctcgcgactacgacatgtggtcgatgggtattctccttctagaatggctgatttggcttgtatacgggagtgacaaggctggaatgcagaagatatcgcaaatcaacagactgatgcagttttgggaatcatcggccaacaagttctatgtcgcagactctgctcagaaggtcatgactgaaatggccgagatactgtcgggcgacactgctatgggagaaatcttacatctcattcgtaaccgactacttgtggtgtcactcgccgacgaacatggagacttgagcaaaggtcgtgcgaaagcttcagaactttcccagactatgagcgacatttatgagcgcgcaaatcgtgattcggcgtatatgtttgaccccaaggtgtggtatcggaggaatcccagcgagagtggatcggctttggagctcccaggaagacccaaacagcaaagagccttgggaacaccacctgcacgagttgactcgattagcgagccttttcacaatcataaagcaattaacgacaatatccctacgatatcggtcgagtttgtcgatagtacatcatcgacacgacgtcttccggctcttcctcctgacgagtacaaccggcgaagcaagccttttaacgataattgggaatcaaaagcagacaacgcatttgctttaaaagtgctaagcaaagacaattttgcagatttccgtcatgcacctattgaaacagtatcttgtcctaattgcaacgtcaaaaacatttggtctgcggggtttcgcttgcgatacaatatgtcagcaatgaaagctgggtctgtcaaatgcaacatgtgtaaattactatatgaatcgcttctatcacatgtaggggaaagtgaggagggtgatttgatacgcgtcgagtcaacgctcaagatcgatgcaacaaaaaagcccgtcatttctctgtactcagaccctagtaagtactacgcagcacccgatcgtgtccctttactcatcgagttctcagcttctcggaagaatactccgaatttcgcacagcttggtttcccgcagctcccaatagtcggaagcgcagaggaattattgcttcttcgcgaatggcttaacaactgtgatcggtcccacatatgtcgaccacgattggatactgaacagagggccttgaagatgccaactcgtctcatagaggtcaaagaggataattctaagctatctttgcatcttgtagaaacagcagacttgcctagtgtggactacgttgctctaagccattgctggggcaaagttcctgagggattggaattttcaacaactcaaagcacactcgaaagccacaaacaaactattgctttcgaaaagcttccgcaaacgttccaggatgcggtgactgtcacgaacaaacttgggatcagttacgtttggatcgactcaatatgtatcatccaacaagatgaagttgattgggaaactgaagccgggaagatggaggatgtcttcagttccgcgtatgtcacaatcgctgctagctccgccgactcgtgtctcaaaggcttcatccacgatcgcccaccccggccttgcgtcgctatacaagaccaatccggtgacaaggtctacttctgcaaaaacattgatgatttccacggggatgttgagcaaggagtgctcaaccagcgcggctgggtgctacaagagagagctctatctcggaggacgattcacttcacctcaaatcaaatctattgggaatgcggagaaggcgtacattgcgagaccctcgctaaattgcgaaattctaaagctgagtttctcaatgatgccgattttcctaaatcggctcttcgatactttcgagacggtcgtattgtgcttttccaaacaatctattcgatgtactctcaattggcatttaccaatcctacggatcggtcgatggggattctgggtctcgagcgaagactcgcccgtaccctagaatcgaagggcgactacgggatcttacagcgatatcttcaacgcagcctcttatgggaacgagaaccgaataacgagttgacgcctatcacttattcggaagaaagacgcgtaccctcttggtcttggatgtcctgcacgggcgcgatccagttcatcaaagcgccttttgacggtgtagattggagaagcgacgatattcggatagactttgagactggctcactccgcagctcgaggcgcaatcgtaccgcaacctcaaacgcggagattgaggctcttgcaagacgcataaataccgatggcggcgtcgctgacgtgctgaaacgagtgtcatttgacggtatcaccatggacgatctttcgaccctacgctgcgtcgttctcggcatagacaagtcggacaaagacgtcgcgaatgatgagcgaaaacattacgttctattagtgaaaccggtgcctggctcaagtgacggcacatatgttagagttggagtgggttctctcttggcggcccatgtcgtcattgacaatgctgaggctcaatggcaatcgccaaaacccagctctagttccaccgacatcatcaagcttcaaaccattagcgtcgcggtcttcatcaatcccaaggtttcctcacatcaccatacttcccaccataccgacagcgcaatcatgtttcgattccgtaaaagcctcgatatcgtcaccctcttccacaaggccagctcgcccgcctccattcgagccgccacggtcctcaagcaagcatccgccaatgctagtgaggccgcaactgaggatcaggctagcgaccacacacaccagaccaatcctcaccgtccagaatttgacctgaacatcaccgaggaacccccaacagctgaccagctcaagaccatccttgagtatgttggtcagagcaagatcggtactatcgtacagggtgcttcaacagagaatgaggccttgaagaagttcaaggagagctctgatagcttcaaatacccggtgattgtcgattggaacaatgggaaggctattgctacagacaaggagtcagagattctcaagatgctagagcagatgaacagcaaataa

SEQ ID NO: 32897 - protein, 1377 aa, Muscodor strobelii
  misc_feature: SGI Peptide ID NO. 571341
  misc_feature (1237)..(1374): Pfam Id: PF07955 Pfam Desc: Domain of function (DUF1687)
  misc_feature (772)..(918): Pfam Id: PF06985 Pfam Desc: Heterokaryon incompatibility protein (HET)
  misc_feature (164)..(368): Pfam Id: PF00069 Pfam Desc: Protein kinase domain
  misc_feature (36)..(1185): NCBI GI: 256723898 Blast Desc: NECHADRAFT_78374 [Nectria haematococca mpVI 77-13-4]
  misc_feature (9)..(1168): NCBI GI: 256721865 Blast Desc: NECHADRAFT_88069 [Nectria haematococca mpVI 77-13-4]
  misc_feature (34)..(1174): NCBI GI: 256722820 Blast Desc: NECHADRAFT_87137 [Nectria haematococca mpVI 77-13-4]
  misc_feature (44)..(1193): NCBI GI: 256720668 Blast Desc: NECHADRAFT_85605 [Nectria haematococca mpVI 77-13-4]
  misc_feature (33)..(1189): NCBI GI: 256722363 Blast Desc: NECHADRAFT_82209 [Nectria haematococca mpVI 77-13-4]
  misc_feature (15)..(1185): NCBI GI: 256723790 Blast Desc: NECHADRAFT_78344 [Nectria haematococca mpVI 77-13-4]
  misc_feature (35)..(1193): NCBI GI: 256729997 Blast Desc: NECHADRAFT_82546 [Nectria haematococca mpVI 77-13-4]
  misc_feature (36)..(1188): NCBI GI: 169607331 Blast Desc: SNOG_06722 [Phaeosphaeria nodorum SN15] gi|160701390|gb|EAT85373.2| SNOG_06722 [Phaeosphaeria nodorum SN15]
  misc_feature (125)..(1186): NCBI GI: 46110541 Blast Desc: FG02152.1 [Gibberella zeae PH-1]
  misc_feature (615)..(1180): NCBI GI: 171694810 Blast Desc: protein product [Podospora anserina] gi|170947647|emb|CAP59809.1| protein product [Podospora anserina]
METPPKSPSPEPVYEMDKLGEEIVLETAGVSTTDNLIDFALDKAQKIFLILAYIGNPAALNDFQAADFHDEHLPLGVEETKNNDGKRRKIYGPLNEATLHQSSQTLKTNIRFSLSTLRPQEIRQFMHEQWFFLAPMYGRSRFYQNFHESRPLPFINQTGPSRNGHFSSVYQVELHPAHKEHENFGNGWVAVKEFKDTTKEHFRKELEALQIIKNLVDPHLITPIAAFQRGSQQCFVFPWAEGGNLRDYWTKSGSLDSATTRDDRLLSWTLAQMNGLCRCLKRLWDLNCRHGDIKPENILYTGGGGNLLIADVGLAKVHTEVTYKRQMSSSTKYGTRRYEAPEIYMKEQGHKAISRDYDMWSMGILLLEWLIWLVYGSDKAGMQKISQINRLMQFWESSANKFYVADSAQKVMTEMAEILSGDTAMGEILHLIRNRLLVVSLADEHGDLSKGRAKASELSQTMSDIYERANRDSAYMFDPKVWYRRNPSESGSALELPGRPKQQRALGTPPARVDSISEPFHNHKAINDNIPTISVEFVDSTSSTRRLPALPPDEYNRRSKPFNDNWESKADNAFALKVLSKDNFADFRHAPIETVSCPNCNVKNIWSAGFRLRYNMSAMKAGSVKCNMCKLLYESLLSHVGESEEGDLIRVESTLKIDATKKPVISLYSDPSKYYAAPDRVPLLIEFSASRKNTPNFAQLGFPQLPIVGSAEELLLLREWLNNCDRSHICRPRLDTEQRALKMPTRLIEVKEDNSKLSLHLVETADLPSVDYVALSHCWGKVPEGLEFSTTQSTLESHKQTIAFEKLPQTFQDAVTVTNKLGISYVWIDSICIIQQDEVDWETEAGKMEDVFSSAYVTIAASSADSCLKGFIHDRPPRPCVAIQDQSGDKVYFCKNIDDFHGDVEQGVLNQRGWVLQERALSRRTIHFTSNQIYWECGEGVHCETLAKLRNSKAEFLNDADFPKSALRYFRDGRIVLFQTIYSMYSQLAFTNPTDRSMGILGLERRLARTLESKGDYGILQRYLQRSLLWEREPNNELTPITYSEERRVPSWSWMSCTGAIQFIKAPFDGVDWRSDDIRIDFETGSLRSSRRNRTATSNAEIEALARRINTDGGVADVLKRVSFDGITMDDLSTLRCVVLGIDKSDKDVANDERKHYVLLVKPVPGSSDGTYVRVGVGSLLAAHVVIDNAEAQWQSPKPSSSSTDIIKLQTISVAVFINPKVSSHHHTSHHTDSAIMFRFRKSLDIVTLFHKASSPASIRAATVLKQASANASEAATEDQASDHTHQTNPHRPEFDLNITEEPPTADQLKTILEYVGQSKIGTIVQGASTENEALKKFKESSDSFKYPVIVDWNNGKAIATDKESEILKMLEQMNSK

SEQ ID NO: 32898 - DNA, 5019 bp, Muscodor strobelii
  misc_feature: SGI EST ID NO. CUFF.77982.1
  misc_feature: Variant of the nucleotide sequence at SEQ ID NO 32896
caactgtagggcttccgaggtggcttgcatcatttggtgctattgagcggcaactactctattgggcccttgacatttgaatcaacggccacctgactcgatgcctcgcctcgaagagccaccacggggctaggttccagccaagtcgcctggtgctgtcacaacattcgcgttattgctgagcatgactgacccggctacctcagcaagaatacacatctattggcttctagatgccaagttggattcgcatgatcattggatggagttccataactgtttaagatataccattttgtagcttcacagcgcgaatgatagatcacaaagagacacagaaatcttctcgatggagacgcctccaaaatcgccctcgcccgaacctgtgtatgagatggacaaattgggggaagagatcgactctcgcttccagtacgaaacgaaagccttaagacgctctcataaattttttgccgcgggaccagatagctcatctcgtatctgaacacgttgttagagaagtgctggaaacggctggtgtgagcaccacagataatcttatagactttgccttggacaaagctcagaagatattcttgattctcgcatatatcgggaatccagcagcactgaacgactttcaggcggcggacttccatgatgaacatttgccccttggagttgaagagaccaaaaacaatgatggaaagcggcgtaagatatatggcccgctgaatgaagcgactctgcatcagtcgagccaaacactcaaaacaaatattcgcttctcactgtccactctgagacctcaggagataaggcagttcatgcacgaacaatggttttttctcgccccaatgtatggaagatccagattttaccaaaatttccacgagtcacgcccacttcctttcatcaatcaaactggtcctagcaggaatgggcattttagctcagtctatcaggttgaactccatccggctcataaggagcacgagaattttggtaacggttgggttgcagtcaaagagtttaaagacacaacgaaagagcattttcgcaaagaacttgaagcactccaaataatcaaaaatctagtcgatcctcacttaatcacgccgatcgcagcatttcaaagggggtcacaacaatgcttcgtatttccttgggctgagggaggaaatcttcgtgattattggacaaaaagcggctcgttagactctgccactactagggatgatagactgttgtcatggacacttgcccagatgaacggcctctgtagatgtttgaagagactctgggaccttaattgtcgacacggcgatatcaagcccgaaaatattctttacacaggcggaggcggtaacctgctcattgcggacgttggtttggcaaaagttcacacggaggtcacatataaacgccaaatgagctcttcgaccaaatatggaacacgccgctatgaagcgccggagatttacatgaaagagcaaggccacaaggctatctctcgcgactacgacatgtggtcgatgggtattctccttctagaatggctgatttggcttgtatacgggagtgacaaggctggaatgcagaagatatcgcaaatcaacagactgatgcagttttgggaatcatcggccaacaagttctatgtcgcagactctgctcagaaggtcatgactgaaatggccgagatactgtcgggcgacactgctatgggagaaatcttacatctcattcgtaaccgactacttgtggtgtcactcgccgacgaacatggagacttgagcaaaggtcgtgcgaaagcttcagaactttcccagactatgagcgacatttatgagcgcgcaaatcgtgattcggcgtatatgtttgaccccaaggtgtggtatcggaggaatcccagcgagagtggatcggctttggagctcccaggaagacccaaacagcaaagagccttgggaacaccacctgcacgagttgactcgattagcgagccttttcacaatcataaagcaattaacgacaatatccctacgatatcggtcgagtttgtcgatagtacatcatcgacacgacgtcttccggctcttcctcctgacgagtacaaccggcgaagcaagccttttaacgataattgggaatcaaaagcagacaacgcatttgctttaaaagtgctaagcaaagacaattttgcagatttccgtcatgcacctattgaaacagtatcttgtcctaattgcaacgtcaaaaacatttggtctgcggggtttcgcttgcgatacaatatgtcagcaatgaaagctgggtctgtcaaatgcaacatgtgtaaattactatatgaatcgcttctatcacatgtaggggaaagtgaggagggtgatttgatacgcgtcgagtcaacgctcaagatcgatgcaacaaaaaagcccgtcatttctctgtactcagaccctacttctcggaagaatactccgaatttcgcacagcttggtttcccgcagctcccaatagtcggaagcgcagaggaattattgcttcttcgcgaatggcttaacaactgtgatcggtcccacatatgtcgaccacgattggatactgaacagagggccttgaagatgccaactcgtctcatagaggtcaaagaggataattctaagctatctttgcatcttgtagaaacagcagacttgcctagtgtggactacgttgctctaagccattgctggggcaaagttcctgagggattggaattttcaacaactcaaagcacactcgaaagccacaaacaaactattgctttcgaaaagcttccgcaaacgttccaggatgcggtgactgtcacgaacaaacttgggatcagttacgtttggatcgactcaatatgtatcatccaacaagatgaagttgattgggaaactgaagccgggaagatggaggatgtcttcagttccgcgtatgtcacaatcgctgctagctccgccgactcgtgtctcaaaggcttcatccacgatcgcccaccccggccttgcgtcgctatacaagaccaatccggtgacaaggtctacttctgcaaaaacattgatgatttccacggggatgttgagcaaggagtgctcaaccagcgcggctgggtgctacaagagagagctctatctcggaggacgattcacttcacctcaaatcaaatctattgggaatgcggagaaggcgtacattgcgagaccctcgctaaattgcgaaattctaaagctgagtttctcaatgatgccgattttcctaaatcggctcttcgatactttcgagacggtcgtattgtgcttttccaaacaatctattcgatgtactctcaattggcatttaccaatcctacggatcggtcgatggggattctgggtctcgagcgaagactcgcccgtaccctagaatcgaagggcgactacgggatcttacagcgatatcttcaacgcagcctcttatgggaacgagaaccgaataacgagttgacgcctatcacttattcggaagaaagacgcgtaccctcttggtcttggatgtcctgcacgggcgcgatccagttcatcaaagcgccttttgacggtgtagattggagaagcgacgatattcggatagactttgagactggctcactccgcagctcgaggcgcaatcgtaccgcaacctcaaacgcggagattgaggctcttgcaagacgcataaataccgatggcggcgtcgctgacgtgctgaaacgagtgtcatttgacggtatcaccatggacgatctttcgaccctacgctgcgtcgttctcggcatagacaagtcggacaaagacgtcgcgaatgatgagcgaaaacattacgttctattagtgaaaccggtgcctggctcaagtgacggcacatatgttagagttggagtgggttctctcttggcggcccatgtcgtcattgacaatgctgaggctcaatgggtacggattcaatagataaccagacggcaaagccttacaatagtagttgcttgtccttttgtccctacttactatatacatgtatctcaatactggcaacaatttgaattatagaacgactattgtatgtaagaccatgaagttgtgaatgtgcctgatgtcgggaacgaaatgggagagcagggatgctcctactgtggggtctggacaacattgagagctaccccaaaacagcaatcgccaaaacccagctctagttccaccgacatcatcaagcttcaaaccattagcgtcgcggtcttcatcaatcccaaggtttcctcacatcaccatacttcccaccataccgacagcgcaatcatgtttcgattccgtaaaagcctcgatatcgtcaccctcttccacaaggccagctcgcccgcctccattcgagccgccacggtcctcaagcaagcatccgccaatgctagtgaggccgcaactgaggatcaggctagcgaccacacacaccagaccaatcctcaccgtccagaatttgacctgaacatcaccgaggaacccccaacagctgaccagctcaagaccatccttgagtatgttggtcagagcaagatcggtactatcgtacagggtgcttcaacagagaatgaggccttgaagaagttcaaggagagctctgatagcttcaaatacccggtgattgtcgattggaacaatgggaaggctattgctacagacaaggagtcagagattctcaagatgctagagcagatgaacagcaaataaaagtggatgggaatgtagcagtatgatggagtcattctacacgatctcacttagcttggcttgtgctggtggtgcttttgtattacgagggcgacggcaatccgaagggcagacaagagcagaaaagattcagtcgatatcatctgcttgctaatatcacgtgagtcatccattgatgccggcattctcctgatcggcctatatgtaattatatttatctagtccaatatataccatactcgacttaaga

SEQ ID NO: 32899 - DNA, 3669 bp, Muscodor strobelii
  misc_feature: SGI cDNA ID NO. 571342
  misc_feature: Encodes the peptide sequence at SEQ ID NO 32900
atggagacgcctccaaaatcgccctcgcccgaacctgtgtatgagatggacaaattgggggaagagatcgtgctggaaacggctggtgtgagcaccacagataatcttatagactttgccttggacaaagctcagaagatattcttgattctcgcatatatcgggaatccagcagcactgaacgactttcaggcggcggacttccatgatgaacatttgccccttggagttgaagagaccaaaaacaatgatggaaagcggcgaaatcttcgtgattattggacaaaaagcggctcgttagactctgccactactagggatgatagactgttgtcatggacacttgcccagatgaacggcctctgtagatgtttgaagagactctgggaccttaattgtcgacacggcgatatcaagcccgaaaatattctttacacaggcggaggcggtaacctgctcattgcggacgttggtttggcaaaagttcacacggaggtcacatataaacgccaaatgagctcttcgaccaaatatggaacacgccgctatgaagcgccggagatttacatgaaagagcaaggccacaaggctatctctcgcgactacgacatgtggtcgatgggtattctccttctagaatggctgatttggcttgtatacgggagtgacaaggctggaatgcagaagatatcgcaaatcaacagactgatgcagttttgggaatcatcggccaacaagttctatgtcgcagactctgctcagaaggtcatgactgaaatggccgagatactgtcgggcgacactgctatgggagaaatcttacatctcattcgtaaccgactacttgtggtgtcactcgccgacgaacatggagacttgagcaaaggtcgtgcgaaagcttcagaactttcccagactatgagcgacatttatgagcgcgcaaatcgtgattcggcgtatatgtttgaccccaaggtgtggtatcggaggaatcccagcgagagtggatcggctttggagctcccaggaagacccaaacagcaaagagccttgggaacaccacctgcacgagttgactcgattagcgagccttttcacaatcataaagcaattaacgacaatatccctacgatatcggtcgagtttgtcgatagtacatcatcgacacgacgtcttccggctcttcctcctgacgagtacaaccggcgaagcaagccttttaacgataattgggaatcaaaagcagacaacgcatttgctttaaaagtgctaagcaaagacaattttgcagatttccgtcatgcacctattgaaacagtatcttgtcctaattgcaacgtcaaaaacatttggtctgcggggtttcgcttgcgatacaatatgtcagcaatgaaagctgggtctgtcaaatgcaacatgtgtaaattactatatgaatcgcttctatcacatgtaggggaaagtgaggagggtgatttgatacgcgtcgagtcaacgctcaagatcgatgcaacaaaaaagcccgtcatttctctgtactcagaccctagtaagtactacgcagcacccgatcgtgtccctttactcatcgagttctcagcttctcggaagaatactccgaatttcgcacagcttggtttcccgcagctcccaatagtcggaagcgcagaggaattattgcttcttcgcgaatggcttaacaactgtgatcggtcccacatatgtcgaccacgattggatactgaacagagggccttgaagatgccaactcgtctcatagaggtcaaagaggataattctaagctatctttgcatcttgtagaaacagcagacttgcctagtgtggactacgttgctctaagccattgctggggcaaagttcctgagggattggaattttcaacaactcaaagcacactcgaaagccacaaacaaactattgctttcgaaaagcttccgcaaacgttccaggatgcggtgactgtcacgaacaaacttgggatcagttacgtttggatcgactcaatatgtatcatccaacaagatgaagttgattgggaaactgaagccgggaagatggaggatgtcttcagttccgcgtatgtcacaatcgctgctagctccgccgactcgtgtctcaaaggcttcatccacgatcgcccaccccggccttgcgtcgctatacaagaccaatccggtgacaaggtctacttctgcaaaaacattgatgatttccacggggatgttgagcaaggagtgctcaaccagcgcggctgggtgctacaagagagagctctatctcggaggacgattcacttcacctcaaatcaaatctattgggaatgcggagaaggcgtacattgcgagaccctcgctaaattgcgaaattctaaagctgagtttctcaatgatgccgattttcctaaatcggctcttcgatactttcgagacggtcgtattgtgcttttccaaacaatctattcgatgtactctcaattggcatttaccaatcctacggatcggtcgatggggattctgggtctcgagcgaagactcgcccgtaccctagaatcgaagggcgactacgggatcttacagcgatatcttcaacgcagcctcttatgggaacgagaaccgaataacgagttgacgcctatcacttattcggaagaaagacgcgtaccctcttggtcttggatgtcctgcacgggcgcgatccagttcatcaaagcgccttttgacggtgtagattggagaagcgacgatattcggatagactttgagactggctcactccgcagctcgaggcgcaatcgtaccgcaacctcaaacgcggagattgaggctcttgcaagacgcataaataccgatggcggcgtcgctgacgtgctgaaacgagtgtcatttgacggtatcaccatggacgatctttcgaccctacgctgcgtcgttctcggcatagacaagtcggacaaagacgtcgcgaatgatgagcgaaaacattacgttctattagtgaaaccggtgcctggctcaagtgacggcacatatgttagagttggagtgggttctctcttggcggcccatgtcgtcattgacaatgctgaggctcaatggcaatcgccaaaacccagctctagttccaccgacatcatcaagcttcaaaccattagcgtcgcggtcttcatcaatcccaaggtttcctcacatcaccatacttcccaccataccgacagcgcaatcatgtttcgattccgtaaaagcctcgatatcgtcaccctcttccacaaggccagctcgcccgcctccattcgagccgccacggtcctcaagcaagcatccgccaatgctagtgaggccgcaactgaggatcaggctagcgaccacacacaccagaccaatcctcaccgtccagaatttgacctgaacatcaccgaggaacccccaacagctgaccagctcaagaccatccttgagtatgttggtcagagcaagatcggtactatcgtacagggtgcttcaacagagaatgaggccttgaagaagttcaaggagagctctgatagcttcaaatacccggtgattgtcgattggaacaatgggaaggctattgctacagacaaggagtcagagattctcaagatgctagagcagatgaacagcaaataa

SEQ ID NO: 32900 - protein, 1222 aa, Muscodor strobelii
  misc_feature: SGI Peptide ID NO. 571342
  misc_feature (1082)..(1219): Pfam Id: PF07955 Pfam Desc: Domain of function (DUF1687)
  misc_feature (617)..(763): Pfam Id: PF06985 Pfam Desc: Heterokaryon incompatibility protein (HET)
  misc_feature (135)..(213): Pfam Id: PF00069 Pfam Desc: Protein kinase domain
  misc_feature (89)..(1030): NCBI GI: 256723898 Blast Desc: NECHADRAFT_78374 [Nectria haematococca mpVI 77-13-4]
  misc_feature (85)..(1013): NCBI GI: 256721865 Blast Desc: NECHADRAFT_88069 [Nectria haematococca mpVI 77-13-4]
  misc_feature (89)..(1034): NCBI GI: 256722363 Blast Desc: NECHADRAFT_82209 [Nectria haematococca mpVI 77-13-4]
  misc_feature (89)..(1038): NCBI GI: 256720668 Blast Desc: NECHADRAFT_85605 [Nectria haematococca mpVI 77-13-4]
  misc_feature (89)..(1019): NCBI GI: 256722820 Blast Desc: NECHADRAFT_87137 [Nectria haematococca mpVI 77-13-4]
  misc_feature (134)..(1038): NCBI GI: 256729997 Blast Desc: NECHADRAFT_82546 [Nectria haematococca mpVI 77-13-4]
  misc_feature (134)..(1033): NCBI GI: 169607331 Blast Desc: SNOG_06722 [Phaeosphaeria nodorum SN15] gi|160701390|gb|EAT85373.2| SNOG_06722 [Phaeosphaeria nodorum SN15]
  misc_feature (89)..(1030): NCBI GI: 256723790 Blast Desc: NECHADRAFT_78344 [Nectria haematococca mpVI 77-13-4]
  misc_feature (460)..(1025): NCBI GI: 171694810 Blast Desc: protein product [Podospora anserina] gi|170947647|emb|CAP59809.1| protein product [Podospora anserina]
  misc_feature (541)..(1025): NCBI GI: 170940327 Blast Desc: protein product [Podospora anserina]
METPPKSPSPEPVYEMDKLGEEIVLETAGVSTTDNLIDFALDKAQKIFLILAYIGNPAALNDFQAADFHDEHLPLGVEETKNNDGKRRNLRDYWTKSGSLDSATTRDDRLLSWTLAQMNGLCRCLKRLWDLNCRHGDIKPENILYTGGGGNLLIADVGLAKVHTEVTYKRQMSSSTKYGTRRYEAPEIYMKEQGHKAISRDYDMWSMGILLLEWLIWLVYGSDKAGMQKISQINRLMQFWESSANKFYVADSAQKVMTEMAEILSGDTAMGEILHLIRNRLLVVSLADEHGDLSKGRAKASELSQTMSDIYERANRDSAYMFDPKVWYRRNPSESGSALELPGRPKQQRALGTPPARVDSISEPFHNHKAINDNIPTISVEFVDSTSSTRRLPALPPDEYNRRSKPFNDNWESKADNAFALKVLSKDNFADFRHAPIETVSCPNCNVKNIWSAGFRLRYNMSAMKAGSVKCNMCKLLYESLLSHVGESEEGDLIRVESTLKIDATKKPVISLYSDPSKYYAAPDRVPLLIEFSASRKNTPNFAQLGFPQLPIVGSAEELLLLREWLNNCDRSHICRPRLDTEQRALKMPTRLIEVKEDNSKLSLHLVETADLPSVDYVALSHCWGKVPEGLEFSTTQSTLESHKQTIAFEKLPQTFQDAVTVTNKLGISYVWIDSICIIQQDEVDWETEAGKMEDVFSSAYVTIAASSADSCLKGFIHDRPPRPCVAIQDQSGDKVYFCKNIDDFHGDVEQGVLNQRGWVLQERALSRRTIHFTSNQIYWECGEGVHCETLAKLRNSKAEFLNDADFPKSALRYFRDGRIVLFQTIYSMYSQLAFTNPTDRSMGILGLERRLARTLESKGDYGILQRYLQRSLLWEREPNNELTPITYSEERRVPSWSWMSCTGAIQFIKAPFDGVDWRSDDIRIDFETGSLRSSRRNRTATSNAEIEALARRINTDGGVADVLKRVSFDGITMDDLSTLRCVVLGIDKSDKDVANDERKHYVLLVKPVPGSSDGTYVRVGVGSLLAAHVVIDNAEAQWQSPKPSSSSTDIIKLQTISVAVFINPKVSSHHHTSHHTDSAIMFRFRKSLDIVTLFHKASSPASIRAATVLKQASANASEAATEDQASDHTHQTNPHRPEFDLNITEEPPTADQLKTILEYVGQSKIGTIVQGASTENEALKKFKESSDSFKYPVIVDWNNGKAIATDKESEILKMLEQMNSK

SEQ ID NO: 32901 - DNA, 5019 bp, Muscodor strobelii; identical to SEQ ID NO: 32898
  misc_feature: SGI EST ID NO. CUFF.77982.1
  misc_feature: Variant of the nucleotide sequence at SEQ ID NO 32899

SEQ ID NO: 32902 - DNA, 3150 bp, Muscodor strobelii
  misc_feature: SGI cDNA ID NO. 571343
  misc_feature: Encodes the peptide sequence at SEQ ID NO 32903
atggcacctaacacacaggcctacaagcagccaattgacaagagcatctatcctcgctccctctcagccgatgacgatgacctaaaattggacccaaaagaaaatgaagcaaatggcaaatccttgacagaggaactcagtcgaccaagaaaaccgcacctttctggtccatcattcatcgacaatcagttcacagccaacgagccgcttggtaccaacattacaaccggggcagaacatacggtgtcattcccagcagccacgatagcgaatagcaatagacttcccaccgaaagggagccggctgaagattctttgacctcatctgatgataacggtaccggggccaacaaatctggtctacagatccatctacaacctcccgaggatggcaccaacaacaatgaaaaaggaaggaccgagagtgttcactctggtcattctgatttcacgcatgtcacgcccgttgaagactttgggttgagtgtgggattggaacacataagggaacagatccgcaagggtcaactgtgtccaaaataccctacgcgcatgagagacgatgcatctactcactcccaattatctgacctcgacgcagcgcgaccagaattgacggacttcaaaggcatcggtgaccatcttgatgataaaccccagtttgccatctcaggtgacactcccatcgatgacagaccgataatagaactgttatatgatgagcgggtgacatctgcatatgctagcgacgactttctccctctagatgaactactggccgtcttggacaagaccaacatcgagagggaattggctgttcactttccagcttctccggatcgcgttcaggagcttgtccaagacatttaccacgaagatccgaataaaagtcggatcatcattatggctattctttcttgcatcgaaaaggtaccatcaattccccactttattgagcaaggtatatgcgatgccgacctaccttttctgaaggatttgagcgatatttttgatgatgaggctcatcgagaagagaaaacgagcaagcaatatcggaccattaaggaattgcctctgggatggccgcgacatattgtacgacgatttctaacagaacaatacggtttcctcgttccgttctttgacatgtccgacaacaatttaaatttctatccaatccgcgagaagaaaatgatattaccttttatgacatgggaccaagaaaaggagggagggtacgggacagttcgaaaagcccaaattcaccccgcacatcataactgggacccctcgaagtcatctacatttgcccctaattcttctaaggatgaaaatccatttgtcgccgtcaaagagctccgctcaaataactatgaggcatatcaacaagaagtcaaggttttagaaagattcagtggaaaacagaaggggcacaaacatctcattcgccttctcatggcgtttcagcatgattcaaagtacttcctcgtcttcccgcttgcagaaggagggaaccttaaaaatatctgggagcgtacaacgaaaaacccttataagagaaatgacgtgctttggcttctttgtcagtgtcaaggtatgactgatgggctccggaagattcatcggcacaagtcatggtttgcgaacggtggccttgccccatctcttgatagtgacaaaaataggggcagacatggggacattaagcctgaaaatatcttggcttttaagacagatgtcgaaggcgaatatcatctggtcatttcggattttggtctaacccgcttccattcgcctctatccgtctcgaatgtgcccctggacaaaatcggtggtctctcgtttactcaccgagcgcccgaatacgatcaatattccagcatttctcaggcctacgatatgtggagcctaggttgtctgtttctggagcttgtttcttggtttctactgggaaataaggaagggccgctacgtttccagagcctgcgtttcgaagacgatacacctagtcccggcataatatttccgcataacccgatgcttacagaagacaaatttttcaatatagtcgatgagaaagcgatcgtcaaaccctcagtcacgcagtggattgagaagctccgtggacttgaaagctgttctgagagcatcagtgattttctaagagatatcaaaacagatttgctcgtaccagccaaagatgcacgtgcgagggtagatgtgttccacgcgagcttgaccaagatcgtgaaagctgcttcacagcaccaggctctcgtcaatatattgggaggtgacttcgccatgtcccctttaccacaagagaagaggttatcaaccgccgagagaagcgactcgacgataaaagcaaatcagtacaggattgcaggtcatgcagatagcattggcacctatgagcaacaaatgccccgcacggcagaaattccagctttcactcgcaatacaagcgctttaacggaaacgacaaccaatccatcgcaagattcagaccgggaccacgaagccacggctgttgtcaatactggtcaaggcaatgcgatcacgttgagcgtgaaagtcaatgatgccggacgaatagaccctcagaatataccatctcccgctgctctactgcataccgttgtcgactcgttaatcccagacaagcctggccttccaactgtagatgagcaaaccagtcccagtgcttcccgggttgatagcatatcccacgaacatgaacaggagtccgaggatgaaacagttaccgccgagaactcaccatcgcgatatccaaccgtcaactcaaagactccggcacgcacaaggactccgacgcctcagagtcctaagacacgattggcacctatagtccataacccacaaaacaacccgcagcctgcagctcatcatcctgacgaaaaaactcctcaagtgaggcactccaacttcacagagggagtacatgatcaatctcatgaaggacacggcgttgtcgccgggacctcatccgacgcaatcaacgaaccagccagaaagcaaggccgaggtccaaggaagtattggaacaaattccaaaacgtaatgaaagcgactcgtgttaagctgcacgacacaaaaccacgatctcgggacacaatttctacctag

SEQ ID NO: 32903 - protein, 1049 aa, Muscodor strobelii
  misc_feature: SGI Peptide ID NO. 571343
  misc_feature (565)..(646): Pfam Id: PF00069 Pfam Desc: Protein kinase domain
  misc_feature (410)..(507): Pfam Id: PF00069 Pfam Desc: Protein kinase domain
  misc_feature (252)..(751): NCBI GI: 256723804 Blast Desc: NECHADRAFT_78376 [Nectria haematococca mpVI 77-13-4]
  misc_feature (250)..(739): NCBI GI: 46126729 Blast Desc: FG07742.1 [Gibberella zeae PH-1]
  misc_feature (232)..(755): NCBI GI: 169600195 Blast Desc: SNOG_02927 [Phaeosphaeria nodorum SN15] gi|111068538|gb|EAT89658.1| SNOG_02927 [Phaeosphaeria nodorum SN15]
  misc_feature (251)..(751): NCBI GI: 261359076 Blast Desc: protein kinase domain-containing protein [Verticillium albo-atrum VaMs.102]
  misc_feature (252)..(746): NCBI GI: 154300072 Blast Desc: BC1G_11225 [Botryotinia fuckeliana B05.10] gi|150856838|gb|EDN32030.1| BC1G_11225 [Botryotinia fuckeliana B05.10]
  misc_feature (252)..(749): NCBI GI: 170940330 Blast Desc: protein product [Podospora anserina]
  misc_feature (192)..(702): NCBI GI: 256722881 Blast Desc: NECHADRAFT_87138 [Nectria haematococca mpVI 77-13-4]
  misc_feature (255)..(760): NCBI GI: 121716138 Blast Desc: protein kinase domain protein [Aspergillus clavatus NRRL 1] gi|119403835|gb|EAW14252.1| protein kinase domain protein [Aspergillus clavatus NRRL 1]
  misc_feature (252)..(749): NCBI GI: 256720871 Blast Desc: NECHADRAFT_85604 [Nectria haematococca mpVI 77-13-4]
  misc_feature (301)..(748): NCBI GI: 171685536 Blast Desc: protein product [Podospora anserina] gi|170942729|emb|CAP68382.1| protein product [Podospora anserina]
MAPNTQAYKQPIDKSIYPRSLSADDDDLKLDPKENEANGKSLTEELSRPRKPHLSGPSFIDNQFTANEPLGTNITTGAEHTVSFPAATIANSNRLPTEREPAEDSLTSSDDNGTGANKSGLQIHLQPPEDGTNNNEKGRTESVHSGHSDFTHVTPVEDFGLSVGLEHIREQIRKGQLCPKYPTRMRDDASTHSQLSDLDAARPELTDFKGIGDHLDDKPQFAISGDTPIDDRPIIELLYDERVTSAYASDDFLPLDELLAVLDKTNIERELAVHFPASPDRVQELVQDIYHEDPNKSRIIIMAILSCIEKVPSIPHFIEQGICDADLPFLKDLSDIFDDEAHREEKTSKQYRTIKELPLGWPRHIVRRFLTEQYGFLVPFFDMSDNNLNFYPIREKKMILPFMTWDQEKEGGYGTVRKAQIHPAHHNWDPSKSSTFAPNSSKDENPFVAVKELRSNNYEAYQQEVKVLERFSGKQKGHKHLIRLLMAFQHDSKYFLVFPLAEGGNLKNIWERTTKNPYKRNDVLWLLCQCQGMTDGLRKIHRHKSWFANGGLAPSLDSDKNRGRHGDIKPENILAFKTDVEGEYHLVISDFGLTRFHSPLSVSNVPLDKIGGLSFTHRAPEYDQYSSISQAYDMWSLGCLFLELVSWFLLGNKEGPLRFQSLRFEDDTPSPGIIFPHNPMLTEDKFFNIVDEKAIVKPSVTQWIEKLRGLESCSESISDFLRDIKTDLLVPAKDARARVDVFHASLTKIVKAASQHQALVNILGGDFAMSPLPQEKRLSTAERSDSTIKANQYRIAGHADSIGTYEQQMPRTAEIPAFTRNTSALTETTTNPSQDSDRDHEATAVVNTGQGNAITLSVKVNDAGRIDPQNIPSPAALLHTVVDSLIPDKPGLPTVDEQTSPSASRVDSISHEHEQESEDETVTAENSPSRYPTVNSKTPARTRTPTPQSPKTRLAPIVHNPQNNPQPAAHHPDEKTPQVRHSNFTEGVHDQSHEGHGVVAGTSSDAINEPARKQGRGPRKYWNKFQNVMKATRVKLHDTKPRSRDTIST

SEQ ID NO: 32904 - DNA, 1602 bp, Muscodor strobelii
  misc_feature: SGI cDNA ID NO. 571344
  misc_feature: Encodes the peptide sequence at SEQ ID NO 32905
atgcacgagggtactaattccgttgcggaacgtcagactggcttacatcgtgccagctttaccgacggtacgatagacaacgaaaccaaaatggaggaccaagaagcagtagctgccacgaaagcagcaacacagatggttgaggatcagtcccaggatgttgctctacctgttggctcggccgattatgcggtcctagagcgtaagcttgttcggaagatcgatttgcgactcatgcctgtgcttgtttttatgatcattcttaattatctagaccgtcaagctctcccaaatgcacggatccagggtttggagacggaccttgggctgaagggcgaagagtataatacggcaatttctgtgctttttgctgggtatattgggctacagattccatcgaatctgcttcttactagagtaagaccgagtatctacctaccagtcactatggctctctggggcgtcgtgtcagccagtactgcagcagtcaaagatttccacgggcttgtcgtcagccgtttcttcctcggtctcctagaagcaccgttcttccccggtgcattgtttttgctgagtagctggtacacacctcgcgaactcgccactcgcacggccgttctatacgcgggaagtcttctctcgggcggctttggaggtcttgtcggagccggtgttcaatatggtctaaatggtgccagaggattgaagtcatggcaatggctgttcatcatcgaaggcgctgtcaccgtcgctttctcattgatggcgattttcatcttgcctgatttcccgagtactacgaggtggttgtcggaggaagagaggatggtggctgtgcatcgtcttcgcgcgcatagtggtagtgctgatgagaagcgcggaccgattttccagggtctggccatggcgcttgcggactacaaagtctggttacttgctggagtggtgatattgaagacgtcggctgcggctgtgacgtcgtttatccctaccttggtcaatacttttgattacgattccgtggattctctacttcttgttgcgccgccttatgtctttgctacgatcgtgtctctcgcggtgtcactgtcgagtgataaatttgcagagcgatactttcatctggtgtcgccgcttgctgttggcatggttggtttcatcattggggctacgacacatacgattgcgccgagatatttctccttgtttcttatgttgggcggtgtttatggaagttttaacgttacttatgcttgggtgtcttctactctcccacgcccactcgagaagcgcgcttccgcatttgccatcatcaatgtcgttggaaacattgcgcaaatttactcgccatatttgtacgataagaagacgggtccgcaatatctaccagcgatgattgccaacaccgtgtttgttttcgcatcgattagctgtgctactgtgttgtacttctgtctccgacgagagaatgagaagttggaggctgttgaggagaaccaacctgaggaccacgaggataattcggggaagccccaagatattgtacagaataaaccaggtgggacactgcagttgagtcgcggcttcaggtataccctgtag

SEQ ID NO: 32905 - protein, 533 aa, Muscodor strobelii
  misc_feature: SGI Peptide ID NO. 571344
  misc_feature (82)..(450): Pfam Id: PF07690 Pfam Desc: Major Facilitator Superfamily
  misc_feature (56)..(533): NCBI GI: 29423474 Blast Desc: MFS transporter [Beauveria bassiana]
  misc_feature (67)..(494): NCBI GI: 145230291 Blast Desc: An01g10360 [Aspergillus niger] gi|134055571|emb|CAK37217.1| protein product [Aspergillus niger]
  misc_feature (47)..(531): NCBI GI: 50545269 Blast Desc: YALI0A17666p [Yarrowia lipolytica] gi|49646037|emb|CAG84104.1| YALI0A17666p [Yarrowia lipolytica]
  misc_feature (15)..(494): NCBI GI: 121700683 Blast Desc: MFS transporter, [Aspergillus clavatus NRRL 1] gi|119396749|gb|EAW07180.1| MFS transporter, [Aspergillus clavatus NRRL 1]
  misc_feature (67)..(531): NCBI GI: 119494389 Blast Desc: MFS transporter, [Neosartorya fischeri NRRL 181] gi|119412252|gb|EAW22193.1| MFS transporter, [Neosartorya fischeri NRRL 181]
  misc_feature (67)..(497): NCBI GI: 70996562 Blast Desc: MFS transporter [Aspergillus fumigatus Af293] gi|66850671|gb|EAL90998.1| MFS transporter, [Aspergillus fumigatus Af293] gi|159131772|gb|EDP56885.1| MFS transporter,
  misc_feature (3)..(531): NCBI GI: 154302615 Blast Desc: BC1G_09884 [Botryotinia fuckeliana B05.10] gi|150855373|gb|EDN30565.1| BC1G_09884 [Botryotinia fuckeliana B05.10]
  misc_feature (21)..(531): NCBI GI: 156043924 Blast Desc: SS1G_10065 [Sclerotinia sclerotiorum 1980] gi|154694454|gb|EDN94192.1| SS1G_10065 [Sclerotinia sclerotiorum 1980]
  misc_feature (3)..(531): NCBI GI: 50543468 Blast Desc: YALI0A09383p [Yarrowia lipolytica] gi|49168660|emb|CAE02702.1| [Yarrowia lipolytica] gi|49645765|emb|CAG83827.1| YALI0A09383p [Yarrowia lipolytica]
  misc_feature (25)..(531): NCBI GI: 156055476 Blast Desc: SS1G_05090 [Sclerotinia sclerotiorum 1980] gi|154702874|gb|EDO02613.1| SS1G_05090 [Sclerotinia sclerotiorum 1980]
MHEGTNSVAERQTGLHRASFTDGTIDNETKMEDQEAVAATKAATQMVEDQSQDVALPVGSADYAVLERKLVRKIDLRLMPVLVFMIILNYLDRQALPNARIQGLETDLGLKGEEYNTAISVLFAGYIGLQIPSNLLLTRVRPSIYLPVTMALWGVVSASTAAVKDFHGLVVSRFFLGLLEAPFFPGALFLLSSWYTPRELATRTAVLYAGSLLSGGFGGLVGAGVQYGLNGARGLKSWQWLFIIEGAVTVAFSLMAIFILPDFPSTTRWLSEEERMVAVHRLRAHSGSADEKRGPIFQGLAMALADYKVWLLAGVVILKTSAAAVTSFIPTLVNTFDYDSVDSLLLVAPPYVFATIVSLAVSLSSDKFAERYFHLVSPLAVGMVGFIIGATTHTIAPRYFSLFLMLGGVYGSFNVTYAWVSSTLPRPLEKRASAFAIINVVGNIAQIYSPYLYDKKTGPQYLPAMIANTVFVFASISCATVLYFCLRRENEKLEAVEENQPEDHEDNSGKPQDIVQNKPGGTLQLSRGFRYTL

SEQ ID NO: 32906 - DNA, 2915 bp, Muscodor strobelii
  misc_feature: SGI EST ID NO. CUFF.77808.0
  misc_feature: Variant of the nucleotide sequence at SEQ ID NO 32904
gaattaatacctaaagtctagatatcttgaagccagaatctattctttgttatctgcactaagattaaatgacacgaatctacgcaatcgctagtaggtatctcagataggacactatcgaagctttgttgcgggcttggcacgcaagcccaagtctggagaagcgctattacatctattttggctcgatgcacaggaatcttgcctctagcttctaattatgaagtgggatgtacttgaataatgtttaatgaaaggtatgatgaggcagagactagattggtgagccgggtgtgatgagatcgttcatcttatgatctgtcgtcagattgttaagtccgacccccacttaaatcagcacctggacttgcaaccgactgcagtcctctatgccttctactgttaagcgcagctgtgaagagactccttgaggctaggtgccagattgattccgattatcgtggatgaccgcgactcagttgctggcggttaaccaatgggacaactgtggattaagtctaatatgacgcccaccgtccccgatactacaaggaacgtgagaacggagactggctcatgtagtccctctattgacatccaacctgaggacttagatgcacaaaaggcggtgcgggtttctcgccgaccactcttgtttttgatccccgcagaaccccatgccgaacatgtgtcggcatatggagacgatccagtgttaatgaggagaatgcggagcatatcggcagcaacgccgaactaacatgcacgagggtactaattccgttgcggaacgtcagactggcttacatgtagatagatgaccatcctacgcattcggtgcgagttcacactgcgagcctttttctttcctctgatgtgtgagagcgtgccagctttaccgacggtacgatagacaacgaaaccaaaatggaggaccaagaagcagtagctgccacgaaagcagcaacacagatggttgaggatcagtcccaggatgttgctctacctgttggctcggccgattatgcggtcctagagcgtaagcttgttcggaagatcgatttgcgactcatgcctgtgcttgtttttatgatcattcttaattatctagaccgtcaagctctcccaaatgcacggatccagggtttggagacggaccttgggctgaagggcgaagagtataatacggcaatttctgtgctttttgctgggtatattgggctacagattccatcgaatctgcttcttactagagtaagaccgagtatctacctaccagtcactatggctctctggggcgtcgtgtcagccagtactgcagcagtcaaagatttccacgggcttgtcgtcagccgtttcttcctcggtctcctagaagcaccgttcttccccggtgcattgtttttgctgagtagctggtacacacctcgcgaactcgccactcgcacggccgttctatacgcgggaagtcttctctcgggcggctttggaggtcttgtcggagccggtgttcaatatggtctaaatggtgccagaggattgaagtcatggcaatggctgttcatcatcgaaggcgctgtcaccgtcgctttctcattgatggcgattttcatcttgcctgatttcccgagtactacgaggtggttgtcggaggaagagaggatggtggctgtgcatcgtcttcgcgcgcatagtggtagtgctgatgagaagcgcggaccgattttccagggtctggccatggcgcttgcggactacaaagtctggttacttgctggagtggtgatattgaagacgtcggctgcggctgtgacgtcgtttatccctaccttggtcaatacttttgattacgattccgtggattctctacttcttgttgcgccgccttatgtctttgctacgatcgtgtctctcgcggtgtcactgtcgagtgataaatttgcagagcgatactttcatctggtgtcgccgcttgctgttggcatggttggtttcatcattggggctacgacacatacgattgcgccgagatatttctccttgtttcttatgttgggcggtgtttatggaagttttaacgttacttatgcttgggtgtcttctactctcccacgcccactcgagaagcgcgcttccgcatttgccatcatcaatgtcgttggaaacattgcgcaaatttactcgccatatttgtacgataagaagacgggtccgcaatatctaccagcgatgattgccaacaccgtgtttgttttcgcatcgattagctgtgctactgtgttgtacttctgtctccgacgagagaatgagaagttggaggctgttgaggagaaccaacctgaggaccacgaggataattcggggaagccccaagatattgtacagaataaaccaggtgggacactgcagttgagtcgcggcttcaggtataccctgtagagcaatgagttgcttcggagcaaatggttttgggatgcataccaactggacacggtcttcgatcatatcctgctactcccatagcccgtatatctgtcgatctgctcttcaggcgttggtgatacgaatgactgtatctcaacccaacaatctttcgcattacgtacgtcgtgatcatctcgtttcagccccaaaatggctgttgctgcggcacctcccaaggtgcaacgcgtccgcgcatcgcgaacacgcctcacacaatcctcacctagacaaccaaccaagtcccactaccatcccagcaaccacaccatctcccacgacaccaccccgcaaattcttgagccttatcaatcccaatagcacggtcggccatcacccgtagtgggtttatccaagtgggttatcgcatagaatatttcattactagaatgtatctttgaagtatcctgttcgaatccgcagttcgaatccgc

SEQ ID NO: 32907 - DNA, 345 bp, Muscodor strobelii
  misc_feature: SGI cDNA ID NO. 571345
  misc_feature: Elevated expression when VOC is produced
  misc_feature: Encodes the peptide sequence at SEQ ID NO 32908
atgtggaaagaattcctgcaaggcgccgcagagtggatgatggccaatccgcgcaccaccgttgtaggacttataggcgtagtcctcgttgctgcccccatggctgttgcagctccgttcctggggattttaggctttggcgcggctggtatttctgctgcaagcattgctgctggtgcccaagccggaatcggtaacgtcgtcgcaccgtccctcttcgcaactcttcagagcgccgccatgggtggatatggtgccgctgctgttggaggagtgtttcaagctgctggaggtgtggttgctggagcggctggtctgaaggagatcatcaaagctaagttttga

SEQ ID NO: 32908 - protein, 114 aa, Muscodor strobelii
  misc_feature: SGI Peptide ID NO. 571345
  misc_feature (9)..(89): NCBI GI: 256733258 Blast Desc: NECHADRAFT_79370 [Nectria haematococca mpVI 77-13-4]
  misc_feature (3)..(92): NCBI GI: 85083148 Blast Desc: NCU04490 [Neurospora crassa OR74A] gi|28918143|gb|EAA27823.1| [Neurospora crassa OR74A]
  misc_feature (4)..(108): NCBI GI: 189211454 Blast Desc: [Pyrenophora tritici-repentis Pt-1C-BFP] gi|187978150|gb|EDU44776.1| [Pyrenophora tritici-repentis Pt-1C-BFP]
  misc_feature (4)..(108): NCBI GI: 189211789 Blast Desc: [Pyrenophora tritici-repentis Pt-1C-BFP] gi|187979422|gb|EDU46048.1| [Pyrenophora tritici-repentis Pt-1C-BFP]
  misc_feature (4)..(108): NCBI GI: 189211858 Blast Desc: [Pyrenophora tritici-repentis Pt-1C-BFP] gi|187979456|gb|EDU46082.1| [Pyrenophora tritici-repentis Pt-1C-BFP]
  misc_feature (36)..(102): NCBI GI: 85083131 Blast Desc: NCU04486 [Neurospora crassa OR74A] gi|28918139|gb|EAA27819.1| NCU04486 [Neurospora crassa OR74A]
  misc_feature (3)..(92): NCBI GI: 154317611 Blast Desc: [Botryotinia fuckeliana B05.10] gi|150844331|gb|EDN19524.1| [Botryotinia fuckeliana B05.10]
  misc_feature (7)..(102): NCBI GI: 71001202 Blast Desc: conserved [Aspergillus fumigatus Af293] gi|66852920|gb|EAL93244.1| conserved [Aspergillus fumigatus Af293] gi|159129364|gb|EDP54478.1| conserved [Aspergillus A1163]
  misc_feature (2)..(114): NCBI GI: 154303735 Blast Desc: [Botryotinia fuckeliana B05.10] gi|150854546|gb|EDN29738.1| [Botryotinia fuckeliana B05.10]
  misc_feature (36)..(97): NCBI GI: 85083143 Blast Desc: NCU04489 [Neurospora crassa OR74A] gi|28918142|gb|EAA27822.1| [Neurospora crassa OR74A]
  misc_feature: Useful for introducing or modulating the production of volatile compounds
MWKEFLQGAAEWMMANPRTTVVGLIGVVLVAAPMAVAAPFLGILGFGAAGISAASIAAGAQAGIGNVVAPSLFATLQSAAMGGYGAAAVGGVFQAAGGVVAGAAGLKEIIKAKF

SEQ ID NO: 32909 - DNA, 987 bp, Muscodor strobelii
  misc_feature: SGI EST ID NO. CUFF.77934.0
  misc_feature: Variant of the nucleotide sequence at SEQ ID NO 32907
ccccaattcttacttcactcgtcctctcaacgtttttacacttgttagatcagtaatcgttcgtcaaccgaaactatctgcctcgcagcctcacacatcagttgtgtcaataataacttgtgcacttgcacctcaccgaattccaccatcctgcacaaggctgtggcgtttccatcttcggacactcatactcagacactcaagaactgcattctacgatggcatgtttcagcctcatcccttaccttaattgtggaaagaattcctgcaaggcgccgcagagtggatgatggccaatccgcgcaccaccgttgtaggacttataggcgtagtcctcgttgctgcccccatggctgttgcagctccgttcctggggattttaggctttggcgcggctggtatttctgctgcaagcattgctgctggtgcccaagccggaatcggtaacgtcgtcgcaccgtccctcttcgcaactcttcagagcgccgccatgggtggatatggtgccgctgctgttggaggagtgtttcaagctgctggaggtgtggttgctggagcggctggtctgaaggagatcatcaaagctaagttttgataacaaacggctcgacaacactaggaacatgatgagggagtgctgattgtgatacggaacttacaacgtgtcatacaagagggagactacgatgaggggcacgatcatagggaagattaggacgacgatagagagaccgcgaaatgttcttaagaggaaggtgcccgggcaagagttacgtgttgaggtacattgctgaggaaggaaaacacatgaagtggcatgaaagtaagggcagcagtgactatagcaaatgctgaggcagaagcaacgatgaactctagatagcaaccaccgcgagatttcagtaccttgtgtgagatgtaagatgcaacaccccagtaagcatggcaacaacaataaacttgaaacctaaggtgcctctctacaag

SEQ ID NO: 32910 - DNA, 1284 bp, Muscodor strobelii
  misc_feature: SGI cDNA ID NO. 571346
  misc_feature: Reduced expression when VOC is produced
  misc_feature: Encodes the peptide sequence at SEQ ID NO 32911
atgcgaccgttaatcgtgcacaacgtgcctgacgaggagcgctacacagggcaggatggcgtccagagaccctatgccatgatctggcctgaaagcgatcgccagcgcccggcaccacgcacgcgcgcccgcgagatcaacgagacgggctctttcggcaagtccacccgccgctccagatcgcggactggcagcctgccacccaagcgcgaagatgccaccatgcagagcgccgacaaggtcttctccagctacatcaccagtcgccagcagaccacctccccccagcgcaagacctcctacatgtcccagaacccgtcccagtcccaggacgactcgtgcaccgccaaccaggcctcgacctaccaccaggaacccgtcgaggtcgtcctgcgcggctacgcctcctccgcccagcagtacgccgccatcaaccactacgagcagctcgccggccgcatctgcgaagactacccccgcgaaccccccatcgaggcccgccgctacaagtccgacctgcgcgaccctgccctcacccgccgccagcccctctccaagctcgagcgcgagaaggtcaacaaggtagcaggcggcgagcactggataaagatcaccttcgagtcccaagaagccgccggcgccgccctcttcgcctcgccccagaagatcatgggccatctcatctacgcagagccctaccgcggtctgccccccatggaggacgccgccgtcctcgacgtcgtgggggatatcggcatgttcgacgacgtagtccggtcctcatcactccgcagacgaccttcacaacgcaggcctagaaacgggaaggggttcggcacacctggcgatgaattacctaacggcgaatcacccgaatcccatacctcgacccaaacactcgattccgcgaccgtatcagctacatccacaacaatctccagcgccaccgtaaccggcgaagctgcgcctccaaccagcaccgaaccagaagcagactccaaaaacaacacgctctcccgccgtatcccaggagcccgacgcatcaagctcctccccgcagacgcagcgctcaagaaacagcccacatggacacagaagctgctcgcctggatgcccttactcagttggtttagtggtgccatgatcggtaacgaggtgccacggaccgaggtcggcgagtttgactgggccagagccagtctgtattggaagattatgtacttccttgattcttgggtcaaactctttggtggggagatcgctagtggtgataaagatgactag

SEQ ID NO: 32911 - protein, 427 aa, Muscodor strobelii
  misc_feature: SGI Peptide ID NO. 571346
  misc_feature (1)..(427): NCBI GI: 116193609 Blast Desc: CHGG_06522 [Chaetomium globosum CBS 148.51] gi|88182435|gb|EAQ89903.1| CHGG_06522 [Chaetomium globosum CBS 148.51]
  misc_feature (1)..(427): NCBI GI: 85114177 Blast Desc: NCU02025 [Neurospora crassa OR74A] gi|16945400|emb|CAD11792.1| [Neurospora crassa] gi|28926437|gb|EAA35411.1| conserved [Neurospora crassa OR74A]
  misc_feature (1)..(427): NCBI GI: 46124049 Blast Desc: FG06402.1 [Gibberella zeae PH-1]
  misc_feature (1)..(427): NCBI GI: 39970645 Blast Desc: MGG_02789 [Magnaporthe grisea 70-15] gi|149210121|ref|XP_001522435.1| MGCH7_ch7g542 [Magnaporthe grisea 70-15] gi|86196497|gb|EAQ71135.1| MGCH7_ch7g542 grisea
  misc_feature (1)..(427): NCBI GI: 261353671 Blast Desc: conserved [Verticillium albo-atrum VaMs.102]
  misc_feature (1)..(427): NCBI GI: 256731883 Blast Desc: NECHADRAFT_41594 [Nectria haematococca mpVI 77-13-4]
  misc_feature (1)..(427): NCBI GI: 171684945 Blast Desc: protein product [Podospora anserina] gi|170942433|emb|CAP68085.1| protein product [Podospora anserina]
  misc_feature (1)..(427): NCBI GI: 154300054 Blast Desc: BC1G_11216 [Botryotinia fuckeliana B05.10] gi|150856829|gb|EDN32021.1| BC1G_11216 [Botryotinia fuckeliana B05.10]
  misc_feature (1)..(427): NCBI GI: 156055568 Blast Desc: SS1G_05136 [Sclerotinia sclerotiorum 1980] gi|154702920|gb|EDO02659.1| SS1G_05136 [Sclerotinia sclerotiorum 1980]
  misc_feature (7)..(421): NCBI GI: 238840554 Blast Desc: conserved [Microsporum canis CBS 113480]
  misc_feature: Useful for introducing or modulating the production of volatile compounds
MRPLIVHNVPDEERYTGQDGVQRPYAMIWPESDRQRPAPRTRAREINETGSFGKSTRRSRSRTGSLPPKREDATMQSADKVFSSYITSRQQTTSPQRKTSYMSQNPSQSQDDSCTANQASTYHQEPVEVVLRGYASSAQQYAAINHYEQLAGRICEDYPREPPIEARRYKSDLRDPALTRRQPLSKLEREKVNKVAGGEHWIKITFESQEAAGAALFASPQKIMGHLIYAEPYRGLPPMEDAAVLDVVGDIGMFDDVVRSSSLRRRPSQRRPRNGKGFGTPGDELPNGESPESHTSTQTLDSATVSATSTTISSATVTGEAAPPTSTEPEADSKNNTLSRRIPGARRIKLLPADAALKKQPTWTQKLLAWMPLLSWFSGAMIGNEVPRTEVGEFDWARASLYWKIMYFLDSWVKLFGGEIASGDKDD

SEQ ID NO: 32912 - DNA, 1907 bp, Muscodor strobelii
  misc_feature: SGI EST ID NO. CUFF.77828.0
  misc_feature: Variant of the nucleotide sequence at SEQ ID NO 32910
tcaagatgcaagcacaatcgcatccaaatcgcattttccaatcgtctctgcagctgcaccggcctcgagctcatcatccaccgtcctttttccttgtcttcgtagtgtgattgctaggataccattcattgtccacgtagtcgaagatctttgttcaagctcctttccaatttgatttgcgccaggcagcgaaggaaaaacagtcaaaacaatgcgaccgttaatcgtgcacaacgtgcctgacgaggagcgctacacagggcaggatggcgtccagagaccctatgccatgatctggcctgaaagcgatcgccagcgcccggcaccacgcacgcgcgcccgcgagatcaacgagacgggctctttcggcaagtccacccgccgctccagatcgcggactggcagcctgccacccaagcgcgaagatgccaccatgcagagcgccgacaaggtcttctccagctacatcaccagtcgccagcagaccacctccccccagcgcaagacctcctacatgtcccagaacccgtcccagtcccaggacgactcgtgcaccgccaaccaggcctcgacctaccaccaggaacccgtcgaggtcgtcctgcgcggctacgcctcctccgcccagcagtacgccgccatcaaccactacgagcagctcgccggccgcatctgcgaagactacccccgcgaaccccccatcgaggcccgccgctacaagtccgacctgcgcgaccctgccctcacccgccgccagcccctctccaagctcgagcgcgagaaggtcaacaaggtagcaggcggcgagcactggataaagatcaccttcgagtcccaagaagccgccggcgccgccctcttcgcctcgccccagaagatcatgggccatctcatctacgcagagccctaccgcggtctgccccccatggaggacgccgccgtcctcgacgtcgtgggggatatcggcatgttcgacgacgtagtccggtcctcatcactccgcagacgaccttcacaacgcaggcctagaaacgggaaggggttcggcacacctggcgatgaattacctaacggcgaatcacccgaatcccatacctcgacccaaacactcgattccgcgaccgtatcagctacatccacaacaatctccagcgccaccgtaaccggcgaagctgcgcctccaaccagcaccgaaccagaagcagactccaaaaacaacacgctctcccgccgtatcccaggagcccgacgcatcaagctcctccccgcagacgcagcgctcaagaaacagcccacatggacacagaagctgctcgcctggatgcccttactcagttggtttagtggtgccatgatcggtaacgaggtgccacggaccgaggtcggcgagtttgactgggccagagccagtctgtattggaagattatgtacttccttgattcttgggtcaaactctttggtggggagatcgctagtggtgataaagatgactaggtacacgggcaatgctcgtgggttgcgaactcgggaaagtcatgggcgtgcttatggctatcgatgaggtatcccatacaaagagagtagagtgtaatggacgagaatgaaaaaggagtgaggtattgtaatattatactcgtggtaatgagactttgctctaagacgaccgagcagaagagaatggcatgggacaaaagcataggagtttatgtacggagtcaaggatgcatagcttgccgtacatgtatagtgcgggacagcgtatagacgggctagtcaacatggcataagagaacacagcgccgcatatcagaattataatcaagttctcgtcatccctcactgttcacttagactactctgctggcagactgtataacgtaccaggaatttcacatacgaaatcgtc

SEQ ID NO: 32913 - DNA, 1422 bp, Muscodor strobelii
  misc_feature: SGI cDNA ID NO. 571347
  misc_feature: Encodes the peptide sequence at SEQ ID NO 32914
atggcgacgcccgccaccgcaagaggcacaacaccctcgccctctcgcctgcctcttccaggctcccctacatactcctacgcctcaaccgcgaacccactctcctcctacaacttaccagttcccccaccacctagaccgatagacacatacctcaccaaagccgacctcgaaaactcacacgccgcatactcggaactcctcgcgaccgcgaaatcgtaccgcgccgccctagcagcactctccgcctcctcgtcagcattcggcagcgcactagagtcctgtgcgcgcctcaaagaatcacgcgcggactctctcctaaacatcccaccaggtactccagccgttccaatgagtgcaagttacaacatgcgcgcgacctcttgcacagcagatcacttactctccgcgtcgggcgtgcaccatttaatcgcgaaccatcaacagattctttccgagacggtatacagaagttttgaagtcccgcttttgcatgacttagataagtggaagacggatatcgaggatgcggagcagacatatgcgaaagaggtcttggtgaggagtaaggagatcagacgacttgagaaggaggggctgaagttgcataaggcgagacgaagggatttgaataaattccgtgagcatctcgtggaattgaccgggaagttggatgggttgagtgaattgcatgggaatcatgcacagggcttgttgagggatagtcaggaggcgagttccaagatactagatgcgagttgtagtctggtgagggctgaagtggatatctttgagagtcttgcgaggaaaggttggtctgggggcggactcgatgatttacttgagaaaggacgggatcttttcgcggccgatgaggagggatcgggaccgggatcgacggggaccggggaccaggcgaagttgtttagtatattgccgcctaagagtatacttgctgatactgcgtcggattctggcgggaggggacggcctaggggcttgggtcatgcgaggagtgatagtttgttgagtgagggggaacgatatcagagtctggccggcgcggttacgcacggtggggatgtagagacggatagtatcttctctgagggaaacgcgaggggtgttagaccgtttagtcctcagccggttagaagggtgcctacggatgttgttatggatcctgaggagctgcttcagggtgttgaggagagcagacatggcgaacagacggattcggagacggagaaggaagatgaagatgaagatgatgggagtggtacgctgagaccgagaaaacgtggacttcgcgaggagcgaccgagtttagttgatcgacaggacgcagatccgaatgagggtgagagtccctggaaagatgagggaataagaaaagcgagtgaggaggcgcagaacacttag

SEQ ID NO: 32914 - protein, 473 aa, Muscodor strobelii
  misc_feature: SGI Peptide ID NO. 571347
  misc_feature (1)..(394): NCBI GI: 46124051 Blast Desc: FG06403.1 [Gibberella zeae PH-1]
  misc_feature (7)..(394): NCBI GI: 256732269 Blast Desc: [Nectria haematococca mpVI 77-13-4]
  misc_feature (1)..(394): NCBI GI: 261353672 Blast Desc: conserved [Verticillium albo-atrum VaMs.102]
  misc_feature (22)..(403): NCBI GI: 116193611 Blast Desc: CHGG_06523 [Chaetomium globosum CBS 148.51] gi|88182436|gb|EAQ89904.1| CHGG_06523 [Chaetomium globosum CBS 148.51]
  misc_feature (3)..(461): NCBI GI: 39970643 Blast Desc: MGG_02788 [Magnaporthe grisea 70-15] gi|149210119|ref|XP_001522434.1| MGCH7_ch7g541 [Magnaporthe grisea 70-15] gi|86196496|gb|EAQ71134.1| MGCH7_ch7g541 grisea
  misc_feature (4)..(398): NCBI GI: 154300052 Blast Desc: BC1G_11215 [Botryotinia fuckeliana B05.10] gi|150856828|gb|EDN32020.1| BC1G_11215 [Botryotinia fuckeliana B05.10]
  misc_feature (11)..(351): NCBI GI: 16945401 Blast Desc: conserved [Neurospora crassa]
  misc_feature (11)..(383): NCBI GI: 25465935 Blast Desc: conserved [Neurospora crassa]
  misc_feature (11)..(292): NCBI GI: 164429639 Blast Desc: NCU02026 [Neurospora crassa OR74A] gi|157073559|gb|EAA35412.2| NCU02026 [Neurospora crassa OR74A]
  misc_feature (10)..(387): NCBI GI: 156055570 Blast Desc: SS1G_05137 [Sclerotinia sclerotiorum 1980] gi|154702921|gb|EDO02660.1| SS1G_05137 [Sclerotinia sclerotiorum 1980]
MATPATARGTTPSPSRLPLPGSPTYSYASTANPLSSYNLPVPPPPRPIDTYLTKADLENSHAAYSELLATAKSYRAALAALSASSSAFGSALESCARLKESRADSLLNIPPGTPAVPMSASYNMRATSCTADHLLSASGVHHLIANHQQILSETVYRSFEVPLLHDLDKWKTDIEDAEQTYAKEVLVRSKEIRRLEKEGLKLHKARRRDLNKFREHLVELTGKLDGLSELHGNHAQGLLRDSQEASSKILDASCSLVRAEVDIFESLARKGWSGGGLDDLLEKGRDLFAADEEGSGPGSTGTGDQAKLFSILPPKSILADTASDSGGRGRPRGLGHARSDSLLSEGERYQSLAGAVTHGGDVETDSIFSEGNARGVRPFSPQPVRRVPTDVVMDPEELLQGVEESRHGEQTDSETEKEDEDEDDGSGTLRPRKRGLREERPSLVDRQDADPNEGESPWKDEGIRKASEEAQNT

SEQ ID NO: 32915 - DNA, 3677 bp, Muscodor strobelii
  misc_feature: SGI EST ID NO. CUFF.77832.0
  misc_feature: Variant of the nucleotide sequence at SEQ ID NO 32913
ggaccctatgctcaccaaggcagcgtcttaataggctgattcacaggaagcaccaacaccatggaacatccgccgcactaagttcagctattagctgctcccttccacgagccttaccctaaactcttcgggtgtcacccttcgtcaaacatcgacagcgaactaaatgcccctaacccatcctatattgacggcattaataggctcttttatcgtctttgtgatactactcgttcgtcccacgagttcgagttccagcgcgcacccgtccgacatggctccgcttgtgatgtccgccgttgctaagcacacggccaccgtcattttcatgcacgggctgggtgacactggctacggatgggcttctgcggttgagatgtggcagaaacggggcaagttgaatcatgtcaagtttgtgctgccgcatgcgccttcgattcctgttactgtcaatggtggcatggtcatgccttcttggtttgatgttaccgccctcggtggtgccctggacgacatcaagaagaaccaagatgagcctggccacctcaagtcacgcgagtatgttcacggtcttattcaagccgagattgatgctggcattcccgcaaaccgcatcatcgtcggcggattctcgatgggcggtgccatgtcgcatctttcagctctcacgtccaaagtcaagctcggcggtgtcgttggtctgtcttcgtggttgcctctcgaccacaagtttccggagatggtgaaggaggccggcaatgtcaaccagaatacgcctatcttcatgggtcacggaactgtcgacccttatgtgccctttgccttaggcaagcttacggctgagacgctgaagcagcagggctttagcgtcgaattgacgtcgtatcctggcatggctcactctgcgtgtctggaggaattgatggcagttgagtctttcatcgctaagcaagtgcccgctgacgagggaaaatcggagttgtgatgttgatgcaagagatcacaccttgctggactatttccttaccaaaatcatcttacgaagcatagtcaggaacatggggttgacataaaagaaaatcggccatacgagaaagtcgcataggtgctactcgggttcagcctttcgcgctatttcaacataacgagtaccaccgattgcggaagtcacgatccaaagagaggagagaaagatcgagactcgatgaccgagagagcaaatgtgtagagtgtggaaataaatgccactcaataaggcactggctcaggacttctgcatactgaagtttggcctgtccgtgcctatttcctcgccaaccacaatgtgataccaaacccacgttttgtacctgtcaaacattcttaaacttccttgccttatgtcctatcaattcattgtacgcacgaagccacatggccaagtaggaccaccacgggtcagcatcccatagctctagctccagtagcgggctggcggggtgtacaggagtggaccccctgatcagcgccagccaggtgatcattgtggtggatgggcgaaagttaaacaagtttctcgactttgaccttatcagctgtcctaacacgacatgctcgcttcactccgcctcactcctaagcaatctctagatcgtactatcatgaccgacttctaatagtctgatatttttatttcgtcgcacagctttggttatgccgacctgaatacctacgacaggcaacccatccttatctgcttatctcctctcatcgctatcgcaaagtaaacaaacccagccagtaacagtctctcgtctatccgtctgcctacctgcgtcaccctccgtatcaccaccagcctcagactcgacaccatcaagcatctcgaaccatggcgacgcccgccaccgcaagaggcacaacaccctcgccctctcgcctgcctcttccaggctcccctacatactcctacgcctcaaccgcgaacccactctcctcctacaacttaccagttcccccaccacctagaccgatagacacatacctcaccaaagccgacctcgaaaactcacacgccgcatactcggaactcctcgcgaccgcgaaatcgtaccgcgccgccctagcagcactctccgcctcctcgtcagcattcggcagcgcactagagtcctgtgcgcgcctcaaagaatcacgcgcggactctctcctaaacatcccaccaggtactccagccgttccaatgagtgcaagttacaacatgcgcgcgacctcttgcacagcagatcacttactctccgcgtcgggcgtgcaccatttaatcgcgaaccatcaacagattctttccgagacggtatacagaagttttgaagtcccgcttttgcatgacttagataagtggaagacggatatcgaggatgcggagcagacatatgcgaaagaggtcttggtgaggagtaaggagatcagacgacttgagaaggaggggctgaagttgcataaggcgagacgaagggatttgaataaattccgtgagcatctcgtggaattgaccgggaagttggatgggttgagtgaattgcatgggaatcatgcacagggcttgttgagggatagtcaggaggcgagttccaagatactagatgcgagttgtagtctggtgagggctgaagtggatatctttgagagtcttgcgaggaaaggttggtctgggggcggactcgatgatttacttgagaaaggacgggatcttttcgcggccgatgaggagggatcgggaccgggatcgacggggaccggggaccaggcgaagttgtttagtatattgccgcctaagagtatacttgctgatactgcgtcggattctggcgggaggggacggcctaggggcttgggtcatgcgaggagtgatagtttgttgagtgagggggaacgatatcagagtctggccggcgcggttacgcacggtggggatgtagagacggatagtatcttctctgagggaaacgcgaggggtgttagaccgtttagtcctcagccggttagaagggtgcctacggatgttgttatggatcctgaggagctgcttcagggtgttgaggagagcagacatggcgaacagacggattcggagacggagaaggaagatgaagatgaagatgatgggagtggtacgctgagaccgagaaaacgtggacttcgcgaggagcgaccgagtttagttgatcgacaggacgcagatccgaatgagggtgagagtccctggaaagatgagggaataagaaaagcgagtgaggaggcgcagaacacttagagacgttctcgcggctggagctgctggagctctgcggagcgagagagaagatattcggcttttctaccacctcctagtccgcccgaggatttgcagacctcccaaacaccgaaacggcctcagagagctagtctgccggttgtagatcatggcgatgagcatgaggaggtgagacgggggttagggggcgtgcacttgggctcctgagcacttcgaagagggctgaagatacttgttggatcaagattggcaaagatagataagcattctggagttcgcgattgttgaatctagcctacctgtgatcataccctgctggagtagcctttggcggtatgagaagtatatatagagataatgagtatgcttcacccttcgtctctaa

SEQ ID NO: 32916 - DNA, 711 bp, Muscodor strobelii
  misc_feature: SGI cDNA ID NO. 571348
  misc_feature: Elevated expression when VOC is produced
  misc_feature: Encodes the peptide sequence at SEQ ID NO 32917
atggctccgcttgtgatgtccgccgttgctaagcacacggccaccgtcattttcatgcacgggctgggtgacactggctacggatgggcttctgcggttgagatgtggcagaaacggggcaagttgaatcatgtcaagtttgtgctgccgcatgcgccttcgattcctgttactgtcaatggtggcatggtcatgccttcttggtttgatgttaccgccctcggtggtgccctggacgacatcaagaagaaccaagatgagcctggccacctcaagtcacgcgagtatgttcacggtcttattcaagccgagattgatgctggcattcccgcaaaccgcatcatcgtcggcggattctcgatgggcggtgccatgtcgcatctttcagctctcacgtccaaagtcaagctcggcggtgtcgttggtctgtcttcgtggttgcctctcgaccacaagtttccggagatggtgaaggaggccggcaatgtcaaccagaatacgcctatcttcatgggtcacggaactgtcgacccttatgtgccctttgccttaggcaagcttacggctgagacgctgaagcagcagggctttagcgtcgaattgacgtcgtatcctggcatggctcactctgcgtgtctggaggaattgatggcagttgagtctttcatcgctaagcaagtgcccgctgacgagggaaaatcggagttgtga

SEQ ID NO: 32917 - protein, 236 aa, Muscodor strobelii
  misc_feature: SGI Peptide ID NO. 571348
  misc_feature (1)..(227): Pfam Id: PF02230 Pfam Desc: Phospholipase/Carboxylesterase
  misc_feature (3)..(236): NCBI GI: 171684951 Blast Desc: protein product [Podospora anserina] gi|170942436|emb|CAP68088.1| protein product [Podospora anserina]
  misc_feature (3)..(235): NCBI GI: 85114185 Blast Desc: NCU02027 [Neurospora crassa OR74A] gi|74624718|sp|Q9HFJ5.2|APTH1_NEUCR RecName: Full=Acyl-protein thioesterase 1 gi|16945402|emb|CAC10084.2| related to [Neurospora
  misc_feature (1)..(228): NCBI GI: 256732270 Blast Desc: [Nectria haematococca mpVI 77-13-4]
  misc_feature (2)..(228): NCBI GI: 145609994 Blast Desc: MGG_02811 [Magnaporthe grisea 70-15] gi|42391843|dbj|BAD08698.1| lysophospholipase [Magnaporthe grisea] gi|145017375|gb|EDK01738.1| MGG_02811 [Magnaporthe grisea
  misc_feature (2)..(228): NCBI GI: 149210171 Blast Desc: MGCH7_ch7g567 [Magnaporthe grisea 70-15] gi|86196522|gb|EAQ71160.1| MGCH7_ch7g567 [Magnaporthe grisea 70-15]
  misc_feature (4)..(236): NCBI GI: 116193613 Blast Desc: CHGG_06524 [Chaetomium globosum CBS 148.51] gi|88182437|gb|EAQ89905.1| CHGG_06524 [Chaetomium globosum CBS 148.51]
  misc_feature (2)..(228): NCBI GI: 42391844 Blast Desc: lysophospholipase [Magnaporthe grisea]
  misc_feature (1)..(228): NCBI GI: 46124053 Blast Desc: FG06404.1 [Gibberella zeae PH-1] gi|90111967|sp|Q4I8Q4.1|APTH1_GIBZE RecName: Full=Acyl-protein thioesterase 1
  misc_feature (2)..(229): NCBI GI: 261353673 Blast Desc: acyl-protein thioesterase [Verticillium albo-atrum VaMs.102]
  misc_feature (2)..(234): NCBI GI: 212537443 Blast Desc: phospholipase, [Penicillium marneffei ATCC 18224] gi|210068619|gb|EEA22710.1| phospholipase, [Penicillium marneffei ATCC 18224]
  misc_feature (3)..(227): SWISSPROT Homolog: EC 3.1.1.1 Carboxylesterase
  misc_feature: Useful for introducing or modulating the production of volatile compounds
MAPLVMSAVAKHTATVIFMHGLGDTGYGWASAVEMWQKRGKLNHVKFVLPHAPSIPVTVNGGMVMPSWFDVTALGGALDDIKKNQDEPGHLKSREYVHGLIQAEIDAGIPANRIIVGGFSMGGAMSHLSALTSKVKLGGVVGLSSWLPLDHKFPEMVKEAGNVNQNTPIFMGHGTVDPYVPFALGKLTAETLKQQGFSVELTSYPGMAHSACLEELMAVESFIAKQVPADEGKSEL

SEQ ID NO: 32918 - DNA, 3677 bp, Muscodor strobelii; identical to SEQ ID NO: 32915
  misc_feature: SGI EST ID NO. CUFF.77832.0
  misc_feature: Variant of the nucleotide sequence at SEQ ID NO 32916

SEQ ID NO: 32919 - DNA, 765 bp, Muscodor strobelii
  misc_feature: SGI cDNA ID NO. 571349
  misc_feature: Encodes the peptide sequence at SEQ ID NO 32920
atggctccgcttgtgatgtccgccgttgctaagcacacggccaccgtcattttcatgcacgggctgggtgacactggctacggatgggcttctgcggttgagatgtggcagaaacggggcaagttgaatcatgtcaagtttgtgctgccgcatgcgccttcgattcctgttactgtcaatggtggcatggtcatgccttcttggtttgatgttgtaagttattctttgattcatgcgaatatgaatatcctatctgactgcattgagaccgccctcggtggtgccctggacgacatcaagaagaaccaagatgagcctggccacctcaagtcacgcgagtatgttcacggtcttattcaagccgagattgatgctggcattcccgcaaaccgcatcatcgtcggcggattctcgatgggcggtgccatgtcgcatctttcagctctcacgtccaaagtcaagctcggcggtgtcgttggtctgtcttcgtggttgcctctcgaccacaagtttccggagatggtgaaggaggccggcaatgtcaaccagaatacgcctatcttcatgggtcacggaactgtcgacccttatgtgccctttgccttaggcaagcttacggctgagacgctgaagcagcagggctttagcgtcgaattgacgtcgtatcctggcatggctcactctgcgtgtctggaggaattgatggcagttgagtctttcatcgctaagcaagtgcccgctgacgagggaaaatcggagttgtga

SEQ ID NO: 32920 - protein, 254 aa, Muscodor strobelii
  misc_feature: SGI Peptide ID NO. 571349
  misc_feature (1)..(245): Pfam Id: PF02230 Pfam Desc: Phospholipase/Carboxylesterase
  misc_feature (103)..(245): Pfam Id: PF02230 Pfam Desc: Phospholipase/Carboxylesterase
  misc_feature (1)..(75): Pfam Id: PF02230 Pfam Desc: Phospholipase/Carboxylesterase
  misc_feature (3)..(254): NCBI GI: 171684951 Blast Desc: protein product [Podospora anserina] gi|170942436|emb|CAP68088.1| protein product [Podospora anserina]
  misc_feature (3)..(253): NCBI GI: 85114185 Blast Desc: NCU02027 [Neurospora crassa OR74A] gi|74624718|sp|Q9HFJ5.2|APTH1_NEUCR RecName: Full=Acyl-protein thioesterase 1 gi|16945402|emb|CAC10084.2| related to [Neurospora
  misc_feature (2)..(254): NCBI GI: 42391844 Blast Desc: lysophospholipase [Magnaporthe grisea]
  misc_feature (1)..(246): NCBI GI: 256732270 Blast Desc: [Nectria haematococca mpVI 77-13-4]
  misc_feature (2)..(246): NCBI GI: 149210171 Blast Desc: MGCH7_ch7g567 [Magnaporthe grisea 70-15] gi|86196522|gb|EAQ71160.1| MGCH7_ch7g567 [Magnaporthe grisea 70-15]
  misc_feature (2)..(254): NCBI GI: 145609994 Blast Desc: MGG_02811 [Magnaporthe grisea 70-15] gi|42391843|dbj|BAD08698.1| lysophospholipase [Magnaporthe grisea] gi|145017375|gb|EDK01738.1| MGG_02811 [Magnaporthe grisea
  misc_feature (4)..(254): NCBI GI: 116193613 Blast Desc: CHGG_06524 [Chaetomium globosum CBS 148.51] gi|88182437|gb|EAQ89905.1| CHGG_06524 [Chaetomium globosum CBS 148.51]
  misc_feature (1)..(246): NCBI GI: 46124053 Blast Desc: FG06404.1 [Gibberella zeae PH-1] gi|90111967|sp|Q4I8Q4.1|APTH1_GIBZE RecName: Full=Acyl-protein thioesterase 1
  misc_feature (3)..(246): NCBI GI: 169609470 Blast Desc: SNOG_07827 [Phaeosphaeria nodorum SN15] gi|111064173|gb|EAT85293.1| SNOG_07827 [Phaeosphaeria nodorum SN15]
  misc_feature (2)..(252): NCBI GI: 212537443 Blast Desc: phospholipase, [Penicillium marneffei ATCC 18224] gi|210068619|gb|EEA22710.1| phospholipase, [Penicillium marneffei ATCC 18224]
  misc_feature (3)..(245): SWISSPROT Homolog: EC 3.1.1.1 Carboxylesterase
MAPLVMSAVAKHTATVIFMHGLGDTGYGWASAVEMWQKRGKLNHVKFVLPHAPSIPVTVNGGMVMPSWFDVVSYSLIHANMNILSDCIETALGGALDDIKKNQDEPGHLKSREYVHGLIQAEIDAGIPANRIIVGGFSMGGAMSHLSALTSKVKLGGVVGLSSWLPLDHKFPEMVKEAGNVNQNTPIFMGHGTVDPYVPFALGKLTAETLKQQGFSVELTSYPGMAHSACLEELMAVESFIAKQVPADEGKSEL

SEQ ID NO: 32921 - DNA, 3677 bp, Muscodor strobelii; identical to SEQ ID NO: 32915
  misc_feature: SGI EST ID NO. CUFF.77832.0
  misc_feature: Variant of the nucleotide sequence at SEQ ID NO 32919

SEQ ID NO: 32922 - DNA, 825 bp, Muscodor strobelii
  misc_feature: SGI cDNA ID NO. 571350
  misc_feature: Encodes the peptide sequence at SEQ ID NO 32923
atgacgagaacaccggtctattttatgagccatggcggtccgaacacaatgttcgacacggtgcaccctgtgtatccgatacttcaaaatctcggaaaggaaatcacacaaaaggttaagccaaaggctatagtagtcttctccgctcattgggaggctggacccaatgacattgaggtcaatacagcagagaaaaccgatctgatatttgattactggggattcccatctcactactacgatgtctcgtatccaaaccaaggcagtccagcaattgcctcaaaagtcctcgacattctgaagcaagccgggatcaatgccacaggcaccactcgaggtttagatcacggtgtcttcgtcggcttctcagttgcctttgacccaaaaaccaaccccctaaacatccccataatccaagtaagccaatacaacagccaagacgtagacctacactacaggctcgggcaagccgtgcaatcactccgcgatgagaatatcctcatcatcggagccggcatgtctgttcacaatctgcgagatctcagattcgcacaaggcccactgccactgccttacacggtctcttttgatgaggcactgaaggagggaatggaggcgccgccggataaacgccaggttgctatgtctgagattgcgaaacggccggatgctaagaaggcccatcccagattcgaccatttgatgccggcgtacatcactgcaggcgcagctggtaacgatatgggaaagcagatgtggacttttcatgagatgagtatgggatgggccatgtacaggtttggcggattgccagcagaagcatag

SEQ ID NO: 32923 - protein, 274 aa, Muscodor strobelii
  misc_feature: SGI Peptide ID NO. 571350
  misc_feature (5)..(268): Pfam Id: PF02900 Pfam Desc: Catalytic LigB subunit of aromatic ring-opening dioxygenase
  misc_feature (1)..(272): NCBI GI: 116193615 Blast Desc: CHGG_06525 [Chaetomium globosum CBS 148.51] gi|88182438|gb|EAQ89906.1| CHGG_06525 [Chaetomium globosum CBS 148.51]
  misc_feature (3)..(268): NCBI GI: 119467360 Blast Desc: aromatic ring-opening dioxygenase LigB subunit, [Neosartorya fischeri NRRL 181] gi|119405638|gb|EAW15589.1| aromatic ring-opening dioxygenase LigB subunit, [Neosartorya NRRL
  misc_feature (3)..(268): NCBI GI: 255950846 Blast Desc: Pc22g22960 [Penicillium chrysogenum Wisconsin 54-1255] gi|211593207|emb|CAP99584.1| Pc22g22960 [Penicillium chrysogenum Wisconsin 54-1255]
  misc_feature (3)..(268): NCBI GI: 121703938 Blast Desc: aromatic ring-opening dioxygenase LigB subunit, [Aspergillus clavatus NRRL 1] gi|119398377|gb|EAW08807.1| aromatic ring-opening dioxygenase LigB subunit, [Aspergillus NRRL
  misc_feature (1)..(268): NCBI GI: 169775449 Blast Desc: [Aspergillus oryzae RIB40] gi|83770055|dbj|BAE60190.1| protein product [Aspergillus oryzae]
  misc_feature (1)..(268): NCBI GI: 238495905 Blast Desc: aromatic ring-opening dioxygenase LigB subunit, [Aspergillus flavus NRRL3357] gi|220694068|gb|EED50412.1| aromatic ring-opening dioxygenase LigB subunit, [Aspergillus
  misc_feature (3)..(271): NCBI GI: 115386598 Blast Desc: conserved [Aspergillus terreus NIH2624] gi|114190838|gb|EAU32538.1| conserved [Aspergillus terreus NIH2624]
  misc_feature (1)..(268): NCBI GI: 145247106 Blast Desc: An12g07530 [Aspergillus niger] gi|134080530|emb|CAK46377.1| protein product [Aspergillus niger]
  misc_feature (2)..(274): NCBI GI: 256727055 Blast Desc: NECHADRAFT_76650 [Nectria haematococca mpVI 77-13-4]
  misc_feature (1)..(272): NCBI GI: 238840593 Blast Desc: extradiol ring-cleavage dioxygenase [Microsporum canis CBS 113480]
MTRTPVYFMSHGGPNTMFDTVHPVYPILQNLGKEITQKVKPKAIVVFSAHWEAGPNDIEVNTAEKTDLIFDYWGFPSHYYDVSYPNQGSPAIASKVLDILKQAGINATGTTRGLDHGVFVGFSVAFDPKTNPLNIPIIQVSQYNSQDVDLHYRLGQAVQSLRDENILIIGAGMSVHNLRDLRFAQGPLPLPYTVSFDEALKEGMEAPPDKRQVAMSEIAKRPDAKKAHPRFDHLMPAYITAGAAGNDMGKQMWTFHEMSMGWAMYRFGGLPAEA

SEQ ID NO: 32924 - DNA, 1431 bp, Muscodor strobelii
  misc_feature: SGI EST ID NO. CUFF.77900.0
  misc_feature: Variant of the nucleotide sequence at SEQ ID NO 32922
cgtcatccagcttaggagcaaattccgaaagactagaaaagctccatgtcctagctcccacccaaaactagctgaagcacgaagggtccatgaccccatctcgcgcgcgggacacgggtcccgacgccgcgacccgacagcgcggaaagaaagaaactcccaatcggattgctcacctcgtaacaaatgctgacatatccttggtaatctccaaactatcggtcgaagctattgtcacatcgtacagaaagagaaagatgttataataatattattttcaatatattttgccctcaatggcgttcggattcctgtcgttgagaagaattgtactcttgactcctatcgttgtcgcaatcgtggctttcctactctcgaatcggctctccagcatttccaactcctcgctgtcttcactcacaagattcttcacttctaaggcgatgacgagaacaccggtctattttatgagccatggcggtccgaacacaatgttcgacacggtgcaccctgtgtatccgatacttcaaaatctcggaaaggaaatcacacaaaaggttaagccaaaggctatagtagtcttctccgctcattgggaggctggacccaatgacattgaggtcaatacagcagagaaaaccgatctgatatttgattactggggattcccatctcactactacgatgtctcgtatccaaaccaaggcagtccagcaattgcctcaaaagtcctcgacattctgaagcaagccgggatcaatgccacaggcaccactcgaggtttagatcacggtgtcttcgtcggcttctcagttgcctttgacccaaaaaccaaccccctaaacatccccataatccaagtaagccaatacaacagccaagacgtagacctacactacaggctcgggcaagccgtgcaatcactccgcgatgagaatatcctcatcatcggagccggcatgtctgttcacaatctgcgagatctcagattcgcacaaggcccactgccactgccttacacggtctcttttgatgaggcactgaaggagggaatggaggcgccgccggataaacgccaggttgctatgtctgagattgcgaaacggccggatgctaagaaggcccatcccgtaagttactctcctagcatgttgttgggttgtgtgctgatagactgcagagattcgaccatttgatgccggcgtacatcactgcaggcgcagctggtaacgatatgggaaagcagatgtggacttttcatgagatgagtatgggatgggccatgtacaggtttggcggattgccagcagaagcatagtaatcgagaaataaaatcgtgcagcttgcaatgtgtctcgtaaacgactgttaaatgtcatctaacgcagtctagttctcgtcctgtgatgtctaccctgctgttcaattacc

SEQ ID NO: 32925 - DNA, 972 bp, Muscodor strobelii
  misc_feature: SGI cDNA ID NO. 571351
  misc_feature: Encodes the peptide sequence at SEQ ID NO 32926
atgtcctcgccactccaggaagcgctcagttccgcagtcggagccacccacccagcgctcctctcagacgtcataccatgcctcctacaaagcataagtcaaatcggtcaaacgctccgcaccgcacaccacgtatcacaagcaggattctctaacgcattcggcgacgaccagctaaacgtcgacgtgttagcagagaaccacatccggtcctctctctcgtcatgccgctctgtcgcaacagcgagcagcgaagaggatcccatcgaacggcttacaggacaaactgagagagaggagggagaagagatctataccgtggccttcgacccgcttgacgggagttcgataatcgcgccgaattggaccgtaggcaccatcatcgggatctggacgggaaaaagcgcattgcgtcaaaacccagagaatcaagtcgctgccgtgatcggtgtctacgggcctcggaccacggctcttatcgcgttgcgtatccccgggcgtgaagaagacgctgtatgcgtcgaggtcggtatttcgggggaggaaatagagatcatacggtctcgtgtcagactcgatgaaaatacacccaaacccaagtatttcgcccccgcgaacctacgcgctgcgtcggaagacccgcggtatatggcgttggtcacggaatatataagccagcggtatacgttgagatatagcgggggtttggtcccagatattatgcatgcgcttgttaaggggcatggggtttatatctcgcccgtgacgaaagggagtaaggcgaagctgaggagattatatgagttgtatcctattgcgcttttgatggagtgtgctggtggtagtgccattgatcccgtggatgggaagagtatcttggagaggacgcttgaggatttgaatgaaacggcgggattggtctgtgggacgtctgaggaggttgagagggttaggggtaagcttgttggttag

SEQ ID NO: 32926 - protein, 323 aa, Muscodor strobelii
  misc_feature: SGI Peptide ID NO. 571351
  misc_feature (3)..(321): Pfam Id: PF00316 Pfam Desc: Fructose-1-6-bisphosphatase
  misc_feature (47)..(157): Pfam Id: PF00316 Pfam Desc: Fructose-1-6-bisphosphatase
  misc_feature (200)..(317): Pfam Id: PF00316 Pfam Desc: Fructose-1-6-bisphosphatase
  misc_feature (5)..(322): NCBI GI: 256723283 Blast Desc: NECHADRAFT_64445 [Nectria haematococca mpVI 77-13-4]
  misc_feature (18)..(323): NCBI GI: 189209121 Blast Desc: sedoheptulose-1,7-bisphosphatase [Pyrenophora tritici-repentis Pt-1C-BFP] gi|187976986|gb|EDU43612.1| sedoheptulose-1,7-bisphosphatase [Pyrenophora tritici-repentis
  misc_feature (2)..(323): NCBI GI: 85083119 Blast Desc: NCU04483 [Neurospora crassa OR74A] gi|28918136|gb|EAA27816.1| conserved [Neurospora crassa OR74A]
  misc_feature (19)..(322): NCBI GI: 46114570 Blast Desc: FG03127.1 [Gibberella zeae PH-1]
  misc_feature (1)..(323): NCBI GI: 261358806 Blast Desc: sedoheptulose-1,7-bisphosphatase [Verticillium albo-atrum VaMs.102]
  misc_feature (3)..(321): NCBI GI: 171691352 Blast Desc: protein product [Podospora anserina] gi|170945624|emb|CAP71737.1| protein product [Podospora anserina]
  misc_feature (2)..(250): NCBI GI: 145604477 Blast Desc: MGG_07702 [Magnaporthe grisea 70-15] gi|145012469|gb|EDJ97123.1| MGG_07702 [Magnaporthe grisea 70-15]
  misc_feature (19)..(238): NCBI GI: 116195362 Blast Desc: CHGG_04279 [Chaetomium globosum CBS 148.51] gi|88180192|gb|EAQ87660.1| CHGG_04279 [Chaetomium globosum CBS 148.51]
  misc_feature (7)..(318): NCBI GI: 219110533 Blast Desc: seduheptulose bisphosphatase [Phaeodactylum tricornutum CCAP 1055/1] gi|217411553|gb|EEC51481.1| seduheptulose bisphosphatase [Phaeodactylum tricornutum CCAP
  misc_feature (25)..(314): NCBI GI: 223997392 Blast Desc: [Thalassiosira pseudonana CCMP1335] gi|220975477|gb|EED93805.1| [Thalassiosira pseudonana CCMP1335]
  misc_feature (5)..(323): SWISSPROT Homolog: EC 3.1.3.37 Sedoheptulose-bisphosphatase
MSSPLQEALSSAVGATHPALLSDVIPCLLQSISQIGQTLRTAHHVSQAGFSNAFGDDQLNVDVLAENHIRSSLSSCRSVATASSEEDPIERLTGQTEREEGEEIYTVAFDPLDGSSIIAPNWTVGTIIGIWTGKSALRQNPENQVAAVIGVYGPRTTALIALRIPGREEDAVCVEVGISGEEIEIIRSRVRLDENTPKPKYFAPANLRAASEDPRYMALVTEYISQRYTLRYSGGLVPDIMHALVKGHGVYISPVTKGSKAKLRRLYELYPIALLMECAGGSAIDPVDGKSILERTLEDLNETAGLVCGTSEEVERVRGKLVG

SEQ ID NO: 32927 - DNA, 1251 bp, Muscodor strobelii
  misc_feature: SGI EST ID NO. CUFF.77837.0
  misc_feature: Variant of the nucleotide sequence at SEQ ID NO 32925
atttctgtttcaaatccactttcacctcaaatcacctcaatataatcaaaatttcatcctaattttcatcatgacagtacatcagtcactaaataactgaccctactcaaaaatgtcctcgccactccaggaagcgctcagttccgcagtcggagccacccacccagcgctcctctcagacgtcataccatgcctcctacaaagcataagtcaaatcggtcaaacgctccgcaccgcacaccacgtatcacaagcaggattctctaacgcattcggcgacgaccagctaaacgtcgacgtgttagcagagaaccacatccggtcctctctctcgtcatgccgctctgtcgcaacagcgagcagcgaagaggatcccatcgaacggcttacaggacaaactgagagagaggagggagaagagatctataccgtggccttcgacccgcttgacgggagttcgataatcgcgccgaattggaccgtaggcaccatcatcgggatctggacgggaaaaagcgcattgcgtcaaaacccagagaatcaagtcgctgccgtgatcggtgtctacgggcctcggaccacggctcttatcgcgttgcgtatccccgggcgtgaagaagacgctgtatgcgtcgaggtcggtatttcgggggaggaaatagagatcatacggtctcgtgtcagactcgatgaaaatacacccaaacccaagtatttcgcccccgcgaacctacgcgctgcgtcggaagacccgcggtatatggcgttggtcacggaatatataagccagcggtatacgttgagatatagcgggggtttggtcccagatattatgcatgcgcttgttaaggggcatggggtttatatctcgcccgtgacgaaagggagtaaggcgaagctgaggagattatatgagttgtatcctattgcgcttttgatggagtgtgctggtggtagtgccattgatcccgtggatgggaagagtatcttggagaggacgcttgaggatttgaatgaaacggcgggattggtctgtgggacgtctgaggaggttgagagggttaggggtaagcttgttggttagatagatatggatcaaagtacggttcactgctaagtgttggattcgctggtgatgtgttctccgacgtgtggcatctcgacggaaacgaaagggatatttcgggtatgcacactgggatggatctcacaaagagaaaaagtcaataacggaatgaataagaatcccaa

SEQ ID NO: 32928 - DNA, 1236 bp, Muscodor strobelii
  misc_feature: SGI cDNA ID NO. 571352
  misc_feature: Encodes the peptide sequence at SEQ ID NO 32929
atgacgaaatcacagtccaacatatcccaactcaaagactttctatcttacctcgcaacagtaaagggagatctttcgaatgtcactgcgccgccatttgtcctctcgccaaaatcagtcacagagatcccagcatcatgggcagagcggcatgagctgttcctccaacccgcgcacgaagatgacgcggcacagcgtgcacttcttattcttaagaatttcctctgcagtctgaagcgtcaagtttatagttctgcatctgcagactcggattcggactcagatggcggagcaaagaaaccattgaatgcattcctcggggaattgtttctcggtgaattttctagtgcggatgggagttccacacgtctcatttccgagcaagtttcacatcacccgcctgtgacggcatgttttctgtataacgagaagcacggcatctcatcttcagggtatgtcgcacaggaaacgacattcagtcctacgtcgggggtgagagtacagcagattggatatgcgataatacgggatgaggtacataccgagtctcatctcatgactttgcctactatggtcatcaagggtctaattaccggtcgtccatacccggagttagaggggacatgttatatctcgtcgagttccggataccttgctacggttgaatttgagggtaaaacggcgctgggcacagggacaaagaacagggtccgtgctaagttaacgaacattagagaggacgggaagaagttgtttgagatatctgggcaatggaatggacgcctcgatatcaaagattgcattagcgggaaagtggttgaagagtttgacgtcaacgatgttcccctaagcgagttgaaagtgaaggacatagatgcacagagtccttgggaatcgcgacgagcgtggaagggagtgttagagggtatccaaaaggccgatatggaaataataagcaacgagaaaaacgagttagaagaagcgcagagggagcttcgagacgcggaggaagaagttgggatagactggccaaggctgttcttccgaaaatcagacaatggccaagaattctcgctgcttgcgaagacgataccagatgctgatgtgagagatctcgatcagagcaggacggcaggcgtttggaagtttattggcgtcgaggcttctgaagcgttgatcaaggatggcatttttcacgagggattggagcctaaggggcaagctatcaagagttag

SEQ ID NO: 32929 - protein, 411 aa, Muscodor strobelii
  misc_feature: SGI Peptide ID NO. 571352
  misc_feature (2)..(411): Pfam Id: PF01237 Pfam Desc: Oxysterol-binding protein
  misc_feature (99)..(355): Pfam Id: PF01237 Pfam Desc: Oxysterol-binding protein
  misc_feature (7)..(390): NCBI GI: 46139059 Blast Desc: FG11044.1 [Gibberella zeae PH-1]
  misc_feature (6)..(407): NCBI GI: 189205933 Blast Desc: PTRG_08969 [Pyrenophora tritici-repentis Pt-1C-BFP] gi|187975394|gb|EDU42020.1| PTRG_08969 [Pyrenophora tritici-repentis Pt-1C-BFP]
  misc_feature (6)..(410): NCBI GI: 169611192 Blast Desc: SNOG_08704 [Phaeosphaeria nodorum SN15] gi|111062752|gb|EAT83872.1| SNOG_08704 [Phaeosphaeria nodorum SN15]
  misc_feature (4)..(390): NCBI GI: 156052789 Blast Desc: SS1G_06562 [Sclerotinia sclerotiorum 1980] gi|154704340|gb|EDO04079.1| SS1G_06562 [Sclerotinia sclerotiorum 1980]
  misc_feature (4)..(392): NCBI GI: 154314987 Blast Desc: BC1G_04835 [Botryotinia fuckeliana B05.10] gi|150848373|gb|EDN23566.1| BC1G_04835 [Botryotinia fuckeliana B05.10]
  misc_feature (9)..(391): NCBI GI: 189205124 Blast Desc: PTRG_08565 [Pyrenophora tritici-repentis Pt-1C-BFP] gi|187985996|gb|EDU51484.1| PTRG_08565 [Pyrenophora tritici-repentis Pt-1C-BFP]
  misc_feature (14)..(404): NCBI GI: 169610661 Blast Desc: SNOG_08438 [Phaeosphaeria nodorum SN15] gi|160702124|gb|EAT84714.2| SNOG_08438 [Phaeosphaeria nodorum SN15]
  misc_feature (14)..(400): NCBI GI: 212527166 Blast Desc: oxysterol binding protein (Osh5), [Penicillium marneffei ATCC 18224] gi|212527168|ref|XP_002143741.1| oxysterol binding protein (Osh5), [Penicillium marneffei ATCC 18224] ATCC
  misc_feature (14)..(391): NCBI GI: 145233035 Blast Desc: An02g07570 [Aspergillus niger] gi|134056814|emb|CAK37720.1| protein product [Aspergillus niger]
  misc_feature (2)..(383): NCBI GI: 256722004 Blast Desc: [Nectria haematococca mpVI 77-13-4]
MTKSQSNISQLKDFLSYLATVKGDLSNVTAPPFVLSPKSVTEIPASWAERHELFLQPAHEDDAAQRALLILKNFLCSLKRQVYSSASADSDSDSDGGAKKPLNAFLGELFLGEFSSADGSSTRLISEQVSHHPPVTACFLYNEKHGISSSGYVAQETTFSPTSGVRVQQIGYAIIRDEVHTESHLMTLPTMVIKGLITGRPYPELEGTCYISSSSGYLATVEFEGKTALGTGTKNRVRAKLTNIREDGKKLFEISGQWNGRLDIKDCISGKVVEEFDVNDVPLSELKVKDIDAQSPWESRRAWKGVLEGIQKADMEIISNEKNELEEAQRELRDAEEEVGIDWPRLFFRKSDNGQEFSLLAKTIPDADVRDLDQSRTAGVWKFIGVEASEALIKDGIFHEGLEPKGQAIKS

SEQ ID NO: 32930 - DNA, 1002 bp, Muscodor strobelii
  misc_feature: SGI EST ID NO. CUFF.77849.0
  misc_feature: Variant of the nucleotide sequence at SEQ ID NO 32928
taacgagaagcacggcatctcatcttcagggtatgtcgcacaggaaacgacattcagtcctacgtcgggggtgagagtacagcagattggatatgcgataatacgggatgaggtacataccgagtctcatctcatgactttgcctactatggtcatcaagggtctaattaccggtcgtccatacccggagttagaggggacatgttatatctcgtcgagttccggataccttgctacggttgaatttgagggtaaaacggcgctgggcacagggacaaagaacagggtccgtgctaagttaacgaacattagagaggacgggaagaagttgtttgagatatctgggcaatggaatggacgcctcgatatcaaagattgcattagcgggaaagtggttgaagagtttgacgtcaacgatgttcccctaagcgagttgaaagtgaaggacatagatgcacagagtccttgggaatcgcgacgagcgtggaagggagtgttagagggtatccaaaaggccgatatggaaataataagcaacgagaaaaacgagttagaagaagcgcagagggagcttcgagacgcggaggaagaagttgggatagactggccaaggctgttcttccgaaaatcagacaatggccaagaattctcgctgcttgcgaagacgataccagatgctgatgtgagagatctcgatcagagcaggacggcaggcgtttggaagtttattggcgtcgaggcttctgaagcgttgatcaaggatggcatttttcacgagggattggagcctaaggggcaagctatcaagagttagcgaattttctctacaaagaaatgtgtataactgtgttgcaaaatgttagtttatgtcagagctgtttttgtatggtgctcgcatcaaacgtacctacacggcctgcccttccagagcatggggcgcaattcggatgctacactctacgcgaaggtgctcccagtaatcaaagacttgtgagagaaaaa

SEQ ID NO: 32931 - DNA, 924 bp, Muscodor strobelii
  misc_feature: SGI cDNA ID NO. 571353
  misc_feature: Encodes the peptide sequence at SEQ ID NO 32932
atggggctccgagagaaactgaggctgaaagtcaagaaagcattaaaaggatgggccattcgcaagccttcccaacaagaccgtatcgccgatattagtgagaccaagattttagtatcctcatccacggacggtcttgcgcctcgcaccggcttgtcagtagttctacctacttctatcggcgctaatgtactgaatctatggcaacgcggggtgtcggcgaggaaccatcgccgggtccgaaaggaggtcaagaagagaaaatcttacctccctgtgttccaagaagtcgacgaagcgaataaccatcgagctcatgacgtgatcacaggtgtcacggaaagaactgctttcatagtgccaggccaggatattgtcggctgcgctgaattggctgataactccaagagtctaaacgagcatcaaatcgcgtctcacgtcgaaaatcacgtcgaaaatttcctcgtaaacacggtgagcagcgcggcgcaacctcccctccaagatgtcgaagcaccgaatacattgaatgccacagtgcctcatgatgattgcgataaatcaaaacatccagggtcatatcagcatccagcggcgacaaaaacttactcgaatgtggttccatcccactcacctacaacacacaatgccttcgttcgatcccacccccatttgactgctggtgctagtggcttccgctacctgaattgtaagattggcaatgactttgcggcaaggttggctcatttcacctcgctcggtatcagtgatagcacgacctgggccgagttcgccagcatggtggctgcagacagacatgttgatctggagaggcttaccacaactatcggttgcctcttagccgatgcgatcgtcgcagatgtcacgcaatttgcttcgatgaagatcgacaggcttctatga

SEQ ID NO: 32932 - protein, 307 aa, Muscodor strobelii
  misc_feature: SGI Peptide ID NO. 571353
MGLREKLRLKVKKALKGWAIRKPSQQDRIADISETKILVSSSTDGLAPRTGLSVVLPTSIGANVLNLWQRGVSARNHRRVRKEVKKRKSYLPVFQEVDEANNHRAHDVITGVTERTAFIVPGQDIVGCAELADNSKSLNEHQIASHVENHVENFLVNTVSSAAQPPLQDVEAPNTLNATVPHDDCDKSKHPGSYQHPAATKTYSNVVPSHSPTTHNAFVRSHPHLTAGASGFRYLNCKIGNDFAARLAHFTSLGISDSTTWAEFASMVAADRHVDLERLTTTIGCLLADAIVADVTQFASMKIDRLL

SEQ ID NO: 32933 - DNA, 304 bp, Muscodor strobelii
  misc_feature: SGI EST ID NO. CUFF.77876.0
  misc_feature: Variant of the nucleotide sequence at SEQ ID NO 32931
ttcatagtgccaggccaggatattgtcggctgcgctgaattggctgataactccaagagtctaaacgagcatcaaatcgcgtctcacgtcgaaaatcacgtcgaaaatttcctcgtaaacacggtgagcagcgcggcgcaacctcccctccaagatgtcgaagcaccgaatacattgaatgccacagtgcctcatgatgattgcgataaatcaaaacatccagggtcatatcagcatccagcggcgacaaaaacttactcgaatgtggttccatcccactcacctacaacacacaatgccttcg

SEQ ID NO: 32934 - DNA, 654 bp, Muscodor strobelii
  misc_feature: SGI cDNA ID NO. 571354
  misc_feature: Reduced expression when VOC is produced
  misc_feature: Encodes the peptide sequence at SEQ ID NO 32935
atgcgttcattcctcacactcttcggcgccgccttcgtcgctgccagccctctcgagttcccaggcacaggaaccggcactggcaccgcacccgcgcccaccgatatcacgattgtgagcgtctctgccagtggaaatggatgtcctcagggcagtgtcactacggatctctctcctgatcgttcgctcgtgaccttcggcttcgacaaattccaaacatacattgggccgggaaccaccgtagcagacaagtctaagaactgccagctccacttgaacctcaagtacccgggtggtttccaatactccgtcgtcgaatcaacataccacggctacgcacagctcgacaaaggcgtgacggggactttctactcgacttattacttcagtcaagacgccgctgctactactacgacgcagactagtatctctgggggtgatacttgggcacttggcgatgtctacacaaaacaagaccaagtccccacagcatccgtgatctggtcaccctgcggcgcctcagggatcctaaacgtgaataaccgcattgcgctcacgtcgagcaattctagcgccagcggtcagatctcggatgatgacgccaccgtcgcttttacgcagcaggttcatgttagctggcaggcttgtaagtaa

SEQ ID NO: 32935 - protein, 217 aa, Muscodor strobelii
  misc_feature: SGI Peptide ID NO. 571354
  misc_feature (1)..(217): NCBI GI: 116194011 Blast Desc: CHGG_06723 [Chaetomium globosum CBS 148.51] gi|88182636|gb|EAQ90104.1| CHGG_06723 [Chaetomium globosum CBS 148.51]
  misc_feature (1)..(217): NCBI GI: 39970303 Blast Desc: MGG_02618 [Magnaporthe grisea 70-15] gi|149209713|ref|XP_001522231.1| MGCH7_ch7g339 [Magnaporthe grisea 70-15] gi|86196294|gb|EAQ70932.1| MGCH7_ch7g339 grisea
  misc_feature (1)..(216): NCBI GI: 189191862 Blast Desc: PTRG_01937 [Pyrenophora tritici-repentis Pt-1C-BFP] gi|187973876|gb|EDU41375.1| PTRG_01937 [Pyrenophora tritici-repentis Pt-1C-BFP]
  misc_feature (26)..(217): NCBI GI: 170940276 Blast Desc: protein product [Podospora anserina]
  misc_feature (1)..(216): NCBI GI: 85116560 Blast Desc: NCU02483 [Neurospora crassa OR74A] gi|28926879|gb|EAA35841.1| conserved [Neurospora crassa OR74A]
  misc_feature (31)..(216): NCBI GI: 261353764 Blast Desc: conserved [Verticillium albo-atrum VaMs.102]
  misc_feature (30)..(216): NCBI GI: 169623241 Blast Desc: SNOG_14857 [Phaeosphaeria nodorum SN15] gi|111056589|gb|EAT77709.1| SNOG_14857 [Phaeosphaeria nodorum SN15]
  misc_feature (1)..(216): NCBI GI: 38567106 Blast Desc: conserved [Neurospora crassa]
  misc_feature (36)..(216): NCBI GI: 261358126 Blast Desc: secreted protein [Verticillium albo-atrum VaMs.102]
  misc_feature (30)..(216): NCBI GI: 223469446 Blast Desc: candidate effector 16 [Venturia inaequalis]
  misc_feature: Useful for introducing or modulating the production of volatile compounds
MRSFLTLFGAAFVAASPLEFPGTGTGTGTAPAPTDITIVSVSASGNGCPQGSVTTDLSPDRSLVTFGFDKFQTYIGPGTTVADKSKNCQLHLNLKYPGGFQYSVVESTYHGYAQLDKGVTGTFYSTYYFSQDAAATTTTQTSISGGDTWALGDVYTKQDQVPTASVIWSPCGASGILNVNNRIALTSSNSSASGQISDDDATVAFTQQVHVSWQACK

SEQ ID NO: 32936 - DNA, 4389 bp, Muscodor strobelii
  misc_feature: SGI EST ID NO. CUFF.78130.2
  misc_feature: Variant of the nucleotide sequence at SEQ ID NO 32934
cactgacattacaatattctcgtagcaacaatgtgccttgcccgttactgtcctccccgcggtacgcagagcctactcggcagccaccgagaaagacttgaaggagactttgaaagaggtcattcccgccaagcgcgagctcttcaagaaggtcaaggccaatggctccgccgtcattggtgaggtcaaggttgagaacacaattggcggcatgagaggactcaaggcgatgatctgggagggcagtgtcctggatgcgaacgaaggtattcgcttccacggacgaaccattaaggactgccaaaaggagcttcccaagggcaagaccggcacagaaatgctgcccgagtctatgttctggctcttgctgaccggtcaggtcccctcgaccaaccaggtccgcaagttctcgcgccaattggccgagcaggcgtatcttcccgacttcgttaacaagatgctcgataacttccccaaggatctacacccgatgactcagtttgctatcgctgtcagcgccttgaactacacctccaagttcgctaaagcctacgagagcggcttgaacaaggccgactactgggagcctactttcgatgactgtattagtctgttggccaagctgcctactattgccgccaagatctaccagaactcctaccgtggcggcggtgctctacctgctgacgtcgatcccgagcaagattggtcttacaacttcgctgctatgctcggaaaggctggtaaggaaaacgagaatttccaggatctcttgagattgtatctcgcccttcacggtgaccacgaaggcggtaacgtctccgctcacgctacccacctggttggaagtgctctcagcgatcccttcctcagctacagtgctggtctgcagggtctagctggtcctcttcacggtctggctgcccaagaggttctgcgctggatcctccagatgaaggagggtatccccgagaactatactgagacggatgttcacgactacttatggtccactctcaacagcggccgtgtcatccctggctatggtcacgccgtgctccgcaagcctgaccctcgattcgaggccctgatggactacgcttctgctcgccctgagatcgccaaggatcctgtcttccagcttgtcaagctcaacagcgaagtcgctcctggagtcctgaccaagcacggaaagaccaagaacccttatcccaatgtcgactccagcagtggtgtcttatttcaccactacggcttccacgagactctctactacacggccaccttcggtgtcagcagaggcctgggtccacttgctcagctgatctgggatcgcgcgcttggtcttcccatcgagcgtcccaaatctatcaacttggaaggattattgaagcaggttggtgcttgagcgcgaaaatggttgcatatgcaagagcgattcttgccggcgttgtcggtttatatccattgtgttagatttttagatttgcgaaggtcatattcaggatcaatgtgaatattttcgactcacttggttccctattcttatgcccattgatgtttgcgactatcattttcacgagtccttcgttctcggcttccagagctgcaaaacgtcaatctgatgacaatgtctcgttcacttcgtgttcaattgacgatcaactgatgcccgtcgaatacgacaatttgatcgcgtccgtgacgaattgacagccaaagacaaaaatgctttgcggcatgattcttagactgccccgccgcggggtcgcgatacgtcagtgatgcagacgcgaactctcgtcgcctggattgaccatccgggaaatctgcgaatggaaatgcgttcgttactccggcgttgcatctgggatcattggcatcctgcgatagctgtctaaagtccctcaaccgggtggactaaccaagccacgcagtcgagagctggctttctctaattaactattaattgcaaacaatttcgcctggtcgcgtcccgtgtcgtcgcgatgtctttgcacccatcacgtgtcggacagcgttgcatcgtgccaacacctaatgatgcgatgcaggttcaatgcatggcacgtcgcactggccagcacgaaaaaagaaatccataccagctctctcgcatttggtatgttacctgcagacagggtccattggtatgcaaggctctggatgcaaatcgcgccttgtcccctgtttctgaccgcattcccaccaagcggctaaagaggctaaacacatagttgacacatatgtattgaccacaagcgctctagaccacccggagtataaccaacccacaccatccttcggagacaagcaatcaagcgtcgtaccaaaaggtagtagtggcctagtctccgggttctggagctgcttctcagcttgcccaacgtcttggtgaccgaatggaacatgatctaggtgtgcttattggtttccaacacgtgttgtacgatataccgatttcggaaatatcgatatcagtttcattatatggtgaaactcgcagaatacctcatacagggaccgatattcatctggcattttgaattgccgatatgaccgccgagtgacaacaccgctcaacacatttgtattttacgacacaatctcttgcgtaagatacaacagctcattacacttgatgagaaagcgccatgatcgcaatcaagattaatctattactcgctcgaatattaaaaatagcacaagagaagttgaggcctcatatccagagggacggttgaccgacccctgtcgcctcatatttgccgctgcgctgtgccctgaatctcagttcatgcggactatacgaccaagccgaactagacatgatgggtctcgcacttgaagctcacgagcaatattccgagattcgagctaacagtcgaagtaagacccagagccgcctcattcatacatcgcctttcccctttcagaagtcacttataataccatagaccgtctttctataaaaagaaattccgtacacgagaatcacggaatccgaggagctagacgacgttcttttaatatgatttcatatataatgtcttggactctaattcacccgcaatcttacaaggcgggctggaagcctgaccatggtcagcaacgcatccgaagggctgagaattccggcgtgctaatgcacagccattacgaaacgaatgacttcacgatggcgtctactttctagacccaaagactggaacgatgacgcccgtgtccttagaaaaaccaggtcatgacaagatcagctcgggattcttgacaatgccgacgagagtataaatacacgacatttcacgatcttgacgatcctttctctatccgcaactgatcaacaactccagctccatcaacaccaaacgtacccctaaccacccactcaactcacgtaactcatatcatcatgcgttcattcctcacactcttcggcgccgccttcgtcgctgccagccctctcgagttcccaggcacaggaaccggcactggcaccgcacccgcgcccaccgatatcacgattgtgagcgtctctgccagtggaaatggatgtcctcagggcagtgtcactacggatctctctcctgatcgttcgctcgtgaccttcggcttcgacaaattccaaacatacattgggccgggaaccaccgtagcagacaagtctaagaactgccagctccacttgaacctcaagtacccgggtggtttccaatactccgtcgtcgaatcaacataccacggctacgcacagctcgacaaaggcgtgacggggactttctactcgacttattacttcagtcaagacgccgctgctactactacgacgcagactagtatctctgggggtgatacttgggcacttggcgatgtctacacaaaacaagaccaagtccccacagcatccgtgatctggtcaccctgcggcgcctcagggatcctaaacgtgaataaccgcattgcgctcacgtcgagcaattctagcgccagcggtcagatctcggatgatgacgccaccgtcgcttttacgcagcaggttcatgttagctggcaggcttgtaagtaaatggaatgatgataggttgttgtggttgtgtgagctaatgggtgtgttgcgggtaaggtgtttgagtgtgagatgacggtctaggggaaagctgaggtgcgacgggagggtgtaagaggttggagggcgaaaaggggaatgggttgagaggggtgtgagtgtgagataggaggcgacattcatttttctttgagtcttgtttggttttgtgtcttttgagcttcatttgaattgagaatcaactctatcaactacttcgtcggtgtccagctaccgctccccgtgaacctcgttgtcatctt

SEQ ID NO: 32937 - DNA, 666 bp, Muscodor strobelii
  misc_feature: SGI cDNA ID NO. 571355
  misc_feature: Encodes the peptide sequence at SEQ ID NO 32938
atgcgttcattcctcacactcttcggcgccgccttcgtcgctgccagccctctcgagttcccaggcacaggaaccggcactggcaccgcacccgcgcccaccgatatcacgattgtgagcgtctctgccagtggaaatggatgtcctcagggcagtgtcactacggatctctctcctgatcgttcgctcgtgaccttcggcttcgacaaattccaaacatacattgggccgggaaccaccgtagcagacaagtctaagaactgccagctccacttgaacctcaagtacccgggtggtttccaatactccgtcgtcgaatcaacataccacggctacgcacagctcgacaaaggcgtgacggggactttctactcgacttattacttcagtcaagacgccgctgctactgtatgtggtgctactacgacgcagactagtatctctgggggtgatacttgggcacttggcgatgtctacacaaaacaagaccaagtccccacagcatccgtgatctggtcaccctgcggcgcctcagggatcctaaacgtgaataaccgcattgcgctcacgtcgagcaattctagcgccagcggtcagatctcggatgatgacgccaccgtcgcttttacgcagcaggttcatgttagctggcaggcttgtaagtaa

SEQ ID NO: 32938 - protein, 221 aa, Muscodor strobelii
  misc_feature: SGI Peptide ID NO. 571355
  misc_feature (1)..(221): NCBI GI: 116194011 Blast Desc: CHGG_06723 [Chaetomium globosum CBS 148.51] gi|88182636|gb|EAQ90104.1| CHGG_06723 [Chaetomium globosum CBS 148.51]
  misc_feature (1)..(221): NCBI GI: 39970303 Blast Desc: MGG_02618 [Magnaporthe grisea 70-15] gi|149209713|ref|XP_001522231.1| MGCH7_ch7g339 [Magnaporthe grisea 70-15] gi|86196294|gb|EAQ70932.1| MGCH7_ch7g339 grisea
  misc_feature (1)..(220): NCBI GI: 189191862 Blast Desc: PTRG_01937 [Pyrenophora tritici-repentis Pt-1C-BFP] gi|187973876|gb|EDU41375.1| PTRG_01937 [Pyrenophora tritici-repentis Pt-1C-BFP]
  misc_feature (26)..(221): NCBI GI: 170940276 Blast Desc: protein product [Podospora anserina]
  misc_feature (1)..(220): NCBI GI: 85116560 Blast Desc: NCU02483 [Neurospora crassa OR74A] gi|28926879|gb|EAA35841.1| conserved [Neurospora crassa OR74A]
  misc_feature (31)..(220): NCBI GI: 261353764 Blast Desc: conserved [Verticillium albo-atrum VaMs.102]
  misc_feature (30)..(220): NCBI GI: 169623241 Blast Desc: SNOG_14857 [Phaeosphaeria nodorum SN15] gi|111056589|gb|EAT77709.1| SNOG_14857 [Phaeosphaeria nodorum SN15]
  misc_feature (1)..(220): NCBI GI: 38567106 Blast Desc: conserved [Neurospora crassa]
  misc_feature (36)..(220): NCBI GI: 261358126 Blast Desc: secreted protein [Verticillium albo-atrum VaMs.102]
  misc_feature (30)..(220): NCBI GI: 223469446 Blast Desc: candidate effector 16 [Venturia inaequalis]
MRSFLTLFGAAFVAASPLEFPGTGTGTGTAPAPTDITIVSVSASGNGCPQGSVTTDLSPDRSLVTFGFDKFQTYIGPGTTVADKSKNCQLHLNLKYPGGFQYSVVESTYHGYAQLDKGVTGTFYSTYYFSQDAAATVCGATTTQTSISGGDTWALGDVYTKQDQVPTASVIWSPCGASGILNVNNRIALTSSNSSASGQISDDDATVAFTQQVHVSWQACK

SEQ ID NO: 32939 - DNA, 4389 bp, Muscodor strobelii; identical to SEQ ID NO: 32936
  misc_feature: SGI EST ID NO. CUFF.78130.2
  misc_feature: Variant of the nucleotide sequence at SEQ ID NO 32937

SEQ ID NO: 32940 - DNA, 1338 bp, Muscodor strobelii
  misc_feature: SGI cDNA ID NO. 571356
  misc_feature: Reduced expression when VOC is produced
  misc_feature: Encodes the peptide sequence at SEQ ID NO 32941
gcctactcggcagccaccgagaaagacttgaaggagactttgaaagaggtcattcccgccaagcgcgagctcttcaagaaggtcaaggccaatggctccgccgtcattggtgaggtcaaggttgagaacacaattggcggcatgagaggactcaaggcgatgatctgggagggcagtgtcctggatgcgaacgaaggtattcgcttccacggacgaaccattaaggactgccaaaaggagcttcccaagggcaagaccggcacagaaatgctgcccgagtctatgttctggctcttgctgaccggtcaggtcccctcgaccaaccaggtccgcaagttctcgcgccaattggccgagcaggcgtatcttcccgacttcgttaacaagatgctcgataacttccccaaggatctacacccgatgactcagtttgctatcgctgtcagcgccttgaactacacctccaagttcgctaaagcctacgagagcggcttgaacaaggccgactactgggagcctactttcgatgactgtattagtctgttggccaagctgcctactattgccgccaagatctaccagaactcctaccgtggcggcggtgctctacctgctgacgtcgatcccgagcaagattggtcttacaacttcgctgctatgctcggaaaggctggtaaggaaaacgagaatttccaggatctcttgagattgtatctcgcccttcacggtgaccacgaaggcggtaacgtctccgctcacgctacccacctggttggaagtgctctcagcgatcccttcctcagctacagtgctggtctgcagggtctagctggtcctcttcacggtctggctgcccaagaggttctgcgctggatcctccagatgaaggagggtatccccgagaactatactgagacggatgttcacgactacttatggtccactctcaacagcggccgtgtcatccctggctatggtcacgccgtgctccgcaagcctgaccctcgattcgaggccctgatggactacgcttctgctcgccctgagatcgccaaggatcctgtcttccagcttgtcaagctcaacagcgaagtcgctcctggagtcctgaccaagcacggaaagaccaagaacccttatcccaatgtcgactccagcagtggtgtcttatttcaccactacggcttccacgagactctctactacacggccaccttcggtgtcagcagaggcctgggtccacttgctcagctgatctgggatcgcgcgcttggtcttcccatcgagcgtcccaaatctatcaacttggaaggattattgaagcaggttggtgcttga

SEQ ID NO: 32941 - protein, 445 aa, Muscodor strobelii
  misc_feature: SGI Peptide ID NO. 571356
  misc_feature (47)..(431): Pfam Id: PF00285 Pfam Desc: Citrate synthase
  misc_feature (2)..(443): NCBI GI: 170940277 Blast Desc: protein product [Podospora anserina]
  misc_feature (4)..(443): NCBI GI: 254527699 Blast Desc: methylcitrate synthase precursor [Nectria haematococca]
  misc_feature (4)..(443): NCBI GI: 254527701 Blast Desc: methylcitrate synthase precursor [Gibberella moniliformis]
  misc_feature (2)..(444): NCBI GI: 145610262 Blast Desc: conserved [Magnaporthe grisea 70-15] gi|149209711|ref|XP_001522230.1| MGCH7_ch7g338 [Magnaporthe grisea 70-15] gi|86196293|gb|EAQ70931.1| MGCH7_ch7g338 grisea
  misc_feature (4)..(443): NCBI GI: 256731965 Blast Desc: [Nectria haematococca mpVI 77-13-4]
  misc_feature (4)..(443): NCBI GI: 46105094 Blast Desc: FG00175.1 [Gibberella zeae PH-1]
  misc_feature (1)..(443): NCBI GI: 111380624 Blast Desc: citrate synthase [Hypocrea jecorina]
  misc_feature (4)..(443): NCBI GI: 85116556 Blast Desc: 2-methylcitrate synthase, mitochondrial precursor [Neurospora crassa OR74A] gi|28926878|gb|EAA35840.1| 2-methylcitrate synthase, mitochondrial precursor [Neurospora
  misc_feature (2)..(441): NCBI GI: 156055096 Blast Desc: conserved [Sclerotinia sclerotiorum 1980] gi|154702684|gb|EDO02423.1| conserved [Sclerotinia sclerotiorum 1980]
  misc_feature (2)..(435): NCBI GI: 154304551 Blast Desc: conserved [Botryotinia fuckeliana B05.10] gi|150854131|gb|EDN29323.1| conserved [Botryotinia fuckeliana B05.10]
  misc_feature (4)..(441): SWISSPROT Homolog: EC 2.3.3.5 2-methylcitrate synthase
  misc_feature: Useful for introducing or modulating the production of volatile compounds
AYSAATEKDLKETLKEVIPAKRELFKKVKANGSAVIGEVKVENTIGGMRGLKAMIWEGSVLDANEGIRFHGRTIKDCQKELPKGKTGTEMLPESMFWLLLTGQVPSTNQVRKFSRQLAEQAYLPDFVNKMLDNFPKDLHPMTQFAIAVSALNYTSKFAKAYESGLNKADYWEPTFDDCISLLAKLPTIAAKIYQNSYRGGGALPADVDPEQDWSYNFAAMLGKAGKENENFQDLLRLYLALHGDHEGGNVSAHATHLVGSALSDPFLSYSAGLQGLAGPLHGLAAQEVLRWILQMKEGIPENYTETDVHDYLWSTLNSGRVIPGYGHAVLRKPDPRFEALMDYASARPEIAKDPVFQLVKLNSEVAPGVLTKHGKTKNPYPNVDSSSGVLFHHYGFHETLYYTATFGVSRGLGPLAQLIWDRALGLPIERPKSINLEGLLKQVGA

SEQ ID NO: 32942 - DNA, 4389 bp, Muscodor strobelii; identical to SEQ ID NO: 32936
  misc_feature: SGI EST ID NO. CUFF.78130.2
  misc_feature: Variant of the nucleotide sequence at SEQ ID NO 32940

SEQ ID NO: 32943 - DNA, 540 bp, Muscodor strobelii
  misc_feature: SGI cDNA ID NO. 571357
  misc_feature: Encodes the peptide sequence at SEQ ID NO 32944
atgcccggcgccagcgtggcagttctccccacctccgcctcgtcgactccggtcccccgcaaggccgccgccgtccagccagaacgcaagtacaagtgccagttctgcgccagggccttcagccggagtgaacacagaagcagacatgagcgctcgcacaccaaagagcggcccttcaagtgcatgaaatgtaggagtacatttgtgcgacgcgacctgctgcttcgacacgaccgcaccgtccacgccaaagacggcggtgttcctctgcacagcgacggcaagcgacgcgccggcggtgccaaggcccgagccatcaacggtccttccaagcagatcgccatcgacacctcgaccctcagcgagcagatcgaggccagcagcgacggcgtcttcgacgtcgagcacgccgccatgctggttgcggacctgcaccacaaggcgacggccgctatgcgcggcagcgacgccggcagcccctatgcctccagcccggctgtggccttctcgtccaacggcgccccgttgatggaccctgcg

SEQ ID NO: 32944 - protein, 180 aa, Muscodor strobelii
  misc_feature: SGI Peptide ID NO. 571357
  misc_feature (1)..(180): NCBI GI: 156058208 Blast Desc: SS1G_03115 [Sclerotinia sclerotiorum 1980] gi|154700903|gb|EDO00642.1| SS1G_03115 [Sclerotinia sclerotiorum 1980]
  misc_feature (1)..(180): NCBI GI: 154309418 Blast Desc: BC1G_07603 [Botryotinia fuckeliana B05.10] gi|150852427|gb|EDN27619.1| BC1G_07603 [Botryotinia fuckeliana B05.10]
  misc_feature (1)..(170): NCBI GI: 116208074 Blast Desc: CHGG_03330 [Chaetomium globosum CBS 148.51] gi|88183927|gb|EAQ91395.1| CHGG_03330 [Chaetomium globosum CBS 148.51]
  misc_feature (1)..(178): NCBI GI: 46122043 Blast Desc: FG05399.1 [Gibberella zeae PH-1]
  misc_feature (1)..(178): NCBI GI: 256729951 Blast Desc: [Nectria haematococca mpVI 77-13-4]
  misc_feature (1)..(178): NCBI GI: 39974961 Blast Desc: MGG_00373 [Magnaporthe grisea 70-15] gi|145018736|gb|EDK03015.1| MGG_00373 [Magnaporthe grisea 70-15]
  misc_feature (1)..(179): NCBI GI: 171686412 Blast Desc: protein product [Podospora anserina] gi|170943167|emb|CAP68820.1| protein product [Podospora anserina]
  misc_feature (1)..(180): NCBI GI: 85083550 Blast Desc: NCU06503 [Neurospora crassa OR74A] gi|28918229|gb|EAA27907.1| conserved [Neurospora crassa OR74A]
  misc_feature (10)..(176): NCBI GI: 240278488 Blast Desc: C2H2 finger domain-containing protein [Ajellomyces capsulatus H143]
  misc_feature (10)..(176): NCBI GI: 225556025 Blast Desc: conserved [Ajellomyces capsulatus G186AR]
MPGASVAVLPTSASSTPVPRKAAAVQPERKYKCQFCARAFSRSEHRSRHERSHTKERPFKCMKCRSTFVRRDLLLRHDRTVHAKDGGVPLHSDGKRRAGGAKARAINGPSKQIAIDTSTLSEQIEASSDGVFDVEHAAMLVADLHHKATAAMRGSDAGSPYASSPAVAFSSNGAPLMDPA

SEQ ID NO: 32945 - DNA, 1364 bp, Muscodor strobelii
  misc_feature: SGI EST ID NO. CUFF.78025.1
  misc_feature: Variant of the nucleotide sequence at SEQ ID NO 32943
ccgacagcgcacctggcagaagcagacgaagcaagctagcggaaggcaagttagcaacgcacagcgcaccactcgcccccccatccgctgtccccggccactgcaaagacagcactacggtggtggactcactggcctgtccagcggcctgtggcccgtccgtgtctccctcttttgtgccccctctcctcccttcccccccatcccctcctttttatttccagcccttttgcatttccagcccgtctgcactccctctccccttttgcacaacccctcttcgtccatcgacacctcgcaaagacagcatcaacacccgcccgcgcatcgcccttggagacaggccgagcgcatcatcctcgatacacaatcagcacgtgtatcaggagcagcaacagcagcaggccgcggccgcatcaccccatcaccagcattccatgatcgcgatatccattcaaatgaccagctacgaacagaccagtcagcaagacacactttaaatcccacgggagagcgcgcgcgagcgagagcagagaggagcacggcgatttcaactatcagtctgctcagggtttagagaacgagaacgcaagaaaagaaaagaacgagcgccgtcatcattgattgcatttgcccattgcccagtgccattgtgtgtcgtagccagattgagtgtgcattccacctccagccaaagccacgacaacaagacataagtcagtccatcgacgtccacatcgacaagcaacaccacgacagcaagacaacagcacgcatagccatccaagatgcccggcgccagcgtggcagttctccccacctccgcctcgtcgactccggtcccccgcaaggccgccgccgtccagccagaacgcaagtacaagtgccagttctgcgccagggccttcagccggagtgaacacagaagcagacatgagcgctcgcacaccaaagagcggcccttcaagtgcatgaaatgtaggagtacatttgtgcgacgcgacctgctgcttcgacacgaccgcaccgtccacgccaaagacggcggtgttcctctgcacagcgacggcaagcgacgcgccggcggtgccaaggcccgagccatcaacggtccttccaagcagatcgccatcgacacctcgaccctcagcgagcagatcgaggccagcagcgacggcgtcttcgacgtcgagcacgccgccatgctggttgcggacctgcaccacaaggcgacggccgctatgcgcggcagcgacgccggcagcccctatgcctccagcccggctgtggccttctcgtccaacggcgccccgttgatggaccctgcggttagttaccctcccgccgccgcccccctccccacg

SEQ ID NO: 32946 - DNA, 1101 bp, Muscodor strobelii
  misc_feature: SGI cDNA ID NO. 571358
  misc_feature: Encodes the peptide sequence at SEQ ID NO 32947
atgtgccaaacaggcaatcctcagtcactcgccggtgatgatgtgaggttcatccctgacgaagaagatgacatcgacgagaagatcgatctaaaagaccaaccggacaagtcgtttaaaaactcgatcagagccaatttttcctctgttgaaaacatcgttacaagttggcgaagcgttgttcaagaatattcgcgccttcaactcacaaagctttcggaggatcgcctagttgcgctctcgggaatcgcaagtgaatatgggcgcgcagtccaagcccagaaggaagagccgcggggtaacaacaagaaaagggaaaccgatgttcaatatgtctgcggcttatggtttcctgaaccccgcgatttgatgtgggaacaattcgagccgggtgctcgcgttcgatcaaagggaataccaacatggtcctgggcatcaatgggaacaggtattccgaaacctagtggaggtgacgatacaccctcgaagggcctcgaggtgcgctggagcagttcatatcacttgtctacggactgtgtacttgaaaagtttgtacgagtgccagtcgacccgataagcctacgtccacaattcgatgctgtgaaagggtacaagccaacgaacgtctacggcaatgatgggcgtttcgcagttttgggtatcttcggtaggataatggaaatacgactacatggtgctttccaagatgacgatagtcgaacagttgctgccaacatgaccggccatggcgacgtcggccgtgatatgtggcgctgtgtcaccacaacagcctcccttgacttgatcgcaggatgggcttctctcgaacatcctgacttccagaccgacatagtcgctgaaactaatctatacgcactcgttatgtctgtagttacgaaagtccaaggcggctggctcctcgggaagaataatccgcatctctcggcttacgaagtcctataccttcgcaatatccaagtcccggccttcgaaaaccaagatcgggaatgttacgaaagggtaggcgtcggcagattattcggcgatcaagtgaatgtggcgttcgaggcgacggacaaatcacgaatctggttggtttaa

SEQ ID NO: 32947 - protein, 366 aa, Muscodor strobelii
  misc_feature: SGI Peptide ID NO. 571358
  misc_feature (55)..(151): NCBI GI: 164427540 Blast Desc: NCU03015 [Neurospora crassa OR74A] gi|157071786|gb|EAA36165.2| [Neurospora crassa OR74A]
  misc_feature (55)..(151): NCBI GI: 16945382 Blast Desc: related to tol protein [Neurospora crassa]
  misc_feature (50)..(147): NCBI GI: 256732396 Blast Desc: NECHADRAFT_80919 [Nectria haematococca mpVI 77-13-4]
  misc_feature (39)..(148): NCBI GI: 145245217 Blast Desc: An11g09180 [Aspergillus niger] gi|134079572|emb|CAK97048.1| protein product [Aspergillus niger]
  misc_feature (57)..(146): NCBI GI: 145616755 Blast Desc: MGG_00035 [Magnaporthe grisea 70-15] gi|145023109|gb|EDK06684.1| MGG_00035 [Magnaporthe grisea 70-15]
  misc_feature (57)..(147): NCBI GI: 261354960 Blast Desc: conserved [Verticillium albo-atrum VaMs.102]
  misc_feature (60)..(147): NCBI GI: 154314106 Blast Desc: BC1G_04996 [Botryotinia fuckeliana B05.10] gi|150849142|gb|EDN24335.1| BC1G_04996 [Botryotinia fuckeliana B05.10]
  misc_feature (45)..(146): NCBI GI: 256721272 Blast Desc: NECHADRAFT_82337 [Nectria haematococca mpVI 77-13-4]
  misc_feature (28)..(147): NCBI GI: 238500704 Blast Desc: conserved [Aspergillus flavus NRRL3357] gi|220691823|gb|EED48170.1| conserved [Aspergillus flavus NRRL3357]
  misc_feature (26)..(156): NCBI GI: 256725280 Blast Desc: NECHADRAFT_82999 [Nectria haematococca mpVI 77-13-4]
MCQTGNPQSLAGDDVRFIPDEEDDIDEKIDLKDQPDKSFKNSIRANFSSVENIVTSWRSVVQEYSRLQLTKLSEDRLVALSGIASEYGRAVQAQKEEPRGNNKKRETDVQYVCGLWFPEPRDLMWEQFEPGARVRSKGIPTWSWASMGTGIPKPSGGDDTPSKGLEVRWSSSYHLSTDCVLEKFVRVPVDPISLRPQFDAVKGYKPTNVYGNDGRFAVLGIFGRIMEIRLHGAFQDDDSRTVAANMTGHGDVGRDMWRCVTTTASLDLIAGWASLEHPDFQTDIVAETNLYALVMSVVTKVQGGWLLGKNNPHLSAYEVLYLRNIQVPAFENQDRECYERVGVGRLFGDQVNVAFEATDKSRIWLV

SEQ ID NO: 32948 - DNA, 1236 bp, Muscodor strobelii
  misc_feature: SGI EST ID NO. CUFF.77919.0
  misc_feature: Variant of the nucleotide sequence at SEQ ID NO 32946
tggctcctaagccgtcgtgtcctagccttcgcagactatggtctatttatcatgtgccaaacaggcaatcctcagtcactcgccggtgatgatgtgaggttcatccctgacgaagaagatgacatcgacgagaagatcgatctaaaagaccaaccggacaagtcgtttaaaaactcgatcagagccaatttttcctctgttgaaaacatcgttacaagttggcgaagcgttgttcaagaatattcgcgccttcaactcacaaagctttcggaggatcgcctagttgcgctctcgggaatcgcaagtgaatatgggcgcgcagtccaagcccagaaggaagagccgcggggtaacaacaagaaaagggaaaccgatgttcaatatgtctgcggcttatggtttcctgaaccccgcgatttgatgtgggaacaattcgagccgggtgctcgcgttcgatcaaagggaataccaacatggtcctgggcatcaatgggaacaggtattccgaaacctagtggaggtgacgatacaccctcgaagggcctcgaggtgcgctggagcagttcatatcacttgtctacggactgtgtacttgaaaagtttgtacgagtgccagtcgacccgataagcctacgtccacaattcgatgctgtgaaagggtacaagccaacgaacgtctacggcaatgatgggcgtttcgcagttttgggtatcttcggtaggataatggaaatacgactacatggtgctttccaagatgacgatagtcgaacagttgctgccaacatgaccggccatggcgacgtcggccgtgatatgtggcgctgtgtcaccacaacagcctcccttgacttgatcgcaggatgggcttctctcgaacatcctgacttccagaccgacatagtcgctgaaactaatctatacgcactcgttatgtctgtagttacgaaagtccaaggcggctggctcctcgggaagaataatccgcatctctcggcttacgaagtcctataccttcgcaatatccaagtcccggccttcgaaaaccaagatcgggaatgttacgaaagggtaggcgtcggcagattattcggcgatcaagtgaatgtggcgttcgaggcgacggacaaatcacgaatctggttggtttaagcagtatgaatttccagttacacaagccttatgtaaaaccgcaaacaacgggcaaaaggccattacataataaaaaatacagca

SEQ ID NO: 32949 - DNA, 1398 bp, Muscodor strobelii
  misc_feature: SGI cDNA ID NO. 571359
  misc_feature: Encodes the peptide sequence at SEQ ID NO 32950
atgagcgtcttcgagagccgtgaatggcgtcgcatgagaagagacatcgaagctgttaaatggcggcaatggagcttacttcccgctgtcatcattaccgccgctgggctgctcataaccttaatcaacggcatcactggtctcaccaacttcgctcattacaaagacgatgacggtatatctttttctttctatgagctcccacagggtgagctacgctcaaagatcataattgccattgcattgcagatatccttgctggtcgcgatttgggtctcctgcgttcattttctgttgttcttccaccgcgacaactcggtctacagacgcgctgcgatccaaaccgtcctttcaagcgcagttgttgtactagcggtcttgatgaaagtgagcggagatggagtggctgctctaccgctggttatcgatgcggctatgataaatcggagcgacgtgactgccgagcagtttgtctcagcctataattcttggcgagatttcgtaatcacgcagacaggactcatatcctttcttgccagcatcatcgtctcgggctttcaagtagttgtcaccctcctctgggtctggctactcccatcgcgctacaggctccccgacaactacgtccctgtcatcaagcctcataggtggcgtactcttgctactggcaagcgaagtcattctagctatgagctcgtagaaacaacagactcggcagtccctggccgactcgatgaggtctatcaagaacatgagcaatcaaggcgtgatgatttgaagaactcctcaatcaaacaagaaaaagttgtacaagctgtctcctccacaaggaacacatcgactggcccccaatttgagcctatggtccgctattggatgctcaatccgctacgaaacggtctgtggtttaccacagccgtgttcttggtgtttttcactgtctccattatcctcgagactgtgttttacacactcacgacggcgcatgacttgcgatgtcaatgggactgctatctgtcattcgtatatccatatccggtcgtgctctgggcaagtatcattgccttgttactacggctgaagatcccatttgatcgcaagctctttgctggtaaaggcccaagactggatatgctcataaccattatggcactcccattcatccccgttttcgttattgtccacattgctcgcttcgtatcatttggcacagacggcaatactgactatcagaattatattgagagcgactcaggtcgagagaatgcctatggagtgatcttggctttgaagataattgaatcaagtttcgcaattttaacaggaatatgtttgtcagttctaattcacacaatttacaagttctatcaacaagcgagaacgaaagagagtacatga

SEQ ID NO: 32950 - protein, 465 aa, Muscodor strobelii
  misc_feature: SGI Peptide ID NO. 571359
MSVFESREWRRMRRDIEAVKWRQWSLLPAVIITAAGLLITLINGITGLTNFAHYKDDDGISFSFYELPQGELRSKIIIAIALQISLLVAIWVSCVHFLLFFHRDNSVYRRAAIQTVLSSAVVVLAVLMKVSGDGVAALPLVIDAAMINRSDVTAEQFVSAYNSWRDFVITQTGLISFLASIIVSGFQVVVTLLWVWLLPSRYRLPDNYVPVIKPHRWRTLATGKRSHSSYELVETTDSAVPGRLDEVYQEHEQSRRDDLKNSSIKQEKVVQAVSSTRNTSTGPQFEPMVRYWMLNPLRNGLWFTTAVFLVFFTVSIILETVFYTLTTAHDLRCQWDCYLSFVYPYPVVLWASIIALLLRLKIPFDRKLFAGKGPRLDMLITIMALPFIPVFVIVHIARFVSFGTDGNTDYQNYIESDSGRENAYGVILALKIIESSFAILTGICLSVLIHTIYKFYQQARTKEST

SEQ ID NO: 32951 - DNA, 1883 bp, Muscodor strobelii
  misc_feature: SGI EST ID NO. CUFF.77924.0
  misc_feature: Variant of the nucleotide sequence at SEQ ID NO 32949
atatactttagaatccatatcagggttgatgatgtatactaagtcattttacgatgagcgtcttcgagagccgtgaatggcgtcgcatgagaagagacatcgaagctgttaaatggcggcaatggagcttacttcccgctgtcatcattaccgccgctgggctgctcataaccttaatcaacggcatcactggtctcaccaacttcgctcattacaaagacgatgacggtatatctttttctttctatgagctcccacagggtgagctacgctcaaagatcataattgccattgcattgcagatatccttgctggtcgcgatttgggtctcctgcgttcattttctgttgttcttccaccgcgacaactcggtctacagacgcgctgcgatccaaaccgtcctttcaagcgcagttgttgtactagcggtcttgatgaaagtgagcggagatggagtggctgctctaccgctggttatcgatgcggctatgataaatcggagcgacgtgactgccgagcagtttgtctcagcctataattcttggcgagatttcgtaatcacgcagacaggactcatatcctttcttgccagcatcatcgtctcgggctttcaagtagttgtcaccctcctctgggtctggctactcccatcgcgctacaggctccccgacaactacgtccctgtcatcaagcctcataggtggcgtactcttgctactggcaagcgaagtcattctagctatgagctcgtagaaacaacagactcggcagtccctggccgactcgatgaggtctatcaagaacatgagcaatcaaggcgtgatgatttgaagaactcctcaatcaaacaagaaaaagttgtacaagctgtctcctccacaaggaacacatcgactggcccccaatttgagcctatggtccgctattggatgctcaatccgctacgaaacggtctgtggtttaccacagccgtgttcttggtgtttttcactgtctccattatcctcgagactgtgttttacacactcacgacggcgcatgacttgcgatgtcaatgggactgctatctgtcattcgtatatccatatccggtcgtgctctgggcaagtatcattgccttgttactacggctgaagatcccatttgatcgcaagctctttgctggtaaaggcccaagactggatatgctcataaccattatggcactcccattcatccccgttttcgttattgtccacattgctcgcttcgtatcatttggcacagacggcaatactgactatcagaattatattgagagcgactcaggtcgagagaatgcctatggagtgatcttggctttgaagataattgaatcaagtttcgcaattttaacaggaatatgtttgtcagttctaattcacacaatttacaagttctatcaacaagcgagaacgaaagagagtacatgagataggcaatatgttgtacaactataggatgtagtactacgcagggtcgcgacttgtcgtcacatattccctcagctcccacatattagcaagttcggagtatgagaatgaggaacgagacatgtacgtggtgtgacgatcgatcttcttggaatatccatactacgaatcgtgtatctagatatttaatgcttgcaggcaaccatgcctgtctgaccttgggtctcgctacgtagttggaatgaaactcgatgaagaatttataacgtctcaagtggctactaagggaagcgttggcgtcgagcgaaccgaattgtatcgcctccagttcatccgctacggtatacatacctgtagaatagttgttcttttgcaagaatgggacttcacttcgctggggtacctctcctgcgctgaaatagtcatgagctt

SEQ ID NO: 32952 - DNA, 3681 bp, Muscodor strobelii
  misc_feature: SGI cDNA ID NO. 571360
  misc_feature: Encodes the peptide sequence at SEQ ID NO 32953
atgctcatgacacagtctccggtaaatgcactggtcactgcgcagaacaccaagacgtacaactcacgcaaccggtcccgctccaacacctacgacaacaaccctgactctgctgtcgatctctcgtcctcgcagtcctcgctggaccgctttggcggcgaccgcaagttctacaactaccctgccaagatgaatggcgttggtgcgacaccccagggcactctctacgtgcgagcgctctacgactacgaggccgacgaccgcacaagcctgagcttccacgagggcgatgtcatccaggtcataacacagctggagagcggctggtgggacggggtgatcaacggcgtgcgtggctggtttccaagtaactattgccaaatcatcacgagccccgatgaggtgtccgatttgacaaacggcgatggagaccgcggtgatgacgagtttgaggatggtgtgctctacgaagatgatgtagaggatgataatgactctgatttggacgatatacatgcgctgcccctagaaggggcgaagacgatgcggaaatcgggggcggatttctggataccccaggccacctcagacggaaggctgttctattacaacaccatgacaggtgaaagtagcatggagcttccgctcgagtcccccacggcgcttgccgacggtccacgcgataggatgcatgcgaccgtgacagagaagtcacggcccccacccgaaatgatggcgcgaggcttgacacaggacgaggacgaggactcagaggccacctccgcatccgaacttgatggtgaatcactcatgctcaactccataagctctttgccctcacgacaacgccgcgcattcactaatgacattggcatctccccctccccctctatggattcgatgaatggtgcttccatcggcacaaggtctcgtgctgacactggcctaaccaacactaccatcccaacttctgctggcctgaacccacccccgatgctggcctctgccacctcgttcactggtgtgggcttcagcctgcctcaggctgcgacgatcccccgctccttctttgacgatggcagcgcgcagcctttgacttggaatacgttggtggccaacatgaagaaggccatcgacaaataccgtgatgcaatcaccaacggcaaccgctctgaatacgtcagccgtgccgaggatatctcggatcatcttcgactactgctcgctgctggttcgggcacgaccgataatcactctggccagccctccatcatatcaacaaacaaggctctgtacccccatttccgcgacatgatgtccaagttctcaaaattggttatctcttcgcacatcgccgcggcagattggccaaatgccgaatctgtgcagaagtgcatgcaagaggccgatggcgttctgatgggtgtcttcagcttcgtagaagtcgcccgacaacaaagaggtgaagatatcccacggctgtttcctggcttcgtcatcggcagcaacgcgggtgggagctggcagaacaatgcccttggccctcgcgaccccataatggcgaatttcttggatgacgacgaaggcatgcaggagccgacagttatcctggatggcaagttactcgaacggctcgatgaatataagcggatgttggtctccagtatcagggaactggagaagaacttgggtatatccgaaaaaattgtctccacataccgccacgagcttcttgcgaataacgtttgcgccgctggtagcaaagtcctggacacattcaaaccctggatcgccatgattgagtcgatcgatctttcttgcttggaaaacagcttccaggcaccccagctggccgatttcgccatgaacaaacaaagtctctacgataatatttccgatctattggtggcttgccaatctactgcaggacctctcggggacgaatgggctgaagtccgtggggaatcattggagaaccgacttgaatacgttcgacagtgcgcacgagccttggagacaaactcttcccatgttggattctccctacagctcttatccgaacaagtacaaattagcttgcagcagcagcagagctggcgtatgcgcgatgatttctccagggatcctctccgaaggaatgagtcaatgccatacaacggcagtgttcatgcaagatcagaatctcgcaaccttttgagtagaccgcagttacttggctcacagtcgtttactgagggtgacatgactgctcctagtaacaatttcaccaggaagggcgatttgtcgaaagttaggaaaattttgggggacgaccctacacctcaaggtgccattcaacaagtcgaggagacgccgcctttcttgcgcctcgatctcgaacacgatctgtcatgggatttgaaaacgaccccgccatcagtcaaaggtggctcattgctagctcttgttgagcagctaacacgacacgacaagcttgattccaattttaacaatacgttcctgttaacttatcgatcattcacaacggcaagagagctcttcgagctcctcgtgaagcggtttaatatacagcctcccgaaggattgcacagtagtatgtacgacacatggagagacaagaagcagaaacctattagattccgtgtagtcaatattctcaagagttggttcgacaatttttggatggaggaacccaatgaggaatcgaagcagatcattcgtgatgtgtattcatttgcaagagatacggtcaaatccacagaaactcccggctccggacctctcatggctgtcttggatcagcgtctcagcggcaaggagatttcatcgaagcgcttgattcagacaatggccaacaacataccgacaccgatcatgcccaagaatatgaagaaactgaagtttttagacatcgacgtcaccgagtttgcgcgccagctaaccattatcgaatcgaaactgtatgcaaaagtcaagccaacagagtgtctcaataaaacatggcagaaaaaggtcgcagacggcgagccagaacccgctccaaatgtcaaagctctcattttacactcgaatcagatgacaaactgggtcgccgagatgatcctggctcaaatggatgttaaaaaacgagtggttgtcataaagcacttcgtatctgtcgcagagaaatgtcggggcctcaacaacttctctacgttgacatccatcatatccgctctcagcactgcgccgattgctcgtcttaagcgaacctgggaccaagttcctgcccgtactcagaccgtcctcgaaaacatgcggaagttgatggcaagcaccaagaacttcggcgaatgcagagaggctctgcacgcggccaatccgccgtgtatacctttcttcggtgtatatctgacggatctgacgtttatcgaggatggtattccgtcgatcataaagaagacaaatatgatcaacttcgctaagcgagcaaagactgccgaagttatccgcgacattcagcaataccagaacgcaccctactcactgcaacccgtgccagaattgcatgattacatcttgagcaatatggctgctgcaggtgatgtacatgaaatgtatgacaagagcttagttgttgagccacgggagcgcgaggacgagaaaattgttagggtattggccgagtctggctttctgtga

SEQ ID NO: 32953 - protein, 1226 aa, Muscodor strobelii
  misc_feature: SGI Peptide ID NO. 571360
  misc_feature (969)..(1158): Pfam Id: PF00617 Pfam Desc: RasGEF domain
  misc_feature (806)..(909): Pfam Id: PF00618 Pfam Desc: Guanine nucleotide exchange factor for Ras-like GTPases; N-terminal motif
  misc_feature (75)..(129): Pfam Id: PF00018 Pfam Desc: SH3 domain
  misc_feature (76)..(129): Pfam Id: PF07653 Pfam Desc: Variant SH3 domain
  misc_feature (64)..(1226): NCBI GI: 46122041 Blast Desc: FG05398.1 [Gibberella zeae PH-1]
  misc_feature (64)..(1218): NCBI GI: 171686414 Blast Desc: protein product [Podospora anserina] gi|170943168|emb|CAP68821.1| protein product [Podospora anserina]
  misc_feature (1)..(1226): NCBI GI: 145611462 Blast Desc: MGG_00371 [Magnaporthe grisea 70-15] gi|145018738|gb|EDK03017.1| MGG_00371 [Magnaporthe grisea 70-15]
  misc_feature (75)..(1226): NCBI GI: 116208070 Blast Desc: CHGG_03328 [Chaetomium globosum CBS 148.51] gi|88183925|gb|EAQ91393.1| CHGG_03328 [Chaetomium globosum CBS 148.51]
  misc_feature (1)..(1217): NCBI GI: 164425093 Blast Desc: NCU06500 [Neurospora crassa OR74A] gi|157070786|gb|EAA27904.2| NCU06500 [Neurospora crassa OR74A]
  misc_feature (75)..(1226): NCBI GI: 154309424 Blast Desc: BC1G_07606 [Botryotinia fuckeliana B05.10] gi|150852430|gb|EDN27622.1| BC1G_07606 [Botryotinia fuckeliana B05.10]
  misc_feature (75)..(1226): NCBI GI: 156058204 Blast Desc: SS1G_03113 [Sclerotinia sclerotiorum 1980] gi|154700901|gb|EDO00640.1| SS1G_03113 [Sclerotinia sclerotiorum 1980]
  misc_feature (87)..(1218): NCBI GI: 169614341 Blast Desc: SNOG_10312 [Phaeosphaeria nodorum SN15] gi|160707325|gb|EAT82647.2| SNOG_10312 [Phaeosphaeria nodorum SN15]
  misc_feature (58)..(1224): NCBI GI: 169775981 Blast Desc: [Aspergillus oryzae RIB40] gi|83771192|dbj|BAE61324.1| protein product [Aspergillus oryzae]
  misc_feature (19)..(1217): NCBI GI: 121716782 Blast Desc: cell division control protein Cdc25, [Aspergillus clavatus NRRL 1] gi|119404065|gb|EAW14482.1| cell division control protein Cdc25, [Aspergillus clavatus NRRL 1]
MLMTQSPVNALVTAQNTKTYNSRNRSRSNTYDNNPDSAVDLSSSQSSLDRFGGDRKFYNYPAKMNGVGATPQGTLYVRALYDYEADDRTSLSFHEGDVIQVITQLESGWWDGVINGVRGWFPSNYCQIITSPDEVSDLTNGDGDRGDDEFEDGVLYEDDVEDDNDSDLDDIHALPLEGAKTMRKSGADFWIPQATSDGRLFYYNTMTGESSMELPLESPTALADGPRDRMHATVTEKSRPPPEMMARGLTQDEDEDSEATSASELDGESLMLNSISSLPSRQRRAFTNDIGISPSPSMDSMNGASIGTRSRADTGLTNTTIPTSAGLNPPPMLASATSFTGVGFSLPQAATIPRSFFDDGSAQPLTWNTLVANMKKAIDKYRDAITNGNRSEYVSRAEDISDHLRLLLAAGSGTTDNHSGQPSIISTNKALYPHFRDMMSKFSKLVISSHIAAADWPNAESVQKCMQEADGVLMGVFSFVEVARQQRGEDIPRLFPGFVIGSNAGGSWQNNALGPRDPIMANFLDDDEGMQEPTVILDGKLLERLDEYKRMLVSSIRELEKNLGISEKIVSTYRHELLANNVCAAGSKVLDTFKPWIAMIESIDLSCLENSFQAPQLADFAMNKQSLYDNISDLLVACQSTAGPLGDEWAEVRGESLENRLEYVRQCARALETNSSHVGFSLQLLSEQVQISLQQQQSWRMRDDFSRDPLRRNESMPYNGSVHARSESRNLLSRPQLLGSQSFTEGDMTAPSNNFTRKGDLSKVRKILGDDPTPQGAIQQVEETPPFLRLDLEHDLSWDLKTTPPSVKGGSLLALVEQLTRHDKLDSNFNNTFLLTYRSFTTARELFELLVKRFNIQPPEGLHSSMYDTWRDKKQKPIRFRVVNILKSWFDNFWMEEPNEESKQIIRDVYSFARDTVKSTETPGSGPLMAVLDQRLSGKEISSKRLIQTMANNIPTPIMPKNMKKLKFLDIDVTEFARQLTIIESKLYAKVKPTECLNKTWQKKVADGEPEPAPNVKALILHSNQMTNWVAEMILAQMDVKKRVVVIKHFVSVAEKCRGLNNFSTLTSIISALSTAPIARLKRTWDQVPARTQTVLENMRKLMASTKNFGECREALHAANPPCIPFFGVYLTDLTFIEDGIPSIIKKTNMINFAKRAKTAEVIRDIQQYQNAPYSLQPVPELHDYILSNMAAAGDVHEMYDKSLVVEPREREDEKIVRVLAESGFL

SEQ ID NO: 32954 - DNA, 5378 bp, Muscodor strobelii
  misc_feature: SGI EST ID NO. CUFF.77999.0
  misc_feature: Variant of the nucleotide sequence at SEQ ID NO 32952
cgatgccaaaagggaccaaatctgaatgcctcaccacgccaatagcacccccccttctttttagcccccagtcagcaacgaattgcgctccctggtccgaccctgtctctgccttccaccatatgagacgtccaccaaggcgcctcttccaccactcatcttgtctcgagcccatacctctgatgtctctagagttagacgtgcccgctacagctgctagcgacacaatattttgaacaaaacaacaacatcgcggccgtgttgcaggcgactgactggcgacggactgaccaggccaacgccacttggatttgtacggtatctatgtgtaataattgtagcactgccttccgaccctccgcctgagtcgggcccatcccactccgcctttctggtctggttgtctctcattcctgagcccgcgcacatctccctctggtccgacctgaggctcgccttaccttgccctgccttgccttaccgccctccatcgcaggaggtgaccgacctgcttctatcgctctgcagccggtgtttgtctcgccgtggtgttcgcatcgcatcgcagccgcgaggtagaggttgaggttgcgcagcacccggtcgacgcccttggctctctgtgagccagcaacgtcccggttccattcttttcccttctcgcgggcctgcagtttgccttgcccgttgtatcagtgctccggagtatgtgacttgatcccgctcactctcgatccttgattgctcccgcggactgcatccgacaccacgatgctcatgacacagtctccggtaaatgcactggtcactgcgcagaacaccaagacgtacaactcacgcaaccggtcccgctccaacacctacgacaacaaccctgactctgctgtcgatctctcgtcctcgcagtcctcgctggaccgctttggcggcgaccgcaagttctacaactaccctgccaagatgaatggcgttggtgcgacaccccagggcactctctacgtgcgagcgctctacgactacgaggccgacgaccgcacaagcctgagcttccacgagggcgatgtcatccaggtcataacacagctggagagcggctggtgggacggggtgatcaacggcgtgcgtggctggtttccaagtaactattgccaaatcatcacgagccccgatgaggtgtccgatttgacaaacggcgatggagaccgcggtgatgacgagtttgaggatggtgtgctctacgaagatgatgtagaggatgataatgactctgatttggacgatatacatgcgctgcccctagaaggggcgaagacgatgcggaaatcgggggcggatttctggataccccaggccacctcagacggaaggctgttctattacaacaccatgacaggtgaaagtagcatggagcttccgctcgagtcccccacggcgcttgccgacggtccacgcgataggatgcatgcgaccgtgacagagaagtcacggcccccacccgaaatgatggcgcgaggcttgacacaggacgaggacgaggactcagaggccacctccgcatccgaacttgatggtgaatcactcatgctcaactccataagctctttgccctcacgacaacgccgcgcattcactaatgacattggcatctccccctccccctctatggattcgatgaatggtgcttccatcggcacaaggtctcgtgctgacactggcctaaccaacactaccatcccaacttctgctggcctgaacccacccccgatgctggcctctgccacctcgttcactggtgtgggcttcagcctgcctcaggctgcgacgatcccccgctccttctttgacgatggcagcgcgcagcctttgacttggaatacgttggtggccaacatgaagaaggccatcgacaaataccgtgatgcaatcaccaacggcaaccgctctgaatacgtcagccgtgccgaggatatctcggatcatcttcgactactgctcgctgctggttcgggcacgaccgataatcactctggccagccctccatcatatcaacaaacaaggctctgtacccccatttccgcgacatgatgtccaagttctcaaaattggttatctcttcgcacatcgccgcggcagattggccaaatgccgaatctgtgcagaagtgcatgcaagaggccgatggcgttctgatgggtgtcttcagcttcgtagaagtcgcccgacaacaaagaggtgaagatatcccacggctgtttcctggcttcgtcatcggcagcaacgcgggtgggagctggcagaacaatgcccttggccctcgcgaccccataatggcgaatttcttggatgacgacgaaggcatgcaggagccgacagttatcctggatggcaagttactcgaacggctcgatgaatataagcggatgttggtctccagtatcagggaactggagaagaacttgggtatatccgaaaaaattgtctccacataccgccacgagcttcttgcgaataacgtttgcgccgctggtagcaaagtcctggacacattcaaaccctggatcgccatgattgagtcgatcgatctttcttgcttggaaaacagcttccaggcaccccagctggccgatttcgccatgaacaaacaaagtctctacgataatatttccgatctattggtggcttgccaatctactgcaggacctctcggggacgaatgggctgaagtccgtggggaatcattggagaaccgacttgaatacgttcgacagtgcgcacgagccttggagacaaactcttcccatgttggattctccctacagctcttatccgaacaagtacaaattagcttgcagcagcagcagagctggcgtatgcgcgatgatttctccagggatcctctccgaaggaatgagtcaatgccatacaacggcagtgttcatgcaagatcagaatctcgcaaccttttgagtagaccgcagttacttggctcacagtcgtttactgagggtgacatgactgctcctagtaacaatttcaccaggaagggcgatttgtcgaaagttaggaaaattttgggggacgaccctacacctcaaggtgccattcaacaagtcgaggagacgccgcctttcttgcgcctcgatctcgaacacgatctgtcatgggatttgaaaacgaccccgccatcagtcaaaggtggctcattgctagctcttgttgagcagctaacacgacacgacaagcttgattccaattttaacaatacgttcctgttaacttatcgatcattcacaacggcaagagagctcttcgagctcctcgtgaagcggtttaatatacagcctcccgaaggattgcacagtagtatgtacgacacatggagagacaagaagcagaaacctattagattccgtgtagtcaatattctcaagagttggttcgacaatttttggatggaggaacccaatgaggaatcgaagcagatcattcgtgatgtgtattcatttgcaagagatacggtcaaatccacagaaactcccggctccggacctctcatggctgtcttggatcagcgtctcagcggcaaggagatttcatcgaagcgcttgattcagacaatggccaacaacataccgacaccgatcatgcccaagaatatgaagaaactgaagtttttagacatcgacgtcaccgagtttgcgcgccagctaaccattatcgaatcgaaactgtatgcaaaagtcaagccaacagagtgtctcaataaaacatggcagaaaaaggtcgcagacggcgagccagaacccgctccaaatgtcaaagctctcattttacactcgaatcagatgacaaactgggtcgccgagatgatcctggctcaaatggatgttaaaaaacgagtggttgtcataaagcacttcgtatctgtcgcagagaaatgtcggggcctcaacaacttctctacgttgacatccatcatatccgctctcagcactgcgccgattgctcgtcttaagcgaacctgggaccaagttcctgcccgtactcagaccgtcctcgaaaacatgcggaagttgatggcaagcaccaagaacttcggcgaatgcagagaggctctgcacgcggccaatccgccgtgtatacctttcttcggtgtatatctgacggatctgacgtttatcgaggatggtattccgtcgatcataaagaagacaaatatgatcaacttcgctaagcgagcaaagactgccgaagttatccgcgacattcagcaataccagaacgcaccctactcactgcaacccgtgccagaattgcatgattacatcttgagcaatatggctgctgcaggtgatgtacatgaaatgtatgacaagagcttagttgttgagccacgggagcgcgaggacgagaaaattgttagggtattggccgagtctggctttctgtgagcgagttcaatctctcaatgctcgtaattcagtattcctgctcctatggatactgttgctcattccaagtcgaaaagtgcacgagccgagggctaaatgggcccatccattgtctcatttggctcggccatgccgaagggttattggcacctaaagcttgggagattaatgcacattgcttacagcgttgcttgcaatacggacttgtcgcgaacaaatcacggaggcatgtgccttatttaggttggatcaacaacgactatctatttggctacagtttgcattgctttgcctggctcattatcacatccatgggactgttggtcaccacgttaaatactgtcgtggaaagcgaaatgtcgagcctccggatctcttgcgtgacctcgagaaggagaaacaccaaccaaaagcaagcaagagtgtaggcaagaagccagcatctgtttgaataataactacttgaagatcgagtgatatttgcatcggcgatcttagctacacagattttgaatctgttggggacaacaatgaccaattacagaaagtgtcaccccatttcatgatgattacggaagaaaattataaggtcaatgaagatatgacgggaacgatattcgcattgcaaaggtttcatggggcatcttaccacctggttcatccgggagttctaggttttgatggaggaaagacagtactttgatgctgtttgaattacttgtctctccctcgcttgtggtatatagaagggatagcccgataattcatcacttgtgcgcatatgccttctcatccgtatcatgtgtgcttagcctgtaacacatcccacttagctcactgctactacatgcatttcaagtttcctgctgatgctgcctagtgttcgtactcctctttccatcttactcaatgctacccaaggtgaa

SEQ ID NO: 32955 - DNA, 792 bp, Muscodor strobelii
  misc_feature: SGI cDNA ID NO. 571361
  misc_feature: Reduced expression when VOC is produced
  misc_feature: Encodes the peptide sequence at SEQ ID NO 32956
atggagtccataaacagcatggcagcagcggcagcaaaggcagtatggggcgagaaccagcagaatagcgaggagcctgtctctggaaagcttggggatacatcgaaaggggagccttacgacgccggcaacatcgaaacatcaaacaaaacagaagagaccagcaataccaagacagacactggagctgccgagttcgccaaggagaccggcacagctacaaagagcgatgccacacctgaaaacccctctaccgacctcaaggagaagagggacgttcctgccgacacaagcgctccccaaggagatgtacgagatcccgaggatcctcaaacacaccctaaggatgcgcccacggatgttaataacgctgacgaggatggcgtcaacgaggctcagaagctcgatggccctggtcccaagccattgatcgaggttgctaaagagcacggcggagatgctggcaacagcaacgaagcggtagacaagtccgaaaagaaggaggactctgaagatacagaagagaacaagaagagtgaggggaccggcgagcaatatgtcaagtctaccggactgcaagccgacggaggagactttgatgcgaccaagcccggcgcgggtcgcgaggctgaccgtctcatggaagagaagggcatccacaaccccaacgatgacagcaagccgtctgcgggagcaagcgaagacagatccagcagtcctgaatcggagaagaagaagagaagcctgggtcagaagatcaaggagaagctccacagaaataaggagacttag

SEQ ID NO: 32956 - protein, 263 aa, Muscodor strobelii
  misc_feature: SGI Peptide ID NO. 571361
  misc_feature (1)..(260): NCBI GI: 46122039 Blast Desc: FG05397.1 [Gibberella zeae PH-1]
  misc_feature (1)..(222): NCBI GI: 171686442 Blast Desc: protein product [Podospora anserina] gi|170943182|emb|CAP68835.1| protein product [Podospora anserina]
  misc_feature (1)..(260): NCBI GI: 256729952 Blast Desc: NECHADRAFT_83909 [Nectria haematococca mpVI 77-13-4]
  misc_feature (1)..(220): NCBI GI: 145611454 Blast Desc: MGG_00376 [Magnaporthe grisea 70-15] gi|145018733|gb|EDK03012.1| MGG_00376 [Magnaporthe grisea 70-15]
  misc_feature (94)..(260): NCBI GI: 85083562 Blast Desc: NCU06506 [Neurospora crassa OR74A] gi|28918232|gb|EAA27910.1| [Neurospora crassa OR74A]
  misc_feature (181)..(260): NCBI GI: 116208034 Blast Desc: [Chaetomium globosum CBS 148.51] gi|88183907|gb|EAQ91375.1| [Chaetomium globosum CBS 148.51]
  misc_feature (181)..(262): NCBI GI: 238842615 Blast Desc: glycine-rich cell wall structural protein 1 [Microsporum canis CBS 113480]
  misc_feature (1)..(61): NCBI GI: 116208034 Blast Desc: [Chaetomium globosum CBS 148.51] gi|88183907|gb|EAQ91375.1| [Chaetomium globosum CBS 148.51]
  misc_feature (1)..(262): NCBI GI: 119174710 Blast Desc: [Coccidioides immitis RS]
  misc_feature (1)..(44): NCBI GI: 154299436 Blast Desc: [Botryotinia fuckeliana B05.10] gi|150857322|gb|EDN32514.1| [Botryotinia fuckeliana B05.10]
  misc_feature: Useful for introducing or modulating the production of volatile compounds
MESINSMAAAAAKAVWGENQQNSEEPVSGKLGDTSKGEPYDAGNIETSNKTEETSNTKTDTGAAEFAKETGTATKSDATPENPSTDLKEKRDVPADTSAPQGDVRDPEDPQTHPKDAPTDVNNADEDGVNEAQKLDGPGPKPLIEVAKEHGGDAGNSNEAVDKSEKKEDSEDTEENKKSEGTGEQYVKSTGLQADGGDFDATKPGAGREADRLMEEKGIHNPNDDSKPSAGASEDRSSSPESEKKKRSLGQKIKEKLHRNKET

SEQ ID NO: 32957 - DNA, 1257 bp, Muscodor strobelii
  misc_feature: SGI EST ID NO. CUFF.77943.0
  misc_feature: Variant of the nucleotide sequence at SEQ ID NO 32955
gtcacatgtagagtaaacctgcattctctcgacagctttaaggctgcatgcctacaatacataagtatcgttgatacccttccaccgacatcagcctttcaaacctcacaaacaacattactcgacctagagctttctacctatatcctcgacctcgaacgtctcttcaccagcacacgcacgtgagataaaatcatcctataccatggagtccataaacagcatggcagcagcggcagcaaaggcagtatggggcgagaaccagcagaatagcgaggagcctgtctctggaaagcttggggatacatcgaaaggggagccttacgacgccggcaacatcgaaacatcaaacaaaacagaagagaccagcaataccaagacagacactggagctgccgagttcgccaaggagaccggcacagctacaaagagcgatgccacacctgaaaacccctctaccgacctcaaggagaagagggacgttcctgccgacacaagcgctccccaaggagatgtacgagatcccgaggatcctcaaacacaccctaaggatgcgcccacggatgttaataacgctgacgaggatggcgtcaacgaggctcagaagctcgatggccctggtcccaagccattgatcgaggttgctaaagagcacggcggagatgctggcaacagcaacgaagcggtagacaagtccgaaaagaaggaggactctgaagatacagaagagaacaagaagagtgaggggaccggcgagcaatatgtcaagtctaccggactgcaagccgacggaggagactttgatgcgaccaagcccggcgcgggtcgcgaggctgaccgtctcatggaagagaagggcatccacaaccccaacgatgacagcaagccgtctgcgggagcaagcgaagacagatccagcagtcctgaatcggagaagaagaagagaagcctgggtcagaagatcaaggagaagctccacagaaataaggagacttagacgccatcacgttggatgtcgattttttgacttttgcaacgacctctcatgaataatgactcaacatcgcgccttatgttcgcgcgtgcccctatcgttgtaattagattcctgtaataatatttgtttaaatcaagactaatgcgccttgtataaatgtctggctggaggttaacccaccttttgcatgcgaatctttcgccttacgctttcattcatctgcagctcatccgcattcaaggtggattacttggtctcgc

SEQ ID NO: 32958 - DNA, 1011 bp, Muscodor strobelii
  misc_feature: SGI cDNA ID NO. 571362
  misc_feature: Elevated expression when VOC is produced
  misc_feature: Encodes the peptide sequence at SEQ ID NO 32959
atggtgtccttcaagtccttggcctgggctctgctcacgcctctcaccttggctgccgccgccgaggcgacagacaagcgcgtcgtcgtgtactaccagtccaagcaaaccagcggtagtgaccatgtctctttgctacctctgattcagcaaggtaccattgatgtgacacacgtcttgattgccgcagtccacatccaggaccccatccatgtcaatgatctcccacccaccgatcctggcttcgacgagatgtggaccgaggtcggacagcttcaagctgctggtgtcaaagtcggatgcatggttggaggtgcggcggctggctcttggcctgcgcttgaacaaggagcgaactttgaggccaactacaagctgctccacgacctgatcggtaactacaacttgcaggttgttgacttggacgtcgagcagagcttttcccttgatggcgctgtggccttgatcaaccgtctcaagactgacttccccgatatcgagattaccctagcccctgttgcttctgcgttgtctggcggtggcaatctgagcgggtttgactacaaagaacttgaagcccaggctggcggcaacattgctttctacaatggccaattctacagtggctttgctgatgcaagcactacgggtgactacgagagtattctcgatgatggctggccagcaaacaaggttgtgatgggtctgctgagcaacagtgccaacggattcggcttcgtcgacctcgacacgagcagcaaggtcatcgaggagctggtaacagagaacggacagttcggaggtgtggcgaactgggagtacttcaactctgagccagacccgtctaacccatggaagtgggttcagtgggctgctcagtctcaggcgagcgccgctgctagaaagcgcgtcgaggtgccagcaagagaggctgcctggcgttccgtcaagaagatgggccgtcgcactcgcgccgtcgccaagaagttctaccgcaacgtcgttgcctaa

SEQ ID NO: 32959 - protein, 336 aa, Muscodor strobelii
  misc_feature: SGI Peptide ID NO. 571362
  misc_feature (27)..(290): NCBI GI: 261358057 Blast Desc: chitinase [Verticillium albo-atrum VaMs.102]
  misc_feature (12)..(329): NCBI GI: 171693585 Blast Desc: protein product [Podospora anserina] gi|170946741|emb|CAP73545.1| protein product [Podospora anserina]
  misc_feature (24)..(287): NCBI GI: 240109552 Blast Desc: chitinase 3 [Coccidioides posadasii C735 delta SOWgp]
  misc_feature (27)..(290): NCBI GI: 156062794 Blast Desc: SS1G_01513 [Sclerotinia sclerotiorum 1980] gi|154696849|gb|EDN96587.1| SS1G_01513 [Sclerotinia sclerotiorum 1980]
  misc_feature (23)..(289): NCBI GI: 284033338 Blast Desc: coagulation factor 5/8 type domain protein [Kribbella flavida DSM 17836] gi|283812631|gb|ADB34470.1| coagulation factor 5/8 type domain protein [Kribbella flavida DSM 17836]
  misc_feature (24)..(287): NCBI GI: 29539602 Blast Desc: AF492472_1 chitinase 3 [Coccidioides posadasii]
  misc_feature (27)..(289): NCBI GI: 39952971 Blast Desc: MGG_01876 [Magnaporthe grisea 70-15] gi|145020255|gb|EDK04384.1| MGG_01876 [Magnaporthe grisea 70-15]
  misc_feature (27)..(289): NCBI GI: 46123183 Blast Desc: FG05969.1 [Gibberella zeae PH-1]
  misc_feature (24)..(287): NCBI GI: 119183278 Blast Desc: CIMG_06595 [Coccidioides immitis RS]
  misc_feature (27)..(289): NCBI GI: 256731096 Blast Desc: glycoside hydrolase family 18 [Nectria haematococca mpVI 77-13-4]
  misc_feature: Useful for introducing or modulating the production of volatile compounds
MVSFKSLAWALLTPLTLAAAAEATDKRVVVYYQSKQTSGSDHVSLLPLIQQGTIDVTHVLIAAVHIQDPIHVNDLPPTDPGFDEMWTEVGQLQAAGVKVGCMVGGAAAGSWPALEQGANFEANYKLLHDLIGNYNLQVVDLDVEQSFSLDGAVALINRLKTDFPDIEITLAPVASALSGGGNLSGFDYKELEAQAGGNIAFYNGQFYSGFADASTTGDYESILDDGWPANKVVMGLLSNSANGFGFVDLDTSSKVIEELVTENGQFGGVANWEYFNSEPDPSNPWKWVQWAAQSQASAAARKRVEVPAREAAWRSVKKMGRRTRAVAKKFYRNVVA

SEQ ID NO: 32960 - DNA, 1792 bp, Muscodor strobelii
  misc_feature: SGI EST ID NO. CUFF.77957.0
  misc_feature: Variant of the nucleotide sequence at SEQ ID NO 32958
tgacgtttcaactccatacccaatcacactaagcgcttaccaggggcaaacctagtagccatggtgcggcatgtagtcctgaacacagcagctggtgctgctcacttctgacatgttattattagcttccatggtacgaaacggacagtggacaccctgtatgcagatacttagagactattgttaatgggtacaacgctgtgaggttcatcgtcattcaacccgagtatggaaaaccatctgaccagcccctcagaaccctacaaggcaactgcaaggatctaccgaatatctgtaacgttgtcgaagatgtccttggtggtcagaatgggagataatacagcggtgcttgatgattgtggaggacaaccaatggccatcgtcttacgacctagcttggcagggagatgatcagcattgccccggattagctgcgcgcctcagcatcgccattgaccaggaaccgtcttacgctttataaatatttatatttaaaaggtcaggcatatcttctctcgccatccggctctggtctagccatcttatccatccggacgtcttttccttccacgtcgtcttctcttcacgttgtgtgcccataagccgttgcttcgggttacgggtcatcaccttcagaatggtgtccttcaagtccttggcctgggctctgctcacgcctctcaccttggctgccgccgccgaggcgacagacaagcgcgtcgtcgtgtactaccagtccaagcaaaccagcggtagtgaccatgtctctttgctacctctgattcagcaaggtaccattgatgtgacacacgtcttgattgccgcagtccacatccaggaccccatccatgtcaatgatctcccacccaccgatcctggcttcgacgagatgtggaccgaggtcggacagcttcaagctgctggtgtcaaagtcggatgcatggttggaggtgcggcggctggctcttggcctgcgcttgaacaaggagcgaactttgaggccaactacaagctgctccacgacctgatcggtaactacaacttgcaggttgttgacttggacgtcgagcagagcttttcccttgatggcgctgtggccttgatcaaccgtctcaagactgacttccccgatatcgagattaccctagcccctgttgcttctgcgttgtctggcggtggcaatctgagcgggtttgactacaaagaacttgaagcccaggctggcggcaacattgctttctacaatggccaattctacagtggctttgctgatgcaagcactacgggtgactacgagagtattctcgatgatggctggccagcaaacaaggttgtgatgggtctgctgagcaacagtgccaacggattcggcttcgtcgacctcgacacgagcagcaaggtcatcgaggagctggtaacagagaacggacagttcggaggtgtggcgaactgggagtacttcaactctgagccagacccgtctaacccatggaagtgggttcagtgggctgctcagtctcaggcgagcgccgctgctagaaagcgcgtcgaggtgccagcaagagaggctgcctggcgttccgtcaagaagatgggccgtcgcactcgcgccgtcgccaagaagttctaccgcaacgtcgttgcctaagggatttacgctccgaagaggcaggcagggtggaagaagatcaatttcatatctgtacatacctacctagttatacccacttacatatatccatccgcgtctgggatatcggaaatatcaaaaaagataccacggactgtttcc

SEQ ID NO: 32961 - DNA, 3087 bp, Muscodor strobelii
  misc_feature: SGI cDNA ID NO. 571363
  misc_feature: Encodes the peptide sequence at SEQ ID NO 32962
atgacgagacctcagatcatccgtgccgattccatcgatctccaagaccacgaagctccctccgccaaagaccaccgcggcgccgctgccaacccgactctgcattcccacgggccccttgccccccaccaggccgagacgatccgcgaggtcgaagaggagagggctgaggaggaggctcgcagcccgagggtgtcgtgggccaatggcgccgccgccgaccgtgacctccagcagtacgccgaagagctgagctcgggcattgccaattccctgaatggcaccgccatgcagcagcaagatgccctcgccattgcccagaacggcggcgtctccggccacggcgaagacgatggcgacatcgacaccaacaccgacgacgacctcgacgacgacatgatggacaggatctccagctccccctcgatcattgatggtgggtacacccttccgcccgtctggcctgcgcgcgtcgattccttgctcaattctcccctgcgcaactcgacacaaggctccccgtcgcgcagcagtatctcgcgagacagttctccgatgcccagtgaggcgagatcttcatccccctacctcgagccagcgccgtatctcccgctcatgaaccccaggcggcagttaagcaaggcttctgccccatcactttcaacttcaacttcacgcagtcatctctcgagcgagtgtgccgagtggggtagcgcagacgagtacgcctgcagtgactctaccgtgttgtattctcaggatcaagatcaggacgcggatcaggatggcgatactcctgaaacttcggactcaatcgaaggttcacgttcaggttcagtccttgagactcagcatctcagtgatttggagattccgccgtgcgaccgcgactcagctgtcgatctcaaagttgaagacttctccctcgaaggaccttacgccgatgaccatgaagttcatgcgcacggcgatggttacttatacgattctcttgtcatcccttatgaagaatctgaagatgaggagcaagatgatttcgccatcgaggctgatcccagatttgtcgattccggctggggtggagaatgcttacaagacgcagaggacatcgatttcgaattcgtctacgcactccacactttcgtggcaactgtcgagggccaggccaacgcgacaaaaggcgacactatggtacttctcgacgacagcaacagctactggtggctggtccgtgttgtgaaagatagtagtatcggctacttacctgcagagcacatcgaaacaccaacggaaaggcttgcccgtcttaacaaacatagaaatgtcgaagtgagtgtatgctgcgatcctcaaccagggcactatattaatctcaagaagctttcatcgacaacactgtcggaccacgacaccaagccgaagaaccctatcaagtctgccctgaggaggcacaagacaaagaatgttacatttacagcaccaacttacgtggactacgaagaaatagactattctgatgatgaagacgaggaaaatgatacccaaggtcaacagaatggtgcacaacaagacgaccaacggcagcaacaggcagctgaacagcaggctgtagcagagtcagttgaagatgacgaatctgcaaaggtcgagcctttgaaacctcgtgcccagaagcaagtgaaaccagaattgtccacaaccgatggagcctctcaaccagacccagatgccagaaatagcgacgagatcttcgacggcaagaacgagagggtcacccgcaatggtactgttagaaacacagattccttcttcagagacgaaaccatcgagaccaagaagataagcctgacacccggcttattacgagatgacaacgaaccacgaatatcgaatgattcaaaggacttgcgccaacggcctagcttcgaaaaagagctcgtctccgataagaacagagacgacaagaagaagaaagagaaggagaagaaggagaaggaaaagaagccgagcgctattcgaagcttcttctcccggaaggacaaaaagaagtctattgacgacgacgatgaatcatttggcaagaggtccaatgatttcagtggcggttatggagaggcagagatggtcgatgagccagaggacatggacggatcgcctcaaaaggggccatcacgtaatccgagcaagctgcaaaagacacagcgcaagaccgagccttcacctacccgtcggtcaggaccctcaacagcggcgcccttgggcgatacagaccttggacctcctctggctgctgaagtgaggacgaacaatgtcgcaaatgtgcctcctgcgactttaaggatggtggagtccgaacaggctgaaggatttgggatgcagacgcgcaaggaagagaaggccaagtcacctatcacgaagatattaccgacgaactcagagcccaagcctcccaaggtcacgaaggcgaaatcacgaatcgaactggatgatttcgattcttcaacggaggaggagattgtgcccgagccaactcggcctgctcccgtggagccgaaggagccatcccaggacagacttttgcgcccaactctccctgggtcgtttcccgacagctatgtcagctcgatggcaccaaacgaaacaatatcaccgaccgaagagggtctatctgatgctcctacccaagtttcgcccatcactccttctgatccacctgcacttatgggtgacacgtcgagccaagaggatcgctcgtcgtctgtctcgtcatcatcgccagagctcatcgacacggctggcaatactcatagaaaccaagattcgatgacaacctcaacatcagcaacaaccacgtcgacttggaatgacgccaatctgcgcgcgttcttcgaatccggtagtgaggtcagagacttgttggtggtcgtgtacgataagaccgacatacccccagcagggcccgaccaccccatcgctgggccactattccgagagcaaaatgcaaagctggccgagataacaacacaattggacaacatgctcggagactatttggcccgaaagcaaagactgcgaggtacagtctag

SEQ ID NO: 32962 - protein, 1028 aa, Muscodor strobelii
  misc_feature: SGI Peptide ID NO. 571363
  misc_feature (373)..(429): Pfam Id: PF00018 Pfam Desc: SH3 domain
  misc_feature (1)..(1028): NCBI GI: 256725736 Blast Desc: NECHADRAFT_94475 [Nectria haematococca mpVI 77-13-4]
  misc_feature (1)..(1026): NCBI GI: 39977073 Blast Desc: MGG_06439 [Magnaporthe grisea 70-15] gi|145016144|gb|EDK00634.1| MGG_06439 [Magnaporthe grisea 70-15]
  misc_feature (1)..(1008): NCBI GI: 46116552 Blast Desc: FG04118.1 [Gibberella zeae PH-1]
  misc_feature (328)..(1028): NCBI GI: 171686034 Blast Desc: protein product [Podospora anserina] gi|170942978|emb|CAP68631.1| protein product [Podospora anserina]
  misc_feature (1)..(1028): NCBI GI: 116207458 Blast Desc: CHGG_03022 [Chaetomium globosum CBS 148.51] gi|88183619|gb|EAQ91087.1| CHGG_03022 [Chaetomium globosum CBS 148.51]
  misc_feature (1)..(1023): NCBI GI: 154309220 Blast Desc: BC1G_07504 [Botryotinia fuckeliana B05.10] gi|150852328|gb|EDN27520.1| BC1G_07504 [Botryotinia fuckeliana B05.10]
  misc_feature (1)..(1027): NCBI GI: 156058368 Blast Desc: SS1G_03195 [Sclerotinia sclerotiorum 1980] gi|154700983|gb|EDO00722.1| SS1G_03195 [Sclerotinia sclerotiorum 1980]
  misc_feature (366)..(1023): NCBI GI: 70995606 Blast Desc: SH3 domain protein [Aspergillus fumigatus Af293] gi|66850193|gb|EAL90520.1| SH3 domain protein, [Aspergillus fumigatus Af293] gi|159131313|gb|EDP56426.1| SH3 domain protein,
  misc_feature (375)..(1021): NCBI GI: 212538345 Blast Desc: SH3 domain protein, [Penicillium marneffei ATCC 18224] gi|210069070|gb|EEA23161.1| SH3 domain protein, [Penicillium marneffei ATCC 18224]
  misc_feature (366)..(1021): NCBI GI: 242806869 Blast Desc: SH3 domain protein, [Talaromyces stipitatus ATCC 10500] gi|218715459|gb|EED14881.1| SH3 domain protein, [Talaromyces stipitatus ATCC 10500]
MTRPQIIRADSIDLQDHEAPSAKDHRGAAANPTLHSHGPLAPHQAETIREVEEERAEEEARSPRVSWANGAAADRDLQQYAEELSSGIANSLNGTAMQQQDALAIAQNGGVSGHGEDDGDIDTNTDDDLDDDMMDRISSSPSIIDGGYTLPPVWPARVDSLLNSPLRNSTQGSPSRSSISRDSSPMPSEARSSSPYLEPAPYLPLMNPRRQLSKASAPSLSTSTSRSHLSSECAEWGSADEYACSDSTVLYSQDQDQDADQDGDTPETSDSIEGSRSGSVLETQHLSDLEIPPCDRDSAVDLKVEDFSLEGPYADDHEVHAHGDGYLYDSLVIPYEESEDEEQDDFAIEADPRFVDSGWGGECLQDAEDIDFEFVYALHTFVATVEGQANATKGDTMVLLDDSNSYWWLVRVVKDSSIGYLPAEHIETPTERLARLNKHRNVEVSVCCDPQPGHYINLKKLSSTTLSDHDTKPKNPIKSALRRHKTKNVTFTAPTYVDYEEIDYSDDEDEENDTQGQQNGAQQDDQRQQQAAEQQAVAESVEDDESAKVEPLKPRAQKQVKPELSTTDGASQPDPDARNSDEIFDGKNERVTRNGTVRNTDSFFRDETIETKKISLTPGLLRDDNEPRISNDSKDLRQRPSFEKELVSDKNRDDKKKKEKEKKEKEKKPSAIRSFFSRKDKKKSIDDDDESFGKRSNDFSGGYGEAEMVDEPEDMDGSPQKGPSRNPSKLQKTQRKTEPSPTRRSGPSTAAPLGDTDLGPPLAAEVRTNNVANVPPATLRMVESEQAEGFGMQTRKEEKAKSPITKILPTNSEPKPPKVTKAKSRIELDDFDSSTEEEIVPEPTRPAPVEPKEPSQDRLLRPTLPGSFPDSYVSSMAPNETISPTEEGLSDAPTQVSPITPSDPPALMGDTSSQEDRSSSVSSSSPELIDTAGNTHRNQDSMTTSTSATTTSTWNDANLRAFFESGSEVRDLLVVVYDKTDIPPAGPDHPIAGPLFREQNAKLAEITTQLDNMLGDYLARKQRLRGTV

SEQ ID NO: 32963 - DNA, 3653 bp, Muscodor strobelii
  misc_feature: SGI EST ID NO. CUFF.77963.0
  misc_feature: Variant of the nucleotide sequence at SEQ ID NO 32961
tgacaacctgacgctgattctcccttgagtaaagtgtgcccgtcaattgaaggtggccatctaaaattagggccgtcatccttccaaaggtcaaagttggaggacgtcaagcaggctcccgagatctacacgccgccaatgccactctcgttagcctcaattgcacctttgtctgactatctttgagaaatacactaagactaacacacgacgggtgctccgccaattgcgccagtacggcctaccccaggctcctgccccagccagtccaggtcacccgcctctgcaggcccagcacacatcagccaatacgatagccccaacccccttgcaccctcgcccatttgggacgttgcaggtgcgcccgtccagccaaaccaggggctcaaaaaaactgacggtcgttgctgctctggtcgcccaacctgtcacacactcattgcgaaaaaagagagagcgcggagcacgatcatctgtccaacactcatgtcacgggtcccctcgaggccctccccgtcaccatgacgagacctcagatcatccgtgccgattccatcgatctccaagaccacgaagctccctccgccaaagaccaccgcggcgccgctgccaacccgactctgcattcccacgggccccttgccccccaccaggccgagacgatccgcgaggtcgaagaggagagggctgaggaggaggctcgcagcccgagggtgtcgtgggccaatggcgccgccgccgaccgtgacctccagcagtacgccgaagagctgagctcgggcattgccaattccctgaatggcaccgccatgcagcagcaagatgccctcgccattgcccagaacggcggcgtctccggccacggcgaagacgatggcgacatcgacaccaacaccgacgacgacctcgacgacgacatgatggacaggatctccagctccccctcgatcattgatgaggacatcgatttcgaattcgtctacgcactccacactttcgtggcaactgtcgagggccaggccaacgcgacaaaaggcgacactatggtacttctcgacgacagcaacagctactggtggctggtccgtgttgtgaaagatagtagtatcggctacttacctgcagagcacatcgaaacaccaacggaaaggcttgcccgtcttaacaaacatagaaatgtcgaactttcatcgacaacactgtcggaccacgacaccaagccgaagaaccctatcaagtctgccctgaggaggcacaagacaaagaatgttacatttacagcaccaacttacgtggactacgaagaaatagactattctgatgatgaagacgaggaaaatgatacccaaggtcaacagaatggtgcacaacaagacgaccaacggcagcaacaggcagctgaacagcaggctgtagcagagtcagttgaagatgacgaatctgcaaaggtcgagcctttgaaacctcgtgcccagaagcaagtgaaaccagaattgtccacaaccgatggagcctctcaaccagacccagatgccagaaatagcgacgagatcttcgacggcaagaacgagagggtcacccgcaatggtactgttagaaacacagattccttcttcagagacgaaaccatcgagaccaagaagataagcctgacacccggcttattacgagatgacaacgaaccacgaatatcgaatgattcaaaggacttgcgccaacggcctagcttcgaaaaagagctcgtctccgataagaacagagacgacaagaagaagaaagagaaggagaagaaggagaaggaaaagaagccgagcgctattcgaagcttcttctcccggaaggacaaaaagaagtctattgacgacgacgatgaatcatttggcaagaggtccaatgatttcagtggcggttatggagaggcagagatggtcgatgagccagaggacatggacggatcgcctcaaaaggggccatcacgtaatccgagcaagctgcaaaagacacagcgcaagaccgagccttcacctacccgtcggtcaggaccctcaacagcggcgcccttgggcgatacagaccttggacctcctctggctgctgaagtgaggacgaacaatgtcgcaaatgtgcctcctgcgactttaaggatggtggagtccgaacaggctgaaggatttgggatgcagacgcgcaaggaagagaaggccaagtcacctatcacgaagatattaccgacgaactcagagcccaagcctcccaaggtcacgaaggcgaaatcacgaatcgaactggatgatttcgattcttcaacggaggaggagattgtgcccgagccaactcggcctgctcccgtggagccgaaggagccatcccaggacagacttttgcgcccaactctccctgggtcgtttcccgacagctatgtcagctcgatggcaccaaacgaaacaatatcaccgaccgaagagggtctatctgatgctcctacccaagtttcgcccatcactccttctgatccacctgcacttatgggtgacacgtcgagccaagaggatcgctcgtcgtctgtctcgtcatcatcgccagagctcatcgacacggctggcaatactcatagaaaccaagattcgatgacaacctcaacatcagcaacaaccacgtcgacttggaatgacgccaatctgcgcgcgttcttcgaatccggtagtgaggtcagagacttgttggtggtcgtgtacgataagaccgacatacccccagcagggcccgaccaccccatcgctgggccactattccgagagcaaaatgcaaagctggccgagataacaacacaattggacaacatgctcggagactatttggcccgaaagcaaagactgcgaggtacagtctagtgttgctcacacacctaatcttattgcacaactcgcaaagattattggactactttacctctccaggagtgaatgtctggacttttactatttctctgttttgttagtaatagctggcgtatggaatgttgattcgaaaggggcaagtgtttgcatgcagagcacaacggtcgataccaaagggattaacacaagatcaagttatttgatttctgctgtttctgaaatgatctatgagtatggaattgatgcacggataagccaaaatcgtgcctcggcgactgctttaagtacaatactcgccgacagagctataggaggtgacggggtggcttcgccgataaatacagctttgccgataaaacaacttcgccaacaacagaatttttgctgacgacacctttgccgacaacgctgggcacaactttgccagatcttcaactcaggctttcgtatatacaattcgggtgttgtacatatcaattggcttcaaacaggatgcgctatgctatccacttttaccaagcctggagctattattcacacggtctcaaaaaacattcttcagcattggagtatcaggggatacttctttcatcggcaagcacggacggaggtgaattgatgcgaacaatgtgtgcctaggcttagtcataggtagtcaatgttgcaaacaattcttcaccaaccattgttgcagagtagaacaaggcattccgtgacaaaatattttcattagaaattatttaaagtaagactcca

SEQ ID NO: 32964 - DNA, 3036 bp, Muscodor strobelii
  misc_feature: SGI cDNA ID NO. 571364
  misc_feature: Reduced expression when VOC is produced
  misc_feature: Encodes the peptide sequence at SEQ ID NO 32965
atgacgagacctcagatcatccgtgccgattccatcgatctccaagaccacgaagctccctccgccaaagaccaccgcggcgccgctgccaacccgactctgcattcccacgggccccttgccccccaccaggccgagacgatccgcgaggtcgaagaggagagggctgaggaggaggctcgcagcccgagggtgtcgtgggccaatggcgccgccgccgaccgtgacctccagcagtacgccgaagagctgagctcgggcattgccaattccctgaatggcaccgccatgcagcagcaagatgccctcgccattgcccagaacggcggcgtctccggccacggcgaagacgatggcgacatcgacaccaacaccgacgacgacctcgacgacgacatgatggacaggatctccagctccccctcgatcattgatggtgggtacacccttccgcccgtctggcctgcgcgcgtcgattccttgctcaattctcccctgcgcaactcgacacaaggctccccgtcgcgcagcagtatctcgcgagacagttctccgatgcccagtgaggcgagatcttcatccccctacctcgagccagcgccgtatctcccgctcatgaaccccaggcggcagttaagcaaggcttctgccccatcactttcaacttcaacttcacgcagtcatctctcgagcgagtgtgccgagtggggtagcgcagacgagtacgcctgcagtgactctaccgtgttgtattctcaggatcaagatcaggacgcggatcaggatggcgatactcctgaaacttcggactcaatcgaaggttcacgttcaggttcagtccttgagactcagcatctcagtgatttggagattccgccgtgcgaccgcgactcagctgtcgatctcaaagttgaagacttctccctcgaaggaccttacgccgatgaccatgaagttcatgcgcacggcgatggttacttatacgattctcttgtcatcccttatgaagaatctgaagatgaggagcaagatgatttcgccatcgaggctgatcccagatttgtcgattccggctggggtggagaatgcttacaagacgcagaggacatcgatttcgaattcgtctacgcactccacactttcgtggcaactgtcgagggccaggccaacgcgacaaaaggcgacactatggtacttctcgacgacagcaacagctactggtggctggtccgtgttgtgaaagatagtagtatcggctacttacctgcagagcacatcgaaacaccaacggaaaggcttgcccgtcttaacaaacatagaaatgtcgaactttcatcgacaacactgtcggaccacgacaccaagccgaagaaccctatcaagtctgccctgaggaggcacaagacaaagaatgttacatttacagcaccaacttacgtggactacgaagaaatagactattctgatgatgaagacgaggaaaatgatacccaaggtcaacagaatggtgcacaacaagacgaccaacggcagcaacaggcagctgaacagcaggctgtagcagagtcagttgaagatgacgaatctgcaaaggtcgagcctttgaaacctcgtgcccagaagcaagtgaaaccagaattgtccacaaccgatggagcctctcaaccagacccagatgccagaaatagcgacgagatcttcgacggcaagaacgagagggtcacccgcaatggtactgttagaaacacagattccttcttcagagacgaaaccatcgagaccaagaagataagcctgacacccggcttattacgagatgacaacgaaccacgaatatcgaatgattcaaaggacttgcgccaacggcctagcttcgaaaaagagctcgtctccgataagaacagagacgacaagaagaagaaagagaaggagaagaaggagaaggaaaagaagccgagcgctattcgaagcttcttctcccggaaggacaaaaagaagtctattgacgacgacgatgaatcatttggcaagaggtccaatgatttcagtggcggttatggagaggcagagatggtcgatgagccagaggacatggacggatcgcctcaaaaggggccatcacgtaatccgagcaagctgcaaaagacacagcgcaagaccgagccttcacctacccgtcggtcaggaccctcaacagcggcgcccttgggcgatacagaccttggacctcctctggctgctgaagtgaggacgaacaatgtcgcaaatgtgcctcctgcgactttaaggatggtggagtccgaacaggctgaaggatttgggatgcagacgcgcaaggaagagaaggccaagtcacctatcacgaagatattaccgacgaactcagagcccaagcctcccaaggtcacgaaggcgaaatcacgaatcgaactggatgatttcgattcttcaacggaggaggagattgtgcccgagccaactcggcctgctcccgtggagccgaaggagccatcccaggacagacttttgcgcccaactctccctgggtcgtttcccgacagctatgtcagctcgatggcaccaaacgaaacaatatcaccgaccgaagagggtctatctgatgctcctacccaagtttcgcccatcactccttctgatccacctgcacttatgggtgacacgtcgagccaagaggatcgctcgtcgtctgtctcgtcatcatcgccagagctcatcgacacggctggcaatactcatagaaaccaagattcgatgacaacctcaacatcagcaacaaccacgtcgacttggaatgacgccaatctgcgcgcgttcttcgaatccggtagtgaggtcagagacttgttggtggtcgtgtacgataagaccgacatacccccagcagggcccgaccaccccatcgctgggccactattccgagagcaaaatgcaaagctggccgagataacaacacaattggacaacatgctcggagactatttggcccgaaagcaaagactgcgaggtacagtctag

SEQ ID NO: 32965 - protein, 1011 aa, Muscodor strobelii
  misc_feature: SGI Peptide ID NO. 571364
  misc_feature (373)..(429): Pfam Id: PF00018 Pfam Desc: SH3 domain
  misc_feature (1)..(1011): NCBI GI: 256725736 Blast Desc: NECHADRAFT_94475 [Nectria haematococca mpVI 77-13-4]
  misc_feature (1)..(1009): NCBI GI: 39977073 Blast Desc: MGG_06439 [Magnaporthe grisea 70-15] gi|145016144|gb|EDK00634.1| MGG_06439 [Magnaporthe grisea 70-15]
  misc_feature (1)..(991): NCBI GI: 46116552 Blast Desc: FG04118.1 [Gibberella zeae PH-1]
  misc_feature (328)..(1011): NCBI GI: 171686034 Blast Desc: protein product [Podospora anserina] gi|170942978|emb|CAP68631.1| protein product [Podospora anserina]
  misc_feature (1)..(1011): NCBI GI: 116207458 Blast Desc: CHGG_03022 [Chaetomium globosum CBS 148.51] gi|88183619|gb|EAQ91087.1| CHGG_03022 [Chaetomium globosum CBS 148.51]
  misc_feature (1)..(1006): NCBI GI: 154309220 Blast Desc: BC1G_07504 [Botryotinia fuckeliana B05.10] gi|150852328|gb|EDN27520.1| BC1G_07504 [Botryotinia fuckeliana B05.10]
  misc_feature (1)..(1006): NCBI GI: 156058368 Blast Desc: SS1G_03195 [Sclerotinia sclerotiorum 1980] gi|154700983|gb|EDO00722.1| SS1G_03195 [Sclerotinia sclerotiorum 1980]
  misc_feature (366)..(1004): NCBI GI: 242806869 Blast Desc: SH3 domain protein, [Talaromyces stipitatus ATCC 10500] gi|218715459|gb|EED14881.1| SH3 domain protein, [Talaromyces stipitatus ATCC 10500]
  misc_feature (375)..(1004): NCBI GI: 212538345 Blast Desc: SH3 domain protein, [Penicillium marneffei ATCC 18224] gi|210069070|gb|EEA23161.1| SH3 domain protein, [Penicillium marneffei ATCC 18224]
  misc_feature (366)..(1006): NCBI GI: 119495575 Blast Desc: SH3 domain protein, [Neosartorya fischeri NRRL 181] gi|119412731|gb|EAW22672.1| SH3 domain protein, [Neosartorya fischeri NRRL 181]
  misc_feature: Useful for introducing or modulating the production of volatile compounds
MTRPQIIRADSIDLQDHEAPSAKDHRGAAANPTLHSHGPLAPHQAETIREVEEERAEEEARSPRVSWANGAAADRDLQQYAEELSSGIANSLNGTAMQQQDALAIAQNGGVSGHGEDDGDIDTNTDDDLDDDMMDRISSSPSIIDGGYTLPPVWPARVDSLLNSPLRNSTQGSPSRSSISRDSSPMPSEARSSSPYLEPAPYLPLMNPRRQLSKASAPSLSTSTSRSHLSSECAEWGSADEYACSDSTVLYSQDQDQDADQDGDTPETSDSIEGSRSGSVLETQHLSDLEIPPCDRDSAVDLKVEDFSLEGPYADDHEVHAHGDGYLYDSLVIPYEESEDEEQDDFAIEADPRFVDSGWGGECLQDAEDIDFEFVYALHTFVATVEGQANATKGDTMVLLDDSNSYWWLVRVVKDSSIGYLPAEHIETPTERLARLNKHRNVELSSTTLSDHDTKPKNPIKSALRRHKTKNVTFTAPTYVDYEEIDYSDDEDEENDTQGQQNGAQQDDQRQQQAAEQQAVAESVEDDESAKVEPLKPRAQKQVKPELSTTDGASQPDPDARNSDEIFDGKNERVTRNGTVRNTDSFFRDETIETKKISLTPGLLRDDNEPRISNDSKDLRQRPSFEKELVSDKNRDDKKKKEKEKKEKEKKPSAIRSFFSRKDKKKSIDDDDESFGKRSNDFSGGYGEAEMVDEPEDMDGSPQKGPSRNPSKLQKTQRKTEPSPTRRSGPSTAAPLGDTDLGPPLAAEVRTNNVANVPPATLRMVESEQAEGFGMQTRKEEKAKSPITKILPTNSEPKPPKVTKAKSRIELDDFDSSTEEEIVPEPTRPAPVEPKEPSQDRLLRPTLPGSFPDSYVSSMAPNETISPTEEGLSDAPTQVSPITPSDPPALMGDTSSQEDRSSSVSSSSPELIDTAGNTHRNQDSMTTSTSATTTSTWNDANLRAFFESGSEVRDLLVVVYDKTDIPPAGPDHPIAGPLFREQNAKLAEITTQLDNMLGDYLARKQRLRGTV

SEQ ID NO: 32966 - DNA, 3653 bp, Muscodor strobelii; identical to SEQ ID NO: 32963
  misc_feature: SGI EST ID NO. CUFF.77963.0
  misc_feature: Variant of the nucleotide sequence at SEQ ID NO 32964

SEQ ID NO: 32967 - DNA, 231 bp, Muscodor strobelii
  misc_feature: SGI cDNA ID NO. 571365
  misc_feature: Encodes the peptide sequence at SEQ ID NO 32968
atggcaccaaaatacaaaaacggccaaacggtgcgctacaagcccgtcggaggaccaagctccaacacatcagagagcacaggcaagatcaccgacattctacaagagctcggtacgcaagcaggcttgaacgtgcaagcttctgctgatgagccccgatacgagatccgcaatgacaacaccggcaagatgacgagcatctacgagtcgaatatcatgggcggtgcttga

SEQ ID NO: 32968 - protein, 76 aa, Muscodor strobelii
  misc_feature: SGI Peptide ID NO. 571365
  misc_feature (1)..(74): NCBI GI: 169859402 Blast Desc: CC1G_06426 [Coprinopsis cinerea okayama7#130] gi|116502630|gb|EAU85525.1| CC1G_06426 [Coprinopsis cinerea okayama7#130]
  misc_feature (3)..(76): NCBI GI: 115397223 Blast Desc: conserved [Aspergillus terreus NIH2624] gi|114192394|gb|EAU34094.1| conserved [Aspergillus terreus NIH2624]
  misc_feature (1)..(74): NCBI GI: 169857350 Blast Desc: CC1G_10253 [Coprinopsis cinerea okayama7#130] gi|116503636|gb|EAU86531.1| CC1G_10253 [Coprinopsis cinerea okayama7#130]
  misc_feature (5)..(76): NCBI GI: 164422829 Blast Desc: NCU09630 [Neurospora crassa OR74A] gi|16944452|emb|CAB91416.2| [Neurospora crassa] gi|157069839|gb|EAA34158.2| conserved [Neurospora crassa OR74A]
  misc_feature (3)..(76): NCBI GI: 121704497 Blast Desc: conserved [Aspergillus clavatus NRRL 1] gi|119398657|gb|EAW09086.1| conserved [Aspergillus clavatus NRRL 1]
  misc_feature (3)..(76): NCBI GI: 255946371 Blast Desc: Pc20g14780 [Penicillium chrysogenum Wisconsin 54-1255] gi|211588688|emb|CAP86807.1| Pc20g14780 [Penicillium chrysogenum Wisconsin 54-1255]
  misc_feature (3)..(73): NCBI GI: 238842527 Blast Desc: conserved [Microsporum canis CBS 113480]
  misc_feature (5)..(74): NCBI GI: 171681230 Blast Desc: protein product [Podospora anserina] gi|170940573|emb|CAP65801.1| protein product [Podospora anserina]
  misc_feature (3)..(76): NCBI GI: 238505818 Blast Desc: conserved [Aspergillus flavus NRRL3357] gi|220690226|gb|EED46576.1| conserved [Aspergillus flavus NRRL3357]
  misc_feature (3)..(76): NCBI GI: 67524029 Blast Desc: AN2471.2 [Aspergillus nidulans FGSC A4] gi|40744633|gb|EAA63789.1| AN2471.2 [Aspergillus nidulans FGSC A4] gi|259487892|tpe|CBF86925.1| TPA: [Aspergillus nidulans FGSC
MAPKYKNGQTVRYKPVGGPSSNTSESTGKITDILQELGTQAGLNVQASADEPRYEIRNDNTGKMTSIYESNIMGGA

SEQ ID NO: 32969 - DNA, 429 bp, Muscodor strobelii
  misc_feature: SGI cDNA ID NO. 571366
  misc_feature: Encodes the peptide sequence at SEQ ID NO 32970
atgcccgtgtcccacgtatccctcgcaaccggcgtgtcctcgttcgccctgatgcgaacattctatctcaaagccctcgcgccactaggctacgtaacatactacgaccaagagaacttcatgctcggtctcaagcccgtcggtaaattcccagacttctggatacatgtcggcaatggagaacaacccgccctaccagccaacaccaatgcagagaatcgtccaggccgcacgcacgtggcgtttgatgcggagtcgcctaaggtagtagatgagtggtacgatgctgctattaaagccggcggcatctgcaacggcaagccgggcctgcgcgcggaattctccgagccctactatgcggcgtttgtcctcgatcccctgggaaacaacattgaggccgttcactatgcgcggacggagccctggtaa

SEQ ID NO: 32970 - protein, 142 aa, Muscodor strobelii
  misc_feature: SGI Peptide ID NO. 571366
  misc_feature (1)..(135): NCBI GI: 46137761 Blast Desc: FG10396.1 [Gibberella zeae PH-1]
  misc_feature (1)..(135): NCBI GI: 256720910 Blast Desc: NECHADRAFT_49822 [Nectria haematococca mpVI 77-13-4]
  misc_feature (1)..(134): NCBI GI: 119196175 Blast Desc: [Coccidioides immitis RS] gi|240110663|gb|EER28821.1| CPC735_040850 [Coccidioides posadasii C735 delta SOWgp]
  misc_feature (1)..(134): NCBI GI: 154287062 Blast Desc: conserved [Ajellomyces capsulatus NAm1] gi|150407967|gb|EDN03508.1| conserved [Ajellomyces capsulatus NAm1]
  misc_feature (1)..(134): NCBI GI: 258569855 Blast Desc: [Uncinocarpus reesii 1704] gi|237904001|gb|EEP78402.1| [Uncinocarpus reesii 1704]
  misc_feature (1)..(134): NCBI GI: 261193102 Blast Desc: glyoxalase/bleomycin resistance protein/dioxygenase [Ajellomyces dermatitidis SLH14081] gi|239589092|gb|EEQ71735.1| glyoxalase/bleomycin resistance protein/dioxygenase [Ajellomyces
  misc_feature (12)..(134): NCBI GI: 160897643 Blast Desc: glyoxalase/bleomycin resistance protein/dioxygenase [Delftia acidovorans SPH-1] gi|160363227|gb|ABX34840.1| Glyoxalase/bleomycin resistance protein/dioxygenase [Delftia
  misc_feature (1)..(134): NCBI GI: 240273783 Blast Desc: glyoxalase/bleomycin resistance protein/dioxygenase [Ajellomyces capsulatus H143]
  misc_feature (1)..(134): NCBI GI: 225555474 Blast Desc: glyoxalase/bleomycin resistance protein/dioxygenase [Ajellomyces capsulatus G186AR]
  misc_feature (1)..(134): NCBI GI: 239613673 Blast Desc: glyoxalase/bleomycin resistance protein/dioxygenase [Ajellomyces dermatitidis ER-3]
MPVSHVSLATGVSSFALMRTFYLKALAPLGYVTYYDQENFMLGLKPVGKFPDFWIHVGNGEQPALPANTNAENRPGRTHVAFDAESPKVVDEWYDAAIKAGGICNGKPGLRAEFSEPYYAAFVLDPLGNNIEAVHYARTEPW

SEQ ID NO: 32971 - DNA, 613 bp, Muscodor strobelii
  misc_feature: SGI EST ID NO. CUFF.77970.0
  misc_feature: Variant of the nucleotide sequence at SEQ ID NO 32969
tcggaactccgtgcagatacaatcagcaagctggagatcttgactcaactatacaagtcggcaacatgtatataagactagatggtcccaaacaacgaagcatgtgttcatagaaacaacatcaaatctcaaagccagaatatcaactttcaacaattttcaattgaaaaagccacaccatctccatcatgcccgtgtcccacgtatccctcgcaaccggcgtgtcctcgttcgccctgatgcgaacattctatctcaaagccctcgcgccactaggctacgtaacatactacgaccaagagaacttcatgctcggtctcaagcccgtcggtaaattcccagacttctggatacatgtcggcaatggagaacaacccgccctaccagccaacaccaatgcagagaatcgtccaggccgcacgcacgtggcgtttgatgcggagtcgcctaaggtagtagatgagtggtacgatgctgctattaaagccggcggcatctgcaacggcaagccgggcctgcgcgcggaattctccgagccctactatgcggcgtttgtcctcgatcccctgggaaacaacattgaggccgttcactatgcgcggacggagccctg

SEQ ID NO: 32972 - DNA, 2013 bp, Muscodor strobelii
  misc_feature: SGI cDNA ID NO. 571367
  misc_feature: Encodes the peptide sequence at SEQ ID NO 32973
atgtccgactcaattcaacatccggcaagcttgtcacctccaccaacgtctaccacggcggatcaaaacgccagaggagcctataatccccgaaaaagaggtcggaccgcttgttcaagatgtaaacatagaaaacagaaatgtgatgaccagtggccttcctgttccaactgtagaaaagcagggacggagtgcgacaagtctgctgtttctgaagatgaaccaccggcggcgtacactcgtgctttggagcagcgtgttgctcttctagaggctcgactatccgaagtgagcggccaagaagggcaagagatatcccaaaccccaagtagtactacacgaacacagcctagaaacaacgttcttgctgaagctgtagaactacttgctctcggcaatatagaagctcctgcctatgttggcgcgtcttcgggccttaacctggcattaacgctgggtgagatggtgcaagcgactgtatggaataaagccttgccccttgaagccgaaggagcacagagcagcaacagtgacagtccgaggacgaacaggggtggtcgtgttctcacgcggcaagaaatggtctctcgaagtgcagaaccaccaagtgatgaacacggaacgttgcttgtgaatgcttacttaaatcaaccccataatcgatatccatttcttgatgagagcgaactctgggctctccacgcgaagcgcatgtcgctcaactctacacccgtacaacagctcactaaagctgagcgttttggtttattcaagctgaacatggtctacgcagtaggggctatgttaattcagctgacagagagacgcacgacaacgccacccgaagactattacatgacggcacttagatatgtgtctaccgctaaagagtcaaaaacaacacaaaacgtggaggcgatgttgcttctggttatttaccacgttcgaagctcgagctatggcatatggtacatgataggcttggccatgcgtacttgcatcgatcttggtttgcacacgaaacgacacgagagaaatctggacccttacgcgattcaaatgcgccgccgactattctggagtgtctatgctctagaaagaactattgcaatctgtcttgggcgacctttgagcataccggacagacaaattgacgtggagttaccgctagatgttgtcgaaggtggtggctgggaagagatgtcgtctacaaagctgacgggtacacctaagaaaaactctctttctatgactatcatgttgttcaaaatgcggagaatcgagtcgcgcattcaattctctatttaccgcgcagacaaacctctctctgctcttacgcccaaattaaatcaactttaccaagatctcgaaatgtggaaaacatcactagaagagcgattcggcggtatcgacctcaattatcctatgttgcattatcaccgtgcagtaagattactcatacagccgttcttgtcgctcttaacgccgtcagatccatactatttgatctgcatgcgtgctgcaggaggcgtatgccaggcacacaaaaagctacaccaatctttagaatacggacattccttcattgccgtgcaaactgtcttcgtcgcaggaattacactgctctacggtctttggacacagcagcacgctatctggtccgtggccatgtctaacgatcttcgggcttgctcattagtcttatttgtgatgggagaacgagccccgtgggtgcggaaatatcgcgatgcattcgaagttttagttaatgcaaccatggaaaaactcgagaacggagtcaataatctagcggagacagcagcagtccagatgcggaatgtgacaaacaataactccgagttggcgaccgaaaatttcgatagtttcgtccagggcgaagacggcgatgcttggaaagtggttgctgagcttgccaactggattgatcagccggaaggctctatggtctggatgccagacttcgagctgttgcagaacttatcacctgtgtaa

SEQ ID NO: 32973 - protein, 670 aa, Muscodor strobelii
  misc_feature: SGI Peptide ID NO. 571367
  misc_feature (36)..(75): Pfam Id: PF00172 Pfam Desc: Fungal Zn(2)-Cys(6) binuclear cluster domain
  misc_feature (300)..(395): Pfam Id: PF04082 Pfam Desc: Fungal specific transcription factor domain
  misc_feature (11)..(668): NCBI GI: 255935727 Blast Desc: Pc13g04550 [Penicillium chrysogenum Wisconsin 54-1255] gi|211583510|emb|CAP91524.1| Pc13g04550 [Penicillium chrysogenum Wisconsin 54-1255]
  misc_feature (28)..(668): NCBI GI: 71000954 Blast Desc: C6 transcription factor [Aspergillus fumigatus Af293] gi|66852796|gb|EAL93120.1| C6 transcription factor, [Aspergillus fumigatus Af293] gi|159129252|gb|EDP54366.1| C6 transcription
  misc_feature (28)..(668): NCBI GI: 119480613 Blast Desc: C6 transcription factor, [Neosartorya fischeri NRRL 181] gi|119408489|gb|EAW18438.1| C6 transcription factor, [Neosartorya fischeri NRRL 181]
  misc_feature (28)..(668): NCBI GI: 242776283 Blast Desc: C6 transcription factor, [Talaromyces stipitatus ATCC 10500] gi|218722433|gb|EED21851.1| C6 transcription factor, [Talaromyces stipitatus ATCC 10500]
  misc_feature (7)..(668): NCBI GI: 259479635 Blast Desc: TPA: Zn(II)2Cys6 transcription factor (Eurofung) [Aspergillus nidulans FGSC A4]
  misc_feature (27)..(665): NCBI GI: 212538137 Blast Desc: C6 transcription factor, [Penicillium marneffei ATCC 18224] gi|210068966|gb|EEA23057.1| C6 transcription factor, [Penicillium marneffei ATCC 18224]
  misc_feature (84)..(668): NCBI GI: 121698213 Blast Desc: C6 transcription factor, [Aspergillus clavatus NRRL 1] gi|119395892|gb|EAW06324.1| C6 transcription factor, [Aspergillus clavatus NRRL 1]
  misc_feature (7)..(668): NCBI GI: 67540006 Blast Desc: AN6173.2 [Aspergillus nidulans FGSC A4] gi|40738769|gb|EAA57959.1| AN6173.2 [Aspergillus nidulans FGSC A4]
  misc_feature (79)..(668): NCBI GI: 169783978 Blast Desc: [Aspergillus oryzae RIB40] gi|83775195|dbj|BAE65318.1| protein product [Aspergillus oryzae]
  misc_feature (109)..(667): NCBI GI: 145236032 Blast Desc: protein product [Aspergillus niger] gi|134075114|emb|CAK39124.1| protein product [Aspergillus niger]
MSDSIQHPASLSPPPTSTTADQNARGAYNPRKRGRTACSRCKHRKQKCDDQWPSCSNCRKAGTECDKSAVSEDEPPAAYTRALEQRVALLEARLSEVSGQEGQEISQTPSSTTRTQPRNNVLAEAVELLALGNIEAPAYVGASSGLNLALTLGEMVQATVWNKALPLEAEGAQSSNSDSPRTNRGGRVLTRQEMVSRSAEPPSDEHGTLLVNAYLNQPHNRYPFLDESELWALHAKRMSLNSTPVQQLTKAERFGLFKLNMVYAVGAMLIQLTERRTTTPPEDYYMTALRYVSTAKESKTTQNVEAMLLLVIYHVRSSSYGIWYMIGLAMRTCIDLGLHTKRHERNLDPYAIQMRRRLFWSVYALERTIAICLGRPLSIPDRQIDVELPLDVVEGGGWEEMSSTKLTGTPKKNSLSMTIMLFKMRRIESRIQFSIYRADKPLSALTPKLNQLYQDLEMWKTSLEERFGGIDLNYPMLHYHRAVRLLIQPFLSLLTPSDPYYLICMRAAGGVCQAHKKLHQSLEYGHSFIAVQTVFVAGITLLYGLWTQQHAIWSVAMSNDLRACSLVLFVMGERAPWVRKYRDAFEVLVNATMEKLENGVNNLAETAAVQMRNVTNNNSELATENFDSFVQGEDGDAWKVVAELANWIDQPEGSMVWMPDFELLQNLSPV

SEQ ID NO: 32974 - DNA, 916 bp, Muscodor strobelii
  misc_feature: SGI EST ID NO. CUFF.77984.0
  misc_feature: Variant of the nucleotide sequence at SEQ ID NO 32972
acgacacaagcctgcgtaggtatcttcaaatcggatgtccgtcgcgcctcgttacacagggcgcccgtgacttagtcattgctcactatgtccgactcaattcaacatccggcaagcttgtcacctccaccaacgtctaccacggcggatcaaaacgccagaggagcctataatccccgaaaaagaggtcggaccgcttgttcaagatgtaaacatagaaaacagaaatgtgatgaccagtggccttcctgttccaactgtagaaaagcagggacggagtgcgacaagtctgctgtttctgaagatgaaccaccggcggcgtacactcgtgctttggagcagcgtgttgctcttctagaggctcgactatccgaagtgagcggccaagaagggcaagagatatcccaaaccccaagtagtactacacgaacacagcctagaaacaacgttcttgctgaagctgtagaactacttgctctcggcaatatagaagctcctgcctatgttggcgcgtcttcgggccttaacctggcattaacgctgggtgagatggtgcaagcgactgtatggaataaagccttgccccttgaagccgaaggagcacagagcagcaacagtgacagtccgaggacgaacaggggtggtcgtgttctcacgcggcaagaaatggtctctcgaagtgcagaaccaccaagtgatgaacacggaacgttgcttgtgaatgcttacttaaatcaaccccataatcgatatccatttcttgatgagagcgaactctgggctctccacgcgaagcgcatgtcgctcaactctacacccgtacaacagctcactaaagctgagcgttttggtttattcaagctgaacatggtctacgcagtaggggctatgttaattcagctgacagagagacgca

SEQ ID NO: 32975 - DNA, 1671 bp, Muscodor strobelii
  misc_feature: SGI cDNA ID NO. 571368
  misc_feature: Encodes the peptide sequence at SEQ ID NO 32976
atgagcagtcgacaacaggctgccgagcggtctctccataaccaggtgaacctcctaccaaggggaaaactcctggttgtgttcgcagggttatctctaactctcctcatttcattcattgatcaaaatggaattggagtcatgttgccgacaattgcaaaggatctcgacgcaagagccaccatatcctgggcaggaacatcctccctcatcgccaacacgacatttcagatgctatacggccgactctctgatatcttcggccgaaaagtagtgtatctaggagctacggcatctctggcccttgcggctcttctctgtggactttcacagaatgctgccatgttctatgtttttcgtggtattgcaggaattggtggaggtggtctagcgaatctgtcgatgattatagtctcagacattgtcactctggagcagagaggtaaataccagggcatcataggctcttgtgttggacttggtaacgttatcggcccattcctcgcggctgctttcatcagtcgtgtgacctggcgagcattttggtggctgttagcgcccttgacggcagcagttggagtcatgtcgttcttcctgcttccttcgatgccgccaacggtgcattttagagaaagcttgaagaagattgattatgctggcgttatattatcctctattggggtgatttttcttctcatccctattagtggcggcggcgcctacttcttgtggaactctccgatggtgatcagcatgctggtcataggagcaatctcttgggtattctttattttatgggaatggaaaggcgccaggctacctatgctgcccgtgcaattcttccggaatcctgtactatgcgttctgctgactcagagctttcttctcggtgccgtgtatcaagcgtatctgtactaccttccactatatctccagaatgcgaggcaattctcggtgctacaaagtgctgccatcgttgccactttggtggttacgcaagccgtcacatccatcatatcgggatattatatctcccatttcaaacgatggaaggaagtgatctttactgggttcagcgcctggctccttggcgctggactggctctattgtacaagcgcgactcgtcggctggcatgatcgtaggacctctcatcttgattggatttggagtgggtaatgtatttcagcctaccctcgtcgccgtgcaatctcacgttacaaaatcacggagggctgttgcgatttcgaatcgaaacttctttcgatgcggtggcggtgcagttgggcttgcagtttctgctgcagtccttcaagctgctcttcgagcaaatttgcctgctgaatatcgatccattgcgaatgatgcgtattcgttgcccagtctgacagggccgggtcgtgatgtcgttttagatgcgttcatggctgcaagccatgcggtgttcattttgcaaatacctctgcttggggtttgctttctcggctgtttctttctcaaagatcgtggattgcagccaatggaagaagagggagagagaaagagagacgaggagtcaaatgatgaacaagatctccagcagcatcaggagaaaagcacatccgacagggataatcaacctggtgagccggagcaaccgaccacgaagccagttgcaagtggcgttccgtaa

SEQ ID NO: 32976 - protein, 556 aa, Muscodor strobelii
  misc_feature: SGI Peptide ID NO. 571368
  misc_feature (31)..(430): Pfam Id: PF07690 Pfam Desc: Major Facilitator Superfamily
  misc_feature (31)..(215): Pfam Id: PF07690 Pfam Desc: Major Facilitator Superfamily
  misc_feature (224)..(430): Pfam Id: PF07690 Pfam Desc: Major Facilitator Superfamily
  misc_feature (3)..(551): NCBI GI: 67527861 Blast Desc: AN4180.2 [Aspergillus nidulans FGSC A4] gi|40740089|gb|EAA59279.1| AN4180.2 [Aspergillus nidulans FGSC A4] gi|259481221|tpe|CBF74543.1| TPA: MFS transporter, nidulans
  misc_feature (3)..(545): NCBI GI: 145236028 Blast Desc: protein product [Aspergillus niger] gi|134075112|emb|CAK39122.1| protein product [Aspergillus niger]
  misc_feature (3)..(538): NCBI GI: 238493809 Blast Desc: MFS transporter, [Aspergillus flavus NRRL3357] gi|220696635|gb|EED52977.1| MFS transporter, [Aspergillus flavus NRRL3357]
  misc_feature (8)..(505): NCBI GI: 256723033 Blast Desc: NECHADRAFT_97444 [Nectria haematococca mpVI 77-13-4]
  misc_feature (3)..(549): NCBI GI: 255935729 Blast Desc: Pc13g04560 [Penicillium chrysogenum Wisconsin 54-1255] gi|211583511|emb|CAP91525.1| Pc13g04560 [Penicillium chrysogenum Wisconsin 54-1255]
  misc_feature (3)..(549): NCBI GI: 159129251 Blast Desc: MFS transporter, [Aspergillus fumigatus A1163]
  misc_feature (3)..(549): NCBI GI: 71000952 Blast Desc: MFS transporter [Aspergillus fumigatus Af293] gi|66852795|gb|EAL93119.1| MFS transporter, [Aspergillus fumigatus Af293]
  misc_feature (4)..(549): NCBI GI: 242776278 Blast Desc: MFS transporter, [Talaromyces stipitatus ATCC 10500] gi|218722432|gb|EED21850.1| MFS transporter, [Talaromyces stipitatus ATCC 10500]
  misc_feature (4)..(547): NCBI GI: 258574277 Blast Desc: conserved [Uncinocarpus reesii 1704] gi|237901586|gb|EEP75987.1| conserved [Uncinocarpus reesii 1704]
  misc_feature (3)..(545): NCBI GI: 115442956 Blast Desc: conserved [Aspergillus terreus NIH2624] gi|114188154|gb|EAU29854.1| conserved [Aspergillus terreus NIH2624]
MSSRQQAAERSLHNQVNLLPRGKLLVVFAGLSLTLLISFIDQNGIGVMLPTIAKDLDARATISWAGTSSLIANTTFQMLYGRLSDIFGRKVVYLGATASLALAALLCGLSQNAAMFYVFRGIAGIGGGGLANLSMIIVSDIVTLEQRGKYQGIIGSCVGLGNVIGPFLAAAFISRVTWRAFWWLLAPLTAAVGVMSFFLLPSMPPTVHFRESLKKIDYAGVILSSIGVIFLLIPISGGGAYFLWNSPMVISMLVIGAISWVFFILWEWKGARLPMLPVQFFRNPVLCVLLTQSFLLGAVYQAYLYYLPLYLQNARQFSVLQSAAIVATLVVTQAVTSIISGYYISHFKRWKEVIFTGFSAWLLGAGLALLYKRDSSAGMIVGPLILIGFGVGNVFQPTLVAVQSHVTKSRRAVAISNRNFFRCGGGAVGLAVSAAVLQAALRANLPAEYRSIANDAYSLPSLTGPGRDVVLDAFMAASHAVFILQIPLLGVCFLGCFFLKDRGLQPMEEEGERKRDEESNDEQDLQQHQEKSTSDRDNQPGEPEQPTTKPVASGVP

SEQ ID NO: 32977 - DNA, 3104 bp, Muscodor strobelii
  misc_feature: SGI EST ID NO. CUFF.78018.1
  misc_feature: Variant of the nucleotide sequence at SEQ ID NO 32975
gcaaaaaattagattaccgtgcatcggacactattcaacatgagcagtcgacaacaggctgccgagcggtctctccataaccaggtgaacctcctaccaaggggaaaactcctggttgtgttcgcagggttatctctaactctcctcatttcattcattgatcaaaatggaattggagtcatgttgccgacaattgcaaaggatctcgacgcaagagccaccatatcctgggcaggaacatcctccctcatcgccaacacgacatttcagatgctatacggccgactctctgatatcttcggccgaaaagtagtgtatctaggagctacggcatctctggcccttgcggctcttctctgtggactttcacagaatgctgccatgttctatgtttttcgtggtattgcaggaattggtggaggtggtctagcgaatctgtcgatgattatagtctcagacattgtcactctggagcagagaggtaaataccagggcatcataggctcttgtgttggacttggtaacgttatcggcccattcctcgcggctgctttcatcagtcgtgtgacctggcgagcattttggtggctgttagcgcccttgacggcagcagttggagtcatgtcgttcttcctgcttccttcgatgccgccaacggtgcattttagagaaagcttgaagaagattgattatgctggcgttatattatcctctattggggtgatttttcttctcatccctattagtggcggcggcgcctacttcttgtggaactctccgatggtgatcagcatgctggtcataggagcaatctcttgggtattctttattttatgggaatggaaaggcgccaggctacctatgctgcccgtgcaattcttccggaatcctgtactatgcgttctgctgactcagagctttcttctcggtgccgtgtatcaagcgtatctgtactaccttccactatatctccagaatgcgaggcaattctcggtgctacaaagtgctgccatcgttgccactttggtggttacgcaagccgtcacatccatcatatcgggatattatatctcccatttcaaacgatggaaggaagtgatctttactgggttcagcgcctggctccttggcgctggactggctctattgtacaagcgcgactcgtcggctggcatgatcgtaggacctctcatcttgattggatttggagtgggtaatgtatttcagcctaccctcgtcgccgtgcaatctcacgttacaaaatcacggagggctgttgcgatttcgaatcgaaacttctttcgatgcggtggcggtgcagttgggcttgcagtttctgctgcagtccttcaagctgctcttcgagcaaatttgcctgctgaatatcgatccattgcgaatgatgcgtattcgttgcccagtctgacagggccgggtcgtgatgtcgttttagatgcgttcatggctgcaagccatgcggtgttcattttgcaaatacctctgcttggggtttgctttctcggctgtttctttctcaaagatcgtggattgcagccaatggaagaagagggagagagaaagagagacgaggagtcaaatgatgaacaagatctccagcagcatcaggagaaaagcacatccgacagggataatcaacctggtgagccggagcaaccgaccacgaagccagttgcaagtggcgttccgtaatgtcgatagcagcattagtctcaaatagtcagcgttggcattagtaatctgtctccaagctagaaattgttagattcatgcactaataacgaaccaccataatcaaaaggtagtgaatgtgcccgtgcttaggtaagagccatactgagagtcttccaaaaatgcttttaattaaccgccaaccggagctttttgcatcaagagcctttcgagaacgcagataataagaaatattccttacacaggtgataagttctgcaacagctcgaagtctggcatccagaccatagagccttccggctgatcaatccagttggcaagctcagcaaccactttccaagcatcgccgtcttcgccctggacgaaactatcgaaattttcggtcgccaactcggagttattgtttgtcacattccgcatctggactgctgctgtctccgctagattattgactccgttctcgagtttttccatggttgcattaactaaaacttcgaatgcatcgcgatatttccgcacccacggggctcgttctcccatcacaaataagactaatgagcaagcccgaagatcgttagacatggccacggaccagatagcgtgctgctgtgtccaaagaccgtagagcagtgtaattcctgcgacgaagacagtttgcacggcaatgaaggaatgtccgtattctaaagattggtgtagctttttgtgtgcctggcatacgcctcctgcagcacgcatgcagatcaaatagtatggatctgacggcgttaagagcgacaagaacggctgtatgagtaatcttactgcacggtgataatgcaacataggataattgaggtcgataccgccgaatcgctcttctagtgatgttttccacatttcgagatcttggtaaagttgatttaatttgggcgtaagagcagagagaggtttgtctgcgcggtaaatagagaattgaatgcgcgactcgattctccgcattttgaacaacatgatagtcatagaaagagagtttttcttaggtgtacccgtcagctttgtagacgacatctcttcccagccaccaccttcgacaacatctagcggtaactccacgtcaatttgtctgtccggtatgctcaaaggtcgcccaagacagattgcaatagttctttctagagcatagacactccagaatagtcggcggcgcatttgaatcgcgtaagggtccagatttctctcgtgtcgtttcgtgtgcaaaccaagatcgatgcaagtacgcatggccaagcctatcatgtaccatatgccatagctcgagcttcgaacgtggtaaataaccagaagcaacatcgcctccacgttttgtgttgtttttgactctttagcggtagacacatatctaagtgccgtca

SEQ ID NO: 32978 - DNA, 522 bp, Muscodor strobelii
  misc_feature: SGI cDNA ID NO. 571369
  misc_feature: Encodes the peptide sequence at SEQ ID NO 32979
atgtctacctctcaagcagcgtctacttcgaatccagaatacgctcaagtgagtgaaaaccttatccgcaaacttactgacacgagagaggcgttggagcgtttagtcgcattgccttggaagctctatgacccagcagatgaggatatcgtcaacgagcagatgttgaaagtattgccccagcttacacgtacggttattcgcattgagcagttaactgtagattatcagtcggcgtcatttccacgagaagctgcgaccattcgtcaaagagaacaccacgtttcgtggttagttgacattgctaaagcgcagatgaatgttcttcaaatcatggaacgtcagttgagcgaaaagccgaatggacgactccgaaagttcagacaattggatgaggctattattgtcaaaatttatactgtcgaaaaccttattgttgatggtgcatctgcgtacgcagatacaggcgactaccaccacatgcttgtcgatcattttccccagggtccgatatttctgtaa

SEQ ID NO: 32979 - protein, 173 aa, Muscodor strobelii
  misc_feature: SGI Peptide ID NO. 571369
MSTSQAASTSNPEYAQVSENLIRKLTDTREALERLVALPWKLYDPADEDIVNEQMLKVLPQLTRTVIRIEQLTVDYQSASFPREAATIRQREHHVSWLVDIAKAQMNVLQIMERQLSEKPNGRLRKFRQLDEAIIVKIYTVENLIVDGASAYADTGDYHHMLVDHFPQGPIFL

SEQ ID NO: 32980 - DNA, 1014 bp, Muscodor strobelii
  misc_feature: SGI cDNA ID NO. 571370
  misc_feature: Elevated expression when VOC is produced
  misc_feature: Encodes the peptide sequence at SEQ ID NO 32981
atgattgtctcgggagtgattcccgctatattgggaaatgcggctgacaaagttggccggcggccagtctacatccttgctctctccgtatatttgattgccaatattggtttggcactacagaaaaactatcctactcttctagtactacgaatgctgcagagcgcaggaagttcaggaacgatctcgcttggctatgggatcattgctgaccttgcagcgccctgtgaacgagggtcatacgtcggcatattttctcttggaccaaacgtagcacccccccttggacctgtcatcggaggtgttctttccgctaagctcggctggagatcgatcttttggttcctcgtaatattcggaggtctctgcttgttgacgatcatcgttgctcttccagaaacggcacgtagcattgtcggcaatgggagcgtccctgccactggcgtcaatcgaaccctatggtctgttttcttgtcgaaacaagagaagaatgaagtgtcccctttacccaaaaagggtaaagttctggatttcgaatatgctagagttgcgaaaagtaaaggtttcgatgtcacagaggtcaaaaaagaaagcgtcgatgacttccctatagagttggctcggttgcgtagtgtgttctacctcgtcgtcgcgacagccgcaggtatcacagcatatggctgggctgtgcaagcgcgtgtgcacgtggccggaccactagtaatccaagccattattggctttaccatatcggcggcattcgttgcctttggtactttggtcacggacctcaatccgaatagatcgtcgacagcagcagcctccgcaaatatagtacgatgcttactggctgcagctgggacagcggctttacaaccgattatcgatggggtcggacccggttggtgttttacaatcttcgggggtctcattggaatctgcgggcccttattgttgctcgaggtgaaaattggacctgcgtggagaaagcgcagagcacaaacatctacatga

SEQ ID NO: 32981 - protein, 337 aa, Muscodor strobelii
  misc_feature: SGI Peptide ID NO. 571370
  misc_feature (1)..(288): Pfam Id: PF07690 Pfam Desc: Major Facilitator Superfamily
  misc_feature (1)..(134): Pfam Id: PF07690 Pfam Desc: Major Facilitator Superfamily
  misc_feature (1)..(329): NCBI GI: 119176154 Blast Desc: CIMG_09822 [Coccidioides immitis RS]
  misc_feature (1)..(332): NCBI GI: 212543579 Blast Desc: conserved [Penicillium marneffei ATCC 18224] gi|210066851|gb|EEA20944.1| conserved [Penicillium marneffei ATCC 18224]
  misc_feature (1)..(337): NCBI GI: 256720826 Blast Desc: NECHADRAFT_50131 [Nectria haematococca mpVI 77-13-4]
  misc_feature (1)..(328): NCBI GI: 242787158 Blast Desc: florfenicol exporter, [Talaromyces stipitatus ATCC 10500] gi|218721094|gb|EED20513.1| florfenicol exporter, [Talaromyces stipitatus ATCC 10500]
  misc_feature (1)..(332): NCBI GI: 154293367 Blast Desc: BC1G_13705 [Botryotinia fuckeliana B05.10] gi|150845362|gb|EDN20555.1| BC1G_13705 [Botryotinia fuckeliana B05.10]
  misc_feature (1)..(165): NCBI GI: 240108759 Blast Desc: Major Facilitator Superfamily protein [Coccidioides posadasii C735 delta SOWgp]
  misc_feature (1)..(334): NCBI GI: 258575811 Blast Desc: conserved [Uncinocarpus reesii 1704] gi|237902353|gb|EEP76754.1| conserved [Uncinocarpus reesii 1704]
  misc_feature (1)..(337): NCBI GI: 255930825 Blast Desc: Pc12g00670 [Penicillium chrysogenum Wisconsin 54-1255] gi|211581588|emb|CAP79694.1| Pc12g00670 [Penicillium chrysogenum Wisconsin 54-1255]
  misc_feature (1)..(334): NCBI GI: 242796115 Blast Desc: bicyclomycin resistance protein, [Talaromyces stipitatus ATCC 10500] gi|218719320|gb|EED18740.1| bicyclomycin resistance protein, [Talaromyces stipitatus ATCC 10500]
  misc_feature (1)..(331): NCBI GI: 226281712 Blast Desc: conserved [Paracoccidioides brasiliensis Pb01]
  misc_feature: Useful for introducing or modulating the production of volatile compounds
MIVSGVIPAILGNAADKVGRRPVYILALSVYLIANIGLALQKNYPTLLVLRMLQSAGSSGTISLGYGIIADLAAPCERGSYVGIFSLGPNVAPPLGPVIGGVLSAKLGWRSIFWFLVIFGGLCLLTIIVALPETARSIVGNGSVPATGVNRTLWSVFLSKQEKNEVSPLPKKGKVLDFEYARVAKSKGFDVTEVKKESVDDFPIELARLRSVFYLVVATAAGITAYGWAVQARVHVAGPLVIQAIIGFTISAAFVAFGTLVTDLNPNRSSTAAASANIVRCLLAAAGTAALQPIIDGVGPGWCFTIFGGLIGICGPLLLLEVKIGPAWRKRRAQTST

SEQ ID NO: 32982 - DNA, 1876 bp, Muscodor strobelii
  misc_feature: SGI EST ID NO. CUFF.78020.1
  misc_feature: Variant of the nucleotide sequence at SEQ ID NO 32980
taataccgaggagatcagttcttctatgtacgggctcgcacgaagagtctggagctatgcaacgtacgttgccccgctcggtatttgaagattgatctagtgtttatgacctacttcctactgaaggcgtgatagtggttgatcatcgcatcaaggaactttacatatttgcctctacgcctgatacgggaacctcccaatacctattgttaatcatgagtcaagcagtcatcagtggagagaaagagactgatccagggacatctagtgcgcaagatatatattcagaccaatttacggttttcacacggcttcaaaaaagagccatcgtttcactcactgctcttgcaggtgtattctcgcctttgagcagtttcatattctatccagccatcacaccaatcgcattagatctcggtgtttcaattgggttggtcaatctggctataacaacgtatatgattgtctcgggagtgattcccgctatattgggaaatgcggctgacaaagttggccggcggccagtctacatccttgctctctccgtatatttgattgccaatattggtttggcactacagaaaaactatcctactcttctagtactacgaatgctgcagagcgcaggaagttcaggaacgatctcgcttggctatgggatcattgctgaccttgcagcgccctgtgaacgagggtcatacgtcggcatattttctcttggaccaaacgtagcacccccccttggacctgtcatcggaggtgttctttccgctaagctcggctggagatcgatcttttggttcctcgtaatattcggaggtctctgcttgttgacgatcatcgttgctcttccagaaacggcacgtagcattgtcggcaatgggagcgtccctgccactggcgtcaatcgaaccctatggtctgttttcttgtcgaaacaagagaagaatgaagtgtcccctttacccaaaaagggtcgcctgtcatcaattcctaacccgctagcttgcctcagcattctactagagagagacatatttgtattgcagctatgtaacggcatattctatgccacatactgttgtgttcaagcctctttgtcgtcgctgttcatacagctctacggtatccaagaactacagggtggacttatatacctcccatttggactgggttgcctgagtagcgtatatatctggggtaaagttctggatttcgaatatgctagagttgcgaaaagtaaaggtttcgatgtcacagaggtcaaaaaagaaagcgtcgatgacttccctatagagttggctcggttgcgtagtgtgttctacctcgtcgtcgcgacagccgcaggtatcacagcatatggctgggctgtgcaagcgcgtgtgcacgtggccggaccactagtaatccaagccattattggctttaccatatcggcggcattcgttgcctttggtactttggtcacggacctcaatccgaatagatcgtcgacagcagcagcctccgcaaatatagtacgatgcttactggctgcagctgggacagcggctttacaaccgattatcgatggggtcggacccggttggtgttttacaatcttcgggggtctcattggaatctgcgggcccttattgttgctcgaggtgaaaattggacctgcgtggagaaagcgcagagcacaaacatctacatgagtctacatagagacaacgtcatattacttgtagacagcctagatcctaaaagctaatgcggcatggaggtgggaacgacatcacgattcagtctccgtacaaactcacacgtgtagagcactagaaatacaatcaaattatctaattcgaaattgatctttattatctatatagcgaac

SEQ ID NO: 32983 - DNA, 1065 bp, Muscodor strobelii
  misc_feature: SGI cDNA ID NO. 571371
  misc_feature: Elevated expression when VOC is produced
  misc_feature: Encodes the peptide sequence at SEQ ID NO 32984
atggctactggtgcactgcagcttcaagctgagctgaaagagcaactctcagctttaactcttcctgaaggcacaaacgtgcaatcagctcacagtcatggattgtcagcttggtctttcactgcgaaaatcaatgcaacaagcgaagatggctcgcctactccgttctttctgaagtatgttgctggcgacttaggaaagagccaaatcgaaggagagtatacaggcatgaccaagttgcatgaagttgcaccagatttggttcctaggccaattgcctggggaaagttgaagaaatcagccactccaacatatttctttctgatcgaatttaagcactttgtacccggcttgcctaacccggcaaaactaggtgctcgattagctgcgatgcacgagaagagtgccatacctggcggcaaattcggattccacgtgcagacgtacgatggtgctcgattgcaagtggtcgattgggatgacagttggacctcctttttctcaaaacttcttgcagaagcgcaccgtcaagatgcaggtactaatggatcgtggactgagcttgacattgtgttccggagggtacagtcacacctcataccacgcttgatcggcgcgcttgaagcagagggacgccaggtaactcctgtactgattcacggagatttatgggatggaaatctggcaaatgatagcgaaacaggtgatccttggatctttgactgcgcggcctattatgcgcataatgaaatggagctaggcatttggcggaccgaaaggcatcagatgagggccaaagtttttcgaagagaatacttgcggcatttcgacccaagcgaacccgaagaagagtgggatgatcggaatcggctttatagcgcgaaaacaaatttcatgcattcggcatgtttcgcgggctcaccctcccgtcgcttggcctttcacgatatgtttgaactgattcagaaatatgtgccttgggaggaagactcgctagagcttgcagaggtgcggagggctgtagaagcaagtgatttcgaacgtcgtgagcatcacaattcttga

SEQ ID NO: 32984 - protein, 354 aa, Muscodor strobelii
  misc_feature: SGI Peptide ID NO. 571371
  misc_feature (1)..(314): Pfam Id: PF03881 Pfam Desc: Fructosamine kinase
  misc_feature (212)..(246): Pfam Id: PF03881 Pfam Desc: Fructosamine kinase
  misc_feature (1)..(329): NCBI GI: 145228563 Blast Desc: An01g01490 [Aspergillus niger] gi|134054681|emb|CAK43522.1| protein product [Aspergillus niger]
  misc_feature (20)..(324): NCBI GI: 116206070 Blast Desc: CHGG_02328 [Chaetomium globosum CBS 148.51] gi|88182925|gb|EAQ90393.1| CHGG_02328 [Chaetomium globosum CBS 148.51]
  misc_feature (16)..(328): NCBI GI: 240110347 Blast Desc: CPC735_063790 [Coccidioides posadasii C735 delta SOWgp]
  misc_feature (9)..(326): NCBI GI: 116214451 Blast Desc: CHGG_11066 [Chaetomium globosum CBS 148.51] gi|88175421|gb|EAQ82890.1| CHGG_11066 [Chaetomium globosum CBS 148.51]
  misc_feature (16)..(328): NCBI GI: 119180471 Blast Desc: CIMG_08864 [Coccidioides immitis RS]
  misc_feature (16)..(312): NCBI GI: 258563734 Blast Desc: [Uncinocarpus reesii 1704] gi|237908119|gb|EEP82520.1| [Uncinocarpus reesii 1704]
  misc_feature (4)..(331): NCBI GI: 261356147 Blast Desc: conserved [Verticillium albo-atrum VaMs.102]
  misc_feature (21)..(311): NCBI GI: 238503680 Blast Desc: conserved [Aspergillus flavus NRRL3357] gi|220690543|gb|EED46892.1| conserved [Aspergillus flavus NRRL3357]
  misc_feature (20)..(311): NCBI GI: 169765035 Blast Desc: [Aspergillus oryzae RIB40] gi|83764843|dbj|BAE54987.1| protein product [Aspergillus oryzae]
  misc_feature (21)..(292): NCBI GI: 145256231 Blast Desc: An10g00710 [Aspergillus niger CBS 513.88] gi|134078637|emb|CAK40510.1| protein product [Aspergillus niger]
  misc_feature: Useful for introducing or modulating the production of volatile compounds
MATGALQLQAELKEQLSALTLPEGTNVQSAHSHGLSAWSFTAKINATSEDGSPTPFFLKYVAGDLGKSQIEGEYTGMTKLHEVAPDLVPRPIAWGKLKKSATPTYFFLIEFKHFVPGLPNPAKLGARLAAMHEKSAIPGGKFGFHVQTYDGARLQVVDWDDSWTSFFSKLLAEAHRQDAGTNGSWTELDIVFRRVQSHLIPRLIGALEAEGRQVTPVLIHGDLWDGNLANDSETGDPWIFDCAAYYAHNEMELGIWRTERHQMRAKVFRREYLRHFDPSEPEEEWDDRNRLYSAKTNFMHSACFAGSPSRRLAFHDMFELIQKYVPWEEDSLELAEVRRAVEASDFERREHHNS

SEQ ID NO: 32985 - DNA, 1366 bp, Muscodor strobelii
  misc_feature: SGI EST ID NO. CUFF.78002.0
  misc_feature: Variant of the nucleotide sequence at SEQ ID NO 32983
ttcctgtctactaggagctgtgagcttgcttatatagctttagacataacacatgtaaagtcatatgactttacagtctagagaagatataccctttgacaagaaagtaagagaattgagtctttcctgttgctagggtcttaaacatggctactggtgcactgcagcttcaagctgagctgaaagagcaactctcagctttaagtgagtcgttaggcggccaattgcctttagatgaagcaattatagaagctcttcctgaaggcacaaacgtgcaatcagctcacagtcatggattgtcagcttggtctttcactgcgaaaatcaatgcaacaagcgaagatggctcgcctactccgttctttctgaagtatgttgctggcgacttaggaaagagccaaatcgaaggagagtatacaggcatgaccaagttgcatgaagttgcaccagatttggttcctaggccaattgcctggggaaagttgaagaaatcagccactccaacatatttctttctgatcgaatttaagcactttgtacccggcttgcctaacccggcaaaactaggtgctcgattagctgcgatgcacgagaagagtgccatacctggcggcaaattcggattccacgtgcagacgtacgatggtgctcgattgcaagtggtcgattgggatgacagttggacctcctttttctcaaaacttcttgcagaagcgcaccgtcaagatgcaggtactaatggatcgtggactgagcttgacattgtgttccggagggtacagtcacacctcataccacgcttgatcggcgcgcttgaagcagagggacgccaggtaactcctgtactgattcacggagatttatgggatggaaatctggcaaatgatagcgaaacaggtgatccttggatctttgactgcgcggcctattatgcgcataatgaaatggagctaggcatttggcggaccgaaaggcatcagatgagggccaaagtttttcgaagagaatacttgcggcatttcgacccaagcgaacccgaagaagagtgggatgatcggaatcggctttatagcgcgaaaacaaatttcatgcattcggcatgtttcgcgggctcaccctcccgtcgcttggcctttcacgatatgtttgaactgattcagaaatatgtgccttgggaggaagactcgctagagcttgcagaggtgcggagggctgtagaagcaagtgatttcgaacgtcgtgagcatcacaattcttgaacatgacaagcaaagaaatattagatggaatttcgaggacttgtcttggatagaaccgctatgaaacaatagttaagataaacgtatggtgaataatttgtctgagc

SEQ ID NO: 32986 - DNA, 2886 bp, Muscodor strobelii
  misc_feature: SGI cDNA ID NO. 571372
  misc_feature: Encodes the peptide sequence at SEQ ID NO 32987
atggacgaagatgttggccaggcaagaatctttacctttggatataacgctgattttcgtgctgcatcacaaagcaataatctaggcatcacagattttgctaagaatcttctctttgatatgctctatggaagggatcgagatgggcgcagttttggacttggacaagcccctatcatatttgttgcgcactctatgggtggcttggtttttaaaaaggcatacctcgaagctcagctcgatgatcgatacaataagatcacacagtcgatcaaggcagttgtatttctagccacaccacatcgtggcgccgacttggctgaattcctaaacaaactgctctcgataagctttcgaaactctccaaagcagtatgttagtgagcttggtaagaatggtacattcttaaggaacatcaatgaacaatttcggcacctggcgacgaggctgcaaatattctcgttttacgagactttacagacctcgctaggcataagttcatcgatgatcttagatgaagaatcagccaaattgggttatccgggtgagatatcacgatcgttgaatgcagaccatcatgatgtctgcaagttcaagtctcccgacgattccaactaccaagcactcttggctgctctgaagtcacttgtctcatcacactcaagaacaaacaaagagtacgaagaagcagaattaatcaaaatccgcacaatgttgaatatctctgatagccatgagcatgacttggcccatttctctggtcgaaggacggaagggacttgcgaatggatattggagcatgctatgttcaaaccttggttcgcgtcttctgcttcacatgtattgtggctctacgggcgaccggcgcgaggcaaatcagtgctctcgtcatttcttgtcaacgccattcacgacaggggtgcatcggtgcaatacttcttcttcagaaatggagacgaaacgaaaagatcagtaacagcactactcagatcactcgcattccagatttcaacccaactgtcgagttttcgcaaagctctcgctgatatcgcagatggagggtataaacctaaagaggctgattggaaatcgctgtggaagaagatatttgttggcttattgtttcaaatggaagtccgtcctcccacttactggatcatagatggtctagatgaatctgtctccaatcaccaaattttcgaactcttcgcagagaccaaactttcaatagtgccgattcacattcttcttgtcagccgcttcaccccggggctttttacttcatttacccgacttaaggataggataccggcagacttcacttcgatcgaccaggatattacagacatggaaatatacgtggaagaagagctgagacacctggggttcgcagatgaaaatgacgacaaccttaatctgctgattaagttcttccaagaccagtcagttctgacgtggatacaggccttggccgctctcaacaacctgaagtctttgatcgaagcttctcattgtcttgaggcatttgtgaagaaaaagcgacggatggatgccacccgagaagcttcattacgccgcttcgaagatcttgagttcttggaattgtggtcacgcgatatgctcaaaatacccggtcgttttggcagcaatttactgaaagatccaagttctattcaccattgcatcgctcctttctgcccagacaattcagcgatctacaccacattcggccgtgctgtcccatggcccatagttcatggcttgcccgaagattgggatgattgccttgctcgtataagtgtaggcagtgacgatcaggcaacactagtcgcgagctcctggagatacctcgctgtaatagcatcctacgggtcagtcactacaaagatttggaactgccagaccggggagctgatgcacttggtaaacaacgttccaggcatgcaagccctttgcctagagtttgtggatcatgataaggctctgctgctgggccctgaccgtagctgtgtgcttcatgttcttctcgatcacgtcgacgaaggttgggctgtcactgattcttcactgttgaatagtgttgatgctgtcgaaggcacttacttgaattcacccacgtcaatggccttcagtccggaccacactatgatagccgtggcttatcgcaggtttcctctgacgatctgggctatgaatccggccaaggtcctcaagcgactcactcgcgaatacagacaaggcaaagcggcaaatgcctccccatttgttgaacaaatggtctggcatccaaacaacgaggatattattggctttttcgtagacgggcacgttttcagactgagcatcgtagactcttcataccaggaaagtccacctgatgctggtcagtggccatccattatttgcttcactccagatggtcaggacggtcgacgattttacgacgtccgaggcaactcatgccaagtgtgggagcctaatgcactcgtcagacttggagtaggagacgagaagccagcaagcagtcatactccagatgaaagtgtcgagcagtcgaactacccatctgagacttttgcggacaatcctgtacctatcgagttgctttccccgatgcctggccagcctgtcgttgcgtttggtgatgaagagggtctcatcgcgctattggacctcaagacaagggcaagattcaaaatcgacaacaccgcaactgggcttagtattgagcatcttgcatggaacggagatggaagccatctcatatatgctgagccagattcaaacccaaacacgaggctggcggtattgtccaacttgtactttctccggagtcaaaaagcgttctcgttgtccatcaagattcgatccaactttggtccctaa

SEQ ID NO: 32987 - protein, 961 aa, Muscodor strobelii
  misc_feature: SGI Peptide ID NO. 571372
  misc_feature (4)..(466): NCBI GI: 116206072 Blast Desc: CHGG_02329 [Chaetomium globosum CBS 148.51] gi|88182926|gb|EAQ90394.1| CHGG_02329 [Chaetomium globosum CBS 148.51]
  misc_feature (2)..(471): NCBI GI: 259483375 Blast Desc: TPA: NACHT and WD domain protein (AFU_orthologue; AFUA_3G07460) [Aspergillus nidulans FGSC A4]
  misc_feature (2)..(471): NCBI GI: 67900580 Blast Desc: AN7277.2 [Aspergillus nidulans FGSC A4] gi|40741958|gb|EAA61148.1| AN7277.2 [Aspergillus nidulans FGSC A4]
  misc_feature (2)..(461): NCBI GI: 258565149 Blast Desc: [Uncinocarpus reesii 1704] gi|237907020|gb|EEP81421.1| [Uncinocarpus reesii 1704]
  misc_feature (8)..(496): NCBI GI: 159127877 Blast Desc: AFUB_041630 [Aspergillus fumigatus A1163]
  misc_feature (8)..(496): NCBI GI: 146323333 Blast Desc: NACHT and WD domain protein [Aspergillus fumigatus Af293] gi|129558342|gb|EAL92825.2| NACHT and WD domain protein [Aspergillus fumigatus Af293]
  misc_feature (56)..(458): NCBI GI: 261356146 Blast Desc: NACHT and WD domain-containing protein [Verticillium albo-atrum VaMs.102]
  misc_feature (9)..(420): NCBI GI: 145603982 Blast Desc: MGG_10481 [Magnaporthe grisea 70-15] gi|145012093|gb|EDJ96749.1| MGG_10481 [Magnaporthe grisea 70-15]
  misc_feature (9)..(496): NCBI GI: 171679241 Blast Desc: protein product [Podospora anserina] gi|170939246|emb|CAP64474.1| protein product [Podospora anserina]
  misc_feature (2)..(468): NCBI GI: 240109219 Blast Desc: CPC735_027240 [Coccidioides posadasii C735 delta SOWgp]
MDEDVGQARIFTFGYNADFRAASQSNNLGITDFAKNLLFDMLYGRDRDGRSFGLGQAPIIFVAHSMGGLVFKKAYLEAQLDDRYNKITQSIKAVVFLATPHRGADLAEFLNKLLSISFRNSPKQYVSELGKNGTFLRNINEQFRHLATRLQIFSFYETLQTSLGISSSMILDEESAKLGYPGEISRSLNADHHDVCKFKSPDDSNYQALLAALKSLVSSHSRTNKEYEEAELIKIRTMLNISDSHEHDLAHFSGRRTEGTCEWILEHAMFKPWFASSASHVLWLYGRPARGKSVLSSFLVNAIHDRGASVQYFFFRNGDETKRSVTALLRSLAFQISTQLSSFRKALADIADGGYKPKEADWKSLWKKIFVGLLFQMEVRPPTYWIIDGLDESVSNHQIFELFAETKLSIVPIHILLVSRFTPGLFTSFTRLKDRIPADFTSIDQDITDMEIYVEEELRHLGFADENDDNLNLLIKFFQDQSVLTWIQALAALNNLKSLIEASHCLEAFVKKKRRMDATREASLRRFEDLEFLELWSRDMLKIPGRFGSNLLKDPSSIHHCIAPFCPDNSAIYTTFGRAVPWPIVHGLPEDWDDCLARISVGSDDQATLVASSWRYLAVIASYGSVTTKIWNCQTGELMHLVNNVPGMQALCLEFVDHDKALLLGPDRSCVLHVLLDHVDEGWAVTDSSLLNSVDAVEGTYLNSPTSMAFSPDHTMIAVAYRRFPLTIWAMNPAKVLKRLTREYRQGKAANASPFVEQMVWHPNNEDIIGFFVDGHVFRLSIVDSSYQESPPDAGQWPSIICFTPDGQDGRRFYDVRGNSCQVWEPNALVRLGVGDEKPASSHTPDESVEQSNYPSETFADNPVPIELLSPMPGQPVVAFGDEEGLIALLDLKTRARFKIDNTATGLSIEHLAWNGDGSHLIYAEPDSNPNTRLAVLSNLYFLRSQKAFSLSIKIRSNFGP

SEQ ID NO: 32988 - DNA, 5515 bp, Muscodor strobelii
  misc_feature: SGI EST ID NO. CUFF.78006.0
  misc_feature: Variant of the nucleotide sequence at SEQ ID NO 32986
cgcacacactgaatggcatcttactgccagagggatgattcctgaaacatgtggcgacaacaagctctgaacattatcgtctcttctgcatcgtgcaggcgagttgggttacttgaataccaaccgctgcgctgagggggaagacagggttctatcttggtcggcggttagatacaccattacagcgcgcactagcggggaatccttgaagagcatggggcagaaccagctgagccaattagtccaaatatcgaggtaggtgacgtgcagttttgatgcatacataagatagacatatgctggcaagactctggtaatcttctgactgtcgagtgttggaaacaaacgttccattttgtagtctagacttcttcttgtctgttttatgtccacatcgaagtgaggatcgaaatgcttctctactaatggaaggagaccgataatcattcggcattgggaaattgcaggcagagccctggccctgaatgtggtctctgagcatgcaactcgtggtagcagaatgtttcgtcgcaagttattctcttcctcccggagccgttcatcgaacgacaacgcaatcgagactggttccgactatcccgttgagcgaacgaaaagcttaggaactacaaccacgacagtcgcgagcacaagcaagagtattagcgatgcaacgagttctcagagcactcttgttcaacgtccacatctcgcttctaccacctccgcaccgcccgcaacgtccattgtagctagcaagtcagcgacgcctatccgagccgatgaccctcaaggcttgactctggtgcatgtaccggatactcaagtttctgcggacataatatttatccatggcctcggtggatctagtagactaacatggtctaaaaaccatgatctgagtctgttctggccggcaaagtggttgcccatggacgaagatgttggccaggcaagaatctttacctttggatataacgctgattttcgtgctgcatcacaaagcaataatctaggcatcacagattttgctaagaatcttctctttgatatgctctatggaagggatcgagatgggcgcagttttggacttggacaagcccctatcatatttgttgcgcactctatgggtggcttggtttttaaaaaggcatacctcgaagctcagctcgatgatcgatacaataagatcacacagtcgatcaaggcagttgtatttctagccacaccacatcgtggcgccgacttggctgaattcctaaacaaactgctctcgataagctttcgaaactctccaaagcagtatgttagtgagcttggtaagaatggtacattcttaaggaacatcaatgaacaatttcggcacctggcgacgaggctgcaaatattctcgttttacgagactttacagacctcgctaggcataagttcatcgatgatcttagatgaagaatcagccaaattgggttatccgggtgagatatcacgatcgttgaatgcagaccatcatgatgtctgcaagttcaagtctcccgacgattccaactaccaagcactcttggctgctctgaagtcacttgtctcatcacactcaagaacaaacaaagagtacgaagaagcagaattaatcaaaatccgcacaatgttgaatatctctgatagccatgagcatgacttggcccatttctctggtcgaaggacggaagggacttgcgaatggatattggagcatgctatgttcaaaccttggttcgcgtcttctgcttcacatgtattgtggctctacgggcgaccggcgcgaggcaaatcagtgctctcgtcatttcttgtcaacgccattcacgacaggggtgcatcggtgcaatacttcttcttcagaaatggagacgaaacgaaaagatcagtaacagcactactcagatcactcgcattccagatttcaacccaactgtcgagttttcgcaaagctctcgctgatatcgcagatggagggtataaacctaaagaggctgattggaaatcgctgtggaagaagatatttgttggcttattgtttcaaatggaagtccgtcctcccacttactggatcatagatggtctagatgaatctgtctccaatcaccaaattttcgaactcttcgcagagaccaaactttcaatagtgccgattcacattcttcttgtcagccgcttcaccccggggctttttacttcatttacccgacttaaggataggataccggcagacttcacttcgatcgaccaggatattacagacatggaaatatacgtggaagaagagctgaggtacttaggctgggacgatcagatcaaagaagagatcaaacacaaagtattacatcaagctaatgataattttctttgggtgcacctaatcttggaagagatcaaagagtgtcacacggacgacgacgttaaagatgcattggtagagcttcccttgggaatggaatcgctatatcggaagatggaggactcaatcacacggatacggaagccctcggaccgaaatctatctaggcaattactcttatgggctctatattcccgtcgttctgtatctatcaaagaactatcggcggtcctagagccagattttgggcatattctcgatatgcctaataccataagtcgtttgtgtggtcattttttggtcatcgaagggcagagtcggatcgaactgcttcaccagacggctcgcgaatatctaacaacgagcaagaccctacctttttctttgactttttcagatgcgcacttagatatctttcgcaaatctctgtcttcctttttcgaccggggtcttcgatcgtccttgtcagcgatcggacaggacatcattcgatatagggcaacatcttggatgcaccatttaagacacctggggttcgcagatgaaaatgacgacaaccttaatctgctgattaagttcttccaagaccagtcagttctgacgtggatacaggccttggccgctctcaacaacctgaagtctttgatcgaagcttctcattgtcttgaggcatttgtgaagaaaaagcgacggatggatgccacccgagaagcttcattacgccgcttcgaagatcttgagttcttggaattgtggtcacgcgatatgctcaaaatacccggtcgttttggcagcaatttactgaaagatccaagttctattcaccattgcatcgctcctttctgcccagacaattcagcgatctacaccacattcggccgtgctgtcccatggcccatagttcatggcttgcccgaagattgggatgattgccttgctcgtataagtgtaggcagtgacgatcaggcaacactagtcgcgagctcctggagatacctcgctgtagtaagtagcgctgggattgttctgctgtgggattgtaccacattccatcgaaccgcaaccctacatcaccgtgaaaatatttcagcaatatgtttcaacaccacgggcgaccagatagcatcctacgggtcagtcactacaaagatttggaactgccagaccggggagctgatgcacttggtaaacaacgttccaggcatgcaagccctttgcctagagtttgtggatcatgataaggctctgctgctgggccctgaccgtagctgtgtgcttcatgttcttctcgatcacgtcgacgaaggttgggctgtcactgattcttcactgttgaatagtgttgatgctgtcgaaggcacttacttgaattcacccacgtcaatggccttcagtccggaccacactatgatagccgtggcttatcgcaggtttcctctgacgatctgggctatgaatccggccaaggtcctcaagcgactcactcgcgaatacagacaaggcaaagcggcaaatgcctccccatttgttgaacaaatggtctggcatccaaacaacgaggatattattggctttttcgtagacgggcacgttttcagactgagcatcgtagactcttcataccaggaaagtccacctgatgctggtcagtggccatccattatttgcttcactccagatgggtcagtctacgcaattgccagcgttcatggcactatcaggctttatgacttccagacctcagtaatgatttatcaattgacatcagagagcactgtgtctaaatttacgtttagtcaggacggtcgacgattttacgacgtccgaggcaactcatgccaagtgtgggagcctaatgcactcgtcagacttggagtaggagacgagaagccagcaagcagtcatactccagatgaaagtgtcgagcagtcgaactacccatctgagacttttgcggacaatcctgtacctatcgagttgctttccccgatgcctggccagcctgtcgttgcgtttggtgatgaagagggtctcatcgcgctattggacctcaagacaagggcaagattcaaaatcgacaacaccgcaactgggcttagtattgagcatcttgcatggaacggagatggaagccatctcatatatgctgaggtgagcgggcggctcacgttcattcaaattgaaaaactacatagtggctacagaccccgtcgagtagccagattcaaacccaaacacgaggctggcggtattgtccaacttgtactttctccggagtcaaaaagcgttctcgttgtccatcaagattcgatccaactttggtccctaatgccgccatgcttgcagtaccatcaagtttctgctacacctgaaggaacccgatggatatctcacccactttctccacagtacatgctggcactcacgcccgaggtctgtttcgtaaccgatcggttgaacatgaaagagatatcgcattggaacattagcggagtcgaacctcctagaacttcaaatcagaacttgtcccgaaatacaaccgagattacgatgacagagatgcctctgaaaatcattgaccgagtgttagcaacccatcttcaaggacatgtgcttctgactacgtctacccgacatcactcgggaagtacatctcatgggtttctaattgcagctctcagaggagacgaaaaagattctttgaacgttggtttgatggaacgtattgtggttcctcctgatgttgagagcttggtgttattcccgctaaatatcttggaaaaccaaaacctcgtctttctcgacagagactacggagtatgtacctggaatctaaactcattgacaggcttggctgctgtgacccgccatttcttcctaccacgagattggatatccgaaaggaatctcagtctattatatctgacgccctcgggctcaatcatatgtccacataagggggatatcatagtgattgatacctcaattgggtctcagtggtaatggactcacttcgacaccttgcacatactgtagaactcggagtttggtttcaatatgcagatacgttatcacaattgcacaaaaataattatgcgctttttgtttcctctatctctctatagaataccagactcgaat

SEQ ID NO: 32989 - DNA, 1170 bp, Muscodor strobelii
  misc_feature: SGI cDNA ID NO. 571373
  misc_feature: Encodes the peptide sequence at SEQ ID NO 32990
atgaaaggcatcattacacctgcgcgtggccgtccagcccgcgtcaccaagcccaaccagaggacgcccggccgccccatccgacgcggcgacaccgtccccaaccaagacccggatctcgaggaccctgaccagggcgacatcgacgacgtggaggtcaacatcgacgccgagctcgagcaggagcagcaccaccacgacgaccagcagcagcatctggtgcagcatcagcagccgcaccatcaccaccaagagcatcatccggagcagcaccaagagcaccatccagaacaccatccggagcaccaccaccatgccgagttcgacgccgatgctgctgccgccgccgcagccgctgctgtccaccatcaacagcagcaacagcagcaccaccatcagcaactggacctgaccgccgccagcatcctcgccagcagcgtacagaaccccaacgaccagccgcaccatccagacctcggcccgcctccaggaccccctatggacggccatcctgaggccagcaccaccgagaacttggcgcgcgagtcgggctacgagaatgttgtagtcgagagcgctttggccaagcgcctggcacgtgagccgggcatgcgtcttgcccaccagcgccgtcccgaacaggccctgaatctgcagcgccgcagtaatgtcgaggctctcttcgcccacattgccggcgagatggctcctgtgccctgcaagaactgtcacaaaggtcacggtccgtggactacatgtgtcgttgtcgatggccaaatgtgtggcagctgtgccaattgttggttcaatgcctctggagcgagatgctcattccatgaaacccgcaatccagccacgcatggcggaccagttatgggaggtgacggcatgtcgtttcagttgcctcccgctcctcccacggccatggcccccttcaactttgcctcgatcccggcgtcatcagaccctgtcgtgcgctatactgttgagcaagctatggcccaagtccgtggcgctgacaaaaagacgcggtacatgctcatggttgaggcagccgcgcgacagcttgcattccagatctcaatgtacgaggacgcggtccaagaagaagcacaacagcagcaacagggtcctccccctgctgttatgaacgagccagatgcgccttag

SEQ ID NO: 32990 - protein, 389 aa, Muscodor strobelii
  misc_feature: SGI Peptide ID NO. 571373
  misc_feature (167)..(376): NCBI GI: 116208054 Blast Desc: CHGG_03320 [Chaetomium globosum CBS 148.51] gi|88183917|gb|EAQ91385.1| CHGG_03320 [Chaetomium globosum CBS 148.51]
  misc_feature (175)..(375): NCBI GI: 145611468 Blast Desc: MGG_00366 [Magnaporthe grisea 70-15] gi|145018743|gb|EDK03022.1| MGG_00366 [Magnaporthe grisea 70-15]
  misc_feature (175)..(372): NCBI GI: 171686434 Blast Desc: protein product [Podospora anserina] gi|170943178|emb|CAP68831.1| protein product [Podospora anserina]
  misc_feature (194)..(286): NCBI GI: 67538214 Blast Desc: AN5277.2 [Aspergillus nidulans FGSC A4] gi|40743247|gb|EAA62437.1| AN5277.2 [Aspergillus nidulans FGSC A4] gi|259485290|tpe|CBF82190.1| TPA: [Aspergillus nidulans FGSC
  misc_feature (211)..(279): NCBI GI: 240111710 Blast Desc: CPC735_011730 [Coccidioides posadasii C735 delta SOWgp]
  misc_feature (211)..(287): NCBI GI: 156054528 Blast Desc: [Sclerotinia sclerotiorum 1980] gi|154703892|gb|EDO03631.1| [Sclerotinia sclerotiorum 1980]
  misc_feature (211)..(279): NCBI GI: 119172922 Blast Desc: [Coccidioides immitis RS]
MKGIITPARGRPARVTKPNQRTPGRPIRRGDTVPNQDPDLEDPDQGDIDDVEVNIDAELEQEQHHHDDQQQHLVQHQQPHHHHQEHHPEQHQEHHPEHHPEHHHHAEFDADAAAAAAAAAVHHQQQQQQHHHQQLDLTAASILASSVQNPNDQPHHPDLGPPPGPPMDGHPEASTTENLARESGYENVVVESALAKRLAREPGMRLAHQRRPEQALNLQRRSNVEALFAHIAGEMAPVPCKNCHKGHGPWTTCVVVDGQMCGSCANCWFNASGARCSFHETRNPATHGGPVMGGDGMSFQLPPAPPTAMAPFNFASIPASSDPVVRYTVEQAMAQVRGADKKTRYMLMVEAAARQLAFQISMYEDAVQEEAQQQQQGPPPAVMNEPDAP

SEQ ID NO: 32991 - DNA, 2138 bp, Muscodor strobelii
  misc_feature: SGI EST ID NO. CUFF.78011.0
  misc_feature: Variant of the nucleotide sequence at SEQ ID NO 32989
ccattatgtgccacgccaagccaaaaagtggattctaggcacatatggcattgaatgaacttgtagaattttctcatctccccatcatctgataaaagctccgcagctgcagccagctgtgtttatcgcaaaccctcaactcgcctcatcgaccagaccaccaactgtcagccagcaggccagcaggcgacattgctcatgatgaaaggcatcattacacctgcgcgtggccgtccagcccgcgtcaccaagcccaaccagaggacgcccggccgccccatccgacgcggcgacaccgtccccaaccaagacccggatctcgaggaccctgaccagggcgacatcgacgacgtggaggtcaacatcgacgccgagctcgagcaggagcagcaccaccacgacgaccagcagcagcatctggtgcagcatcagcagccgcaccatcaccaccaagagcatcatccggagcagcaccaagagcaccatccagaacaccatccggagcaccaccaccatgccgagttcgacgccgatgctgctgccgccgccgcagccgctgctgtccaccatcaacagcagcaacagcagcaccaccatcagcaactggacctgaccgccgccagcatcctcgccagcagcgtacagaaccccaacgaccagccgcaccatccagacctcggcccgcctccaggaccccctatggacggccatcctgaggccagcaccaccgagaacttggcgcgcgagtcgggctacgagaatgttgtagtcgagagcgctttggccaagcgcctggcacgtgagccgggcatgcgtcttgcccaccagcgccgtcccgaacaggccctgaatctgcagcgccgcagtaatgtcgaggctctcttcgcccacattgccggcgagatggctcctgtgccctgcaagaactgtcacaaaggtcacggtccgtggactacatgtgtcgttgtcgatggccaaatgtgtggcagctgtgccaattgttggttcaatgcctctggagcgagatgctcattccatgaaacccgcaatccagccacgcatggcggaccagttatgggaggtgacggcatgtcgtttcagttgcctcccgctcctcccacggccatggcccccttcaactttgcctcgatcccggcgtcatcagaccctgtcgtgcgctatactgttgagcaagctatggcccaagtccgtggcgctgacaaaaagacgcggtacatgctcatggttgaggcagccgcgcgacagcttgcattccagatctcaatgtacgaggacgcggtccaagaagaagcacaacagcagcaacagggtcctccccctgctgttatgaacgagccagatgcgccttagtcaggacaatgggatccacagctggatgatgcagattttagaattggtccgctttcgcagtacccggatctgaccgaagaggtcttcaaagaggaattggaggaggatatcactgtcgatgggcagcatgatgaccagcgaacagatcgtaaaggagagaagaaagttactcattaatgcttggtaatgtcaaaccttgcaacgaattacgggttaccatatttctttatctctcctctgtgagactggctagaggaagagcatgtgtgtttggtgcatatctcacgttgagtgtggttgacttactggttcaatcgcattcaacccactcaccccgctctgcatgtacgtggatcgtcagataaaggctctccttctgctctgatgtgccatagttttatttggatgtgttaagaatctgcgcggaaaagctgtgctgatcattctcgcatggggccataactcttatcgtatgctggggttgatgttttccgtttttcaatcgctattaattattagagacaagcatagctttgttctcttctcatctgtataggaggtctctactttaggttccccagactatccagctattagcaggcgtcgtccttgtctagtgtcgacgagcgcaagacccctttcgcagcaatgtcctccggcatggtatgggcaaatatctgctgatatcaatgtactattatgactgtcaaactgtgatgtgcttaaacttttcgacgctattacacaggtcatcgacttggtacaag

SEQ ID NO: 32992 - DNA, 1266 bp, Muscodor strobelii
  misc_feature: SGI cDNA ID NO. 571374
  misc_feature: Elevated expression when VOC is produced
  misc_feature: Encodes the peptide sequence at SEQ ID NO 32993
atgtataagccggcaatattgcttctcgtaaatgcatgtctggctaccacgcaactcgtagtacgaccggagaaccagcatgctttgaatccttcagacacgcattatcgaaggccgtctcgattatctagcttttccaatacccagaatgatacttcaagtcccagtacaggctttgttgcattcggcgattcatatagtgctggaatcggtaccggcggggtgtatagtaaagacgataaatgcttgcgtgggttgaacgcgcacgccgaacttattgcagccgatctatcagcgagccagggaggaccgaataccactgcgttccagttcctctcttgcactggctcgacaacggaagacgtgctaatgagcggagagaagagccaaatcgacagcttcaatgtctcgcttcctgcggaattcgcattactatcaattggagggaatgatctaggcttttttgacgtgataaacgcctgcgtgttccgattttacaacttctactccggtacatgcgaaacggcgctagcggattcccgcgcccgtatggaaagtgacgaattcgagaatcgattagaagtactcatcatggagatactcgataaagtgcgctgggagaagaaaccctggttcttcatcacgatgacgggctacgcaaggtttttcaacgagaacaccgatgagtgtgacgatatgagttttggcgtttggtggggtggcccgaagcttacgaaggagttgagagctggcatgaatgcgcttgtcttgactgttaatgcgaagttgcagggcgccgtggacactatcaactcgcgcttcacgaaggataaagttatttttgttgactatgataaagcatttgatgggcaccgattctgcgaaccgaatatcactgaaccggactataatcgatcagaaacctggttcttccttgttggcggacatgataacgagagaaacggtaccaaaccactcgagaaatcggacaccgagattttatcctctacatctcccctcgtagatccagcgacctgccttgagccagctcagcgatcaggagattggggaacgctggcattgtgctatatggctatagcaaaacacaacgatccgagtctccgactgacccgccgaaatgacttatcagtcaatggaggttggaatgctcctctgtattatgccaaaacattccatcctaggacgttgggccatgaggcgataagggatgcgatatacaaggcatggcgacgatttgatccttga

SEQ ID NO: 32993 - protein, 421 aa, Muscodor strobelii
  misc_feature: SGI Peptide ID NO. 571374
  misc_feature (109)..(419): NCBI GI: 145611454 Blast Desc: MGG_00376 [Magnaporthe grisea 70-15] gi|145018733|gb|EDK03012.1| MGG_00376 [Magnaporthe grisea 70-15]
  misc_feature (55)..(400): NCBI GI: 171686444 Blast Desc: protein product [Podospora anserina] gi|170943183|emb|CAP68836.1| protein product [Podospora anserina]
  misc_feature (40)..(416): NCBI GI: 238845805 Blast Desc: esterase family protein [Microsporum canis CBS 113480]
  misc_feature (59)..(416): NCBI GI: 240105255 Blast Desc: CPC735_048180 [Coccidioides posadasii C735 delta SOWgp]
  misc_feature (59)..(416): NCBI GI: 119194569 Blast Desc: CIMG_01659 [Coccidioides immitis RS]
  misc_feature (43)..(412): NCBI GI: 226291445 Blast Desc: conserved [Paracoccidioides brasiliensis Pb18]
  misc_feature (43)..(412): NCBI GI: 225679700 Blast Desc: [Paracoccidioides brasiliensis Pb03]
  misc_feature (59)..(416): NCBI GI: 258567902 Blast Desc: [Uncinocarpus reesii 1704] gi|237906141|gb|EEP80542.1| [Uncinocarpus reesii 1704]
  misc_feature (43)..(412): NCBI GI: 226285966 Blast Desc: conserved [Paracoccidioides brasiliensis Pb01]
  misc_feature (58)..(412): NCBI GI: 171691454 Blast Desc: protein product [Podospora anserina] gi|170945675|emb|CAP71788.1| protein product [Podospora anserina]
  misc_feature: Useful for introducing or modulating the production of volatile compounds
MYKPAILLLVNACLATTQLVVRPENQHALNPSDTHYRRPSRLSSFSNTQNDTSSPSTGFVAFGDSYSAGIGTGGVYSKDDKCLRGLNAHAELIAADLSASQGGPNTTAFQFLSCTGSTTEDVLMSGEKSQIDSFNVSLPAEFALLSIGGNDLGFFDVINACVFRFYNFYSGTCETALADSRARMESDEFENRLEVLIMEILDKVRWEKKPWFFITMTGYARFFNENTDECDDMSFGVWWGGPKLTKELRAGMNALVLTVNAKLQGAVDTINSRFTKDKVIFVDYDKAFDGHRFCEPNITEPDYNRSETWFFLVGGHDNERNGTKPLEKSDTEILSSTSPLVDPATCLEPAQRSGDWGTLALCYMAIAKHNDPSLRLTRRNDLSVNGGWNAPLYYAKTFHPRTLGHEAIRDAIYKAWRRFDP

SEQ ID NO: 32994 - DNA, 2314 bp, Muscodor strobelii
  misc_feature: SGI EST ID NO. CUFF.78014.0
  misc_feature: Variant of the nucleotide sequence at SEQ ID NO 32992
taggagacagggctccttagacatcgtatgtgctgtgccacatggggtggtggcttccagccaatcagtcaaaggcgtcttggcatttgtccatgtgctccacgcaattggtctccagccttcagaatccacgaaagctgttgccttgtgactcttgggcagaagtatatacctacatgtagtcaatgatggatctcatatagtaatctcttaatcttctctctagaggagatcattatatgacgtcgagtcttttcttacgatgggatatactaatcgaatgtctctgcacaattgacgtcgggatcattcttgatcttctttcgacagcacgcctatctcacgaaatagccgctgccggcgggtacgatttcgcaatgtataagccggcaatattgcttctcgtaaatgcatgtctggctaccacgcaactcgtagtacgaccggagaaccagcatgctttgaatccttcagacacgcattatcgaaggccgtctcgattatctagcttttccaatacccagaatgatacttcaagtcccagtacaggctttgttgcattcggcgattcatatagtgctggaatcggtaccggcggggtgtatagtaaagacgataaatgcttgcgtgggttgaacgcgcacgccgaacttattgcagccgatctatcagcgagccagggaggaccgaataccactgcgttccagttcctctcttgcactggctcgacaacggaagacgtgctaatgagcggagagaagagccaaatcgacagcttcaatgtctcgcttcctgcggaattcgcattactatcaattggagggaatgatctaggcttttttgacgtgataaacgcctgcgtgttccgattttacaacttctactccggtacatgcgaaacggcgctagcggattcccgcgcccgtatggaaagtgacgaattcgagaatcgattagaagtactcatcatggagatactcgataaagtgcgctgggagaagaaaccctggttcttcatcacgatgacgggctacgcaaggtttttcaacgagaacaccgatgagtgtgacgatatgagttttggcgtttggtggggtggcccgaagcttacgaaggagttgagagctggcatgaatgcgcttgtcttgactgttaatgcgaagttgcagggcgccgtggacactatcaactcgcgcttcacgaaggataaagttatttttgttgactatgataaagcatttgatgggcaccgattctgcgaaccgaatatcactgaaccggactataatcgatcagaaacctggttcttccttgttggcggacatgataacgagagaaacggtaccaaaccactcgagaaatcggacaccgagattttatcctctacatctcccctcgtagatccagcgacctgccttgagccagctcagcgatcaggagattggggaacgctggcattgtgctatatggctatagcaaaacacaacgatccgagtctccgactgacccgccgaaatgacttatcagtcaatggaggttggaatgctcctctgtattatgccaaaacattccatcctaggacgttgggccatgaggcgataagggatgcgatatacaaggcatggcgacgatttgatccttgatattctggcgcttccaatggaggctacgagacatgaagaatattgcaaaagggcataaccgttgtctgagtaagactatgtgaaagagcagatcaattcaccgccaactaccactgcatcatcgagtcgatctggtgctaagattacaggtgaaattgtcgcatcaaccgacgaatttcactcgactacgtgtcgtgtcttcctcgacgagtattcgctatgatggttggatatgtagcgcccgagattgtcacctaaacagtgtctgaaaagagcattctgaacgatttgacgaatgctctcttatcctaagccttagaaatatggctgtggaaacttggtctattggtgggtgtcgtatcataggtatatcaatccaatactggctcgaagagaaataacgaggaagcacatgtctatatgcatgtgcctgacatcacgttgtgatggactattcggaaagcgttaaatgagttgcgtgggaaatacaagacacggcagagattaagagcaatatacaaatagataaagaaagaaatagcacgcaaagtagtataaacattcgagaagagttatcaacctccgtagttatgtggctttttagatatttttttctattcttttggggcagatgctcattaatggcctctgcccctttcccatacgcgaga

SEQ ID NO: 32995 - DNA, 405 bp, Muscodor strobelii
  misc_feature: SGI cDNA ID NO. 571375
  misc_feature: Elevated expression when VOC is produced
  misc_feature: Encodes the peptide sequence at SEQ ID NO 32996
atgggcgcgaagaagaagggtggcaacaagcccgcagctgatgagaaatccggatcttcagaaagtggcaagctgaaaggtggacagaagattgaagtccgacatattctatgctcaaagcatgcccagaaagaggctgctctcgacgaattgaaggcggatggtgaggatgtatcatggagcaagttcgttgaggtggccaagaagtactcggaggacaaggctagcaaaggcggtctcatcgggactatgaccaagggctctcttctaccagattttgaagcagttgcatacaatctgccacccacccagacggatgcacgcggaggcaagactaaagttttcatcggggaggccaagaccgaagaaggatatcacctcatcgtggtagacaaacgattataa

SEQ ID NO: 32996 - protein, 134 aa, Muscodor strobelii
  misc_feature: SGI Peptide ID NO. 571375
  misc_feature (35)..(132): Pfam Id: PF00639 Pfam Desc: PPIC-type PPIASE domain
  misc_feature (4)..(133): NCBI GI: 145608650 Blast Desc: MGG_12826 [Magnaporthe grisea 70-15] gi|145016097|gb|EDK00587.1| MGG_12826 [Magnaporthe grisea 70-15]
  misc_feature (4)..(133): NCBI GI: 189188062 Blast Desc: peptidyl-prolyl cis-trans isomerase pin4 [Pyrenophora tritici-repentis Pt-1C-BFP] gi|187971976|gb|EDU39475.1| peptidyl-prolyl cis-trans isomerase pin4 [Pyrenophora Pt-1C-BFP]
  misc_feature (6)..(130): NCBI GI: 261360403 Blast Desc: peptidyl-prolyl cis-trans isomerase PIN4 [Verticillium albo-atrum VaMs.102]
  misc_feature (19)..(133): NCBI GI: 93140533 Blast Desc: peptidyl-prolyl cis-trans isomerase PIN4 [Verticillium albo-atrum VaMs.102]
  misc_feature (3)..(133): NCBI GI: 67527584 Blast Desc: AN4069.2 [Aspergillus nidulans FGSC A4] gi|74657276|sp|Q5B5W1.1|PIN4_EMENI RecName: Full=Peptidyl-prolyl cis-trans isomerase pin4; Short=PPIase pin4; AltName: Short=Par14
  misc_feature (23)..(133): NCBI GI: 256732766 Blast Desc: NECHADRAFT_79295 [Nectria haematococca mpVI 77-13-4]
  misc_feature (19)..(133): NCBI GI: 46125831 Blast Desc: FG07293.1 [Gibberella zeae PH-1]
  misc_feature (1)..(133): NCBI GI: 258576633 Blast Desc: peptidyl-prolyl cis-trans isomerase NIMA-interacting 4 [Uncinocarpus reesii 1704] gi|237902764|gb|EEP77165.1| peptidyl-prolyl cis-trans isomerase NIMA-interacting 4 reesii
  misc_feature (19)..(133): NCBI GI: 238838337 Blast Desc: peptidyl-prolyl cis-trans isomerase pin4 [Microsporum canis CBS 113480]
  misc_feature (8)..(131): NCBI GI: 74662494 Blast Desc: peptidyl-prolyl cis-trans isomerase pin4 [Microsporum canis CBS 113480]
  misc_feature (31)..(133): SWISSPROT Homolog: EC 5.2.1.8 Peptidylprolyl isomerase
  misc_feature: Useful for introducing or modulating the production of volatile compounds
MGAKKKGGNKPAADEKSGSSESGKLKGGQKIEVRHILCSKHAQKEAALDELKADGEDVSWSKFVEVAKKYSEDKASKGGLIGTMTKGSLLPDFEAVAYNLPPTQTDARGGKTKVFIGEAKTEEGYHLIVVDKRL

SEQ ID NO: 32997 - DNA, 1521 bp, Muscodor strobelii
  misc_feature: SGI EST ID NO. CUFF.78617.0
  misc_feature: Variant of the nucleotide sequence at SEQ ID NO 32995
ctttagcaagtcaagtctcaagcacagcaaaatcgtcttaaaccgcgagaaaaccattgtagaagaaaaatgggcgcgaagaagaagggtggcaacaagcccgcagctgatgagaaatccggatcttcagaaagtggcaagctgaaaggtggacagaagattgaagtccgacatattctatgctcaaagcatgcccagaaagaggctgctctcgacgaattgaaggcggatggtgaggatgtatcatggagcaagttcgttgaggtggccaagaagtactcggaggacaaggctagcaaaggcggtctcatcgggactatgaccaagggctctcttctaccagattttgaagcagttgcatacaatctgccacccacccagacggatgcacgcggaggcaagactaaagttttcatcggggaggccaagaccgaagaaggatatcacctcatcgtggtagacaaacgattataacgtatcaagggctggacatcatgatcactaaagtgaggagcgcggcgtagattcagagtttttgtcttgattccgatgcaatatggttccccttttcccagcacccatgccagccagaatacccagaggatgcactaaggaattatggtagctgattggtatatcgagcttccattgtctatcaccccatacttcggcgccagtcgagagactctttactgctcggtctggaagtagttgagcaagatggaacgctcggtagactcctcaccccagtccttgaccacgacgcaagagcagttgacgaccttgcgagcgttaccctcacgatccaacacgcctagcaaacatgtcgattagcttcaatgtagatcctatattccggcctggagaggccagagaatactcacagagaccagcccactcgccgagctgcttgccatcgggaaccttgatcagggggatcttgtgctcggagcagagggcgatgaccagcttcttgtaggcttcttcctcgcaggactcgttgaggacgcacatgtgggcttggcggcggtcgagggccttggaagcctcgcggagaccacgggcaagaccgtcgtgcatgagggagagcttgaggacacccttgagggcgtcgaggacggacatctggcccttggaggcatcggccgagacttcaacctcctcgggggcttcgggtgcgttgttctcttctacgtccgactaacaaaaggaggataaggttagccattgggactaagatttgtaaagtgaccaagactacaacctcctaatagaggggcacataggctgtgtagattgctgtttgcgaacaatcatagcgttgtaaggagagatattccggcaacataccatcttggattatgtgataccggtgcgatcctcgaagagttaggtgtcggaatgtgtgatgagtgttggtggaatagtgacgttgtgattgagaggcgtgggagcaagtccagaagttttcgcgattataccatgacttcaattgaggcctggggctttgcagggcgggtg

SEQ ID NO: 32998 - DNA, 444 bp, Muscodor strobelii
  misc_feature: SGI cDNA ID NO. 571376
  misc_feature: Reduced expression when VOC is produced
  misc_feature: Encodes the peptide sequence at SEQ ID NO 32999
atgtcggacgtagaagagaacaacgcacccgaagcccccgaggaggttgaagtctcggccgatgcctccaagggccagatgtccgtcctcgacgccctcaagggtgtcctcaagctctccctcatgcacgacggtcttgcccgtggtctccgcgaggcttccaaggccctcgaccgccgccaagcccacatgtgcgtcctcaacgagtcctgcgaggaagaagcctacaagaagctggtcatcgccctctgctccgagcacaagatccccctgatcaaggttcccgatggcaagcagctcggcgagtgggctggtctctgcgtgttggatcgtgagggtaacgctcgcaaggtcgtcaactgctcttgcgtcgtggtcaaggactggggtgaggagtctaccgagcgttccatcttgctcaactacttccagaccgagcagtaa

SEQ ID NO: 32999 - protein, 147 aa, Muscodor strobelii
  misc_feature: SGI Peptide ID NO. 571376
  misc_feature (31)..(126): Pfam Id: PF01248 Pfam Desc: Ribosomal protein L7Ae/L30e/S12e/Gadd45 family
  misc_feature (1)..(147): NCBI GI: 145608652 Blast Desc: 40S ribosomal S12 protein [Magnaporthe grisea 70-15] gi|145016098|gb|EDK00588.1| 40S ribosomal S12 protein [Magnaporthe grisea 70-15]
  misc_feature (1)..(147): NCBI GI: 154298946 Blast Desc: 40S ribosomal protein S12 [Botryotinia fuckeliana B05.10] gi|156064117|ref|XP_001597980.1| 40S ribosomal protein S12 [Sclerotinia sclerotiorum 1980] gi|150857625|gb|EDN32817.1|
  misc_feature (1)..(147): NCBI GI: 164425048 Blast Desc: 40S ribosomal protein S12 [Neurospora crassa OR74A] gi|157070768|gb|EAA28087.2| 40S ribosomal protein S12 [Neurospora crassa OR74A]
  misc_feature (4)..(147): NCBI GI: 261360404 Blast Desc: 40S ribosomal protein S12 [Verticillium albo-atrum VaMs.102]
  misc_feature (1)..(147): NCBI GI: 255942617 Blast Desc: Pc18g02330 [Penicillium chrysogenum Wisconsin 54-1255] gi|211586810|emb|CAP94457.1| Pc18g02330 [Penicillium chrysogenum Wisconsin 54-1255]
  misc_feature (1)..(147): NCBI GI: 225556740 Blast Desc: ankyrin repeat protein [Ajellomyces capsulatus G186AR]
  misc_feature (1)..(147): NCBI GI: 189188162 Blast Desc: 40S ribosomal protein S12 [Pyrenophora tritici-repentis Pt-1C-BFP] gi|187972026|gb|EDU39525.1| 40S ribosomal protein S12 [Pyrenophora tritici-repentis Pt-1C-BFP]
  misc_feature (2)..(147): NCBI GI: 169617139 Blast Desc: SNOG_11745 [Phaeosphaeria nodorum SN15] gi|160703345|gb|EAT80789.2| SNOG_11745 [Phaeosphaeria nodorum SN15]
  misc_feature (1)..(147): NCBI GI: 238503950 Blast Desc: 40S ribosomal protein S12 [Aspergillus flavus NRRL3357] gi|220690678|gb|EED47027.1| 40S ribosomal protein S12 [Aspergillus flavus NRRL3357]
  misc_feature (1)..(147): NCBI GI: 145255198 Blast Desc: An18g04310 [Aspergillus niger] gi|134084480|emb|CAK43234.1| protein product [Aspergillus niger]
  misc_feature: Useful for introducing or modulating the production of volatile compounds
MSDVEENNAPEAPEEVEVSADASKGQMSVLDALKGVLKLSLMHDGLARGLREASKALDRRQAHMCVLNESCEEEAYKKLVIALCSEHKIPLIKVPDGKQLGEWAGLCVLDREGNARKVVNCSCVVVKDWGEESTERSILLNYFQTEQ

SEQ ID NO: 33000 - DNA, 1108 bp, Muscodor strobelii
  misc_feature: SGI EST ID NO. CUFF.78618.1
  misc_feature: Variant of the nucleotide sequence at SEQ ID NO 32998
cacccgccctgcaaagccccaggcctcaattgaagtcatggtataatcgcgaaaacttctggacttgctcccacgcctctcaatcacaacgtcactattccaccaacactcatcacacattccgacacctaactcttcgaggatcgcaccggtatcacataatccaagatgtcggacgtagaagagaacaacgcacccgaagcccccgaggaggttgaagtctcggccgatgcctccaagggccagatgtccgtcctcgacgccctcaagggtgtcctcaagctctccctcatgcacgacggtcttgcccgtggtctccgcgaggcttccaaggccctcgaccgccgccaagcccacatgtgcgtcctcaacgagtcctgcgaggaagaagcctacaagaagctggtcatcgccctctgctccgagcacaagatccccctgatcaaggttcccgatggcaagcagctcggcgagtgggctggtctctgcgtgttggatcgtgagggtaacgctcgcaaggtcgtcaactgctcttgcgtcgtggtcaaggactggggtgaggagtctaccgagcgttccatcttgctcaactacttccagaccgagcagtaaagagtctctcgactggcgccgaagtatggggtgatagacaatggaagctcgatataccaatcagctaccataattccttagtgcatcctctgggtattctggctggcatgggtgctgggaaaaggggaaccatattgcatcggaatcaagacaaaaactctgaatctacgccgcgctcctcactttagtgatcatgatgtccagcccttgatacgttataatcgtttgtctaccacgatgaggtgatatccttcttcggtcttggcctccccgatgaaaactttagtcttgcctccgcgtgcatccgtctgggtgggtggcagattgtatgcaactgcttcaaaatctggtagaagagagcccttggtcatagtcccgatgagaccgcctaagctggatgtcagaaccgagtcttagagttgagatgtagcccaactagtataagtacctttgctagccttgtcctccgagtacttcttggccacctcaacgaact

SEQ ID NO: 33001 - DNA, 393 bp, Muscodor strobelii
  misc_feature: SGI cDNA ID NO. 571377
  misc_feature: Reduced expression when VOC is produced
  misc_feature: Encodes the peptide sequence at SEQ ID NO 33002
atggtcaagacttccgtcctcaacgatgcgctcaatgccatcaacaacgccgagaagactggaaagcgccaggtcctcatccgaccttcgtctaaggtcattgtcaagttcttgaccgtcatgcagaagaagggctacattggcgagtttgaggaggtcgacgaccaccgctccggcaagatcgttgtccagctcaacggccgcatcaacaagaccggtgtcatcagcccccgcttcaacgtccacttgtcccagatggagaaatgggttgtcaagctgctgcccgcccgtcagttcggttacatcatcctcaccacctctgccggtattatggaccacgaagaggcccgccgaaagcacgtctccggcaagattctgggtttcttctactag

SEQ ID NO: 33002 - protein, 130 aa, Muscodor strobelii
  misc_feature: SGI Peptide ID NO. 571377
  misc_feature (5)..(130): Pfam Id: PF00410 Pfam Desc: Ribosomal protein S8
  misc_feature (1)..(130): NCBI GI: 258578295 Blast Desc: 40S ribosomal protein S22 [Uncinocarpus reesii 1704] gi|237903595|gb|EEP77996.1| 40S ribosomal protein S22 [Uncinocarpus reesii 1704]
  misc_feature (1)..(130): NCBI GI: 169598398 Blast Desc: SNOG_02003 [Phaeosphaeria nodorum SN15] gi|111069095|gb|EAT90215.1| SNOG_02003 [Phaeosphaeria nodorum SN15]
  misc_feature (1)..(130): NCBI GI: 225677664 Blast Desc: 40S ribosomal protein S22 [Paracoccidioides brasiliensis Pb03] gi|226278722|gb|EEH34288.1| 40S ribosomal protein S22 [Paracoccidioides brasiliensis Pb01] 40S ribosomal
  misc_feature (1)..(130): NCBI GI: 119186131 Blast Desc: 40S ribosomal protein S22 [Coccidioides immitis RS] gi|240108684|gb|EER26858.1| 40S ribosomal protein S22, [Coccidioides posadasii C735 delta SOWgp]
  misc_feature (1)..(130): NCBI GI: 238837490 Blast Desc: 40S ribosomal protein S22 [Microsporum canis CBS 113480]
  misc_feature (1)..(130): NCBI GI: 189209005 Blast Desc: 40S ribosomal protein S15a [Pyrenophora tritici-repentis Pt-1C-BFP] gi|187976928|gb|EDU43554.1| 40S ribosomal protein S15a [Pyrenophora tritici-repentis Pt-1C-BFP]
  misc_feature (1)..(130): NCBI GI: 212531735 Blast Desc: 40S ribosomal protein S22 [Penicillium marneffei ATCC 18224] gi|212531737|ref|XP_002146025.1| 40S ribosomal protein S22 [Penicillium marneffei ATCC 18224] 40S ribosomal protein S22 ATCC
  misc_feature (1)..(130): NCBI GI: 225561434 Blast Desc: 40S ribosomal protein S22 [Ajellomyces capsulatus G186AR] gi|240274536|gb|EER38052.1| 40S ribosomal protein S22 [Ajellomyces capsulatus H143]
  misc_feature (1)..(130): NCBI GI: 261191400 Blast Desc: 40S ribosomal protein S22 [Ajellomyces dermatitidis SLH14081] gi|239589874|gb|EEQ72517.1| 40S ribosomal protein S22 [Ajellomyces dermatitidis SLH14081]
  misc_feature (1)..(130): NCBI GI: 256732767 Blast Desc: [Nectria haematococca mpVI 77-13-4]
  misc_feature: Useful for introducing or modulating the production of volatile compounds
MVKTSVLNDALNAINNAEKTGKRQVLIRPSSKVIVKFLTVMQKKGYIGEFEEVDDHRSGKIVVQLNGRINKTGVISPRFNVHLSQMEKWVVKLLPARQFGYIILTTSAGIMDHEEARRKHVSGKILGFFY

SEQ ID NO: 33003 - DNA, 898 bp, Muscodor strobelii
  misc_feature: SGI EST ID NO. CUFF.78684.1
  misc_feature: Variant of the nucleotide sequence at SEQ ID NO 33001
ggaaaaagcacaccgactggtctgtggtccgcgccaactttcccgtacccaccgcagtccatcaaaatcaatctgcttctcgactccagcccatccgttctcaccctcaccaccagtctcgacagtccacctcggccaacatcaccacgaccacttatcctgtcgtccagactccattaagataccgccaacatggtcaagacttccgtcctcaacgatgcgctcaatgccatcaacaacgccgagaagactggaaagcgccaggtcctcatccgaccttcgtctaaggtcattgtcaagttcttgaccgtcatgcagaagaagggctacattggcgagtttgaggaggtcgacgaccaccgctccggcaagatcgttgtccagctcaacggccgcatcaacaagaccggtgtcatcagcccccgcttcaacgtccacttgtcccagatggagaaatgggttgtcaagctgctgcccgcccgtcagttcggttacatcatcctcaccacctctgccggtattatggaccacgaagaggcccgccgaaagcacgtctccggcaagattctgggtttcttctactaggcaatgggcaatatgacaagaaaataaaaaagcgactgcggggatcacgaaacaatgatgaatggacttagcattttcgggcgtttgggaggatggatattggcttcgcgtgctcacgagatttgagagcccaataaaaaatatcacgataccacgaaatgctacacgagtccgattcccaagccaggaatgaatgctgtatttcaatattgtgatgttttcaattgtttagacgccaaggtgatagccaaggtgatacaattatctgctgtacactatgctgaacgcctcatgtaaatgctgtgtcacatcg

SEQ ID NO: 33004 - DNA, 2019 bp, Muscodor strobelii
  misc_feature: SGI cDNA ID NO. 571378
  misc_feature: Reduced expression when VOC is produced
  misc_feature: Encodes the peptide sequence at SEQ ID NO 33005
atgccccggccgcggcagctggtgctcctcggggccgtcgccttcatcctcctctgcatcacgagcttctaccggtcgagttcaagcgcgacttcgccgcccccactacaaccaccacctgctcaccacgacattccgcaataccagccactgcatagcggcataaatttcgacgatgaattcacgccgcactcacgtcttcctatccccgcccctgatggcgtccatcccatgcaatacctcattgcacaggccgagcaacagcaagaggcgatggaagcgcgccagtccaagacaatcgacgaagcggtcgctgagtaccgtcgccggtatggtgtgcccccgccgcccaacttcgacagatggttcgaatttgcccagatgaaaggcgtccagctcattgacgagtttgacacgatctacgaatccctgacgccattttggggactgaaaccggctacgatacgagagcgcgcagccgaagctctgggttacgagaatgcgctgcttgggatctcgatccgcggcggcgaaataacacacatacatggtggggatgaatggcagcgagtggctacactgggcatgatggccgagtttctcgagttcctgcccgatatggacctctgcttcaatctgcacgatgagccgagggtcattgtgccgtatgaagacatggcgaggctggtccgaagagccaaggaggtgaatatgcccgccgccaatatccagcatcctgtgaacgagtttacgcgcaagccggtaggactaaattacggcaagaattgggtggagtacaagacgacgcggtttaacgtcttcgcccatcaaacaacatggacccattccaggatgccatgttcgccaaacagcgcttcgagaggactggaggaggatgagttgaaggatgacctctcgagatacgagataggggagctgggctttgtctataacatgacagcgcagtcggacatctgcaattctccaagtctcagctcgacctttgggtttttcgacagaccgaatgccttcaatatcgtccatgatctattccccatcttctcgcaatctaagttatcttccttctcggatattttatacccctcgccctggtattggttcgagaaggtcccgtacgaccaaggccaagacgtggaatgggagcaaaagtacgataagttctactggcgcggctctacgactggtggctttagtcgaaacggcggttggcggcgtcaacaccggcagcatttcgttaagaaagtcaacgcagttgagaacacgaagatacttgtcaatggcgggacggagactgagccgaaatgggagacaaaagttacgccgcggggacaattcagggatctcatggacattttcttctcgggcgtaggacagtgtgaccccggtgattgcgtcgcacaaaataatttcttcacgatcaaatcccacgcgtcccagcagggcgcatgggcgtacaaatacctcttggacatcgatggcaatgccttcagcgggcgattttacgcgtttctcaagagcaagagtcttgtctacaaatgggccatattcagagagtggcatctggaatggctgaagccctgggcgcactatatcccacttagcttgcagggcgaggagtgggtagaagctgttagatacttcgacagcagcgaatctggaaagaaagagggcgagcggctagctaaacagcagagcgactgggcccacaaggtccttcgtcatgaggatatggaggtttggttcttcaggttgttactagaatacggacgagtagtggacgacaacagagccacgattggctacacttttgatccctcagaaaagaaaggaaccgccacagacaagaagaagggtgttccatacaagcacaatgctgctgccccggacaggaaaaacactgataccctggccaaagaaaacaccgctattgctaacaagaaggatcccactgccatgggcaaggacaacacggctaaattggaagccgatatatcataa

SEQ ID NO: 33005 - protein, 672 aa, Muscodor strobelii
  misc_feature: SGI Peptide ID NO. 571378
  misc_feature (76)..(609): NCBI GI: 156064121 Blast Desc: SS1G_00068 [Sclerotinia sclerotiorum 1980] gi|154690930|gb|EDN90668.1| SS1G_00068 [Sclerotinia sclerotiorum 1980]
  misc_feature (3)..(609): NCBI GI: 154298950 Blast Desc: BC1G_11722 [Botryotinia fuckeliana B05.10] gi|150857627|gb|EDN32819.1| BC1G_11722 [Botryotinia fuckeliana B05.10]
  misc_feature (3)..(608): NCBI GI: 85084504 Blast Desc: NCU06430 [Neurospora crassa OR74A] gi|28918411|gb|EAA28085.1| conserved [Neurospora crassa OR74A]
  misc_feature (5)..(608): NCBI GI: 46125825 Blast Desc: FG07290.1 [Gibberella zeae PH-1]
  misc_feature (5)..(621): NCBI GI: 256732768 Blast Desc: [Nectria haematococca mpVI 77-13-4]
  misc_feature (3)..(608): NCBI GI: 171686888 Blast Desc: protein product [Podospora anserina] gi|170943405|emb|CAP69058.1| protein product [Podospora anserina]
  misc_feature (1)..(594): NCBI GI: 261360406 Blast Desc: conserved [Verticillium albo-atrum VaMs.102]
  misc_feature (3)..(610): NCBI GI: 255942579 Blast Desc: Pc18g02140 [Penicillium chrysogenum Wisconsin 54-1255] gi|211586791|emb|CAP94438.1| Pc18g02140 [Penicillium chrysogenum Wisconsin 54-1255]
  misc_feature (1)..(610): NCBI GI: 169764761 Blast Desc: [Aspergillus oryzae RIB40] gi|83764706|dbj|BAE54850.1| protein product [Aspergillus oryzae]
  misc_feature (5)..(609): NCBI GI: 238838357 Blast Desc: conserved [Microsporum canis CBS 113480]
  misc_feature: Useful for introducing or modulating the production of volatile compounds
MPRPRQLVLLGAVAFILLCITSFYRSSSSATSPPPLQPPPAHHDIPQYQPLHSGINFDDEFTPHSRLPIPAPDGVHPMQYLIAQAEQQQEAMEARQSKTIDEAVAEYRRRYGVPPPPNFDRWFEFAQMKGVQLIDEFDTIYESLTPFWGLKPATIRERAAEALGYENALLGISIRGGEITHIHGGDEWQRVATLGMMAEFLEFLPDMDLCFNLHDEPRVIVPYEDMARLVRRAKEVNMPAANIQHPVNEFTRKPVGLNYGKNWVEYKTTRFNVFAHQTTWTHSRMPCSPNSASRGLEEDELKDDLSRYEIGELGFVYNMTAQSDICNSPSLSSTFGFFDRPNAFNIVHDLFPIFSQSKLSSFSDILYPSPWYWFEKVPYDQGQDVEWEQKYDKFYWRGSTTGGFSRNGGWRRQHRQHFVKKVNAVENTKILVNGGTETEPKWETKVTPRGQFRDLMDIFFSGVGQCDPGDCVAQNNFFTIKSHASQQGAWAYKYLLDIDGNAFSGRFYAFLKSKSLVYKWAIFREWHLEWLKPWAHYIPLSLQGEEWVEAVRYFDSSESGKKEGERLAKQQSDWAHKVLRHEDMEVWFFRLLLEYGRVVDDNRATIGYTFDPSEKKGTATDKKKGVPYKHNAAAPDRKNTDTLAKENTAIANKKDPTAMGKDNTAKLEADIS

SEQ ID NO: 33006 - DNA, 2722 bp, Muscodor strobelii
  misc_feature: SGI EST ID NO. CUFF.78034.0
  misc_feature: Variant of the nucleotide sequence at SEQ ID NO 33004
ccttgacgtagtctcctgaatcaagcgaatgccatcgcatggagtgtcgaattcagttctgccagccatcccagtccctaccgtctgccggtaccttaaaccgtctccatccgatcttgcttctagcttatacgtaactttgcgactaatggcaacggcgatcctgcttttcgctcgttgattcactcattgctctgcgacttccatctgcttgccgtacttcgtagtcgcgtgctgccctctcggcacttttttggacgggatccaatgtcactgctgatacggtgctcactaggtgcagatgcgacgacagaacagccttgatttggatatctaggagagccaccaccgcccaagtcgtcgctgcccccgcgatgccccggccgcggcagctggtgctcctcggggccgtcgccttcatcctcctctgcatcacgagcttctaccggtcgagttcaagcgcgacttcgccgcccccactacaaccaccacctgctcaccacgacattccgcaataccagccactgcatagcggcataaatttcgacgatgaattcacgccgcactcacgtcttcctatccccgcccctgatggcgtccatcccatgcaatacctcattgcacaggccgagcaacagcaagaggcgatggaagcgcgccagtccaagacaatcgacgaagcggtcgctgagtaccgtcgccggtatggtgtgcccccgccgcccaacttcgacagatggttcgaatttgcccagatgaaaggcgtccagctcattgacgagtttgacacgatctacgaatccctgacgccattttggggactgaaaccggctacgatacgagagcgcgcagccgaagctctgggttacgagaatgcgctgcttgggatctcgatccgcggcggcgaaataacacacatacatggtggggatgaatggcagcgagtggctacactgggcatgatggccgagtttctcgagttcctgcccgatatggacctctgcttcaatctgcacgatgagccgagggtcattgtgccgtatgaagacatggcgaggctggtccgaagagccaaggaggtgaatatgcccgccgccaatatccagcatcctgtgaacgagtttacgcgcaagccggtaggactaaattacggcaagaattgggtggagtacaagacgacgcggtttaacgtcttcgcccatcaaacaacatggacccattccaggatgccatgttcgccaaacagcgcttcgagaggactggaggaggatgagttgaaggatgacctctcgagatacgagataggggagctgggctttgtctataacatgacagcgcagtcggacatctgcaattctccaagtctcagctcgacctttgggtttttcgacagaccgaatgccttcaatatcgtccatgatctattccccatcttctcgcaatctaagttatcttccttctcggatattttatacccctcgccctggtattggttcgagaaggtcccgtacgaccaaggccaagacgtggaatgggagcaaaagtacgataagttctactggcgcggctctacgactggtggctttagtcgaaacggcggttggcggcgtcaacaccggcagcatttcgttaagaaagtcaacgcagttgagaacacgaagatacttgtcaatggcgggacggagactgagccgaaatgggagacaaaagttacgccgcggggacaattcagggatctcatggacattttcttctcgggcgtaggacagtgtgaccccggtgattgcgtcgcacaaaataatttcttcacgatcaaatcccacgcgtcccagcagggcgcatgggcgtacaaatacctcttggacatcgatggcaatgccttcagcgggcgattttacgcgtttctcaagagcaagagtcttgtctacaaatgggccatattcagagagtggcatctggaatggctgaagccctgggcgcactatatcccacttagcttgcagggcgaggagtgggtagaagctgttagatacttcgacagcagcgaatctggaaagaaagagggcgagcggctagctaaacagcagagcgactgggcccacaaggtccttcgtcatgaggatatggaggtttggttcttcaggttgttactagaatacggacgagtagtggacgacaacagagccacgattggctacacttttgatccctcagaaaagaaaggaaccgccacagacaagaagaagggtgttccatacaagcacaatgctgctgccccggacaggaaaaacactgataccctggccaaagaaaacaccgctattgctaacaagaaggatcccactgccatgggcaaggacaacacggctaaattggaagccgatatatcataataccaacatattttgcgtacgacctggacatgaaaccaccataccgacatctatacatatatatacacgacacagcgagccgtttgagcgaggaatacctcttttggagactaatggctgtataatatttggcacataatgcagatgagtgttctctattggtggagaaagggaacaaggcacgcacatgtcatgagcctcgtccccccagaaagggggatgttttggactaagagcaatgctggcttggttaacagctgtacatcattaccatctgtataggattggtcagacaaaataatgttttttgtagcaacaatgaagaaatg

SEQ ID NO: 33007 - DNA, 1188 bp, Muscodor strobelii
  misc_feature: SGI cDNA ID NO. 571379
  misc_feature: Encodes the peptide sequence at SEQ ID NO 33008
atggcttcgacgccaatggacctcgaccctgccgagtcgtcgtcgcctgccaatgggacgccatctacctcccttcatatcacgagaacactgggttccaaccttcccagtacgtctgcagtaacggacatcatcggcaacttcaggcctacaaaacaattcaagcgcaccaatctcaaagatggccaaccccagccctatgtccttagcctcgacttcgacgacccgggcgagctcctgatgacctccgagagcgacgagtccatacagatctacaaagtgcgggaagggagacacgacaagcagctgctcagcaagaagtacggtgtcaagttagccaagttcacgcgcaacagctcaagcatcatcttcgcaagtacacagcagaatgatgcgattcggtatttgacgacacacgacaatgcattcatccgctacttcgaaggccacgaggcacccgtcacatgtctcgccgtacaccctggcaccgacgacttcatttcctgcagcaaagacaacacagtccggttatggaatgccagtacaaaaaatgccacaggaatgttgaatctgaccacacctttcctttcagctttcgacccgagcggccaaatctttgcggtggcctcgccatcagctggacaaatattgctctacgaccatcggaacttcgacaaggcgcctttctcaacatttgacgtcgttgatgcgggcagatacgtagagaccaacatggatagtaacaacttgaatacaggctggactaagctggcatttgccaacgatgggcgcacgatcctactgggtaccaagggcaaaggacacttcctcctagactcgttcaacggcagtctcaaagcatttctgcagaagccggaaggtaggaccaaccggctcgcgcccggagaagatgccacgatgaacggcggtgggtggacgggtagcaacgttgagggcagcggagactgctgcttcacacccgacggcagatacgtgattggcggcacgaagaagggagtggtggtctgggatacactgggacagacagatgagaaaaaggtgctggcaccgtgtcacacgctagaggatccgcgacaggcggcggtggtgtctttcaacccgcggttcaatttctttgctacagcagaccaggacgtggtcttttggcttcccgatcagcatgcttag

SEQ ID NO: 33008 - protein, 395 aa, Muscodor strobelii
  misc_feature: SGI Peptide ID NO. 571379
  misc_feature (141)..(179): Pfam Id: PF00400 Pfam Desc: WD domain, G-beta repeat
  misc_feature (1)..(392): NCBI GI: 171687070 Blast Desc: protein product [Podospora anserina] gi|170943496|emb|CAP69149.1| protein product [Podospora anserina]
  misc_feature (1)..(395): NCBI GI: 256729755 Blast Desc: histone H3 methyltransferase complex and RNA cleavage factor II complex, subunit SWD2 [Nectria haematococca mpVI 77-13-4]
  misc_feature (1)..(391): NCBI GI: 85109233 Blast Desc: NCU07885 [Neurospora crassa OR74A] gi|28924454|gb|EAA33582.1| NCU07885 [Neurospora crassa OR74A]
  misc_feature (6)..(395): NCBI GI: 39977007 Blast Desc: MGG_06406 [Magnaporthe grisea 70-15] gi|145016181|gb|EDK00671.1| MGG_06406 [Magnaporthe grisea 70-15]
  misc_feature (1)..(392): NCBI GI: 46122071 Blast Desc: FG05413.1 [Gibberella zeae PH-1]
  misc_feature (1)..(395): NCBI GI: 261358460 Blast Desc: WD repeat-containing protein [Verticillium albo-atrum VaMs.102]
  misc_feature (33)..(392): NCBI GI: 154303856 Blast Desc: BC1G_08812 [Botryotinia fuckeliana B05.10] gi|150854396|gb|EDN29588.1| BC1G_08812 [Botryotinia fuckeliana B05.10]
  misc_feature (1)..(392): NCBI GI: 156040768 Blast Desc: SS1G_11362 [Sclerotinia sclerotiorum 1980] gi|154695746|gb|EDN95484.1| SS1G_11362 [Sclerotinia sclerotiorum 1980]
  misc_feature (38)..(395): NCBI GI: 159126858 Blast Desc: WD repeat protein [Aspergillus fumigatus A1163]
  misc_feature (38)..(395): NCBI GI: 119478849 Blast Desc: WD repeat protein [Neosartorya fischeri NRRL 181] gi|119407614|gb|EAW17563.1| WD repeat protein [Neosartorya fischeri NRRL 181]
  misc_feature (86)..(385): SWISSPROT Homolog: EC 2.7.11.1 Non-specific serine/threonine protein kinase
MASTPMDLDPAESSSPANGTPSTSLHITRTLGSNLPSTSAVTDIIGNFRPTKQFKRTNLKDGQPQPYVLSLDFDDPGELLMTSESDESIQIYKVREGRHDKQLLSKKYGVKLAKFTRNSSSIIFASTQQNDAIRYLTTHDNAFIRYFEGHEAPVTCLAVHPGTDDFISCSKDNTVRLWNASTKNATGMLNLTTPFLSAFDPSGQIFAVASPSAGQILLYDHRNFDKAPFSTFDVVDAGRYVETNMDSNNLNTGWTKLAFANDGRTILLGTKGKGHFLLDSFNGSLKAFLQKPEGRTNRLAPGEDATMNGGGWTGSNVEGSGDCCFTPDGRYVIGGTKKGVVVWDTLGQTDEKKVLAPCHTLEDPRQAAVVSFNPRFNFFATADQDVVFWLPDQHA

SEQ ID NO: 33009 - DNA, 4886 bp, Muscodor strobelii
  misc_feature: SGI EST ID NO. CUFF.78413.0
  misc_feature: Variant of the nucleotide sequence at SEQ ID NO 33007
gtcgccgatctcaagctctcttctcccatctctcatcacacaatacctgcacgacacagcatggcttcgacgccaatggacctcgaccctgccgagtcgtcgtcgcctgccaatgggacgccatctacctcccttcatatcacgagaacactgggttccaaccttcccagtacgtctgcagtaacggacatcatcggcaacttcaggcctacaaaacaattcaagcgcaccaatctcaaagatggccaaccccagccctatgtccttagcctcgacttcgacgacccgggcgagctcctgatgacctccgagagcgacgagtccatacagatctacaaagtgcgggaagggagacacgacaagcagctgctcagcaagaagtacggtgtcaagttagccaagttcacgcgcaacagctcaagcatcatcttcgcaagtacacagcagaatgatgcgattcggtatttgacgacacacgacaatgcattcatccgctacttcgaaggccacgaggcacccgtcacatgtctcgccgtacaccctggcaccgacgacttcatttcctgcagcaaagacaacacagtccggttatggaatgccagtacaaaaaatgccacaggaatgttgaatctgaccacacctttcctttcagctttcgacccgagcggccaaatctttgcggtggcctcgccatcagctggacaaatattgctctacgaccatcggaacttcgacaaggcgcctttctcaacatttgacgtcgttgatgcgggcagatacgtagagaccaacatggatagtaacaacttgaatacaggctggactaagctggcatttgccaacgatgggcgcacgatcctactgggtaccaagggcaaaggacacttcctcctagactcgttcaacggcagtctcaaagcatttctgcagaagccggaaggtaggaccaaccggctcgcgcccggagaagatgccacgatgaacggcggtgggtggacgggtagcaacgttgagggcagcggagactgctgcttcacacccgacggcagatacgtgattggcggcacgaagaagggagtggtggtctgggatacactgggacagacagatgagaaaaaggtgctggcaccgtgtcacacgctagaggatccgcgacaggcggcggtggtgtctttcaacccgcggttcaatttctttgctacagcagaccaggacgtggtcttttggcttcccgatcagcatgcttagaagggtgctcggaaaaaggaagatgcactcagtgacatgacgaatatcgtcaggcaaggcatgttgcagctagggccaatgccaatgcggcgcattaggcatctgtgagtaagtcacattggcagcattgaggctgtgtaatatcactagcacctgagaaatgggaagacgaatagggagtaaagagagacggaaaagataccctcacagttactacgtattgtgtgtctagaaacgttaggttccatgacaagccttctgatacatattagtaactaagtggtagtgcgattgtgacggagtgaagcttgagctgaattgccccacgatccctgaaacgggatgaggctggaaccccacctttggtcaccgcaccaaaacttggagattgcaaccaccgaccatttcccatcccacctcaactctaatcactaaccgatcccgccacacaaacaacggctcacgcgaccaccttcgtccttatcgccctcacctaatctgactctgatttcagtacacaactcacagcttcagtcctcacgcgacccaccatcgacgaccgaacgcctccccatattctgtccgacccaaatcctcggctggagatacgtccaagggctatcgagtagcaccagacagcaggggccaagtacccgaccgccaacacacaaaatgccaacctacaaaacaagccaggaatggcttcaccaatcctcactactactcgatgcacggcctacaaccacccgaataacaacaacctactccctctcaaactctcacgccaaaaagcgcgccgcccgcgccgccgccgatccctcctcaaaagacccatcctcgtcctcagcacccacacccctacccccccgaggcgtcctagtcctaaaaacctacgatcccgtatcaggcgcctgcctaaagtaccgcaccacgaaagccgccgaagtctcccgcatgatcatgtgtctcgggcagctcggtcgaaagatggccgcgcttccaagtgatgaaaatgccgtggccgacgtcaaggaggaggaaggcggcgaagtcaagactgaccccgctgtgaagaacgaggggaaggctgagggaaaggctgaggtgaagagtgaagttaaaaaggagagtacgccgcaacagggaggagcaggaggcggtgggaagggcaagaagaagaaggggaagaggtagaggtgtgcttagggggatagatctgataagaagtggaagggggaggaaagggaatgggaagcgtgggtagatgtagaacgcggaattcatgaaatcgagaacaaaagttctcaatctgcgattctctggatctccagtcctggtgtgctccctactggcctcctattaaagaaacagagagggcagtcgagagagcgcctacaccttagatatcgatgggaatgtatacagaaaacatgttcaactgcgtgtctcgcataacacacagaattcctaggtctaagccgcaaaatcacaacagtcaaggaaccaagcgagataacatcttaaatcatcgtctgacattaagcgcctacttcattgaagctcataacgcttccaaatatgttcgtacatcgcgatgcgcagttaaaagaaaaagcgtctttcgtttcccttcccacccctcgagccaacctaggctcccagccacaaaaaggcatccatgccatccaacgaacgcccatacgcctctttgtagacacaacaatactctgcagtcgagtcttagtccagacattaatgacaaaagaaaataccaccacagcgatgcaagcaatgcagataggacagggctagtgcctcaagtctatagtaggatgtcatatacacgaggcggatatgaagatgtgctgtggtgttttgatcgtaaaaaggtgtgcgaaatgggtatcatgagggaagtgtttagttgtttccgatcagcaacagctggcgtgaagtcacagcgaagaggatctaggcagggggtgatccgcttagaagtcatcatcgaaactgaagtcaccgccgttgtcgttcgcagcagcggcaggggcttctgaagatgctacgtcctcgttggagacgttcttcttggtgctgtgcatgacgccagccttctggtactcgccaacccgcttctcgaagaagttggtcttgccaccgagcgagatgttctccataaagtcaaaggggttggtagcacgatagaccttctcattgccaagggcgacgaggagacggtcagcaacaaactcgatgtactgcttcatgaggttggagttcatgcccaagagggcgcaaggcagagcctcggtcaagaactcttgctcgattttgacagcatcgacaatgacatcctcgacaaccttcttgctgggtcggttcttcaagtgagagaacaacaagcaggcaaagtcggtgtgcagaccctcgtcacgagaaatgagttcgttggagaaggtcaaaccaggcatcaggccacgcttcttgagccagaaaatggaagcgaaggcaccgctgaagaaaataccctccacagcagcgaaggcaatcagacgttgggcaaaggtggagttgcggtcgctaatccacttgagagcccagtcggccttcttgcggatggcagggactgaaggcgcgttagaggaatgtgacatgttaagagcaataggggtcaagactcactggtgtcaatagcattgaaaaggtgggtacgctgggcaggctccttgacgtatgtgtcgatgaggagcgagtatgtctccgagtggatgttctccatcatgatctggaaaccgtagaagcatcgggcctctgggatctggacctcaccgctgaagcgctcgaccaggttctcgttgacaatgccgtctgaggctgcgaagaaggcaaggatgtgtgagatgaagtacttctcgtcctcattgatcttgttgttccagtcgtggagatccttggacaggtcaatctcctcagccgtccagaaagatgcctcggccttcttgtacatttgccatatctgtaggagaggtgggatgttagtgccatgtcgcgtagagtggagccactttacgcgtgtaaagacgcgctactcacctcgtggtacttgatggggaagaggacgaagcgctgggggttctcttgcaggaggggctcgtcggcttcctcagctttgatgccagcagccacggtaggcttgggctcttcaggcttcttcatgggggctttgtaggagtcgatctgactggcgaggctgtggatgtcggcatcggcagcggcgttctccttgttgtcggccgaaaagtctagcttcttcaccggcgactcgatcttgaagttctcaatggctgaggacatctgtagggaaatgcgtgttagtcgcaatttgaaagcaagacgaaaatactggagtggcaaaacacgtcatgtaccattttggaaggcgtcacttcggagttcattgtgtgcaattgtgaggtcgcgcgtggaattggaggatgtagacaaagaagtcagagacaagtttgaactgatcaccaaaggacaggagatatatgcgcgtaaaatggtagtgcagagtgtgtgagtgcgtggtgaaggtgatgcagatgtagctttggaagcgtgttttggccgggtct

SEQ ID NO: 33010 - DNA, 522 bp, Muscodor strobelii
  misc_feature: SGI cDNA ID NO. 571380
  misc_feature: Reduced expression when VOC is produced
  misc_feature: Encodes the peptide sequence at SEQ ID NO 33011
atgccaacctacaaaacaagccaggaatggcttcaccaatcctcactactactcgatgcacggcctacaaccacccgaataacaacaacctactccctctcaaactctcacgccaaaaagcgcgccgcccgcgccgccgccgatccctcctcaaaagacccatcctcgtcctcagcacccacacccctacccccccgaggcgtcctagtcctaaaaacctacgatcccgtatcaggcgcctgcctaaagtaccgcaccacgaaagccgccgaagtctcccgcatgatcatgtgtctcgggcagctcggtcgaaagatggccgcgcttccaagtgatgaaaatgccgtggccgacgtcaaggaggaggaaggcggcgaagtcaagactgaccccgctgtgaagaacgaggggaaggctgagggaaaggctgaggtgaagagtgaagttaaaaaggagagtacgccgcaacagggaggagcaggaggcggtgggaagggcaagaagaagaaggggaagaggtag

SEQ ID NO: 33011 - protein, 173 aa, Muscodor strobelii
  misc_feature: SGI Peptide ID NO. 571380
  misc_feature (1)..(126): NCBI GI: 256729757 Blast Desc: NECHADRAFT_83894 [Nectria haematococca mpVI 77-13-4]
  misc_feature (1)..(127): NCBI GI: 145608742 Blast Desc: MGG_06407 [Magnaporthe grisea 70-15] gi|145016180|gb|EDK00670.1| MGG_06407 [Magnaporthe grisea 70-15]
  misc_feature (1)..(113): NCBI GI: 85109235 Blast Desc: NCU07886 [Neurospora crassa OR74A] gi|28924455|gb|EAA33583.1| [Neurospora crassa OR74A]
  misc_feature (1)..(128): NCBI GI: 169625405 Blast Desc: SNOG_15974 [Phaeosphaeria nodorum SN15] gi|111055433|gb|EAT76553.1| SNOG_15974 [Phaeosphaeria nodorum SN15]
  misc_feature (1)..(156): NCBI GI: 154296562 Blast Desc: BC1G_12689 [Botryotinia fuckeliana B05.10] gi|150843272|gb|EDN18465.1| BC1G_12689 [Botryotinia fuckeliana B05.10]
  misc_feature (1)..(124): NCBI GI: 156058954 Blast Desc: SS1G_03489 [Sclerotinia sclerotiorum 1980] gi|154701276|gb|EDO01015.1| SS1G_03489 [Sclerotinia sclerotiorum 1980]
  misc_feature (1)..(128): NCBI GI: 189199506 Blast Desc: conserved [Pyrenophora tritici-repentis Pt-1C-BFP] gi|187983189|gb|EDU48677.1| conserved [Pyrenophora tritici-repentis Pt-1C-BFP]
  misc_feature (1)..(109): NCBI GI: 116191727 Blast Desc: [Chaetomium globosum CBS 148.51] gi|88181494|gb|EAQ88962.1| [Chaetomium globosum CBS 148.51]
  misc_feature (1)..(110): NCBI GI: 46122069 Blast Desc: FG05412.1 [Gibberella zeae PH-1]
  misc_feature (1)..(118): NCBI GI: 226284877 Blast Desc: PAAG_02498 [Paracoccidioides brasiliensis Pb01]
  misc_feature: Useful for introducing or modulating the production of volatile compounds
MPTYKTSQEWLHQSSLLLDARPTTTRITTTYSLSNSHAKKRAARAAADPSSKDPSSSSAPTPLPPRGVLVLKTYDPVSGACLKYRTTKAAEVSRMIMCLGQLGRKMAALPSDENAVADVKEEEGGEVKTDPAVKNEGKAEGKAEVKSEVKKESTPQQGGAGGGGKGKKKKGKR

SEQ ID NO: 33012 - DNA, 4886 bp, Muscodor strobelii; identical to SEQ ID NO: 33009
  misc_feature: SGI EST ID NO. CUFF.78413.0
  misc_feature: Variant of the nucleotide sequence at SEQ ID NO 33010

SEQ ID NO: 33013 - DNA, 1260 bp, Muscodor strobelii
  misc_feature: SGI cDNA ID NO. 571381
  misc_feature: Reduced expression when VOC is produced
  misc_feature: Encodes the peptide sequence at SEQ ID NO 33014
atgaactccgaagtgacgccttccaaaatgatgtcctcagccattgagaacttcaagatcgagtcgccggtgaagaagctagacttttcggccgacaacaaggagaacgccgctgccgatgccgacatccacagcctcgccagtcagatcgactcctacaaagcccccatgaagaagcctgaagagcccaagcctaccgtggctgctggcatcaaagctgaggaagccgacgagcccctcctgcaagagaacccccagcgcttcgtcctcttccccatcaagtaccacgagatatggcaaatgtacaagaaggccgaggcatctttctggacggctgaggagattgacctgtccaaggatctccacgactggaacaacaagatcaatgaggacgagaagtacttcatctcacacatccttgccttcttcgcagcctcagacggcattgtcaacgagaacctggtcgagcgcttcagcggtgaggtccagatcccagaggcccgatgcttctacggtttccagatcatgatggagaacatccactcggagacatactcgctcctcatcgacacatacgtcaaggagcctgcccagcgtacccaccttttcaatgctattgacaccatccctgccatccgcaagaaggccgactgggctctcaagtggattagcgaccgcaactccacctttgcccaacgtctgattgccttcgctgctgtggagggtattttcttcagcggtgccttcgcttccattttctggctcaagaagcgtggcctgatgcctggtttgaccttctccaacgaactcatttctcgtgacgagggtctgcacaccgactttgcctgcttgttgttctctcacttgaagaaccgacccagcaagaaggttgtcgaggatgtcattgtcgatgctgtcaaaatcgagcaagagttcttgaccgaggctctgccttgcgccctcttgggcatgaactccaacctcatgaagcagtacatcgagtttgttgctgaccgtctcctcgtcgcccttggcaatgagaaggtctatcgtgctaccaacccctttgactttatggagaacatctcgctcggtggcaagaccaacttcttcgagaagcgggttggcgagtaccagaaggctggcgtcatgcacagcaccaagaagaacgtctccaacgaggacgtagcatcttcagaagcccctgccgctgctgcgaacgacaacggcggtgacttcagtttcgatgatgacttctaa

SEQ ID NO: 33014 - protein, 419 aa, Muscodor strobelii
  misc_feature: SGI Peptide ID NO. 571381
  misc_feature (78)..(360): Pfam Id: PF00268 Pfam Desc: Ribonucleotide reductase, small chain
  misc_feature (1)..(419): NCBI GI: 116191729 Blast Desc: CHGG_05582 [Chaetomium globosum CBS 148.51] gi|88181495|gb|EAQ88963.1| CHGG_05582 [Chaetomium globosum CBS 148.51]
  misc_feature (1)..(419): NCBI GI: 171687074 Blast Desc: protein product [Podospora anserina] gi|170943498|emb|CAP69151.1| protein product [Podospora anserina]
  misc_feature (1)..(419): NCBI GI: 261358458 Blast Desc: ribonucleoside-diphosphate reductase small chain [Verticillium albo-atrum VaMs.102]
  misc_feature (1)..(419): NCBI GI: 85109237 Blast Desc: ribonucleoside-diphosphate reductase M2 subunit [Neurospora crassa OR74A] gi|30316285|sp|Q9C167.2|RIR2_NEUCR RecName: Full=Ribonucleoside-diphosphate reductase small chain;
  misc_feature (1)..(419): NCBI GI: 156058956 Blast Desc: SS1G_03490 [Sclerotinia sclerotiorum 1980] gi|154701277|gb|EDO01016.1| SS1G_03490 [Sclerotinia sclerotiorum 1980]
  misc_feature (1)..(419): NCBI GI: 46122063 Blast Desc: FG05409.1 [Gibberella zeae PH-1]
  misc_feature (1)..(419): NCBI GI: 256729943 Blast Desc: [Nectria haematococca mpVI 77-13-4]
  misc_feature (1)..(419): NCBI GI: 154296564 Blast Desc: ribonucleotide reductase small subunit [Botryotinia fuckeliana B05.10] gi|150843273|gb|EDN18466.1| ribonucleotide reductase small subunit [Botryotinia fuckeliana B05.10]
  misc_feature (4)..(419): NCBI GI: 39977011 Blast Desc: MGG_06408 [Magnaporthe grisea 70-15] gi|145016179|gb|EDK00669.1| MGG_06408 [Magnaporthe grisea 70-15]
  misc_feature (1)..(419): NCBI GI: 212533263 Blast Desc: ribonucleotide reductase small subunit RnrA, [Penicillium marneffei ATCC 18224] gi|210072152|gb|EEA26241.1| ribonucleotide reductase small subunit RnrA, [Penicillium ATCC
  misc_feature (1)..(396): SWISSPROT Homolog: EC 1.17.4.1 Ribonucleoside-diphosphate reductase
  misc_feature: Useful for introducing or modulating the production of volatile compounds
MNSEVTPSKMMSSAIENFKIESPVKKLDFSADNKENAAADADIHSLASQIDSYKAPMKKPEEPKPTVAAGIKAEEADEPLLQENPQRFVLFPIKYHEIWQMYKKAEASFWTAEEIDLSKDLHDWNNKINEDEKYFISHILAFFAASDGIVNENLVERFSGEVQIPEARCFYGFQIMMENIHSETYSLLIDTYVKEPAQRTHLFNAIDTIPAIRKKADWALKWISDRNSTFAQRLIAFAAVEGIFFSGAFASIFWLKKRGLMPGLTFSNELISRDEGLHTDFACLLFSHLKNRPSKKVVEDVIVDAVKIEQEFLTEALPCALLGMNSNLMKQYIEFVADRLLVALGNEKVYRATNPFDFMENISLGGKTNFFEKRVGEYQKAGVMHSTKKNVSNEDVASSEAPAAAANDNGGDFSFDDDF

SEQ ID NO: 33015 - DNA, 4624 bp, Muscodor strobelii
  misc_feature: SGI EST ID NO. CUFF.78414.1
  misc_feature: Variant of the nucleotide sequence at SEQ ID NO 33013
agacccggccaaaacacgcttccaaagctacatctgcatcaccttcaccacgcactcacacactctgcactaccattttacgcgcatatatctcctgtcctttggtgatcagttcaaacttgtctctgacttctttgtctacatcctccaattccacgcgcgacctcacaattgcacacaatgaactccgaagtgacgccttccaaaatgatgtcctcagccattgagaacttcaagatcgagtcgccggtgaagaagctagacttttcggccgacaacaaggagaacgccgctgccgatgccgacatccacagcctcgccagtcagatcgactcctacaaagcccccatgaagaagcctgaagagcccaagcctaccgtggctgctggcatcaaagctgaggaagccgacgagcccctcctgcaagagaacccccagcgcttcgtcctcttccccatcaagtaccacgagatatggcaaatgtacaagaaggccgaggcatctttctggacggctgaggagattgacctgtccaaggatctccacgactggaacaacaagatcaatgaggacgagaagtacttcatctcacacatccttgccttcttcgcagcctcagacggcattgtcaacgagaacctggtcgagcgcttcagcggtgaggtccagatcccagaggcccgatgcttctacggtttccagatcatgatggagaacatccactcggagacatactcgctcctcatcgacacatacgtcaaggagcctgcccagcgtacccaccttttcaatgctattgacaccatccctgccatccgcaagaaggccgactgggctctcaagtggattagcgaccgcaactccacctttgcccaacgtctgattgccttcgctgctgtggagggtattttcttcagcggtgccttcgcttccattttctggctcaagaagcgtggcctgatgcctggtttgaccttctccaacgaactcatttctcgtgacgagggtctgcacaccgactttgcctgcttgttgttctctcacttgaagaaccgacccagcaagaaggttgtcgaggatgtcattgtcgatgctgtcaaaatcgagcaagagttcttgaccgaggctctgccttgcgccctcttgggcatgaactccaacctcatgaagcagtacatcgagtttgttgctgaccgtctcctcgtcgcccttggcaatgagaaggtctatcgtgctaccaacccctttgactttatggagaacatctcgctcggtggcaagaccaacttcttcgagaagcgggttggcgagtaccagaaggctggcgtcatgcacagcaccaagaagaacgtctccaacgaggacgtagcatcttcagaagcccctgccgctgctgcgaacgacaacggcggtgacttcagtttcgatgatgacttctaagcggatcaccccctgcctagatcctcttcgctgtgacttcacgccagctgttgctgatcggaaacaactaaacacttccctcatgatacccatttcgcacacctttttacgatcaaaacaccacagcacatcttcatatccgcctcgtgtatatgacatcctactatagacttgaggcactagccctgtcctatctgcattgcttgcatcgctgtggtggtattttcttttgtcattaatgtctggactaagactcgactgcagagtattgttgtgtctacaaagaggcgtatgggcgttcgttggatggcatggatgcctttttgtggctgggagcctaggttggctcgaggggtgggaagggaaacgaaagacgctttttcttttaactgcgcatcgcgatgtacgaacatatttggaagcgttatgagcttcaatgaagtaggcgcttaatgtcagacgatgatttaagatgttatctcgcttggttccttgactgttgtgattttgcggcttagacctaggaattctgtgtgttatgcgagacacgcagttgaacatgttttctgtatacattcccatcgatatctaaggtgtaggcgctctctcgactgccctctctgtttctttaataggaggccagtagggagcacaccaggactggagatccagagaatcgcagattgagaacttttgttctcgatttcatgaattccgcgttctacatctacccacgcttcccattccctttcctcccccttccacttcttatcagatctatccccctaagcacacctctacctcttccccttcttcttcttgcccttcccaccgcctcctgctcctccctgttgcggcgtactctcctttttaacttcactcttcacctcagcctttccctcagccttcccctcgttcttcacagcggggtcagtcttgacttcgccgccttcctcctccttgacgtcggccacggcattttcatcacttggaagcgcggccatctttcgaccgagctgcccgagacacatgatcatgcgggagacttcggcggctttcgtggtgcggtactttaggcaggcgcctgatacgggatcgtaggtttttaggactaggacgcctcgggggggtaggggtgtgggtgctgaggacgaggatgggtcttttgaggagggatcggcggcggcgcgggcggcgcgctttttggcgtgagagtttgagagggagtaggttgttgttattcgggtctgggggtggtttgttagcttttgggttgtgcgggaggtggagggtgttatgggggatgtgaaagatgggaatgagcgttggttgaggaggagaacttacggttgtaggccgtgcatcgagtagtagtgaggattggtgaagccattcctggcttgttttgtaggttggcattttgtgtgttggcggtcgggtacttggcccctgctgtctggtgctactcgatagcccttggacgtatctccagccgaggatttgggtcggacagaatatggggaggcgttcggtcgtcgatggtgggtcgcgtgaggactgaagctgtgagttgtgtactgaaatcagagtcagattaggtgagggcgataaggacgaaggtggtcgcgtgagccgttgtttgtgtggcgggatcggttagtgattagagttgaggtgggatgggaaatggtcggtggttgcaatctccaagttttggtgcggtgaccaaaggtggggttccagcctcatcccgtttcagggatcgtggggcaattcagctcaagcttcactccgtcacaatcgcactaccacttagttactaatatgtatcagaaggcttgtcatggaacctaacgtttctagacacacaatacgtagtaactgtgagggtatcttttccgtctctctttactccctattcgtcttcccatttctcaggtgctagtgatattacacagcctcaatgctgccaatgtgacttactcacagatgcctaatgcgccgcattggcattggccctagctgcaacatgccttgcctgacgatattcgtcatgtcactgagtgcatcttcctttttccgagcacccttctaagcatgctgatcgggaagccaaaagaccacgtcctggtctgctgtagcaaagaaattgaaccgcgggttgaaagacaccaccgccgcctgtcgcggatcctctagcgtgtgacacggtgccagcacctttttctcatctgtctgtcccagtgtatcccagaccaccactcccttcttcgtgccgccaatcacgtatctgccgtcgggtgtgaagcagcagtctccgctgccctcaacgttgctacccgtccacccaccgccgttcatcgtggcatcttctccgggcgcgagccggttggtcctaccttccggcttctgcagaaatgctttgagactgccgttgaacgagtctaggaggaagtgtcctttgcccttggtacccagtaggatcgtgcgcccatcgttggcaaatgccagcttagtccagcctgtattcaagttgttactatccatgttggtctctacgtatctgcccgcatcaacgacgtcaaatgttgagaaaggcgccttgtcgaagttccgatggtcgtagagcaatatttgtccagctgatggcgaggccaccgcaaagatttggccgctcgggtcgaaagctgaaaggaaaggtgtggtcagattcaacattcctgtggcattttttgtactggcattccataaccggactgtgttgtctttgctgcaggaaatgaagtcgtcggtgccagggtgtacggcgagacatgtgacgggtgcctcgtggccttcgaagtagcggatgaatgcattgtcgtgtgtcgtcaaataccgaatcgcatctgtcaggaaaatgtgtgagctcttcgccgctgaggtcactcttggtcatgggcaagtgcataccattctgctgtgtacttgcgaagatgatgcttgagctgttgcgcgtgaacttggctaacttgacaccgtacttcttgctgagcagctgcttgtcgtgtctcccttcccgcactttgtagatctgtatggactcgtcgctctcggaggtcatcaggagctcgcccgggtcgtcgaagtcgaggctaaggacatagggctggggttggccatctttgagattggtgcgcttgaa

SEQ ID NO: 33016 - DNA, 804 bp, Muscodor strobelii
  misc_feature: SGI cDNA ID NO. 571382
  misc_feature: Reduced expression when VOC is produced
  misc_feature: Encodes the peptide sequence at SEQ ID NO 33017
atggcgagcgcaatagcccaattcgctgccaagcgaatcttcaaagagtcgctgtcaaacaagtcgggactcgaggatgtgtatttcgagcaggtgcctgcaacgcgcctagacggcaatccggataaaaagttcaagagagtccgaaaggcccttccaccgggactcaatgatcatgatgccaagattcttacgaaggtgaagaggagggcatacaggctggacatgagcttcggcagttttatgggcatcaagtttggttggggcagcgtaatcggtattgtgcctttcatcggtgattttgcggacgcgcttttggccatgatggttattcggaccgccaagggaatcgaaggcggattgccaaacaacgtgctgctgaatatgtacatctgggtcatcatcgatcttatcgtcggcctgacaccgttcattggcgacttgttcgactgcgtgatcctggccaatactcgaaacgccaagttgttggaagaccatctccgtaagaagggacagaagagtctgaaacaacgcggtctcccggttccagaagttgaccccagcaagccatctgaattcgaccgcttccactccgaagtctctgcttcgcccgaccatgctcctcaaactagtggtgtcgtagagcccgtcacgccaacgcgccctcaggaagccagagttcacgacaaccaacagaagaagtccggcggaggtttattcggcttcggcggaaagaaatcaaagcccgccgatatcgagtctggggcggctgcatcaggccacctaaacattgggagtcagtaa

SEQ ID NO: 33017 - protein, 267 aa, Muscodor strobelii
  misc_feature: SGI Peptide ID NO. 571382
  misc_feature (1)..(260): NCBI GI: 256729944 Blast Desc: NECHADRAFT_62938 [Nectria haematococca mpVI 77-13-4]
  misc_feature (1)..(255): NCBI GI: 261358457 Blast Desc: conserved [Verticillium albo-atrum VaMs.102]
  misc_feature (1)..(257): NCBI GI: 46122065 Blast Desc: FG05410.1 [Gibberella zeae PH-1]
  misc_feature (1)..(255): NCBI GI: 156058958 Blast Desc: SS1G_03491 [Sclerotinia sclerotiorum 1980] gi|154701278|gb|EDO01017.1| SS1G_03491 [Sclerotinia sclerotiorum 1980]
  misc_feature (1)..(222): NCBI GI: 154296568 Blast Desc: BC1G_12692 [Botryotinia fuckeliana B05.10] gi|150843275|gb|EDN18468.1| BC1G_12692 [Botryotinia fuckeliana B05.10]
  misc_feature (1)..(255): NCBI GI: 242777599 Blast Desc: conserved [Talaromyces stipitatus ATCC 10500] gi|218722686|gb|EED22104.1| conserved [Talaromyces stipitatus ATCC 10500]
  misc_feature (1)..(255): NCBI GI: 212533245 Blast Desc: conserved [Penicillium marneffei ATCC 18224] gi|210072143|gb|EEA26232.1| conserved [Penicillium marneffei ATCC 18224]
  misc_feature (1)..(255): NCBI GI: 121713840 Blast Desc: conserved [Aspergillus clavatus NRRL 1] gi|119402684|gb|EAW13105.1| conserved [Aspergillus clavatus NRRL 1]
  misc_feature (1)..(257): NCBI GI: 119478841 Blast Desc: NFIA_074790 [Neosartorya fischeri NRRL 181] gi|119407610|gb|EAW17559.1| conserved [Neosartorya fischeri NRRL 181]
  misc_feature (1)..(257): NCBI GI: 159126862 Blast Desc: PH domain protein [Aspergillus fumigatus A1163]
  misc_feature: Useful for introducing or modulating the production of volatile compounds
MASAIAQFAAKRIFKESLSNKSGLEDVYFEQVPATRLDGNPDKKFKRVRKALPPGLNDHDAKILTKVKRRAYRLDMSFGSFMGIKFGWGSVIGIVPFIGDFADALLAMMVIRTAKGIEGGLPNNVLLNMYIWVIIDLIVGLTPFIGDLFDCVILANTRNAKLLEDHLRKKGQKSLKQRGLPVPEVDPSKPSEFDRFHSEVSASPDHAPQTSGVVEPVTPTRPQEARVHDNQQKKSGGGLFGFGGKKSKPADIESGAAASGHLNIGSQ

SEQ ID NO: 33018 - DNA, 1731 bp, Muscodor strobelii
  misc_feature: SGI EST ID NO. CUFF.78059.0
  misc_feature: Variant of the nucleotide sequence at SEQ ID NO 33016
aaaaacactagctgttacgtcgtcattgggtagcgttgcccgttgtgcattgacgtttcagagcggtcgggtgaatcaatgttagcttggtcttggccctatcaaacgctgtgatatatcccccattgcgtcgcgttctgtggtcgggacccgaggccgcctacaccctccctctctccaagcagcattcttgtcaaccatagtcacaccaacgtcaaagcctcataaaagagttactcgtggttcctagcccagtaatctctccgggaaccttacactctgctgttttctccgttcaataatatcactctatccctcaagattcatcaccaacatggcgagcgcaatagcccaattcgctgccaagcgaatcttcaaagagtcgctgtcaaacaagtcgggactcgaggatgtgtatttcgagcaggtgcctgcaacgcgcctagacggcaatccggataaaaagttcaagagagtccgaaaggcccttccaccgggactcaatgatcatgatgccaagattcttacgaaggtgaagaggagggcatacaggctggacatgagcttcggcagttttatgggcatcaagtttggttggggcagcgtaatcggtattgtgcctttgtaagttgtccttaaagtgccccaatgtccctcccccacggcagccttactaacaaacacgatttaatagcatcggtgattttgcggacgcgcttttggccatgatggttattcggaccgccaagggaatcgaaggcggattgccaaacaacgtgctgctgaatatgtacatctgggtcatcatcgatcttatcgtcggcctgacaccgttcattggcgacttgttcgactgcgtgatcctggccaatactcgaaacgccaagttgttggaagaccatctccgtaagaagggacagaagagtctgaaacaacgcggtctcccggttccagaagttgaccccagcaagccatctgaattcgaccgcttccactccgaagtctctgcttcgcccgaccatgctcctcaaactagtggtgtcgtagagcccgtcacgccaacgcgccctcaggaagccagagttcacgacaaccaacagaagaagtccggcggaggtttattcggcttcggcggaaagaaatcaaagcccgccgatatcgagtctggggcggctgcatcaggccacctaaacattgggagtcagtaatacctcttttcaaccaaaaatttgctcatggggggttgtctcgggagcttgcatgagtaaaatcaccactcaaacaaggaagaaaataactcccaaagggtacataggctcctgcttcaaaggaaagtgggcgaagctagtggcagcgccccttctacttccgtggacgaaccaaccttgatggcagacgcgctttgaacgagcttggagagggtaacgaaaattgaagtttacgaccgaaaaagcacacggcgctttgggacgagtcacgattgcatttggagtttacggcattgctaatgaacaagttcaggggcacaggacggattaccgaacgatcaataatcggaaggcatcagatagcagtatacccagagtaatagatacccattagttaatacagtctgaatgaaacccaccatcttggtcagcttgtagctcgtatgacctaatgatctaaagatgagtcaaactgcattaaagtgcacggtctctagttagaggctccatacttatgctcggc

SEQ ID NO: 33019 - DNA, 750 bp, Muscodor strobelii
  misc_feature: SGI cDNA ID NO. 571383
  misc_feature: Encodes the peptide sequence at SEQ ID NO 33020
atgtcttggactccagctgcgtctgcaaacgatatcgtcaaacatgggtggacggcagtacctcgtgatgcgaatgtcatatttgaggcaagaccaatatctaagccaacagcacttgaagcatcagatattaaatttccatcggatgatcccgttgtcgcaaaagtgcagcagtatgcaaaggaacatctgactgaacaaacctataatcactccatgcgggtgtaccattggggtttctcaattatcaaagatcaatttccagaagatggtagcaagctctcaatgtcgacatgggcattagcttgtttgcttcatgatatcggcaccacgcacgacaacttgcgggcaacattgctatcattcgagttctacggcggcatcctagcactcaacctcgtcaaagaatcaggcgcaccaattgcacaagcagaagctgtagccgaggcaattattcgccatcaagacttggggacggtcgggaaaatcacatttctcggccaagtcattcagcttgcgacaatctacgataacatgggagggaatccaggtctaatcgacgaagcgactcgcattagtgtcaacaaagcatacccgcgaaagggctggagtggatgcttctctaagactatcagagaagagaacggcttgaagccatgggcgcatactactcatcttggagaggaagatttcccggagggagtcaagaacaacaagctcatggccgatgttgatagttggggtctttga

SEQ ID NO: 33020 - protein, 249 aa, Muscodor strobelii
  misc_feature: SGI Peptide ID NO. 571383
  misc_feature (68)..(179): Pfam Id: PF01966 Pfam Desc: HD domain
  misc_feature (15)..(247): NCBI GI: 164429399 Blast Desc: NCU04466 [Neurospora crassa OR74A] gi|157073463|gb|EAA27799.2| NCU04466 [Neurospora crassa OR74A]
  misc_feature (8)..(241): NCBI GI: 256722864 Blast Desc: NECHADRAFT_97503 [Nectria haematococca mpVI 77-13-4]
  misc_feature (8)..(241): NCBI GI: 256724112 Blast Desc: NECHADRAFT_86354 [Nectria haematococca mpVI 77-13-4]
  misc_feature (4)..(241): NCBI GI: 46139235 Blast Desc: FG11132.1 [Gibberella zeae PH-1]
  misc_feature (8)..(245): NCBI GI: 240276115 Blast Desc: urea hydro-lyase/cyanamide hydratase [Ajellomyces capsulatus H143]
  misc_feature (7)..(242): NCBI GI: 240105821 Blast Desc: HD domain containing protein [Coccidioides posadasii C735 delta SOWgp]
  misc_feature (8)..(242): NCBI GI: 212542519 Blast Desc: urea hydro-lyase/cyanamide hydratase, [Penicillium marneffei ATCC 18224] gi|210066321|gb|EEA20414.1| urea hydro-lyase/cyanamide hydratase, [Penicillium marneffei ATCC
  misc_feature (7)..(242): NCBI GI: 258574391 Blast Desc: conserved [Uncinocarpus reesii 1704] gi|237901643|gb|EEP76044.1| conserved [Uncinocarpus reesii 1704]
  misc_feature (10)..(226): NCBI GI: 70986789 Blast Desc: cyanamide hydratase [Aspergillus fumigatus Af293] gi|66846513|gb|EAL86845.1| cyanamide hydratase, [Aspergillus fumigatus Af293] gi|159123345|gb|EDP48465.1| cyanamide hydratase,
  misc_feature (32)..(245): NCBI GI: 225560016 Blast Desc: conserved [Ajellomyces capsulatus G186AR]
  misc_feature (8)..(241): SWISSPROT Homolog: EC 4.2.1.69 Cyanamide hydratase
MSWTPAASANDIVKHGWTAVPRDANVIFEARPISKPTALEASDIKFPSDDPVVAKVQQYAKEHLTEQTYNHSMRVYHWGFSIIKDQFPEDGSKLSMSTWALACLLHDIGTTHDNLRATLLSFEFYGGILALNLVKESGAPIAQAEAVAEAIIRHQDLGTVGKITFLGQVIQLATIYDNMGGNPGLIDEATRISVNKAYPRKGWSGCFSKTIREENGLKPWAHTTHLGEEDFPEGVKNNKLMADVDSWGL

SEQ ID NO: 33021 - DNA, 1740 bp, Muscodor strobelii
  misc_feature: SGI EST ID NO. CUFF.78041.1
  misc_feature: Variant of the nucleotide sequence at SEQ ID NO 33019
ctcgttctttaccaatcacgaacccctaaggttgaggccatcaatcatcgttggagattctacactcacagaaacgtggcggatattgattttagcagcctgcttaagcgagctagcagatattgacctaaagggcatcttcgattggagcaactggaggaaggcagaaaagaactccacgaagccttgcgcctgatgccagagaaagaggcgtctcagataccgctggtcttgtgcgtgtgatatacctagcaatcgtggggcaaagcatcctgtttaacatgcctctctctcaggcactacgaagccttgcacggagctaccaataacccatggcgatagggaggaattcagtcctcactcaccgaacgtcgaatcattatgcttcaaatttcgcagttcacgaaatatcgtcggattacatcattaattctggtctcatcggcctactcggcggacatatcattgacgttaacccagtgatctctactgctccgcagagccgcatcattaaacccgagtcatggaaataagaaaatcaactaatcataaaatctaagtctgcgcgcaggaatttaaggtcgcgcggcatctgcctgcgccaagcaaatgccgcggaggttcaacagcttgactaatcgtgcataacacgtaatattagtatgctaaacctgctaatgtcgtcacgaaatcgtcacatataaataagtccagtttgagatgaaattcaaagatgcatgtcttgtgtagaatcatctcattttattatttaacaagataagctaagccatcatgtcttggactccagctgcgtctgcaaacgatatcgtcaaacatgggtggacggcagtacctcgtgatgcgaatgtcatatttgaggcaagaccaatatctaagccaacagcacttgaagcatcagatattaaatttccatcggatgatcccgttgtcgcaaaagtgcagcagtatgcaaaggaacatctgactgaacaaacctataatcactccatgcgggtgtaccattggggtttctcaattatcaaagatcaatttccagaagatggtagcaagctctcaatgtcgacatgggcattagcttgtttgcttcatgatatcggcaccacgcacgacaacttgcgggcaacattgctatcattcgagttctacggcggcatcctagcactcaacctcgtcaaagaatcaggcgcaccaattgcacaagcagaagctgtagccgaggcaattattcgccatcaagacttggggacggtcgggaaaatcacatttctcggccaagtcattcagcttgcgacaatctacgataacatgggagggaatccaggtctaatcgacgaagcgactcgcattagtgtcaacaaagcatacccgcgaaagggctggagtggatgcttctctaagactatcagagaagagaacggcttgaagccatgggcgcatactactcatcttggagaggaagatttcccggagggagtcaagaacaacaagctcatggccgatgttgatagttggggtctttgacttgttcaagtagacacgaattgatgagggcaaatgatgcgaagatattgaagaattttcatcagtatgatagtcttgtatgagtagcataaggttttattcccaatctctacctttctttggccgctgctcaaaatttgaataatcgttgtatcacgtagaatgatgaaaagacacaggcagatttgaccaagcgtg

SEQ ID NO: 33022 - DNA, 1404 bp, Muscodor strobelii
  misc_feature: SGI cDNA ID NO. 571384
  misc_feature: Encodes the peptide sequence at SEQ ID NO 33023
atggttgccaatcaaggacatgagatcgcaatgtctctggctaagcccaagaagctgccgctgctcgtcttcacgacggcaccgctagcaggccaccttgggccccctattcatcttgctcaagagttgatcagcagaggctacgacgtggctttcatgtcttcggaagacagtaaggctgccgtggaaaagatcggagctgagtggttcgagtgttcttcattctggccagctggagctcaagaggcgcgagcaaagctgccatacggacctgagagaacactattcgatatcgagaacgtattcttggctgtagtaccatcgcgcacagctagtttgaagaccctgctggagacagtacgcgagcgagagcctcagcgtgaagtgctgatcatggccgagacctgcgcgatgtccgcacaggcgtttgcttgtggtgcaccattgcccaagggatatgaccgcatgccgaaagtcattggtctcggcgtcgttcctctcatcgtcacaagttgcgatacggctcctttcggcccaggcttgccacccgactcaactgaatctggacgtgcgagaaaccggatgctccacgagatgatgaacatgggaccgttcaggccactcactgattgcttcatttctaaactcaaggaggtcggttgcaccgctatcccagagccatttccgttctttgatgtcttttccgcatcatgcgacacattgttccaactctgcagcccttcaatggactaccccaggagcgaccttgcgctcaacattcgctacgcaggtgcacttcccccgcggccaatcgctgcgaactatgtcttcccatcctggtggggagaggtaaaagaacaagccaacctcccagatggcactcctagcaagaagaagatagtagtcgttgcacagggaactgtaaacgaggaccaccgtgaactcgtgatccccacgatagaagctctcgccgcccgcgaagacatcatcctcatcgccatcctcggcaagcgaggcgcatctctaccagaaagcgtcacgatcccgcccaacacacgtatcatcgactacctcccatacgatcctctgctggcgatgtccgatctgttcgtgatgaacggggcatacggagctttcctacacgcgggcatcaacggtgtacctgtcatcgctgctggcttgactgaggacaaggcagaggcgtcagctcgagcagactggaacggcttcggaatcaaccttcggactcagcacccgtccgtcgaagctctcgctgaggctgccaagaagatcttggcagatcccttgtacaagctgagagcccagagagtcaaacaagataatgaagatctggatccgttccacatgatcgagaagcagatcaaaaagtatacaactcagtaa

SEQ ID NO: 33023 - protein, 467 aa, Muscodor strobelii
  misc_feature: SGI Peptide ID NO. 571384
  misc_feature (20)..(461): NCBI GI: 46117008 Blast Desc: FG04346.1 [Gibberella zeae PH-1]
  misc_feature (2)..(461): NCBI GI: 256729230 Blast Desc: NECHADRAFT_47739 [Nectria haematococca mpVI 77-13-4]
  misc_feature (20)..(461): NCBI GI: 145236587 Blast Desc: An06g01140 [Aspergillus niger] gi|134075400|emb|CAK39187.1| protein product [Aspergillus niger]
  misc_feature (18)..(463): NCBI GI: 145604911 Blast Desc: MGG_01961 [Magnaporthe grisea 70-15] gi|145012824|gb|EDJ97465.1| MGG_01961 [Magnaporthe grisea 70-15]
  misc_feature (18)..(461): NCBI GI: 39968249 Blast Desc: MGG_02217 [Magnaporthe grisea 70-15] gi|145010100|gb|EDJ94756.1| MGG_02217 [Magnaporthe grisea 70-15]
  misc_feature (17)..(467): NCBI GI: 154309557 Blast Desc: BC1G_07249 [Botryotinia fuckeliana B05.10] gi|150852272|gb|EDN27464.1| BC1G_07249 [Botryotinia fuckeliana B05.10]
  misc_feature (20)..(461): NCBI GI: 156045613 Blast Desc: SS1G_09997 [Sclerotinia sclerotiorum 1980] gi|154694390|gb|EDN94128.1| SS1G_09997 [Sclerotinia sclerotiorum 1980]
  misc_feature (20)..(461): NCBI GI: 39968133 Blast Desc: MGG_02159 [Magnaporthe grisea 70-15] gi|145013049|gb|EDJ97690.1| MGG_02159 [Magnaporthe grisea 70-15]
  misc_feature (16)..(461): NCBI GI: 171679803 Blast Desc: protein product [Podospora anserina] gi|170939527|emb|CAP64755.1| protein product [Podospora anserina]
  misc_feature (17)..(465): NCBI GI: 116205577 Blast Desc: CHGG_10672 [Chaetomium globosum CBS 148.51] gi|88176800|gb|EAQ84268.1| CHGG_10672 [Chaetomium globosum CBS 148.51]
MVANQGHEIAMSLAKPKKLPLLVFTTAPLAGHLGPPIHLAQELISRGYDVAFMSSEDSKAAVEKIGAEWFECSSFWPAGAQEARAKLPYGPERTLFDIENVFLAVVPSRTASLKTLLETVREREPQREVLIMAETCAMSAQAFACGAPLPKGYDRMPKVIGLGVVPLIVTSCDTAPFGPGLPPDSTESGRARNRMLHEMMNMGPFRPLTDCFISKLKEVGCTAIPEPFPFFDVFSASCDTLFQLCSPSMDYPRSDLALNIRYAGALPPRPIAANYVFPSWWGEVKEQANLPDGTPSKKKIVVVAQGTVNEDHRELVIPTIEALAAREDIILIAILGKRGASLPESVTIPPNTRIIDYLPYDPLLAMSDLFVMNGAYGAFLHAGINGVPVIAAGLTEDKAEASARADWNGFGINLRTQHPSVEALAEAAKKILADPLYKLRAQRVKQDNEDLDPFHMIEKQIKKYTTQ

SEQ ID NO: 33024 - DNA, 1424 bp, Muscodor strobelii
  misc_feature: SGI EST ID NO. CUFF.78046.0
  misc_feature: Variant of the nucleotide sequence at SEQ ID NO 33022
ccttgggccccctattcatcttgctcaagagttgatcagcagaggctacgacgtggctttcatgtcttcggaagacagtaaggctgccgtggaaaagatcggagctgagtggttcgagtgttcttcattctggccagctggagctcaagaggcgcgagcaaagctgccatacggacctgagagaacactattcgatatcgagaacgtattcttggctgtagtaccatcgcgcacagctagtttgaagaccctgctggagacagtacgcgagcgagagcctcagcgtgaagtgctgatcatggccgagacctgcgcgatgtccgcacaggcgtttgcttgtggtgcaccattgcccaagggatatgaccgcatgccgaaagtcattggtctcggcgtcgttcctctcatcgtcacaagttgcgatacggctcctttcggcccaggcttgccacccgactcaactgaatctggacgtgcgagaaaccggatgctccacgagatgatgaacatgggaccgttcaggccactcactgattgcttcatttctaaactcaaggaggtcggttgcaccgctatcccagagccatttccgttctttgatgtcttttccgcatcatgcgacacattgttccaactctgcagcccttcaatggactaccccaggagcgaccttgcgctcaacattcgctacgcaggtgcacttcccccgcggccaatcgctgcgaactatgtcttcccatcctggtggggagaggtaaaagaacaagccaacctcccagatggcactcctagcaagaagaagatagtagtcgttgcacagggaactgtaaacgaggaccaccgtgaactcgtgatccccacgatagaagctctcgccgcccgcgaagacatcatcctcatcgccatcctcggcaagcgaggcgcatctctaccagaaagcgtcacgatcccgcccaacacacgtatcatcgactacctcccatacgatcctctgctggcgatgtccgatctgttcgtgatgaacggggcatacggagctttcctacacgcgggcatcaacggtgtacctgtcatcgctgctggcttgactgaggacaaggcagaggcgtcagctcgagcagactggaacggcttcggaatcaaccttcggactcagcacccgtccgtcgaagctctcgctgaggctgccaagaagatcttggcagatcccttgtacaagctgagagcccagagagtcaaacaagataatgaagatctggatccgttccacatgatcgagaagcagatcaaaaagtatacaactcagtaatagcgttgccttcaaattgtgcgacttagtcatttatgagatctttccggtcaatgagtcagccagttcttgttcttgagataggcgaggaataaaatatagagaacaattgtca

SEQ ID NO: 33025 - DNA, 849 bp, Muscodor strobelii
  misc_feature: SGI cDNA ID NO. 571385
  misc_feature: Elevated expression when VOC is produced
  misc_feature: Encodes the peptide sequence at SEQ ID NO 33026
atgcgttactcattcatcatcgctgcctctgggctcctcgccactgtgtcgggacatggcgtagttaggtcgatccaaggtgccaatggagtaactatggcgggactgagcgttatcgatggcactcctcgtgactgtatttcgcctgcctgcggcgccgaggccgataccagtatcatccgcgacaacgagttgggcacgtcgaaggccagtgcattgggtcgaaatcagggtggaggccctatcgatgcttcggccatgatcgcatctttcatgggtacaggagctgctgctgcttccgacaacgcggcaaataagaaggtccgaggcatcctcgatagtcttacaggaggcggcgcaggcggcgacagcgcaggcacaaaaacttcagaggctgcagagacagtcgtggcggattctgcgggcaaaggtgctacttccggtctgccaacctgcgctgacgacggctcgatcaccttgacataccgccagatcaaccaggacggtgccggtccgcttaccgcagatgtcgatggtacatccggtggcaccgaagttgatgccttcaagactgccgaagtcacgcaaaacgtccccggcatcattgctggtgtgtctgctgtgtcgagcaccgatttccctgttacggttcagatgcctgctggcatgacctgtgacgctactgtcggcgatgctaagaatgtctgcattgtgcgtgttcgcaacaatacgcccgctggcccattcggtggctctgctgcattcacccagtctgctgccgccaagaagcgtgccattgcttaccgcttgaaggctcgttctgaggagcagaaccgcaagttgagataa

SEQ ID NO: 33026 - protein, 282 aa, Muscodor strobelii
  misc_feature: SGI Peptide ID NO. 571385
  misc_feature (1)..(275): NCBI GI: 256727385 Blast Desc: NECHADRAFT_76194 [Nectria haematococca mpVI 77-13-4]
  misc_feature (12)..(273): NCBI GI: 242783789 Blast Desc: cell surface protein Mas1, [Talaromyces stipitatus ATCC 10500] gi|218720403|gb|EED19822.1| cell surface protein Mas1, [Talaromyces stipitatus ATCC 10500]
  misc_feature (1)..(273): NCBI GI: 13430279 Blast Desc: AF337557_1 Egh16H1 precursor isoform A [Blumeria graminis f. sp. hordei]
  misc_feature (1)..(273): NCBI GI: 39944382 Blast Desc: MGG_04202 [Magnaporthe grisea 70-15] gi|8347747|gb|AAF74764.1| MAS1 protein [Magnaporthe grisea] gi|145014940|gb|EDJ99508.1| MGG_04202 [Magnaporthe grisea 70-15]
  misc_feature (1)..(273): NCBI GI: 13430281 Blast Desc: AF337558_1 Egh16H1 precursor isoform B [Blumeria graminis f. sp. hordei]
  misc_feature (19)..(275): NCBI GI: 116194908 Blast Desc: CHGG_04052 [Chaetomium globosum CBS 148.51] gi|88179965|gb|EAQ87433.1| CHGG_04052 [Chaetomium globosum CBS 148.51]
  misc_feature (1)..(275): NCBI GI: 46127287 Blast Desc: FG08021.1 [Gibberella zeae PH-1]
  misc_feature (1)..(273): NCBI GI: 154294917 Blast Desc: BC1G_13581 [Botryotinia fuckeliana B05.10] gi|150844539|gb|EDN19732.1| BC1G_13581 [Botryotinia fuckeliana B05.10]
  misc_feature (1)..(273): NCBI GI: 156044416 Blast Desc: SS1G_10311 [Sclerotinia sclerotiorum 1980] gi|154694700|gb|EDN94438.1| SS1G_10311 [Sclerotinia sclerotiorum 1980]
  misc_feature (14)..(280): NCBI GI: 189195484 Blast Desc: cell surface protein (Mas1) [Pyrenophora tritici-repentis Pt-1C-BFP] gi|187979959|gb|EDU46585.1| cell surface protein (Mas1) [Pyrenophora tritici-repentis Pt-1C-BFP]
  misc_feature: Useful for introducing or modulating the production of volatile compounds
MRYSFIIAASGLLATVSGHGVVRSIQGANGVTMAGLSVIDGTPRDCISPACGAEADTSIIRDNELGTSKASALGRNQGGGPIDASAMIASFMGTGAAAASDNAANKKVRGILDSLTGGGAGGDSAGTKTSEAAETVVADSAGKGATSGLPTCADDGSITLTYRQINQDGAGPLTADVDGTSGGTEVDAFKTAEVTQNVPGIIAGVSAVSSTDFPVTVQMPAGMTCDATVGDAKNVCIVRVRNNTPAGPFGGSAAFTQSAAAKKRAIAYRLKARSEEQNRKLR

SEQ ID NO: 33027 - DNA, 1403 bp, Muscodor strobelii
  misc_feature: SGI EST ID NO. CUFF.78050.0
  misc_feature: Variant of the nucleotide sequence at SEQ ID NO 33025
gccaactactcgtgttgaaggcttcacgagataggagatgtgatgaatgtatgatgaagaggttgaaagcagttgatgagagtatgatgttgcacgcaagaacgaaatgcttataagatgctgaagtcccaagagattcgaggtttcattctttctcatccgcatcttcacttctcttcacgatacccactagacttcatagcttcgccaggctttgcgaagaactcatcagtacatatttcttcacttcaacttctttcctttccacagctttgaaattcatctcaactgcccaggtggctaatatacaacactacactcttacacgtatcacataatcaaaaaccaaactcacaaatctacaaacatgcgttactcattcatcatcgctgcctctgggctcctcgccactgtgtcgggacatggcgtagttaggtcgatccaaggtgccaatggagtaactatggcgggactgagcgttatcgatggcactcctcgtgactgtatttcgcctgcctgcggcgccgaggccgataccagtatcatccgcgacaacgagttgggcacgtcgaaggccagtgcattgggtcgaaatcagggtggaggccctatcgatgcttcggccatgatcgcatctttcatgggtacaggagctgctgctgcttccgacaacgcggcaaataagaaggtccgaggcatcctcgatagtcttacaggaggcggcgcaggcggcgacagcgcaggcacaaaaacttcagaggctgcagagacagtcgtggcggattctgcgggcaaaggtgctacttccggtctgccaacctgcgctgacgacggctcgatcaccttgacataccgccagatcaaccaggacggtgccggtccgcttaccgcagatgtcgatggtacatccggtggcaccgaagttgatgccttcaagactgccgaagtcacgcaaaacgtccccggcatcattgctggtgtgtctgctgtgtcgagcaccgatttccctgttacggttcagatgcctgctggcatgacctgtgacgctactgtcggcgatgctaagaatgtctgcattgtgcgtgttcgcaacaatacgcccgctggcccattcggtggctctgctgcattcacccagtctgctgccgccaagaagcgtgccattgcttaccgcttgaaggctcgttctgaggagcagaaccgcaagttgagataagtgtgtaatcggagatctcaatgctaacgccttgaaggcgaagcagcgcagtcaggtagtttgacctagtgacacggtttagaatcttggatttttcagttatggattataggctggttctggtatatataggcgtatagaaaactgcaatttcattgagtaaaaagcctcttatctggtatttgcg

SEQ ID NO: 33028 - DNA, 2118 bp, Muscodor strobelii
  misc_feature: SGI cDNA ID NO. 571386
  misc_feature: Encodes the peptide sequence at SEQ ID NO 33029
atgcctccctcaaaactggctgccaaaaagcagccaatcactttggcgcaactatcgtcttatgatgacatgctcacagatgcgctcgttgaccatgcgtattactggacaaccattcccaagaaccgtccttcctatcatgcgtccagaggaattacagaagaggatatcaccaagataatccagtctcatgtcattgtagatcccgacctcgagaccgccgagtcgaaactgcttgcgacacccggcttccgcaaattccacaatgcgctgaagacaccgaaagagaaggacgatttcattgcccatctgcggcgctacctgcgcatttacctccctgattgccctttcgaggtctcgtctaccaaccgctatacgatatatagccacgaagccgccattactgcccgcaagtacatcaagaagggccaatcaatcaaatatcttgagggcattcaagtcataatcacggccaaggaagacaaagagctggcgaagagaaagaaggatttcagcatcgtggtgagcgcgaggaacaaatgcgccgctctgttcatgggtcctgctcggtttgccaatcatgactgcaacgccaatgcgcgcctgatgattacgggtcaagcaggcatcgagattgttgccactcagaatattgatgtaggcgacgagatcacagtttcgtacgcggaaaactactttggggaggataactgcgagtgcttgtgcaagacctgcgagacaaaaggcgtaaatggatgggcgcaaagtgaggcgaccagtccgctcaagacgagcattgaggagacatccgagggctattcgttacgccgtcggcgaagagatgacagctgcgcgtcagcctcccgcacaccctcagtcacgcctgatatccgaccgcgagtgcgcaagaccaagctgaagtctctaggctcggccggggagcgttcatctttctgcgattcccctacgcctcagagtctgctccgggagaagcgcaagcgagagatcgagtgtttgagttcaccacccacaaccccagcgaaaaggctcaaaacacttcgatacgagataggaccaatctctaccccaggcagcctgcagagacgagacagcaatgatgccacatccagcgaacattcgtcctccgactctgcaagcaccgatcctatggtcatgacagatgcgaccacacccgacgagtacccgcaagagacagccctgcagtctccagctctgacaccagtcaggactagaaactccacgttgaagcaagaggatatggacttatcgcctcttcctagcatctcatgcaaactctctgcctcaccagcattgactgctgaatcgttggcgcgccacgagcagagcgcatcgcccatatcaactcatactgaagttccagttacagtacaaggcaaagtcggcgaacttccgtgcatcgacgtcgtggctttgcctgctccgattactgctatatcggataaaacgatcattgtttctgggtctgactcaaccgaggaggcgatagaggatcaagatgatggaacaggcgatgagaagccccggagaggacggcctcgtaagggagagccgtcctcaggagctgactctgcggatgatacaagtacaatggcaaagaagcgtactccaggtgattacacgctgacgcctgccttgctctccgaacctagcatggcttggatttattgcacaatttgtggcgacgcgttcgtccagcagaatgcatacttcacacggagctcctgcttccgatgtgaacggcactccaagctttatggctacatctggccgaagaccgagaaagaggggccaaatgacaaagaagagcgagtcctggaccatcggactgtgcaccggttcttagacccagaagatgaagccaaaagccgagggcggaaaatcgccacagctagcgtcccatgcgaggagcccgttgaatctaaccctgctaatatcacgccgcctggaagacgaggccctggtaggcctaggaagtacctcgcccaggacgacgaagcgaaggttgtggtcgtggaggcaagtctctcgaggctgcgtcgcacaagtcgacgcatctctcaagctgctatgtgctag

SEQ ID NO: 33029 - protein, 705 aa, Muscodor strobelii
  misc_feature: SGI Peptide ID NO. 571386
  misc_feature (189)..(236): Pfam Id: PF00856 Pfam Desc: SET domain
  misc_feature (1)..(653): NCBI GI: 46124303 Blast Desc: FG06529.1 [Gibberella zeae PH-1] gi|121813515|sp|Q4I8C9.1|SET9_GIBZE RecName: Full=Histone-lysine N-methyltransferase SET9; AltName: Full=SET domain protein 9
  misc_feature (9)..(639): NCBI GI: 85109675 Blast Desc: NCU08551 [Neurospora crassa OR74A] gi|74628935|sp|Q7SBJ9.1|SET9_NEUCR RecName: Full=Histone-lysine N-methyltransferase set-9; AltName: Full=SET domain protein 9
  misc_feature (1)..(640): NCBI GI: 256726419 Blast Desc: NECHADRAFT_12117 [Nectria haematococca mpVI 77-13-4]
  misc_feature (7)..(669): NCBI GI: 116208452 Blast Desc: CHGG_03519 [Chaetomium globosum CBS 148.51] gi|121787538|sp|Q2H8D5.1|SET9_CHAGB RecName: Full=Histone-lysine N-methyltransferase SET9; AltName: Full=SET domain protein 9 CBS
  misc_feature (1)..(642): NCBI GI: 145609151 Blast Desc: MGG_07393 [Magnaporthe grisea 70-15] gi|145016570|gb|EDK01000.1| MGG_07393 [Magnaporthe grisea 70-15]
  misc_feature (1)..(428): NCBI GI: 261353990 Blast Desc: histone-lysine N-methyltransferase SET9 [Verticillium albo-atrum VaMs.102]
  misc_feature (1)..(650): NCBI GI: 67539954 Blast Desc: AN6147.2 [Aspergillus nidulans FGSC A4] gi|74594617|sp|Q5AZY3.1|SET9_EMENI RecName: Full=Histone-lysine N-methyltransferase set9; AltName: Full=SET domain protein 9 FGSC
  misc_feature (1)..(312): NCBI GI: 154300642 Blast Desc: BC1G_10909 [Botryotinia fuckeliana B05.10] gi|150856516|gb|EDN31708.1| BC1G_10909 [Botryotinia fuckeliana B05.10]
  misc_feature (1)..(303): NCBI GI: 156048416 Blast Desc: SS1G_08939 [Sclerotinia sclerotiorum 1980] gi|154693336|gb|EDN93074.1| SS1G_08939 [Sclerotinia sclerotiorum 1980]
  misc_feature (1)..(254): NCBI GI: 238841979 Blast Desc: histone-lysine N-methyltransferase set9 [Microsporum canis CBS 113480]
  misc_feature (1)..(461): SWISSPROT Homolog: EC 2.1.1.43 Histone-lysine N-methyltransferase
MPPSKLAAKKQPITLAQLSSYDDMLTDALVDHAYYWTTIPKNRPSYHASRGITEEDITKIIQSHVIVDPDLETAESKLLATPGFRKFHNALKTPKEKDDFIAHLRRYLRIYLPDCPFEVSSTNRYTIYSHEAAITARKYIKKGQSIKYLEGIQVIITAKEDKELAKRKKDFSIVVSARNKCAALFMGPARFANHDCNANARLMITGQAGIEIVATQNIDVGDEITVSYAENYFGEDNCECLCKTCETKGVNGWAQSEATSPLKTSIEETSEGYSLRRRRRDDSCASASRTPSVTPDIRPRVRKTKLKSLGSAGERSSFCDSPTPQSLLREKRKREIECLSSPPTTPAKRLKTLRYEIGPISTPGSLQRRDSNDATSSEHSSSDSASTDPMVMTDATTPDEYPQETALQSPALTPVRTRNSTLKQEDMDLSPLPSISCKLSASPALTAESLARHEQSASPISTHTEVPVTVQGKVGELPCIDVVALPAPITAISDKTIIVSGSDSTEEAIEDQDDGTGDEKPRRGRPRKGEPSSGADSADDTSTMAKKRTPGDYTLTPALLSEPSMAWIYCTICGDAFVQQNAYFTRSSCFRCERHSKLYGYIWPKTEKEGPNDKEERVLDHRTVHRFLDPEDEAKSRGRKIATASVPCEEPVESNPANITPPGRRGPGRPRKYLAQDDEAKVVVVEASLSRLRRTSRRISQAAMC

SEQ ID NO: 33030 - DNA, 3445 bp, Muscodor strobelii
  misc_feature: SGI EST ID NO. CUFF.78056.0
  misc_feature: Variant of the nucleotide sequence at SEQ ID NO 33028
gataccccggcatgcgctgaaagcatagcgtcatcagcgaacgagccaggcgaggcagagccctgtccatcccccacacccctgcccatcgctggaaattagagggcaacccggtcgtgcagcgcagctggttgaccggccaccctcttttcccgcactttgcgccgcgccctcccgctgtccgcactcctctcaccagctgcacctccacacccgtcccgtcttctttcatgttggccgtggtctgctttattcactctatgctcgtcgttggtgcgagctcatcaaactttcgatcgccctcctttcactctttcactctataatccctcatctcctccccgccctacctcctgcagcatatcccagactatcggcaactgatacatacagacgtacaatacagaactaataccatctacataccgtacctcgttctcgtcacacggttttcaaattcgtttctccaatatccgtctcattgatgtgcacgcctacgtctctcgattcaagccttcctgtcttccaccttccgtcagatatcactggagcacggcattgtttcttttctttgcccagtataatttcgtttgcatagtcagagatataattggtcttctgtctgtaccttggccgtcagcttgggtcatgcatctcacgtagccagtcgtaaccacgccaaaagaacatatagcccccagaccattgtaaccctacctcgagatcaccgcctcgctggccaatctgggaaatctcttcggctggttcaccgtctataactcccgggttgcgctgccagtctctctcaccacatttcgcaactcttcgacttgtgtgatcagcagtcatgcctccctcaaaactggctgccaaaaagcagccaatcactttggcgcaactatcgtcttatgatgacatgctcacagatgcgctcgttgaccatgcgtattactggacaaccattcccaagaaccgtccttcctatcatgcgtccagaggaattacagaagaggatatcaccaagataatccagtctcatgtcattgtagatcccgacctcgagaccgccgagtcgaaactgcttgcgacacccggcttccgcaaattccacaatgcgctgaagacaccgaaagagaaggacgatttcattgcccatctgcggcgctacctgcgcatttacctccctgattgccctttcgaggtctcgtctaccaaccgctatacgatatatagccacgaagccgccattactgcccgcaagtacatcaagaagggccaatcaatcaaatatcttgagggcattcaagtcataatcacggccaaggaagacaaagagctggcgaagagaaagaaggatttcagcatcgtggtgagcgcgaggaacaaatgcgccgctctgttcatgggtcctgctcggtttgccaatcatgactgcaacgccaatgcgcgcctgatgattacgggtcaagcaggcatcgagattgttgccactcagaatattgatgtaggcgacgagatcacagtttcgtacgcggaaaactactttggggaggataactgcgagtgcttgtgcaagacctgcgagacaaaaggcgtaaatggatgggcgcaaagtgaggcgaccagtccgctcaagacgagcattgaggagacatccgagggctattcgttacgccgtcggcgaagagatgacagctgcgcgtcagcctcccgcacaccctcagtcacgcctgatatccgaccgcgagtgcgcaagaccaagctgaagtctctaggctcggccggggagcgttcatctttctgcgattcccctacgcctcagagtctgctccgggagaagcgcaagcgagagatcgagtgtttgagttcaccacccacaaccccagcgaaaaggctcaaaacacttcgatacgagataggaccaatctctaccccaggcagcctgcagagacgagacagcaatgatgccacatccagcgaacattcgtcctccgactctgcaagcaccgatcctatggtcatgacagatgcgaccacacccgacgagtacccgcaagagacagccctgcagtctccagctctgacaccagtcaggactagaaactccacgttgaagcaagaggatatggacttatcgcctcttcctagcatctcatgcaaactctctgcctcaccagcattgactgctgaatcgttggcgcgccacgagcagagcgcatcgcccatatcaactcatactgaagttccagttacagtacaaggcaaagtcggcgaacttccgtgcatcgacgtcgtggctttgcctgctccgattactgctatatcggataaaacgatcattgtttctgggtctgactcaaccgaggaggcgatagaggatcaagatgatggaacaggcgatgagaagccccggagaggacggcctcgtaagggagagccgtcctcaggagctgactctgcggatgatacaagtacaatggcaaagaagcgtactccaggtgattacacgctgacgcctgccttgctctccgaacctagcatggcttggatttattgcacaatttgtggcgacgcgttcgtccagcagaatgcatacttcacacggagctcctgcttccgatgtgaacggcactccaagctttatggctacatctggccgaagaccgagaaagaggggccaaatgacaaagaagagcgagtcctggaccatcggactgtgcaccggttcttagacccagaagatgaagccaaaagccgagggcggaaaatcgccacagctagcgtcccatgcgaggagcccgttgaatctaaccctgctaatatcacgccgcctggaagacgaggccctggtaggcctaggaagtacctcgcccaggacgacgaagcgaaggttgtggtcgtggaggcaagtctctcgaggctgcgtcgcacaagtcgacgcatctctcaagctgctatgtgctagctgcacaagtcattcgacatggccatcacaaagtctattctcgaaacccctgaagcccacgatggatcgccaccctcatctagaaatgtaacaattatatcgcatagagcggaatagaaggtgttgtttctctgcatagctctggcgtttttttcatcagtggggttgaacgcatttgaagtgtcgtttcgcactgcattttcctgatgtattgttgcaagcagtgctaggacagtcggtctagatggtctcccgtcgggtttggctggataggaaggatcgactatactgggtcttctggcaactttactagataattgagacatacagctagtggcgaatacaagaattacatgcacatatcagatgcttcagagaaggtatgagacgaattcgatgtcccggggcacaaggtactagccatgagccccgtggtgactgactaggggtggttcatgttgcgatccagtggtctttctg

SEQ ID NO: 33031 - DNA, 396 bp, Muscodor strobelii
  misc_feature: SGI cDNA ID NO. 571387
  misc_feature: Encodes the peptide sequence at SEQ ID NO 33032
atgattcaattaaagtcgtatctcaactgcatcgacaactcaggcgccgccatcgttgagtgcgcactgatcgtcggccagaagagacatgcaaccataggcgaccgattcgtagccatcgtgcaaaagcagcgcggagccagtgacgccggcatgggtgccgcctctgccgccaacaaggtcaagcgcggcgacatccgccacgccatcgtcgtccgcaccaagaagaaggtccagcgccccgacggtagcgtcgtgcgctttgatgacaacgcctgcgtcctcatcaacaaatccggcgatcccatcggctcccgcgtcaacggcgtcgtcggcgccgagctgcgtcgtcgcaaatggagcaagatcttgagtatggcccctgcccacgcctag

SEQ ID NO: 33032 - protein, 131 aa, Muscodor strobelii
  misc_feature: SGI Peptide ID NO. 571387
  misc_feature (1)..(131): Pfam Id: PF00238 Pfam Desc: Ribosomal protein L14p/L23e
  misc_feature (1)..(130): NCBI GI: 39972181 Blast Desc: conserved [Magnaporthe grisea 70-15] gi|145016569|gb|EDK00999.1| conserved [Magnaporthe grisea 70-15]
  misc_feature (1)..(131): NCBI GI: 256726552 Blast Desc: [Nectria haematococca mpVI 77-13-4]
  misc_feature (1)..(131): NCBI GI: 46124305 Blast Desc: FG06530.1 [Gibberella zeae PH-1]
  misc_feature (4)..(131): NCBI GI: 116208450 Blast Desc: conserved [Chaetomium globosum CBS 148.51] gi|88184115|gb|EAQ91583.1| conserved [Chaetomium globosum CBS 148.51]
  misc_feature (1)..(131): NCBI GI: 164425894 Blast Desc: 50S ribosomal protein L14 [Neurospora crassa OR74A] gi|157071111|gb|EAA33798.2| 50S ribosomal protein L14 [Neurospora crassa OR74A]
  misc_feature (1)..(130): NCBI GI: 154300644 Blast Desc: 50S ribosomal protein L14 [Botryotinia fuckeliana B05.10] gi|150856517|gb|EDN31709.1| 50S ribosomal protein L14 [Botryotinia fuckeliana B05.10]
  misc_feature (1)..(131): NCBI GI: 261353989 Blast Desc: mitochondrial 54S ribosomal protein L38 [Verticillium albo-atrum VaMs.102]
  misc_feature (1)..(130): NCBI GI: 238841981 Blast Desc: 50S ribosomal protein L14 [Microsporum canis CBS 113480]
  misc_feature (1)..(130): NCBI GI: 259479662 Blast Desc: TPA: 50S ribosomal protein L14 (AFU_orthologue; AFUA_2G08520) [Aspergillus nidulans FGSC A4]
  misc_feature (1)..(130): NCBI GI: 255935643 Blast Desc: Pc13g04120 [Penicillium chrysogenum Wisconsin 54-1255] gi|211583468|emb|CAP91481.1| Pc13g04120 [Penicillium chrysogenum Wisconsin 54-1255]
MIQLKSYLNCIDNSGAAIVECALIVGQKRHATIGDRFVAIVQKQRGASDAGMGAASAANKVKRGDIRHAIVVRTKKKVQRPDGSVVRFDDNACVLINKSGDPIGSRVNGVVGAELRRRKWSKILSMAPAHA

SEQ ID NO: 33033 - DNA, 2768 bp, Muscodor strobelii
  misc_feature: SGI EST ID NO. CUFF.78208.0
  misc_feature: Variant of the nucleotide sequence at SEQ ID NO 33031
taccaattgaacagatagtatagtgttctcgaagtgagttgtcgagtcgtacgagatagaaagttgaaggcaaacgacagagcccttgttgacctaaagccaatcagagcttcgccttctctcagcctcgacgtctaaaaggtgggcttctgcgtcgagagcatccaatccaatccaatcatcgcacgcgccaaatttctaaacagccgagctagccttgccgaacttcgagtcgtcaaacacgacttttgaaccgtgaacgcagcgttggactgaggcccgaagacaggggcagaagggtcaaaatgattcaattaaagtcgtatctcaactgcatcgacaactcaggcgccgccatcgttgagtgcgcactgatcgtcggccagaagagacatgcaaccataggcgaccgattcgtagccatcgtgcaaaagcagcgcggagccagtgacgccggcatgggtgccgcctctgccgccaacaaggtcaagcgcggcgacatccgccacgccatcgtcgtccgcaccaagaagaaggtccagcgccccgacggtagcgtcgtgcgctttgatgacaacgcctgcgtcctcatcaacaaatccggcgatcccatcggctcccgcgtcaacggcgtcgtcggcgccgagctgcgtcgtcgcaaatggagcaagatcttgagtatggcccctgcccacgcctagacggtggcgcagctggtgataagaaccgagattggttgggcgagttctcggggtgtattgaagggcgggtcttctgagacgatctggactggccctcgtcaaacgaggatgagctgtatggctactagagaagagaaagaagtgtcaaaatactgtactatactgcaagcgcatctactaagcatttacgagatacggcatactggagaggggctagttgcgtccctttagacacaatatacaagtctgctaagtactttcacgacgggcgactcccgcgtctcattgtaccacctctcatcctaccatttgagaaacagtcttgaggtaaatgtgtcacgcaattcattcagggtctggtaaatttaagggtccttttcattttggccaccagcaccgcagcatgccaatgtctttcgtttgggggtatttacaaaaacaatagaactcctatccatgcaattgctacaacccggcatggtatcggcactctaccgaaccaatatcatctaagctccacctctcattcttgctcatcgttggagctcactggaaaatgtgaccgcagtcgcagcatacatagaacaatttctgatggatatcgtgagcgactgattgtcttgatggggctgacttggtacttgatacttaccatgccggtttcggcacttcgctgctgagattggaagaacacggcctcctcatggttgcacgcggggcacgtcttgttggatcggggaagctatagccaaggcaacacgtcagcaccagaatcagtgtcaatgaatacactaaatcatgtgtgctagggccaagtgcatgcgaatcatccagcgaaaggaaacatcggatgtccagatctcatgtggcatcatgtagtgcgcccactttgtcgactgcggggagcttgtgtcatcgagtcgactgaaacacgcgaagacggacactggccacgagaggaaaatgcgattcggaattctatacagcagtgccagaagcccaatcatgatgcagctcgtagtagttgaatgtgagacacgggtggtaatacagttgtgagtcgtaagcgtggctaccatggagcttctgacgtgtccatgacctcggattcctcactgagtgcctcggcaggatcgtcgtcgtattcatacgtagagtcgaagggaaagtaatccgtgatgctctcttcctctaggcccgcgatctgtatgttggtggtagtcgtgaagttttcctcgagcgcagcctgtgtgtcggcatcggaagcggcccaaaggttggcaaggcgtatgcagcgtaaggcgcggttggcagcgaaatcaggatcgcgtatcacgtagtcgttgtactcgttgacagatgcagggtcgttgcacagagaacagtgaaggagtgtcagaccacagcgaaggcaggtggccaaggggttctcatgggcgggagcagcagcgacgggagaagaagtagacacagaggcagaagctgtggtagatgtggcgggggcagcagcggtagaggagaaagagggaacggggccacaaaccgtagggtctgatccgacatcttgagtgacgccggcagtctctccggcggcattgttgaggacgtgacggaatacgcagctcgaagcagcgggctcagtatactggcacgtgcggcacgtgaacatgagcttgtgctcgacctcgtcttccttggggtacagcatgtttgagcattcagagcagaagcgaaaggtgatctgctcgaggttgctctgaggagcctcgcccgacgtcgtcgactgcggtgttgccatgtttacctaggctgaacacgggttgtctaagaagtggcgatgagacaatgggactgagggagtgggagggccgcttggggatccagactagggacctgcgacacgaaaaacctccagctcgcaaagtggttcttctgcagtgctaccgcggaagagtgactttatggcgaggtggttagaggtttgttccggtgagagtagttgtgggtgagagggatgggtgagaggcgaggcgtggttgtatgtcgcaggcgcaagcgtggaagttg

SEQ ID NO: 33034 - DNA, 858 bp, Muscodor strobelii
  misc_feature: SGI cDNA ID NO. 571388
  misc_feature: Encodes the peptide sequence at SEQ ID NO 33035
atgatagttctttggagccaatcagacaaggtgggtacagaagaggacgactggctccaagaacatattgtttacgtcgaacatcaacgagacccaattccatcacaagtcaaaacggctgttcgtgacagaaaggatgcgtacgcaggcaaggtgaaatatagtacagtatacaaccactacgtcccttatagccgaatatctagagccctgatcaagttgatggaaggctcctctcgcaaaaccatcattacgaagttttcggagcttgcacttaagttcaagatcaaccttaaggtctatttcaacggaaaggacctgaaacacatggaccctaaaagcgcgaatttctcgaagtttggtttccattcctatataaactacatatacaggaacatctgtgattggcccgacaacatattcctagggccgtcaatcggcgaccgacagggaagaaggatcgatctaccgagagagtgtacaccgaatttgagtcaccgattgctcaaagcacttttaatgttcaaggaagtgctccatgtcacggtcgatgactatttcgggggtctggatgcatataatgccttcaaagccgaacgagatcacaagtggtcgcagcaagacttcgacgattatgaaaaatattggaagcatctagagaaagaaactgataagatccctacgatcattgaggatgatgatggtatcgacgagtattggtccgattttgacgaacagcaactcaaagcgaaccatcagacgaaggttgtagctcgtcaaaagaagccaataacgctcggtgcggggacgacagatctggggttcaacaagatgttgaaaactagcaagaaacagtga

SEQ ID NO: 33035 - protein, 285 aa, Muscodor strobelii
  misc_feature: SGI Peptide ID NO. 571388
MIVLWSQSDKVGTEEDDWLQEHIVYVEHQRDPIPSQVKTAVRDRKDAYAGKVKYSTVYNHYVPYSRISRALIKLMEGSSRKTIITKFSELALKFKINLKVYFNGKDLKHMDPKSANFSKFGFHSYINYIYRNICDWPDNIFLGPSIGDRQGRRIDLPRECTPNLSHRLLKALLMFKEVLHVTVDDYFGGLDAYNAFKAERDHKWSQQDFDDYEKYWKHLEKETDKIPTIIEDDDGIDEYWSDFDEQQLKANHQTKVVARQKKPITLGAGTTDLGFNKMLKTSKKQ

SEQ ID NO: 33036 - DNA, 1637 bp, Muscodor strobelii
  misc_feature: SGI EST ID NO. CUFF.78071.0
  misc_feature: Variant of the nucleotide sequence at SEQ ID NO 33034
gatcacctatctaccattgttctccaagcactcttccgttgaatatacccgaaagaactcaatatgttaagtttcgggacacccgaagacaaagattccattctgggtaagcaccgtgaggctgatctgttctagacagtgggaatacataggtgtacgcgtcgtttcagctggtgcgaattggcgctactgagctttagacagcacttttatgccacactgtatagttgagcacacattctcggccctggcttgtggtctaccgaaaagaaggcaatttccgctcagaacagagctgagttatcaccgtgccgtgatgcaaggaattgcttgatgctcatcagctcaataaacgagggggccagatggttcagtacggtctagaacatctcccctgtttaacaagcgaaatcggtcggtctgcacatcatggaaagagaaccagatcaagtcaagttcagagaattagaacggttagcattggagtattttcacatatggcattcatataagaagggagctctcacgggagatttctcgttttttatttgcaaagaactaccaaagagcttagtattggaaaaacacgcgattcgaagctactgcttcatatcaatttgtcaagatgatagttctttggagccaatcagacaaggtgggtacagaagaggacgactggctccaagaacatattgtttacgtcgaacatcaacgagacccaattccatcacaagtcaaaacggctgttcgtgacagaaaggatgcgtacgcaggcaaggtgaaatatagtacagtatacaaccactacgtcccttatagccgaatatctagagccctgatcaagttgatggaaggctcctctcgcaaaaccatcattacgaagttttcggagcttgcacttaagttcaagatcaaccttaaggtctatttcaacggaaaggacctgaaacacatggaccctaaaagcgcgaatttctcgaagtttggtttccattcctatataaactacatatacaggaacatctgtgattggcccgacaacatattcctagggccgtcaatcggcgaccgacagggaagaaggatcgatctaccgagagagtgtacaccgaatttgagtcaccgattgctcaaagcacttttaatgttcaaggaagtgctccatgtcacggtcgatgactatttcgggggtctggatgcatataatgccttcaaagccgaacgagatcacaagtggtcgcagcaagacttcgacgattatgaaaaatattggaagcatctagagaaagaaactgataagatccctacgatcattgaggatgatgatggtatcgacgagtattggtccgattttgacgaacagcaactcaaagcgaaccatcagacgaaggttgtagctcgtcaaaagaagccaataacgctcggtgcggggacgacagatctggggttcaacaagatgttgaaaactagcaagaaacagtgaagggccaataccacgagttaggtcttcctttgtttgtaattccatgctgctcgatgcttcgagagcgaaagccccgtgcatctctattatttgaattgagtctagttagatatgaatcaatttcctgttctacgctcagctataatggccgagg

SEQ ID NO: 33037 - DNA, 1749 bp, Muscodor strobelii
  misc_feature: SGI cDNA ID NO. 571389
  misc_feature: Encodes the peptide sequence at SEQ ID NO 33038
atggacactagaggtctcccgcaggcgctgtggtccagctatgcgccgcgcctgcgcacctacaacaactcgctcctcacccccgtcctgcagtccaccgccccggggcccgtctcacgcaccaccaagcgcggcaccaccgtcatcaactacgccgaggacggctacgactacgacgacgacgatgacgacgacagccgccgacgcccgacggggctgcgcagcctgcgtcgcgaggatagcgcctcgagggccgacgccagcgacaagtacggcaaggagaccctcgtccccgtccaccaccagggcatctggcgcgactggatgcagaacaagaagcccgcctccgacatgaatgcccacgcccaggccgtcatgccgctcaccctcatccccatccgcatcgacgtcgacatccccgccttcatgcccgccgccccctaccccctgccgcgcggcgcctaccagccaccccccaacgccgaccctgccctgtaccgcgccggcgagaccaccgtcccctacaagctgcgcgatatcttcctctggaacctgcacgagaccctcatcaccaccgaccagttcgccctcggcctcgtccaagacctcgacctgcccaaccagagtgccatcgccggcgagatcagcaagcagatccgcactcagctggaggagtatgctggtgtggcgctgcatccgctcttccactcgggcggcgacaagacacccgccaacgagaacctccaagtcccccagtctaccgccctggacacgcccgccacgcctgctacacctctaccagccctgacacccctgacgccgatgcgcactggcttggacacaccgtcaaatcttggaccctcacggcttcaggaacaagtcaccgctagcgcctcacccatccctgccgattccgaagactacaaccccgacgacacctaccgatgtatagtcaccctgaacgtgaacctatcctctgagctatataccgacaaattcgagtggtccctgttacatccgccaggcactgctgaggcctttgccaaggtgacctgttctgatttggggttggctggagagtgggttcctgctttgacccatgctatctacgaagcagtgttacgactcaaaaaggaagcttgcgaagctggaggcctggttgcgggctggggcacaatgggagctgagttgccgaatgatgctgctcacggccaagacgctggatggcgctacgacccggaacaattagcagatgcttgggaacccaaaattgaaaccctctcaaaagaagagatggagaaacgagagggagatcgggaacgccaagtccgtcgcttacgacgagagactgctcggtttagtagtaatgccggcatgatagggggtatgcccttcgcctttggagctgagctggaagaagagcgcatgggccgcggtgagagatccaagaagaagcggagattccgtagtctgagtccccttggccgatctggaacccccggcggccgagggacaccagatgccggctatggtggaggcggtggtgggttcctcacggagcaggagaggctcagttggcgatgcatgcattgtcgtatatggggtaccagtgtctgggctgttcgagatggcccacatgggcccaggtcactttgcgccaattgtggctatctttatgaacgaaacaagaaactgcccaggtggacaaagaacttacactatactgaaatgcctgtgcggggtgtctag

SEQ ID NO: 33038 - protein, 582 aa, Muscodor strobelii
  misc_feature: SGI Peptide ID NO. 571389
  misc_feature (100)..(444): Pfam Id: PF04855 Pfam Desc: SNF5 / SMARCB1 / INI1
  misc_feature (312)..(444): Pfam Id: PF04855 Pfam Desc: SNF5 / SMARCB1 / INI1
  misc_feature (175)..(226): Pfam Id: PF04855 Pfam Desc: SNF5 / SMARCB1 / INI1
  misc_feature (4)..(579): NCBI GI: 46107374 Blast Desc: FG00570.1 [Gibberella zeae PH-1]
  misc_feature (4)..(573): NCBI GI: 256735219 Blast Desc: [Nectria haematococca mpVI 77-13-4]
  misc_feature (1)..(577): NCBI GI: 156062072 Blast Desc: SS1G_01151 [Sclerotinia sclerotiorum 1980] gi|154696488|gb|EDN96226.1| SS1G_01151 [Sclerotinia sclerotiorum 1980]
  misc_feature (8)..(573): NCBI GI: 171676864 Blast Desc: protein product [Podospora anserina] gi|170936499|emb|CAP61159.1| protein product [Podospora anserina]
  misc_feature (8)..(576): NCBI GI: 85104664 Blast Desc: NCU07893 [Neurospora crassa OR74A] gi|28923355|gb|EAA32546.1| conserved [Neurospora crassa OR74A]
  misc_feature (7)..(577): NCBI GI: 145616331 Blast Desc: MGG_10538 [Magnaporthe grisea 70-15] gi|145021895|gb|EDK05965.1| MGG_10538 [Magnaporthe grisea 70-15]
  misc_feature (29)..(577): NCBI GI: 154297412 Blast Desc: BC1G_12110 [Botryotinia fuckeliana B05.10] gi|150858615|gb|EDN33807.1| BC1G_12110 [Botryotinia fuckeliana B05.10]
  misc_feature (8)..(579): NCBI GI: 116196724 Blast Desc: CHGG_04960 [Chaetomium globosum CBS 148.51] gi|88180873|gb|EAQ88341.1| CHGG_04960 [Chaetomium globosum CBS 148.51]
  misc_feature (12)..(579): NCBI GI: 255949640 Blast Desc: Pc22g16740 [Penicillium chrysogenum Wisconsin 54-1255] gi|211592604|emb|CAP98962.1| Pc22g16740 [Penicillium chrysogenum Wisconsin 54-1255]
  misc_feature (12)..(579): NCBI GI: 212528660 Blast Desc: RSC complex subunit Sfh1, [Penicillium marneffei ATCC 18224] gi|210073885|gb|EEA27972.1| RSC complex subunit Sfh1, [Penicillium marneffei ATCC 18224]
MDTRGLPQALWSSYAPRLRTYNNSLLTPVLQSTAPGPVSRTTKRGTTVINYAEDGYDYDDDDDDDSRRRPTGLRSLRREDSASRADASDKYGKETLVPVHHQGIWRDWMQNKKPASDMNAHAQAVMPLTLIPIRIDVDIPAFMPAAPYPLPRGAYQPPPNADPALYRAGETTVPYKLRDIFLWNLHETLITTDQFALGLVQDLDLPNQSAIAGEISKQIRTQLEEYAGVALHPLFHSGGDKTPANENLQVPQSTALDTPATPATPLPALTPLTPMRTGLDTPSNLGPSRLQEQVTASASPIPADSEDYNPDDTYRCIVTLNVNLSSELYTDKFEWSLLHPPGTAEAFAKVTCSDLGLAGEWVPALTHAIYEAVLRLKKEACEAGGLVAGWGTMGAELPNDAAHGQDAGWRYDPEQLADAWEPKIETLSKEEMEKREGDRERQVRRLRRETARFSSNAGMIGGMPFAFGAELEEERMGRGERSKKKRRFRSLSPLGRSGTPGGRGTPDAGYGGGGGGFLTEQERLSWRCMHCRIWGTSVWAVRDGPHGPRSLCANCGYLYERNKKLPRWTKNLHYTEMPVRGV

SEQ ID NO: 33039 - DNA, 2492 bp, Muscodor strobelii
  misc_feature: SGI EST ID NO. CUFF.78074.0
  misc_feature: Variant of the nucleotide sequence at SEQ ID NO 33037
ttacaaacagcgccagcctcgccaagtccatcaggtatcccgtagaggtatctcgatctgccagttcccaccgacaatccatactccaacacccatcgtcatcgaactgtagctattttattgcgacaacattgaatactagactgctgtccacaagggagctggggcgaaggagagcgacctaacgtgtcttgaccgcgtctctgagggccactacctacatcccccacgaacagcacagcaccggggatagctcaagacacagtcatcgcatagtcacctccgtccaattgtgtcgcaccgtcatcaccatcgctgtcattgctacaccagatatgaaatcataatatatgcccattgctactgtcaacatggacactagaggtctcccgcaggcgctgtggtccagctatgcgccgcgcctgcgcacctacaacaactcgctcctcacccccgtcctgcagtccaccgccccggggcccgtctcacgcaccaccaagcgcggcaccaccgtcatcaactacgccgaggacggctacgactacgacgacgacgatgacgacgacagccgccgacgcccgacggggctgcgcagcctgcgtcgcgaggatagcgcctcgagggccgacgccagcgacaagtacggcaaggagaccctcgtccccgtccaccaccagggcatctggcgcgactggatgcagaacaagaagcccgcctccgacatgaatgcccacgcccaggccgtcatgccgctcaccctcatccccatccgcatcgacgtcgacatccccgccttcatgcccgccgccccctaccccctgccgcgcggcgcctaccagccaccccccaacgccgaccctgccctgtaccgcgccggcgagaccaccgtcccctacaagctgcgcgatatcttcctctggaacctgcacgagaccctcatcaccaccgaccagttcgccctcggcctcgtccaagacctcgacctgcccaaccagagtgccatcgccggcgagatcagcaagcagatccgcactcagctggaggagtatgctggtgtggcgctgcatccgctcttccactcgggcggcgacaagacacccgccaacgagaacctccaagtcccccagtctaccgccctggacacgcccgccacgcctgctacacctctaccagccctgacacccctgacgccgatgcgcactggcttggacacaccgtcaaatcttggaccctcacggcttcaggaacaagtcaccgctagcgcctcacccatccctgccgattccgaagactacaaccccgacgacacctaccgatgtatagtcaccctgaacgtgaacctatcctctgagctatataccgacaaattcgagtggtccctgttacatccgccaggcactgctgaggcctttgccaaggtgacctgttctgatttggggttggctggagagtgggttcctgctttgacccatgctatctacgaagcagtgttacgactcaaaaaggaagcttgcgaagctggaggcctggttgcgggctggggcacaatgggagctgagttgccgaatgatgctgctcacggccaagacgctggatggcgctacgacccggaacaattagcagatgcttgggaacccaaaattgaaaccctctcaaaagaagagatggagaaacgagagggagatcgggaacgccaagtccgtcgcttacgacgagagactgctcggtttagtagtaatgccggcatgatagggggtatgcccttcgcctttggagctgagctggaagaagagcgcatgggccgcggtgagagatccaagaagaagcggagattccgtagtctgagtccccttggccgatctggaacccccggcggccgagggacaccagatgccggctatggtggaggcggtggtgggttcctcacggagcaggagaggctcagttggcgatgcatgcattgtcgtatatggggtaccagtgtctgggctgttcgagatggcccacatgggcccaggtcactttgcgccaattgtggctatctttatgaacgaaacaagaaactgcccaggtggacaaagaacttacactatactgaaatgcctgtgcggggtgtctagaaagccatctgatcagaggtgaatgatacttcaatcacattcacacaaatcaaagaataaaaaaacaagaaaacaagatagacgctgatgagaccgagtcaggacgctgacatgtatcaagtatggcgttcaaggcgggacatattagtctgtcccatgatgggattcggggtttccctttctgtcgtcaccggcgtcgttggctactcgggaaaaaggtgacggtggcaaggttgcgacaactgctgttcacatggagtgtatagagtactctgtaggcttccgtcctctgattacatgtatactagattctggagattgatggtaatgatagcgcttcgctgttcagatatgtttcctggtgttgatgcg

SEQ ID NO: 33040 - DNA, 849 bp, Muscodor strobelii
  misc_feature: SGI cDNA ID NO. 571390
  misc_feature: Encodes the peptide sequence at SEQ ID NO 33041
atgtccaagccagactctcagttcgatctcataaagagaggtgagaagaaaccgacgcccgccggcacattaacctttgccctcctccgtcttgccgacatccccatccagcatgcgctcttgacacctgccgccactggcctcggagttcgtctcctaacctcactcggcatacgaacaatcttcactcacgccttacctctctcatccacccttctcttacctctcaacaccgtctcacccaattggctcacgagtctcactccaacgggcttcgtactcctactcatgagcgccggctgtgctgcgaagcaaatctactggcaagtcgtcacctctcaagagtccttccccgtcagcgccgcggccgcagtgagcgtctacaacacgtttgtgaatagcgtgaactcgttgctattcctcgctctcagtacgacgtcactgtcttcttcgccacttgtcaatatcccgggaacttccctctccatcccactcagcaccgcgatcggtaccgcattatacatcacgggtctaggcatcgaagccttgtccgagagccagcgcgctgctttcaaagcccggccggagaataaaggaaaagtgtgtaaagttgggctttggagttgggctcgacatgtgaactactttggatatgccatgtggcgcggtggctattgcatggttggctctgggtggattggtggactggctatgggattgtttcaaggttgggacttgagtacgcgcgctgttggagtgctggataagtattgtgaggataggtacaaggagcagtggtcgcagttcaagaaggaagtcccgtataagatcatcccagggatttattga

SEQ ID NO: 33041 - protein, 282 aa, Muscodor strobelii
  misc_feature: SGI Peptide ID NO. 571390
  misc_feature (29)..(273): Pfam Id: PF06966 Pfam Desc: Domain of function (DUF1295)
  misc_feature (169)..(221): Pfam Id: PF06966 Pfam Desc: Domain of function (DUF1295)
  misc_feature (9)..(282): NCBI GI: 256727613 Blast Desc: NECHADRAFT_91175 [Nectria haematococca mpVI 77-13-4]
  misc_feature (73)..(282): NCBI GI: 261352342 Blast Desc: conserved [Verticillium albo-atrum VaMs.102]
  misc_feature (2)..(282): NCBI GI: 169615987 Blast Desc: SNOG_11160 [Phaeosphaeria nodorum SN15] gi|160703090|gb|EAT81659.2| SNOG_11160 [Phaeosphaeria nodorum SN15]
  misc_feature (2)..(282): NCBI GI: 189209918 Blast Desc: conserved [Pyrenophora tritici-repentis Pt-1C-BFP] gi|187977384|gb|EDU44010.1| conserved [Pyrenophora tritici-repentis Pt-1C-BFP]
  misc_feature (9)..(282): NCBI GI: 85083107 Blast Desc: NCU04480 [Neurospora crassa OR74A] gi|28918133|gb|EAA27813.1| [Neurospora crassa OR74A]
  misc_feature (4)..(282): NCBI GI: 39969119 Blast Desc: MGG_10170 [Magnaporthe grisea 70-15] gi|145015186|gb|EDJ99754.1| MGG_10170 [Magnaporthe grisea 70-15]
  misc_feature (6)..(282): NCBI GI: 171691340 Blast Desc: protein product [Podospora anserina] gi|170945618|emb|CAP71731.1| protein product [Podospora anserina]
  misc_feature (4)..(282): NCBI GI: 242794262 Blast Desc: conserved [Talaromyces stipitatus ATCC 10500] gi|218718922|gb|EED18342.1| conserved [Talaromyces stipitatus ATCC 10500]
  misc_feature (9)..(261): NCBI GI: 145247708 Blast Desc: An12g10570 [Aspergillus niger] gi|134080846|emb|CAK41404.1| protein product [Aspergillus niger]
  misc_feature (16)..(261): NCBI GI: 169782704 Blast Desc: [Aspergillus oryzae RIB40] gi|83774558|dbj|BAE64681.1| protein product [Aspergillus oryzae]
MSKPDSQFDLIKRGEKKPTPAGTLTFALLRLADIPIQHALLTPAATGLGVRLLTSLGIRTIFTHALPLSSTLLLPLNTVSPNWLTSLTPTGFVLLLMSAGCAAKQIYWQVVTSQESFPVSAAAAVSVYNTFVNSVNSLLFLALSTTSLSSSPLVNIPGTSLSIPLSTAIGTALYITGLGIEALSESQRAAFKARPENKGKVCKVGLWSWARHVNYFGYAMWRGGYCMVGSGWIGGLAMGLFQGWDLSTRAVGVLDKYCEDRYKEQWSQFKKEVPYKIIPGIY

SEQ ID NO: 33042 - DNA, 1061 bp, Muscodor strobelii
  misc_feature: SGI EST ID NO. CUFF.78079.0
  misc_feature: Variant of the nucleotide sequence at SEQ ID NO 33040
ctccgtcttgccgacatccccatccagcatgcgctcttgacacctgccgccactggcctcggagttcgtctcctaacctcactcggcatacgaacaatcttcactcacgccttacctctctcatccacccttctcttacctctcaacaccgtctcacccaattggctcacgagtctcactccaacgggcttcgtactcctactcatgagcgccggctgtgctgcgaagcaaatctactggcaagtcgtcacctctcaagagtccttccccgtcagcgccgcggccgcagtgagcgtctacaacacgtttgtgaatagcgtgaactcgttgctattcctcgctctcagtacgacgtcactgtcttcttcgccacttgtcaatatcccgggaacttccctctccatcccactcagcaccgcgatcggtaccgcattatacatcacgggtctaggcatcgaagccttgtccgagagccagcgcgctgctttcaaagcccggccggagaataaaggaaaagtgtgtaaagttgggctttggagttgggctcgacatgtgaactactttggatatgccatgtggcgcggtggctattgcatggttggctctgggtggattggtggactggctatgggattgtttcaaggttgggacttgagtacgcgcgctgttggagtgctggataagtattgtgaggataggtacaaggagcagtggtcgcagttcaagaaggaagtcccgtataagatcatcccagggatttattgatgcatgttggatcgcggtcctgagcagagcgagagtgcttcgtccagtccgttggtggacatatgctcgagagtcgaagatcctgggactgccgcatacctagcatcttttagtgaatttttttttttttttgtctgttgatttacagccgtggaataattcagaaagttttggactatagagtcattccgaatgcgcgaaccgacaccgcaaagaacctgaaacatctcttactttacattttcacgtttctttggataggcccctgaatcgtaaacggcagttctctcttggcg

SEQ ID NO: 33043 - DNA, 849 bp, Muscodor strobelii
  misc_feature: SGI cDNA ID NO. 571391
  misc_feature: Encodes the peptide sequence at SEQ ID NO 33044
atgaacgaagaccccggcccatttggtcccctagtaaacgggaccatggtcgtcgtcttctaccaatatcgacctaacgagcccgccgcatatgccttcctagcattattcgccatcgccactctcgcacacatcatctacttcttcgccctcagggcttggtggttcctaccatttatcctcggtggcatcgccgagatatttggctactacggccgcgcctggtctcattcatcacccgacaaagtcggcccctggatcttacagaatctcttacttctcaccgcgcctccgttaatgtcggctaccatatacatgacactaccacgtctaaccaccgccgtcgacatccggcgtaaatcgaaggtcatgagtcgtcttttgacgccgctatatgtactcatcgatctgggaaccgtaggaacacaactcgctgggtctgtcctgcctgcgtctggcgagccatcggccatcgaactgagcaagaagctcgtgttgggtggtcttctagcacaggtcgtggccttgacgatatttattatcatcgcgtgggctacgaaacggagtattggtaaagatcccccggagcccatacgtctcacaaatggctcggcggtcaattggaagaaccacttccgggcgatccagatcgtgacgctgctcgttatagtgaggagtgttgtccggactgtcgagtatcttcagggtgatgatgggttcatcatttcgcatgaggtgttcatttacgtttttgatgcggtgccgatgttcgcgattatggctatttacgcggtactacatcctggcaggttggtcaaggctgctcggcagcaatggcagaaggcgtga

SEQ ID NO: 33044 - protein, 282 aa, Muscodor strobelii
  misc_feature: SGI Peptide ID NO. 571391
  misc_feature (57)..(281): Pfam Id: PF04479 Pfam Desc: RTA1 like protein
  misc_feature (219)..(269): Pfam Id: PF04479 Pfam Desc: RTA1 like protein
  misc_feature (57)..(111): Pfam Id: PF04479 Pfam Desc: RTA1 like protein
  misc_feature (1)..(281): NCBI GI: 46115834 Blast Desc: FG03759.1 [Gibberella zeae PH-1]
  misc_feature (7)..(276): NCBI GI: 156060215 Blast Desc: SS1G_02246 [Sclerotinia sclerotiorum 1980] gi|154699654|gb|EDN99392.1| SS1G_02246 [Sclerotinia sclerotiorum 1980]
  misc_feature (8)..(277): NCBI GI: 255956767 Blast Desc: Pc21g21640 [Penicillium chrysogenum Wisconsin 54-1255] gi|211590847|emb|CAP97061.1| Pc21g21640 [Penicillium chrysogenum Wisconsin 54-1255]
  misc_feature (8)..(277): NCBI GI: 67523773 Blast Desc: AN2342.2 [Aspergillus nidulans FGSC A4] gi|40745297|gb|EAA64453.1| AN2342.2 [Aspergillus nidulans FGSC A4] gi|259487741|tpe|CBF86648.1| TPA: RTA1 domain protein, FGSC
  misc_feature (8)..(277): NCBI GI: 255950060 Blast Desc: Pc22g18940 [Penicillium chrysogenum Wisconsin 54-1255] gi|211592814|emb|CAP99182.1| Pc22g18940 [Penicillium chrysogenum Wisconsin 54-1255]
  misc_feature (8)..(282): NCBI GI: 145249978 Blast Desc: An14g07050 [Aspergillus niger] gi|134082013|emb|CAK46698.1| protein product [Aspergillus niger]
  misc_feature (1)..(273): NCBI GI: 116202079 Blast Desc: CHGG_08924 [Chaetomium globosum CBS 148.51] gi|88177442|gb|EAQ84910.1| CHGG_08924 [Chaetomium globosum CBS 148.51]
  misc_feature (21)..(276): NCBI GI: 242791855 Blast Desc: RTA1 domain protein, [Talaromyces stipitatus ATCC 10500] gi|218718427|gb|EED17847.1| RTA1 domain protein, [Talaromyces stipitatus ATCC 10500]
  misc_feature (18)..(277): NCBI GI: 70997836 Blast Desc: RTA1 domain protein [Aspergillus fumigatus Af293] gi|66851286|gb|EAL91612.1| RTA1 domain protein, [Aspergillus fumigatus Af293] gi|159126617|gb|EDP51733.1| RTA1 domain protein,
  misc_feature (8)..(277): NCBI GI: 115401212 Blast Desc: conserved [Aspergillus terreus NIH2624] gi|114190135|gb|EAU31835.1| conserved [Aspergillus terreus NIH2624]
MNEDPGPFGPLVNGTMVVVFYQYRPNEPAAYAFLALFAIATLAHIIYFFALRAWWFLPFILGGIAEIFGYYGRAWSHSSPDKVGPWILQNLLLLTAPPLMSATIYMTLPRLTTAVDIRRKSKVMSRLLTPLYVLIDLGTVGTQLAGSVLPASGEPSAIELSKKLVLGGLLAQVVALTIFIIIAWATKRSIGKDPPEPIRLTNGSAVNWKNHFRAIQIVTLLVIVRSVVRTVEYLQGDDGFIISHEVFIYVFDAVPMFAIMAIYAVLHPGRLVKAARQQWQKA

SEQ ID NO: 33045 - DNA, 1248 bp, Muscodor strobelii
  misc_feature: SGI EST ID NO. CUFF.78082.0
  misc_feature: Variant of the nucleotide sequence at SEQ ID NO 33043
ggagcacctcgttgtttttgtttaaaatatttcacaatcccgcatctgactccgaagtagtctgagtcctcgacgtgttattgcggcctcgtatccgaattcgatactgaaattcaaaagacacaaacaaaagacaatcaacaatgaacgaagaccccggcccatttggtcccctagtaaacgggaccatggtcgtcgtcttctaccaatatcgacctaacgagcccgccgcatatgccttcctagcattattcgccatcgccactctcgcacacatcatctacttcttcgccctcagggcttggtggttcctaccatttatcctcggtggcatcgccgagatatttggctactacggccgcgcctggtctcattcatcacccgacaaagtcggcccctggatcttacagaatctcttacttctcaccgcgcctccgttaatgtcggctaccatatacatgacactaccacgtctaaccaccgccgtcgacatccggcgtaaatcgaaggtcatgagtcgtcttttgacgccgctatatgtactcatcgatctgggaaccgtaggaacacaactcgctgggtctgtcctgcctgcgtctggcgagccatcggccatcgaactgagcaagaagctcgtgttgggtggtcttctagcacaggtcgtggccttgacgatatttattatcatcgcgtgggctacgaaacggagtattggtaaagatcccccggagcccatacgtctcacaaatggctcggcggtcaattggaagaaccacttccgggcgatccagatcgtgacgctgctcgttatagtgaggagtgttgtccggactgtcgagtatcttcagggtgatgatgggttcatcatttcgcatgaggtgttcatttacgtttttgatgcggtgccgatgttcgcgattatggctatttacgcggtactacatcctggcaggttggtcaaggctgctcggcagcaatggcagaaggcgtgagggccggaggagtctatgatagaatcgggtctcttaggcttggatacgtcgattgtcgaaagaagcttcctggggaactttggacgaatgcaagcgattgtggaaagtgctgaaatccgacttgaaccccgatactcaagagatgtcattcagctgatggtagtgccgtgaagtcatttgcttgcggctatcagctttttctctccaatcatattggactcaaatacgaagagggcgtaatagcgatggtggcctc

SEQ ID NO: 33046 - DNA, 783 bp, Muscodor strobelii
  misc_feature: SGI cDNA ID NO. 571392
  misc_feature: Encodes the peptide sequence at SEQ ID NO 33047
atgaagatcctatgcttgcacccatcggggcaaaatggacaaatgctagaagctgcattgaggcctgtaattcagcagattcaagattcggatccgagtgtatcatttgagttccttaacggccccgtgtattgtgctagtcaggcaggagacgtggctgctgcccacaattattacaacgttctgactgatggcgatacccaagaagctcacgagtggctaactcgattagtcaggcaagacggtccttatgaaggtgtcatagctttcgcccaggcaggtgccttggtctcaagttatctcctacatgagcagtggtaccacggggaagagcagaacggaccgttccgattcgctttcttcgtagatggcagtctacccctttccgtgctaaagaatattggcgtcccagtttctaaaactgcagaatgcatcatggaagaggtcgagaaccagaggagacaaggcctaggtccattaccttcgcatacgttgatggcccgacaggctatctacaactcagacgactgctttgggttgaatttaaacgatattgctcgtgaactgaagatccgaataccgacagttcatgtgtggcgagacaatgacccaggtctcgtacctgccacccacctagccgggatatgtgatccatacattcggaagatacacatcctggaagctcgtggcacatcaataccacagctcacagaagacacgtaccagttcagcaaattactactatggtgcatgcgacgagcaaagtggccgggacagctctag

SEQ ID NO: 33047 - protein, 260 aa, Muscodor strobelii
  misc_feature: SGI Peptide ID NO. 571392
  misc_feature (1)..(247): NCBI GI: 171690564 Blast Desc: protein product [Podospora anserina] gi|170945230|emb|CAP71341.1| protein product [Podospora anserina]
  misc_feature (1)..(247): NCBI GI: 145607331 Blast Desc: MGG_04173 [Magnaporthe grisea 70-15] gi|145014909|gb|EDJ99477.1| MGG_04173 [Magnaporthe grisea 70-15]
  misc_feature (1)..(254): NCBI GI: 255944691 Blast Desc: Pc20g05840 [Penicillium chrysogenum Wisconsin 54-1255] gi|211587848|emb|CAP85913.1| Pc20g05840 [Penicillium chrysogenum Wisconsin 54-1255]
  misc_feature (1)..(224): NCBI GI: 212539344 Blast Desc: conserved [Penicillium marneffei ATCC 18224] gi|210067126|gb|EEA21218.1| conserved [Penicillium marneffei ATCC 18224]
  misc_feature (1)..(251): NCBI GI: 119497869 Blast Desc: EF-hand calcium-binding domain protein, [Neosartorya fischeri NRRL 181] gi|119413856|gb|EAW23795.1| EF-hand calcium-binding domain protein, [Neosartorya fischeri NRRL 181]
  misc_feature (1)..(250): NCBI GI: 154322805 Blast Desc: BC1G_00745 [Botryotinia fuckeliana B05.10] gi|150848079|gb|EDN23272.1| BC1G_00745 [Botryotinia fuckeliana B05.10]
  misc_feature (33)..(252): NCBI GI: 156064777 Blast Desc: SS1G_00396 [Sclerotinia sclerotiorum 1980] gi|154691258|gb|EDN90996.1| SS1G_00396 [Sclerotinia sclerotiorum 1980]
  misc_feature (1)..(251): NCBI GI: 121711144 Blast Desc: EF-hand calcium-binding domain protein, [Aspergillus clavatus NRRL 1] gi|119401338|gb|EAW11762.1| EF-hand calcium-binding domain protein, [Aspergillus clavatus NRRL 1]
  misc_feature (33)..(216): NCBI GI: 259486586 Blast Desc: TPA: conserved [Aspergillus nidulans FGSC A4]
  misc_feature (1)..(254): NCBI GI: 146322745 Blast Desc: EF-hand calcium-binding domain protein [Aspergillus fumigatus Af293] gi|129556781|gb|EAL87229.2| EF-hand calcium-binding domain protein, [Aspergillus fumigatus Af293]
MKILCLHPSGQNGQMLEAALRPVIQQIQDSDPSVSFEFLNGPVYCASQAGDVAAAHNYYNVLTDGDTQEAHEWLTRLVRQDGPYEGVIAFAQAGALVSSYLLHEQWYHGEEQNGPFRFAFFVDGSLPLSVLKNIGVPVSKTAECIMEEVENQRRQGLGPLPSHTLMARQAIYNSDDCFGLNLNDIARELKIRIPTVHVWRDNDPGLVPATHLAGICDPYIRKIHILEARGTSIPQLTEDTYQFSKLLLWCMRRAKWPGQL

SEQ ID NO: 33048 - DNA, 1596 bp, Muscodor strobelii
  misc_feature: SGI cDNA ID NO. 571393
  misc_feature: Encodes the peptide sequence at SEQ ID NO 33049
atggcttcgctgcttcttgatagagtgtattcaagctctaaattcagccatgcaatcatcactgttgttgttctctccaccttttggtatgtactctcagcatggagaagctggtatcgtctacggcagtttcctggtccgctcgccgctcgcttttcctatctctggggctattttgctatgactacgggccgtatgcaccttcgtcttgcagaagagcaagaaaaatatggagaaatagtccgcattgggcctaatgagttgctgatttatgactctcaaactctctggcaaattaacaatgtacggtctaactatggacgtggtgactggtatgcgagtatccaaatcgatccaaacgggcacaccgttctctcggaacctgacacttcgcgccatgacaaacgaaaagcgaaactcgcatctggatatgccggtaaaggagccgtcaacctcgaagcaggtacgaataaagagatccctcgtgaccattcattgattacgtttcttagactgccactaactttgaaagtcgactcccagatttcagtactcattgatatcatcaaaaagaaatacgtttccaagggtggagcgcctgttgttgacttcagtcaactcattcgattcttccaggtcgatgttgtgacgctcgctggcactggaaagccatggggcgatttggtaaccgaaacggatcaattcgacttcatctcgacgacggacgcctttgtacctttccttcactgttttatgatgatacccctcctacgcgacttttttacttctaaattctttctcaaactcgctggaccaaagcatacggacgaaaaaggatttggcaagttgttggcgtttgtaaaagacagcgtctctgcgcgattcgatgaatcaaagaaatctgccgaacctcggggtgatatgcttgaggaatggatcagccatggattgacacgcaaagaatgcgagcttgaactggccgtccaggtgcctgctggctcggaaacgtcgacaaccgccattcgtggcattatgcttcaccttctatcatctcctccggtatatcagaagctacaaaaagaaataactctgggtattcgggaagggcggatttcaacccctataaccaacgaggaagccaaaaagttaccttatctccaggctgttattaacgaaggtctacgaatggttccaccagcaataaccgggttccctaagaaggttccggctgggggcgacacgatttgtggcaagttcgtgcctgaaggtactgatatcttcgtcaacttgtggagcatgttgcgcaaccgagcagtgttcggtgaagatgctgaagtattccgccctgagaggttccttgagtgtgacgaggataaacgagtggagctcgtgaagaatgtcgatcttgcatttggccatggacgatggcagtgtccgggcaaaacactagcatggctcgaattaaacaagatatttgtcgagctgctaagaacatatgatcttcaaattgtcaatccacaaacaccttggcgatgtcgcggctactcgagcttccttattgatgatttctgggtatctatgcgtgagaggtcttga

SEQ ID NO: 33049 - protein, 531 aa, Muscodor strobelii
  misc_feature: SGI Peptide ID NO. 571393
  misc_feature (45)..(527): Pfam Id: PF00067 Pfam Desc: Cytochrome P450
  misc_feature (332)..(510): Pfam Id: PF00067 Pfam Desc: Cytochrome P450
  misc_feature (13)..(529): NCBI GI: 85091832 Blast Desc: NCU09185 [Neurospora crassa OR74A] gi|28920493|gb|EAA29859.1| [Neurospora crassa OR74A]
  misc_feature (38)..(530): NCBI GI: 171678209 Blast Desc: protein product [Podospora anserina] gi|170937174|emb|CAP61831.1| protein product [Podospora anserina]
  misc_feature (28)..(529): NCBI GI: 51490962 Blast Desc: cytochrome P450 monooxygenase [Botryotinia fuckeliana]
  misc_feature (13)..(529): NCBI GI: 171680444 Blast Desc: protein product [Podospora anserina] gi|170939849|emb|CAP65074.1| protein product [Podospora anserina]
  misc_feature (5)..(530): NCBI GI: 85094228 Blast Desc: NCU05848 [Neurospora crassa OR74A] gi|28921295|gb|EAA30603.1| [Neurospora crassa OR74A]
  misc_feature (18)..(525): NCBI GI: 261357872 Blast Desc: pisatin demethylase [Verticillium albo-atrum VaMs.102]
  misc_feature (28)..(495): NCBI GI: 154309274 Blast Desc: BC1G_07531 [Botryotinia fuckeliana B05.10] gi|150852355|gb|EDN27547.1| BC1G_07531 [Botryotinia fuckeliana B05.10]
  misc_feature (1)..(530): NCBI GI: 85111238 Blast Desc: NCU08112 [Neurospora crassa OR74A] gi|28925582|gb|EAA34606.1| [Neurospora crassa OR74A]
  misc_feature (9)..(530): NCBI GI: 169615603 Blast Desc: SNOG_10960 [Phaeosphaeria nodorum SN15] gi|111060339|gb|EAT81459.1| SNOG_10960 [Phaeosphaeria nodorum SN15]
  misc_feature (16)..(530): NCBI GI: 39972649 Blast Desc: cytochrome P450 monooxygenase, [Magnaporthe grisea 70-15] gi|145016837|gb|EDK01267.1| cytochrome P450 monooxygenase, [Magnaporthe grisea 70-15]
  misc_feature (41)..(503): SWISSPROT Homolog: EC 1.14.13.12 Benzoate 4-monooxygenase
MASLLLDRVYSSSKFSHAIITVVVLSTFWYVLSAWRSWYRLRQFPGPLAARFSYLWGYFAMTTGRMHLRLAEEQEKYGEIVRIGPNELLIYDSQTLWQINNVRSNYGRGDWYASIQIDPNGHTVLSEPDTSRHDKRKAKLASGYAGKGAVNLEAGTNKEIPRDHSLITFLRLPLTLKVDSQISVLIDIIKKKYVSKGGAPVVDFSQLIRFFQVDVVTLAGTGKPWGDLVTETDQFDFISTTDAFVPFLHCFMMIPLLRDFFTSKFFLKLAGPKHTDEKGFGKLLAFVKDSVSARFDESKKSAEPRGDMLEEWISHGLTRKECELELAVQVPAGSETSTTAIRGIMLHLLSSPPVYQKLQKEITLGIREGRISTPITNEEAKKLPYLQAVINEGLRMVPPAITGFPKKVPAGGDTICGKFVPEGTDIFVNLWSMLRNRAVFGEDAEVFRPERFLECDEDKRVELVKNVDLAFGHGRWQCPGKTLAWLELNKIFVELLRTYDLQIVNPQTPWRCRGYSSFLIDDFWVSMRERS

SEQ ID NO: 33050 - DNA, 816 bp, Muscodor strobelii
  misc_feature: SGI cDNA ID NO. 571394
  misc_feature: Encodes the peptide sequence at SEQ ID NO 33051
atgccttcggcaacaggcgcttcatctccattactctctccaatatccaaaacacctgtatcacaagacggcagtaaacagacaacgaatacaaactcgcagtctgccgccgccgcaacatcgacaacggtccccgctttgcaaacgaatgtcacaccaattgctcctggtccgcgtaaagcagacacggaaatgtcatggcctacgccggcggccctcccaatccggagtaacgacaacgaaaatctcgtcatatttcgaagagcattgggcataaatacccacctacagagtgctgacaatagcagcacggtagaagaaggacgaaaatccgcaattgggatttatagaaccgttattcaagaacagtcaagcctgcgtctaaactacgctctattgcaagcttttctgtacatagtctacttctcgcagattatcatcggcgcaattctaacggcactgggcgctacggcatcgaaatatgtcagagtcatcacagccctcggcgcgcttaatacgattctcgcgggcatattggctctgataaaaggatcaggacagccgatgaaaatggggaaggataggatagggtatagaagactccaggactggattgaggagactgaggccttgcttgcggttggtgttatcggcaaaaacaggagagaggttggattgctagtggagagtgcttttaagagatataatgcggtgaaagagactgtggaagataacgattctgattattatgcttttccgaaaaggcgagcgagtgacgatgctggtgagcggagaggggaaaggcatggaaaatag

SEQ ID NO: 33051 - protein, 271 aa, Muscodor strobelii
  misc_feature: SGI Peptide ID NO. 571394
  misc_feature (26)..(250): NCBI GI: 85085271 Blast Desc: NCU04392 [Neurospora crassa OR74A] gi|28918561|gb|EAA28233.1| [Neurospora crassa OR74A] gi|40882231|emb|CAF06056.1| [Neurospora crassa]
  misc_feature (8)..(271): NCBI GI: 242799868 Blast Desc: conserved [Talaromyces stipitatus ATCC 10500] gi|218716814|gb|EED16235.1| conserved [Talaromyces stipitatus ATCC 10500]
  misc_feature (60)..(256): NCBI GI: 170940146 Blast Desc: protein product [Podospora anserina]
  misc_feature (73)..(264): NCBI GI: 212541036 Blast Desc: C6 transcription factor, [Penicillium marneffei ATCC 18224] gi|210067972|gb|EEA22064.1| C6 transcription factor, [Penicillium marneffei ATCC 18224]
  misc_feature (4)..(250): NCBI GI: 116195664 Blast Desc: CHGG_04430 [Chaetomium globosum CBS 148.51] gi|88180343|gb|EAQ87811.1| CHGG_04430 [Chaetomium globosum CBS 148.51]
  misc_feature (79)..(260): NCBI GI: 261357822 Blast Desc: conserved [Verticillium albo-atrum VaMs.102]
  misc_feature (83)..(251): NCBI GI: 156061227 Blast Desc: SS1G_02756 [Sclerotinia sclerotiorum 1980] gi|154700160|gb|EDN99898.1| SS1G_02756 [Sclerotinia sclerotiorum 1980]
  misc_feature (47)..(266): NCBI GI: 154293238 Blast Desc: BC1G_14417 [Botryotinia fuckeliana B05.10] gi|150845562|gb|EDN20755.1| BC1G_14417 [Botryotinia fuckeliana B05.10]
  misc_feature (115)..(250): NCBI GI: 169784470 Blast Desc: [Aspergillus oryzae RIB40] gi|238508382|ref|XP_002385386.1| conserved [Aspergillus flavus NRRL3357] gi|83775443|dbj|BAE65563.1| protein product oryzae]
  misc_feature (130)..(251): NCBI GI: 67537838 Blast Desc: AN5089.2 [Aspergillus nidulans FGSC A4] gi|40740994|gb|EAA60184.1| AN5089.2 [Aspergillus nidulans FGSC A4] gi|259482023|tpe|CBF76103.1| TPA: conserved [Aspergillus FGSC
MPSATGASSPLLSPISKTPVSQDGSKQTTNTNSQSAAAATSTTVPALQTNVTPIAPGPRKADTEMSWPTPAALPIRSNDNENLVIFRRALGINTHLQSADNSSTVEEGRKSAIGIYRTVIQEQSSLRLNYALLQAFLYIVYFSQIIIGAILTALGATASKYVRVITALGALNTILAGILALIKGSGQPMKMGKDRIGYRRLQDWIEETEALLAVGVIGKNRREVGLLVESAFKRYNAVKETVEDNDSDYYAFPKRRASDDAGERRGERHGK

SEQ ID NO: 33052 - DNA, 282 bp, Muscodor strobelii
  misc_feature: SGI EST ID NO. CUFF.78106.0
  misc_feature: Variant of the nucleotide sequence at SEQ ID NO 33050
gtgcttttaagagatataatgcggtgaaagagactgtggaagataacgattctgattattatgcttttccgaaaaggcgagcgagtgacgatgctggtgagcggagaggggaaaggcatggaaaataggcacgaggcattgttcgtgattgagtctattaggtatgtctattcatatttggtgttaccaatcttaatagtgatttcttattgatttttatttctttcatggccctctcgttccagaacttcgcgggctactattatgatgactgtgttatca

SEQ ID NO: 33053 - DNA, 657 bp, Muscodor strobelii
  misc_feature: SGI cDNA ID NO. 571395
  misc_feature: Encodes the peptide sequence at SEQ ID NO 33054
atgttgacttcatatctcttgatctcgctgctggcgttggccgggcaggcaaatgccgtgtcgtggtatttcttacggtattatccggcttcgggacaaaagttcacgtcgttgtcgggcacgatgaccatcccaacgcttccaggtgccggtacctactacctatggccaggtctacaacccaccgataacagtggtgtataccagaatgtactcgatggacgttctggcacgtggtggattggctctggatggtgttgctcaaacccaactctagactggggcggtggtttcaacacctacggtggggagcaggtcgctttctcggacacattaggcagctcgacatggacgtctacactcactcggaagtcgacgggagagtcagtgtccaacaatttccctcttacctcaaagtcatttaaccaagctctatttgcgattgagctttacgatgtcgcttggaattttggccaacttgcttttaccaacgtcgttatcgtgagcacgggcagcagcgattcaagctggtgcaacagcaagcccgagaactataacaatgcagcagtgtactccatcagcggcgtaagcgcgagcgtcagtgggacgacagtgacatgtaaaattgcgtcgatcgttcttcagaagccagcatag

SEQ ID NO: 33054 - protein, 218 aa, Muscodor strobelii
  misc_feature: SGI Peptide ID NO. 571395
  misc_feature (1)..(218): NCBI GI: 85092082 Blast Desc: NCU04675 [Neurospora crassa OR74A] gi|28920620|gb|EAA29982.1| NCU04675 [Neurospora crassa OR74A] gi|28950063|emb|CAD70817.1| [Neurospora crassa]
  misc_feature (8)..(202): NCBI GI: 238601545 Blast Desc: MPER_04507 [Moniliophthora perniciosa FA553] gi|215466177|gb|EEB96370.1| MPER_04507 [Moniliophthora perniciosa FA553]
  misc_feature (55)..(214): NCBI GI: 156039465 Blast Desc: [Sclerotinia sclerotiorum 1980] gi|154697606|gb|EDN97344.1| [Sclerotinia sclerotiorum 1980]
  misc_feature (55)..(214): NCBI GI: 154291455 Blast Desc: [Botryotinia fuckeliana B05.10] gi|150846746|gb|EDN21939.1| [Botryotinia fuckeliana B05.10]
MLTSYLLISLLALAGQANAVSWYFLRYYPASGQKFTSLSGTMTIPTLPGAGTYYLWPGLQPTDNSGVYQNVLDGRSGTWWIGSGWCCSNPTLDWGGGFNTYGGEQVAFSDTLGSSTWTSTLTRKSTGESVSNNFPLTSKSFNQALFAIELYDVAWNFGQLAFTNVVIVSTGSSDSSWCNSKPENYNNAAVYSISGVSASVSGTTVTCKIASIVLQKPA

SEQ ID NO: 33055 - DNA, 2428 bp, Muscodor strobelii
  misc_feature: SGI EST ID NO. CUFF.78113.0
  misc_feature: Variant of the nucleotide sequence at SEQ ID NO 33053
gccagtgctccgcaatctgatttagaaagtacacaatcagccacagctggcgggactgacaatatccctcccgctatcatggatattctcttcaacaacacggcaagaggctcggatatcaaccgaggcgataatttctggctgtctgtagcaaatgcactctcgagtataagcagaaacatagaggacaatcgaacgcagattttcagggcctgcatggcgaacgccatctgcatcggtgtcaatctttcggagctcatggtgtgcaatcggccttgtcagtcacctttttatcgaccattagctagtccgcacgatgatccccaagcacttatagctgctgcttcgcctgcggacttgccagagcctttgaaaccgacattagcacagattctcattcctcatcacgctagccttgacttgattcccatcccacgactccgtgagcgtgcaattttgatgtgcgctgctttgccacatctcttcaacatttgggatatgaagattgacatctatgttcaaaatgccttgacgtgccagcggcgcaataccgccagcgggtttgtctcgcaaccctgggatatgcgtgcttggcgggctagtccgtggtttttgaccaaatggaaaatgatcattgacgaagacacaatgactgccggccctactaatattgggtattccgggaatgtggatgtagactcgggcgaaggccgctcaccgaacggaagattctttcgtctcgaaatggattctcccaatcagtccttcatgatgaaattccccagactgatcactactgtctgcattctgcgaagggtcaaaagtcctggggttcagctgcgacagatgaagcatctaagaatgcactggcattcgccataacaatccgttgctagtatgagatcaaatgatatcagccacaactgtcaacgacaaaatcatgtgcactaacttttgacgttatggtacattgggagcagcattgttcagaagcttcatgattctatccaccggatctcgtggatgctcctagattggctaaagtagggttgtattggccgggcgcatcgcaaacgtgaatcgaggaaaatcgcccgccgatgcgactttgctaaacggcaccaaaatccacatagccatcggagtttacatgccgcatagggaaaacggctgatctcgcaccgaagtgatgcaactgcaagcatcaatattcaactccaaattttgtactcctttccggttgttgcatcacctgcgaagcagtatgagatggggaaacgactataacagcggtagtataggcaatggcctccactgatagataaacacccgacttggcacgagataattgtcacactgagtttcgatttcccttcagttttggttgaactggttccacgactgaagcacagaacatgttgacttcatatctcttgatctcgctgctggcgttggccgggcaggcaaatgccgtgtcgtggtatttcttacggtattatccggcttcgggacaaaagttcacgtcgttgtcgggcacgatgaccatcccaacgcttccaggtgccggtacctactacctatggccaggtctacaacccaccgataacagtggtgtataccagaatgtactcgatggacgttctggcacgtggtggattggctctggatggtgttgctcaaacccaactctagactggggcggtggtttcaacacctacggtggggagcaggtcgctttctcggacacattaggcagctcgacatggacgtctacactcactcggaagtcgacgggagagtcagtgtccaacaatttccctcttagtaagttcgacccatgaacgtgtaggtgagagttttctgactcagtggtaatcgatgtagcctcaaagtcatttaaccaagctctatttgcgattgagctgtaagaccaatacttttccaataattgcgatcaatgcttagtgggatgatagttacgatgtcgcttggaattttggccaacttgcttttaccaacgtcgttatcgtgagcacgggcagcagcgattcaagctggtgcaacagcaagcccgagaactataacaatgcagcagtgtactccatcagcggcgtaagcgcgagcgtcagtgggacgacagtgacatgtaaaattgcgtcgatcgttcttcagaagccagcataggcttccgccaagcaacggtgaatatctttgatccaacttgctccatgggtcgagtatctgaagggaactgcaatgaaaagcaaacgattgaggggcgtcaagagagggcgatgatccaatctttcagttcacgtagtcgagctaagccggtagcgaaatatgagatttaagccgccatctttttttgggccaacgcgatgcacgtgcagtccttgaagcctgattttgtgaaacgagtgctctg

SEQ ID NO: 33056 - DNA, 1332 bp, Muscodor strobelii
  misc_feature: SGI cDNA ID NO. 571396
  misc_feature: Encodes the peptide sequence at SEQ ID NO 33057
atgcgcgagacccaagagccacaccatcatgacgccaatgtggggtccaaacggacgaaggtgaagaaaagagttatcacagcagctcgaaaggaacagaacagaactgctcaaagggctttccgtgaacgtcagaagcaacagaaggacatcttaaatacgggagcaatacgtccacagcccagacagctacagccacgcccaagtgatacgcaagatgtgtcgcttgcaatctcttcatctgcttctggtgagcctgtgccagacaccaactcgggcgcgagaacagagtcggacgcaggcccttcatcaataagtaataactcatctgaatctgagttggcatacgttccgcagcttctcgatatcgacgcgtccagttttggcgacgctctggatatagattttcagtcttcattggatcagattgcttcgtcttttgatcctacagccagtgctccgcaatctgatttagaaagtacacaatcagccacagctggcgggactgacaatatccctcccgctatcatggatattctcttcaacaacacggcaagaggctcggatatcaaccgaggcgataatttctggctgtctgtagcaaatgcactctcgagtataagcagaaacatagaggacaatcgaacgcagattttcagggcctgcatggcgaacgccatctgcatcggtgtcaatctttcggagctcatggtgtgcaatcggccttgtcagtcacctttttatcgaccattagctagtccgcacgatgatccccaagcacttatagctgctgcttcgcctgcggacttgccagagcctttgaaaccgacattagcacagattctcattcctcatcacgctagccttgacttgattcccatcccacgactccgtgagcgtgcaattttgatgtgcgctgctttgccacatctcttcaacatttgggatatgaagattgacatctatgttcaaaatgccttgacgtgccagcggcgcaataccgccagcgggtttgtctcgcaaccctgggatatgcgtgcttggcgggctagtccgtggtttttgaccaaatggaaaatgatcattgacgaagacacaatgactgccggccctactaatattgggtattccgggaatgtggatgtagactcgggcgaaggccgctcaccgaacggaagattctttcgtctcgaaatggattctcccaatcagtccttcatgatgaaattccccagactgatcactactgtctgcattctgcgaagggtcaaaagtcctggggttcagctgcgacagatgaagcatctaagaatgcactggcattcgccataa

SEQ ID NO: 33057 - protein, 443 aa, Muscodor strobelii
  misc_feature: SGI Peptide ID NO. 571396
  misc_feature (218)..(387): NCBI GI: 256723956 Blast Desc: NECHADRAFT_37081 [Nectria haematococca mpVI 77-13-4]
  misc_feature (23)..(363): NCBI GI: 119489904 Blast Desc: NFIA_061760 [Neosartorya fischeri NRRL 181] gi|119411072|gb|EAW21015.1| conserved [Neosartorya fischeri NRRL 181]
  misc_feature (23)..(363): NCBI GI: 70998739 Blast Desc: AFUA_3G15340 [Aspergillus fumigatus Af293] gi|66851728|gb|EAL92053.1| AFUA_3G15340 [Aspergillus fumigatus Af293] gi|159127110|gb|EDP52225.1| AFUB_033890 [Aspergillus
  misc_feature (216)..(376): NCBI GI: 46111947 Blast Desc: FG02855.1 [Gibberella zeae PH-1]
  misc_feature (211)..(362): NCBI GI: 242774491 Blast Desc: conserved [Talaromyces stipitatus ATCC 10500] gi|218722070|gb|EED21488.1| conserved [Talaromyces stipitatus ATCC 10500]
  misc_feature (210)..(362): NCBI GI: 238488771 Blast Desc: conserved [Aspergillus flavus NRRL3357] gi|220698011|gb|EED54351.1| conserved [Aspergillus flavus NRRL3357]
  misc_feature (216)..(361): NCBI GI: 119487202 Blast Desc: NFIA_029910 [Neosartorya fischeri NRRL 181] gi|119410613|gb|EAW20559.1| conserved [Neosartorya fischeri NRRL 181]
  misc_feature (216)..(361): NCBI GI: 70982023 Blast Desc: AFUA_4G03530 [Aspergillus fumigatus Af293] gi|66844163|gb|EAL84502.1| AFUA_4G03530 [Aspergillus fumigatus Af293] gi|159122229|gb|EDP47351.1| AFUB_099520 [Aspergillus
  misc_feature (214)..(357): NCBI GI: 242779335 Blast Desc: TSTA_097090 [Talaromyces stipitatus ATCC 10500] gi|218723042|gb|EED22460.1| TSTA_097090 [Talaromyces stipitatus ATCC 10500]
  misc_feature (201)..(362): NCBI GI: 212543381 Blast Desc: conserved [Penicillium marneffei ATCC 18224] gi|210066752|gb|EEA20845.1| conserved [Penicillium marneffei ATCC 18224]
MRETQEPHHHDANVGSKRTKVKKRVITAARKEQNRTAQRAFRERQKQQKDILNTGAIRPQPRQLQPRPSDTQDVSLAISSSASGEPVPDTNSGARTESDAGPSSISNNSSESELAYVPQLLDIDASSFGDALDIDFQSSLDQIASSFDPTASAPQSDLESTQSATAGGTDNIPPAIMDILFNNTARGSDINRGDNFWLSVANALSSISRNIEDNRTQIFRACMANAICIGVNLSELMVCNRPCQSPFYRPLASPHDDPQALIAAASPADLPEPLKPTLAQILIPHHASLDLIPIPRLRERAILMCAALPHLFNIWDMKIDIYVQNALTCQRRNTASGFVSQPWDMRAWRASPWFLTKWKMIIDEDTMTAGPTNIGYSGNVDVDSGEGRSPNGRFFRLEMDSPNQSFMMKFPRLITTVCILRRVKSPGVQLRQMKHLRMHWHSP

SEQ ID NO: 33058 - DNA, 592 bp, Muscodor strobelii
  misc_feature: SGI EST ID NO. CUFF.78117.0
  misc_feature: Variant of the nucleotide sequence at SEQ ID NO 33056
ggcggagccaatcatattgtgggaatcgagtaagccagttccacggagttagcggccagacaaaatcttccctctcatcaaggagagatcgggagctacactcgtcggagaatgcgtacaagccgatccagacaagcagccaagtattcacccttgatcgaagggcgcgcttatcaaatcagttgtgtagcgtagaagcgcagtgcagtcccatggaaatgcgcgagacccaagagccacaccatcatgacgccaatgtggggtccaaacggacgaaggtgaagaaaagagttatcacagcagctcgaaaggaacagaacagaactgctcaaagggctttccgtgaacgtcagaagcaacagaaggacatcttaaatacgggagcaatacgtccacagcccagacagctacagccacgcccaagtgatacgcaagatgtgtcgcttgcaatctcttcatctgcttctggtgagcctgtgccagacaccaactcgggcgcgagaacagagtcggacgcaggcccttcatcaataagtaataactcatctgaatctgagttggcatacgttccgcagcttctcgatatcgacgc

SEQ ID NO: 33059 - DNA, 1011 bp, Muscodor strobelii
  misc_feature: SGI cDNA ID NO. 571397
  misc_feature: Encodes the peptide sequence at SEQ ID NO 33060
atggcctcaacgaaaatcattgctgtcatcggtgcgacaggcaaccagggcttttcagtcgcacggacgttcttagctcttcctggatggcaagttcgtgcaattactaggaatccatcttcagagaaagcaaaagaactctccaaccttggatgcgaagtaacaaaggcagacctggcagacaagagctcattatccagggccttcgacggctcccacgcgatcttcgttaatactgatttttgggctgcgtaccgggcgtccgtcgtcactggtgatgcccccgagaagagcagttcaatcggatgggatacagaagtcctgcatgggaagaatgctgctgcggctgccgccggagttccaactcttgaaaaattcatatattctgctctggggcctatgaagagagcatccaaaggcaaatactccaggtcgtcgcactgggagacgaagtcggcaatagtcgactatattgagaacgaacagcccgagcttgccaagaaatcatcattcatctacattggggcatacacgactaatccgttcctcttgccaaagccgaacccagcaactggagaatacgcaatgattgcgccctgtcctgccgctactcgtatgcccatcactgatgcgcaaaactccccaggaccattcgttcgtgctcttgtggaggacgaggcgcccggcaagaagttgttggcgtacgacagctacttgactatggaccagattgcagagacatggtcgaaagtcacgggcaaaaccgctaagtttatcggcatgacgatggaggccgtgcatgaaatgacaaaggtaccgttcgaggtgctcgaaggtcctgctttcgtcggcgaatttggatatatgggaggaatccccaatgccattgaacctgatcagctcaagaacaagcccaaaactccgaccttcgaagaatggctcgccggaagagatgtcaatgagctgttatccattcaaggcataaatgagtatttgtcaagcaccgagtga

SEQ ID NO: 33060 - protein, 336 aa, Muscodor strobelii
  misc_feature: SGI Peptide ID NO. 571397
  misc_feature (7)..(260): Pfam Id: PF05368 Pfam Desc: NmrA-like family
  misc_feature (7)..(84): Pfam Id: PF05368 Pfam Desc: NmrA-like family
  misc_feature (102)..(255): Pfam Id: PF05368 Pfam Desc: NmrA-like family
  misc_feature (1)..(322): NCBI GI: 256723861 Blast Desc: NECHADRAFT_78487 [Nectria haematococca mpVI 77-13-4]
  misc_feature (3)..(326): NCBI GI: 46111949 Blast Desc: FG02856.1 [Gibberella zeae PH-1]
  misc_feature (5)..(324): NCBI GI: 115388665 Blast Desc: conserved [Aspergillus terreus NIH2624] gi|114195922|gb|EAU37622.1| conserved [Aspergillus terreus NIH2624]
  misc_feature (2)..(323): NCBI GI: 242774486 Blast Desc: conserved [Talaromyces stipitatus ATCC 10500] gi|218722069|gb|EED21487.1| conserved [Talaromyces stipitatus ATCC 10500]
  misc_feature (2)..(322): NCBI GI: 75859146 Blast Desc: AN9531.2 [Aspergillus nidulans FGSC A4] gi|40747575|gb|EAA66731.1| AN9531.2 [Aspergillus nidulans FGSC A4] gi|259486457|tpe|CBF84309.1| TPA: conserved [Aspergillus FGSC
  misc_feature (5)..(335): NCBI GI: 238488769 Blast Desc: hscarg dehydrogenase, [Aspergillus flavus NRRL3357] gi|220698010|gb|EED54350.1| hscarg dehydrogenase, [Aspergillus flavus NRRL3357]
  misc_feature (5)..(335): NCBI GI: 169762948 Blast Desc: [Aspergillus oryzae RIB40] gi|83770402|dbj|BAE60535.1| protein product [Aspergillus oryzae]
  misc_feature (2)..(323): NCBI GI: 119487204 Blast Desc: NmrA-like family protein [Neosartorya fischeri NRRL 181] gi|119410614|gb|EAW20560.1| NmrA-like family protein [Neosartorya fischeri NRRL 181]
  misc_feature (2)..(323): NCBI GI: 70982021 Blast Desc: conserved [Aspergillus fumigatus Af293] gi|66844162|gb|EAL84501.1| conserved [Aspergillus fumigatus Af293]
  misc_feature (2)..(323): NCBI GI: 159122230 Blast Desc: conserved [Aspergillus fumigatus A1163]
MASTKIIAVIGATGNQGFSVARTFLALPGWQVRAITRNPSSEKAKELSNLGCEVTKADLADKSSLSRAFDGSHAIFVNTDFWAAYRASVVTGDAPEKSSSIGWDTEVLHGKNAAAAAAGVPTLEKFIYSALGPMKRASKGKYSRSSHWETKSAIVDYIENEQPELAKKSSFIYIGAYTTNPFLLPKPNPATGEYAMIAPCPAATRMPITDAQNSPGPFVRALVEDEAPGKKLLAYDSYLTMDQIAETWSKVTGKTAKFIGMTMEAVHEMTKVPFEVLEGPAFVGEFGYMGGIPNAIEPDQLKNKPKTPTFEEWLAGRDVNELLSIQGINEYLSSTE

SEQ ID NO: 33061 - DNA, 338 bp, Muscodor strobelii
  misc_feature: SGI EST ID NO. CUFF.78119.0
  misc_feature: Variant of the nucleotide sequence at SEQ ID NO 33059
gcgatgcatcgattatcaataagcatcgccatggagttccctagaatcgatgcatctctcgaatgttaatctcatttaggacgcatcagcgaattagctcagataattctcttactcaagcaataactgtcttctttatacactttcgggcatcaaaatggcctcaacgaaaatcattgctgtcatcggtgcgacaggcaaccagggcttttcagtcgcacggacgttcttagctcttcctggatggcaagttcgtgcaattactaggaatccatcttcagagaaagcaaaagaactctccaaccttggatgcgaagtaacaaaggcagacctggcag

SEQ ID NO: 33062 - DNA, 2070 bp, Muscodor strobelii
  misc_feature: SGI cDNA ID NO. 571398
  misc_feature: Encodes the peptide sequence at SEQ ID NO 33063
atggcgtctcgacctgctttggcgttgtgccttctattatgtctccttgtccttgttgccccggcatcagcctttggggcgggcgaagtccctgttggcagcgaatttaagggatatgtctggcgtcatggagatataggtgaagtgctggcatacttacctgtcagtttcatcacaaaccaccggttcacacagcttgagcgcaagcagatctatttcggcaactggctacgcgatttctcccaggtcattgacactacatgtcttgagaatgtgccagagccgatcctgagagctatcgtatcagtaatggcatttatggaatttgggttcgccaccgatgagtttgatgtcactcgcgaacgcctaggctgttatacgcacgtcgagcatatcgacaatccagctggttatcagaatgacgcaaaactggtcgatgagcgcctgcgaggtcccgtggaccccagagagcttgagtttgaccccaagacaggcatgaagaattacatcgcgaattccggtcaaggatgggacacttcggcggattttgtccggaggcaactcagcgaatgcatcagattagggagaaaacggcgcgatgcgagcgctaagaaggagagctttattcatcttggagcagctttgcacaccctggaagatttctctgcccactccaacttcgtcgagctctgcttacatgagttgggagaaaatgaagttttcccttttgttggggacgcttgccgagttgaagtaccgggtggttttaggaagcacaggaaagttgcaccgctagtgaccggaacatttggcatgctggacattttccacagtcttttgggcgaggctgatgatatggctatactgcaatcaaagggttctctaggtgacctcgaaaaacaactcggatacggcggcgtagcatttgagcacttattcgatgtcatcaagcgcgcgttgcaagtcctgagtaaggtgtcaaaagacgacaatccgcttcttcagcaactcgagactatcagcgtcatattccaaaaggcgaaaggagccatacccgaagtttccctcagctccgattcaagcagcggtgacgagtccagtccgaaagactcggggcgagccgatggaattaccaatccgaacctcttatggcaagcaattgagccaattttctatctccatgatagactgatgaagtggatgcaagagagcgcacaagaatcggcagagttctccgagcatgagtcaagaagtcagcttggtgaacagacaaatcagcttgtgttcaaattcctggctgtaatgattgagtctgccgtgaaagagcttcgcaacgctgttaaagctgcaaaggaaaaagtggacgaggaagcagcgaagtcgaatgcagcacagatctatcaagacgggtcatctgcttcagatcccagtcactctgatatttccaaagaccacttctctaatacactcaatcaaatttcgggtctcgtggcaacaatcacgacaaattgggccacccaacaagttgttagatgctgggacgacccaaaaatcaatgctgaaaggacgatcgatgagataatgaccatattacaccatccagcctttccgaaaaagaaaacggccatacaagaatacatgttcaaacaggttgaaaagtggtggaaagacatgtcagatgaagagaaggccggactacgccaacagcttacacgagagagcgttcaagaaagaggtcatgaaaatcacgagttgactttgaaggacctcgttacgacacacaaaggagccgcagaattcccaggctcgcgacctgaagtgaaggcccctccaaagaaggtctcatttccattgacatgggccctaaacgaagcgtcaaaggacataagctggatactctcgacgctacacaagggccttcgagacccgactggagcagcgaaagatatcatacagacttcgggcggcgttgtttacggttcaggacggtttgccttcaataccgtgggttgggttgcaaacaagatcacaggattgctctggaaaacgagcaataccgaggagcaatag

SEQ ID NO: 33063 - protein, 689 aa, Muscodor strobelii
  misc_feature: SGI Peptide ID NO. 571398
  misc_feature (1)..(610): Pfam Id: PF07217 Pfam Desc: Heterokaryon incompatibility protein Het-C
  misc_feature (1)..(285): Pfam Id: PF07217 Pfam Desc: Heterokaryon incompatibility protein Het-C
  misc_feature (475)..(585): Pfam Id: PF07217 Pfam Desc: Heterokaryon incompatibility protein Het-C
  misc_feature (12)..(659): NCBI GI: 46112807 Blast Desc: FG02905.1 [Gibberella zeae PH-1]
  misc_feature (22)..(651): NCBI GI: 256721170 Blast Desc: [Nectria haematococca mpVI 77-13-4]
  misc_feature (5)..(602): NCBI GI: 115385404 Blast Desc: ATEG_01884 [Aspergillus terreus NIH2624] gi|114196941|gb|EAU38641.1| ATEG_01884 [Aspergillus terreus NIH2624]
  misc_feature (22)..(589): NCBI GI: 119489357 Blast Desc: NIMA-interacting protein TinC [Neosartorya fischeri NRRL 181] gi|119411047|gb|EAW20992.1| NIMA-interacting protein TinC [Neosartorya fischeri NRRL 181]
  misc_feature (7)..(589): NCBI GI: 238843618 Blast Desc: NIMA-interacting protein TinC [Microsporum canis CBS 113480]
  misc_feature (8)..(589): NCBI GI: 226292756 Blast Desc: HET-C protein [Paracoccidioides brasiliensis Pb18]
  misc_feature (11)..(582): NCBI GI: 255954861 Blast Desc: Pc21g11520 [Penicillium chrysogenum Wisconsin 54-1255] gi|211589894|emb|CAP96049.1| Pc21g11520 [Penicillium chrysogenum Wisconsin 54-1255]
  misc_feature (22)..(589): NCBI GI: 70982294 Blast Desc: NIMA-interacting protein TinC [Aspergillus fumigatus Af293] gi|66844299|gb|EAL84637.1| NIMA-interacting protein TinC [Aspergillus fumigatus Af293] gi|159123078|gb|EDP48198.1| protein
  misc_feature (9)..(607): NCBI GI: 67904160 Blast Desc: AN9067.2 [Aspergillus nidulans FGSC A4] gi|40742710|gb|EAA61900.1| AN9067.2 [Aspergillus nidulans FGSC A4] gi|259485522|tpe|CBF82615.1| TPA: TINC (Eurofung) nidulans
  misc_feature (8)..(589): NCBI GI: 225680602 Blast Desc: NIMA-interacting protein TinC [Paracoccidioides brasiliensis Pb03]
MASRPALALCLLLCLLVLVAPASAFGAGEVPVGSEFKGYVWRHGDIGEVLAYLPVSFITNHRFTQLERKQIYFGNWLRDFSQVIDTTCLENVPEPILRAIVSVMAFMEFGFATDEFDVTRERLGCYTHVEHIDNPAGYQNDAKLVDERLRGPVDPRELEFDPKTGMKNYIANSGQGWDTSADFVRRQLSECIRLGRKRRDASAKKESFIHLGAALHTLEDFSAHSNFVELCLHELGENEVFPFVGDACRVEVPGGFRKHRKVAPLVTGTFGMLDIFHSLLGEADDMAILQSKGSLGDLEKQLGYGGVAFEHLFDVIKRALQVLSKVSKDDNPLLQQLETISVIFQKAKGAIPEVSLSSDSSSGDESSPKDSGRADGITNPNLLWQAIEPIFYLHDRLMKWMQESAQESAEFSEHESRSQLGEQTNQLVFKFLAVMIESAVKELRNAVKAAKEKVDEEAAKSNAAQIYQDGSSASDPSHSDISKDHFSNTLNQISGLVATITTNWATQQVVRCWDDPKINAERTIDEIMTILHHPAFPKKKTAIQEYMFKQVEKWWKDMSDEEKAGLRQQLTRESVQERGHENHELTLKDLVTTHKGAAEFPGSRPEVKAPPKKVSFPLTWALNEASKDISWILSTLHKGLRDPTGAAKDIIQTSGGVVYGSGRFAFNTVGWVANKITGLLWKTSNTEEQ

SEQ ID NO: 33064 - DNA, 5063 bp, Muscodor strobelii
  misc_feature: SGI EST ID NO. CUFF.78123.0
  misc_feature: Variant of the nucleotide sequence at SEQ ID NO 33062
ggaaactgggtaagaaaaaatcatcgaactttgaagtcgaattgagatactaaaacctatttaaaaccaggtttttccatatgatgatagtgcgtgaacaaaaccattatccccatcctccttgatggtacaactgactttgcacatagtgttcgataatggagagcttcgcgacaatccagttgtagcgagagaagtcatggactgtttgatgagtccgatgcaagagagatattcaaagtcacaaagaagtgcgacaaccccggcgagagcacctataatccaagttcatgatatggtttgggatagaatcagaaaggtatgcgagccatatcatggaaatttgtaataaggttggactaacattccacaagtcttctcctacaggagtacggcgacgatttgccgacgcaatgtcgaagtattgtgatggcgctttgaaccatgttgcatcttatgcgacaggggagacgatgagccctgaagagatgctgaataggaggcagctctcagcaggagtcactccgatatttgctctggtagagtatgctcattcgttgaatgtgccagatcatgtctttgcgcatccaatcattcaagaacttgagctcctatcaactgacatggtggcaatgtaagtcatataggagaaaattcccgaggctacagtctctaacaagtggcagatctaatgatatcttgtcatatatgaaggaagaggtaagaccacttggcgtctcatttcacgtcgctagataattctaatgaatcgtagaacgagctcgtaccgcataacatggtcgcagctgcgagggtcagcggccttggccctcaagaggcgtttgattacgtcgggcacatgcttatatcaagatatgagcgatggaacaaagctgtcgcttgtgtgccaagttggggtgaggacatcgatacccatgtggaaaggtacatacagggggttctgaatgtatcgaaggcaaatttgtattggagcttcaagtccgagagatatctcggccagaatgggcagaacatccggcaatctcgcgccgttgaggttcttcgttgcccaccgttcctgagcaggaatcgacatatgggcagattggtaactcggcaagaaagggcatttttgcttgttgattggcggcaacagatcaatctgctagtatcgctgatgatgtgcccttttgtgctggttgtatcgtttctccatggggagcgctttctccgaatgtcaaagggagggtctggatgagaagttcaagattttggaagcatcctgagcggcttgtcaattattattaccactcccgtcgtccaacctcggcccgttgccggctgcgagaacccactagtcatgggcactcttacaggctatcccactaaaacgtagctcccgtggcggcgtgacccgggcagtcccgaatgcacgcaacttgccaaacatcttcttgacggaattagaaacgaatgaaatcgaaacatgccagggctcgtcagcattattgcggctatgacgcagatcgtcgatgacaggcccacaaggcatcccgctcagctcccagtacatcatgacccgccacttctctgctgtagccgcacgtgtctatgacagatgcctcgggtgtgcaccacgggtacacacaggctacaacctcaatgcacacacctttgctcacatgagaagcttgtccctcgcccacagcgcatgctaagagacattatagaatatgcaagagtacacagtgatgaagttaatacgtatacattcaggcaataatagagctaaggtagctcgaggttccgttactcgcgtcacgcgtgaatgtgcgcaggcttgcagagtgggtcattcgcagttgtgttacaaaacttggtttgagccgcatcttctggattcactagtttgtgcgccttactcgtccaacaactatgatctcgtagcgcagaccggaaatcccttctgcaagtaatcttcattgcttaaccgcgcgccccgtcgcatcacggatcataccgccgcaatggcgtctcgacctgctttggcgttgtgccttctattatgtctccttgtccttgttgccccggcatcagcctttggggcgggcgaagtccctgttggcagcgaatttaagggatatgtctggcgtcatggagatataggtgaagtgctggcatacttacctgtcagtttcatcacaaaccaccggttcacacagcttgagcgcaagcagatctatttcggcaactggctacgcgatttctcccaggtcattgacactacatgtcttgagaatgtgccagagccgatcctgagagctatcgtatcagtaatggcatttatggaatttgggttcgccaccgatgagtttgatgtcactcgcgaacgcctaggctgttatacgcacgtcgagcatatcgacaatccagctggttatcagaatgacgcaaaactggtcgatgagcgcctgcgaggtcccgtggaccccagagagcttgagtttgaccccaagacaggcatgaagaattacatcgcgaattccggtcaaggatgggacacttcggcggattttgtccggaggcaactcagcgaatgcatcagattagggagaaaacggcgcgatgcgagcgctaagaaggagagctttattcatcttggagcagctttgcacaccctggaagatttctctgcccactccaacttcgtcgagctctgcttacatgagttgggagaaaatgaagttttcccttttgttggggacgcttgccgagttgaagtaccgggtggttttaggaagcacaggaaagttgcaccgctagtgaccggaacatttggcatgctggacattttccacagtcttttgggcgaggctgatgatatggctatactgcaatcaaagggttctctaggtgacctcgaaaaacaactcggatacggcggcgtagcatttgagcacttattcgatgtcatcaagcgcgcgttgcaagtcctgagtaaggtgtcaaaagacgacaatccgcttcttcagcaactcgagactatcagcgtcatattccaaaaggcgaaaggagccatacccgaagtttccctcagctccgattcaagcagcggtgacgagtccagtccgaaagactcggggcgagccgatggaattaccaatccgaacctcttatggcaagcaattgagccaattttctatctccatgatagactgatgaagtggatgcaagagagcgcacaagaatcggcagagttctccgagcatgagtcaagaagtcagcttggtgaacagacaaatcagcttgtgttcaaattcctggctgtaatgattgagtctgccgtgaaagagcttcgcaacgctgttaaagctgcaaaggaaaaagtggacgaggaagcagcgaagtcgaatgcagcacagatctatcaagacgggtcatctgcttcagatcccagtcactctgatatttccaaagaccacttctctaatacactcaatcaaatttcgggtctcgtggcaacaatcacgacaaattgggccacccaacaagttgttagatgctgggacgacccaaaaatcaatgctgaaaggacgatcgatgagataatgaccatattacaccatccagcctttccgaaaaagaaaacggccatacaagaatacatgttcaaacaggttgaaaagtggtggaaagacatgtcagatgaagagaaggccggactacgccaacagcttacacgagagagcgttcaagaaagaggtcatgaaaatcacgagttgactttgaaggacctcgttacgacacacaaaggagccgcagaattcccaggctcgcgacctgaagtgaaggcccctccaaagaaggtctcatttccattgacatgggccctaaacgaagcgtcaaaggacataagctggatactctcgacgctacacaagggccttcgagacccgactggagcagcgaaagatatcatacagacttcgggcggcgttgtttacggttcaggacggtttgccttcaataccgtgggttgggttgcaaacaagatcacaggattgctctggaaaacgagcaataccgaggagcaatagagtctctagacttttgagcgctagtagatatcactcttcgtgtcacatactttagagagatggctgagagtgctagttagacggttgtaacccccccactggcgtgggtttgttggctccgattgctaactgggagtatctcactgcacaaggataagaacggaagatagatcgctgcatatgagatagacgcattgcgaatcatagatgctatgtatgtaacggattaacagtacataggtatgcacgatcctggcggagccagtgtcatgtagcaagcattttcataccccatcactcggtgcttgacaaatactcatttatgccttgaatggataacagctcattgacatctcttccggcgagccattcttcgaaggtcggagttttgggcttgttcttgagctgatcaggttcaatggcattggggattcctcccatatatccaaattcgccgacgaaagcaggaccttcgagcacctcgaacggtacctttgtcatttcatgcacggcctccatcgtcatgccgataaacttagcggttttgcccgtgactttcgaccatgtctctgcaatctggtccatagtcaagtagctgtcgtacgccaacaacttcttgccgggcgcctcgtcctccacaagagcacgaacgaatggtcctggggagttttgcgcatcagtgatgggcatacgagtagcggcaggacagggcgcaatcattgcgtattctccagttgctgggttcggctttggcaagaggaacggattagtcgtgtatgccccaatgtagatgaatgatgatttcttggcaagctcgggctgttcgttctcaatatagtcgactattgccgacttcgtctcccagtgcgacgacctggagtatttgcctttggatgctctcttcataggccccagagcagaatatatgaatttttcaagagttggaactccggcggcagccgcagc

SEQ ID NO: 33065 - DNA, 1419 bp, Muscodor strobelii
  misc_feature: SGI cDNA ID NO. 571399
  misc_feature: Elevated expression when VOC is produced
  misc_feature: Encodes the peptide sequence at SEQ ID NO 33066
atgtataatgaaaaggtaattgaagaagaggcaattgggtcgacacagcgcgtagggccatacactttccaatggaccgagcgtcatctaccacgatccataacagagccctttcggcatgaatgtgatgtacttggagataaggctcttatccagctgcaagctatcgcaaaagcacggggtttctctgacgatcctcgcaagcgacctgattactaccagattctcaccgagaactatacgaagaacgaggatctccagaagttctgggctcatcttaatcacgtcccagattgggtcgactgggagcaattggaaagaggccagagattcttctatcggtacgcggctgccaacctcatgggctttgcccttcaaggcttcatcggagaaaacagctctgcagctggcgtcgtagaagtccttgttcgtacgggggggttctcgaccagagttctcctacataggctactagagactttttgctggctactccaagtcaccgagtgcttgtccgccatcaaaccaggtggaaccggacacatatcgacggctcgattacgtctcttacacgcctctgtacgacagcggatcatgaaattagcagggacaaggccggaatatttcaatgttgacgcttacggcgtgccgatcaacacccttgacagtattcactccatctcgacattctgctgcaaccatatgtggcttcagcttccacgaatggggatcattcccactcaacaagagaaagaagactatatcgccctctttcggtacatcgcatacctcctagcaacacctgatgagttcttttcgtccgttgagcagggaaaggccacaatggaaacgatgcttttgcatgaactcaaagtgacagacacgagccaagtagtgttgttcaacttcataaagtgtttgaccgatctacctccattcaatgtatcgaaagagttcatcgaggccggcggtcgtgtactaaatggggacgagttgtgtgatgaacttcaactaagtcgcccaggttggataccatacgcatgttttcaaggccattgctggctagtgcgcatgttggctgttgtgcagcgagccagccctgcgtttgaccgctgggtcatcaagcaatggacgcaactcctgcactccgccatcatacagagtgggctcaaaggtggtacgaagtttgatttcaaatatgtccccaaagacggtgttacggctggcaaagaggagaacgcaagacaaggagtgaagtatggtctgttatcacgtccggtagaacttgtttacttggctttcttcacgcttgtcttggcgactgctgctttgttggggttggtggctgcttatggtgtatggcacttcgtcacaccacaccaactccagtcaagcctcttgtcgtacatgaagaattga

SEQ ID NO: 33066 - protein, 472 aa, Muscodor strobelii
  misc_feature: SGI Peptide ID NO. 571399
  misc_feature (18)..(448): NCBI GI: 46126589 Blast Desc: FG07672.1 [Gibberella zeae PH-1]
  misc_feature (12)..(450): NCBI GI: 119497925 Blast Desc: NFIA_033890 [Neosartorya fischeri NRRL 181] gi|119413884|gb|EAW23823.1| conserved [Neosartorya fischeri NRRL 181]
  misc_feature (21)..(411): NCBI GI: 145235445 Blast Desc: An03g04900 [Aspergillus niger] gi|134058053|emb|CAK38282.1| protein product [Aspergillus niger]
  misc_feature (21)..(375): NCBI GI: 121710888 Blast Desc: conserved [Aspergillus clavatus NRRL 1] gi|119401210|gb|EAW11634.1| conserved [Aspergillus clavatus NRRL 1]
  misc_feature (21)..(452): NCBI GI: 115433378 Blast Desc: conserved [Aspergillus terreus NIH2624] gi|114189678|gb|EAU31378.1| conserved [Aspergillus terreus NIH2624]
  misc_feature (3)..(375): NCBI GI: 238495512 Blast Desc: conserved [Aspergillus flavus NRRL3357] gi|220695642|gb|EED51985.1| conserved [Aspergillus flavus NRRL3357]
  misc_feature (16)..(414): NCBI GI: 145602971 Blast Desc: MGG_04632 [Magnaporthe grisea 70-15] gi|145011311|gb|EDJ95967.1| MGG_04632 [Magnaporthe grisea 70-15]
  misc_feature (21)..(458): NCBI GI: 226284336 Blast Desc: conserved [Paracoccidioides brasiliensis Pb01]
  misc_feature (21)..(403): NCBI GI: 154310327 Blast Desc: BC1G_07083 [Botryotinia fuckeliana B05.10] gi|150851415|gb|EDN26608.1| BC1G_07083 [Botryotinia fuckeliana B05.10]
  misc_feature (13)..(450): NCBI GI: 189199214 Blast Desc: conserved [Pyrenophora tritici-repentis Pt-1C-BFP] gi|187983043|gb|EDU48531.1| conserved [Pyrenophora tritici-repentis Pt-1C-BFP]
  misc_feature: Useful for introducing or modulating the production of volatile compounds
MYNEKVIEEEAIGSTQRVGPYTFQWTERHLPRSITEPFRHECDVLGDKALIQLQAIAKARGFSDDPRKRPDYYQILTENYTKNEDLQKFWAHLNHVPDWVDWEQLERGQRFFYRYAAANLMGFALQGFIGENSSAAGVVEVLVRTGGFSTRVLLHRLLETFCWLLQVTECLSAIKPGGTGHISTARLRLLHASVRQRIMKLAGTRPEYFNVDAYGVPINTLDSIHSISTFCCNHMWLQLPRMGIIPTQQEKEDYIALFRYIAYLLATPDEFFSSVEQGKATMETMLLHELKVTDTSQVVLFNFIKCLTDLPPFNVSKEFIEAGGRVLNGDELCDELQLSRPGWIPYACFQGHCWLVRMLAVVQRASPAFDRWVIKQWTQLLHSAIIQSGLKGGTKFDFKYVPKDGVTAGKEENARQGVKYGLLSRPVELVYLAFFTLVLATAALLGLVAAYGVWHFVTPHQLQSSLLSYMKN

SEQ ID NO: 33067 - DNA, 2089 bp, Muscodor strobelii
  misc_feature: SGI EST ID NO. CUFF.78131.0
  misc_feature: Variant of the nucleotide sequence at SEQ ID NO 33065
ctgccgggctgcatcggactatcaacacaaacattgaggatcgacctaattcatcatttgcaatgtccttctaagtcatcactctttcgatcactgacctaagaatcagagtgaattggcatcagttccttagctgagactgagaaagctctgacagccgcaattttctctcaaaatttaccccaatctgtgttcacaccctgaaattgttcttgaatacccaattatcaaacgttctaccatgtataatgaaaagtggaccgagcgtcatctaccacgatccataacagagccctttcggcatgaatgtgatgtacttggagataaggctcttatccagctgcaagctatcgcaaaagcacggggtttctctgacgatcctcgcaagcgacctgattactaccagattctcaccgagaactatacgaagaacgaggatctccagaagttctgggctcatcttaatcacgtcccagattgggtcgactgggagcaattggaaagaggccagagattcttctatcggtacgcggctgccaacctcatgggctttgcccttcaaggcttcatcggagaaaacagctctgcagctggcgtcgtagaagtccttgttcgtacgggggggttctcgaccagagttctcctacataggctactagagactttttgctggctactccaagtcaccgagtgcttgtccgccatcaaaccaggtggaaccggacacatatcgacggctcgattacgtctcttacacgcctctgtacgacagcggatcatgaaattagcagggacaaggccggaatatttcaatgttgacgcttacggcgtgccgatcaacacccttgacagtattcactccatctcgacattctgctgcaaccatatgtggcttcagcttccacgaatggggatcattcccactcaacaagagaaagaagactatatcgccctctttcggtacatcgcatacctcctagcaacacctgatgagttcttttcgtccgttgagcagggaaaggccacaatggaaacgatgcttttgcatgaactcaaagtgacagacacgagccaagtagtgttgttcaacttcataaagtgtttgaccgatctacctccattcaatgtatcgaaagagttcatcgaggccggcggtcgtgtactaaatggggacgagttgtgtgatgaacttcaactaagtcgcccaggttggataccatacgcatgttttcaaggccattgctggctagtgcgcatgttggctgttgtgcagcgagccagccctgcgtttgaccgctgggtcatcaagcaatggacgcaactcctgcactccgccatcatacagagtgggctcaaaggtggtacgaagtttgatttcaaatatgtccccaaagacggtgttacggctggcaaagaggagaacgcaagacaaggagtgaagtatggtctgttatcacgtccggtagaacttgtttacttggctttcttcacgcttgtcttggcgactgctgctttgttggggttggtggctgcttatggtgtatggcacttcgtcacaccacaccaactccagtcaagcctcttgtcgtacatgaagaattgatcttactctaccttttacgacctgcttggccgggccagcgttgacatcgggttggacttagaacatgtaccgcattgcagactgtctctgaatgctttatgaagatatctggcagtgatcgtagtctctagttcatatggaagcaagccatgagcgcccacgaattcctgagggatcgaagactgataatgaagctggagatgacgaccagagaaacgtcgacgaagaacacggcgtggccgatagcattaaggccatcaaatgtaaatagtgcctagctctgtaataagcttactctgctgtcatatcaatttgttttaccagcatctcgatatcaagcccgctagaggcgtcgtgtagtaaggagatcgatatatttcacctgcaacgatcctatcaacatcgtcataggacccaagcccaagactaccacctcacccgctgcgtaataggcttacgcttgatctcaccgttatgccacctcgg

SEQ ID NO: 33068 - DNA, 2523 bp, Muscodor strobelii
  misc_feature: SGI cDNA ID NO. 571400
  misc_feature: Encodes the peptide sequence at SEQ ID NO 33069
atggcgaccacgtcaacgcgctgcaaattctttcagagaggaaattgcagaaatggtgatagctgtcgtttcagccatgcgccgcctctgtctcccgttggcgctgcacagccagatagccggtcccgcgtgttatgcaaattccacagtctagggaagtgcaacaaaggcaaggaatgcccataccgacatgatgaacaatcaactccatcttctgatgcacaggcgtatgctgtcgccaacaaagatactttcgttagagtcttccgtggtgctctggtccattacggcgatggcgcttgcgtaacgagtcttcggcttgcgtccgagtactcttcagttcgcctggatggtctgcctagagacacaagtgcggttgatgtacttcgtctcctggagggacttgatcacgacgtcgaaattgatggtctgcgcgtggtggcttctctgcagtctaacacctccagcgcttatgtgagtgatcctttgtttggagaacagcctcgatcgcggctagacctaaacttcgcccaaactctgcatgagagtttgattttccatggcatacagcaggatttcaaagctgtaccggtgcccccaaagcttccagcatgggcgtccactcgccgggtccgctgcaacaaggtgaagctaaaatggagcgcgccccgaacctcttgctatctgcttttcaccaaaatggcaattgcagtgagggtggcaggaaagttcacctccggcacatacaaaattggttccaggcgcgttaaaagtgaattgtgtcacgatcgagacttgcctgaagtgatactatcggaactaccgcttaacacctccaaagaactcgtgcttgccaatattaccgccgagtacgacaaaccgttcgctgcagacatgaacgagaagcccatctgggatgaggaacgcgtggaaaatgcaatcagagatgcgcttgctggttccggctctctgaaattcatgtcagagccaaccgaacatgacggcggcttgtattggacagccttcgcttcctttgaggatgactttgacgcccgagacgtcgcgttgttcatgcataatgaataccgcaatatttgtctcgaattttctctccaatacaaaatactttacagcactacattcaaggtgtcgactgaagtctatcgtcacgttcagaggcacattggggctgccttagacgaactggaagcaccacagctacatgtttcacaacgaacgacttacgcatacttgagcctcgacagcaccaactcaagcgaaattgcagagtgtgctgacgttattgagaccatagtggctggcgatatggtccttgatcagaacggcaaaccgttttgggttcccgagcttggagacagtggcacagcaccgaaaacattgagggaaattcaaaagactcacgacatactactactacccaacagaacaaagcgtgagttacgcttcttcggtgaggcatcaaaactagctgcggtgacagcagaagtaattcgatcattcaccgaacaacgaagcaaaactcacacagtcgacatcgatgagaatggattcgcttggctttgcaggactggtcttgacctcttagagaacacggtcggcgacaagatcctatcactcagcatagcatcaaagtccaaaaagctcgtcgttagcggcaccgatgaacagtactgtgaaatcttggctctcctcgaggccaatgaaattcccttcatcacaatgaaagcaaaaccgacagatgactgtagcgtctgtttcacggagccggatagtgatcctgttgttttacgatgcggccatacctactgtaaggagtgctttgaaaacctgtgcaagaacgcaagcacaacccgtgacttgtgtgtcacatgtaccggtgccgaagacaggtgcaagcttgcgattggactcgaggagatacaagttcatgtcgaaccgtcagtgctggaagatcttctagagtcatccttcagtacgtatgtcgctcgccgtccagaccaattccattattgcccgactccagaatgcggatatatgtacaggccagcgagtgaaggcgcgcatgatctctctcatatgtgtcccaaatgcttgaaacgaatctgtcggtcatgccacgccaatcacgatggccagacttgccgtgcctcgagggcgaatcaggctttcgatgcttacaaagaggaacacaaggcaaacgttaaggattgccccaaatgtcagactacggtcgagaagattgatggctgcaatcacctgcaatgtggcggatgtaagatacatttctgctgggtatgcctggagaccttcgacgagcctggagaatgctaccaacacatgagagctactcatggtgggattgggcttgaagacgtggaagaggaagaggaagaggaagacggggctgaaagcgacgatgacggtgattgggaagatgatattgcggcccaaataggatatccggatgagcctgacggaggttttgtactacgcccatattga

SEQ ID NO: 33069 - protein, 840 aa, Muscodor strobelii
  misc_feature: SGI Peptide ID NO. 571400
  misc_feature (589)..(631): Pfam Id: PF00097 Pfam Desc: Zinc finger, C3HC4 type (RING finger)
  misc_feature (3)..(28): Pfam Id: PF00642 Pfam Desc: Zinc finger C-x8-C-x5-C-x3-H type (and similar)
  misc_feature (7)..(28): Pfam Id: PF00642 Pfam Desc: Zinc finger C-x8-C-x5-C-x3-H type (and similar)
  misc_feature (8)..(797): NCBI GI: 171694724 Blast Desc: protein product [Podospora anserina] gi|170947604|emb|CAP59765.1| protein product [Podospora anserina]
  misc_feature (1)..(772): NCBI GI: 154314247 Blast Desc: BC1G_05217 [Botryotinia fuckeliana B05.10] gi|150848862|gb|EDN24055.1| BC1G_05217 [Botryotinia fuckeliana B05.10]
  misc_feature (157)..(799): NCBI GI: 242812087 Blast Desc: ariadne RING finger, [Talaromyces stipitatus ATCC 10500] gi|218714225|gb|EED13648.1| ariadne RING finger, [Talaromyces stipitatus ATCC 10500]
  misc_feature (8)..(794): NCBI GI: 46126751 Blast Desc: FG07753.1 [Gibberella zeae PH-1]
  misc_feature (43)..(793): NCBI GI: 256725294 Blast Desc: NECHADRAFT_21495 [Nectria haematococca mpVI 77-13-4]
  misc_feature (2)..(721): NCBI GI: 154323822 Blast Desc: BC1G_00310 [Botryotinia fuckeliana B05.10] gi|150842539|gb|EDN17732.1| BC1G_00310 [Botryotinia fuckeliana B05.10]
  misc_feature (588)..(793): NCBI GI: 256731206 Blast Desc: NECHADRAFT_96471 [Nectria haematococca mpVI 77-13-4]
  misc_feature (8)..(794): NCBI GI: 169867747 Blast Desc: CC1G_11608 [Coprinopsis cinerea okayama7#130] gi|116498456|gb|EAU81351.1| CC1G_11608 [Coprinopsis cinerea okayama7#130]
  misc_feature (93)..(794): NCBI GI: 169848719 Blast Desc: CC1G_03955 [Coprinopsis cinerea okayama7#130] gi|116507791|gb|EAU90686.1| CC1G_03955 [Coprinopsis cinerea okayama7#130]
  misc_feature (84)..(794): NCBI GI: 169848745 Blast Desc: CC1G_03968 [Coprinopsis cinerea okayama7#130] gi|116507804|gb|EAU90699.1| CC1G_03968 [Coprinopsis cinerea okayama7#130]
MATTSTRCKFFQRGNCRNGDSCRFSHAPPLSPVGAAQPDSRSRVLCKFHSLGKCNKGKECPYRHDEQSTPSSDAQAYAVANKDTFVRVFRGALVHYGDGACVTSLRLASEYSSVRLDGLPRDTSAVDVLRLLEGLDHDVEIDGLRVVASLQSNTSSAYVSDPLFGEQPRSRLDLNFAQTLHESLIFHGIQQDFKAVPVPPKLPAWASTRRVRCNKVKLKWSAPRTSCYLLFTKMAIAVRVAGKFTSGTYKIGSRRVKSELCHDRDLPEVILSELPLNTSKELVLANITAEYDKPFAADMNEKPIWDEERVENAIRDALAGSGSLKFMSEPTEHDGGLYWTAFASFEDDFDARDVALFMHNEYRNICLEFSLQYKILYSTTFKVSTEVYRHVQRHIGAALDELEAPQLHVSQRTTYAYLSLDSTNSSEIAECADVIETIVAGDMVLDQNGKPFWVPELGDSGTAPKTLREIQKTHDILLLPNRTKRELRFFGEASKLAAVTAEVIRSFTEQRSKTHTVDIDENGFAWLCRTGLDLLENTVGDKILSLSIASKSKKLVVSGTDEQYCEILALLEANEIPFITMKAKPTDDCSVCFTEPDSDPVVLRCGHTYCKECFENLCKNASTTRDLCVTCTGAEDRCKLAIGLEEIQVHVEPSVLEDLLESSFSTYVARRPDQFHYCPTPECGYMYRPASEGAHDLSHMCPKCLKRICRSCHANHDGQTCRASRANQAFDAYKEEHKANVKDCPKCQTTVEKIDGCNHLQCGGCKIHFCWVCLETFDEPGECYQHMRATHGGIGLEDVEEEEEEEDGAESDDDGDWEDDIAAQIGYPDEPDGGFVLRPY

SEQ ID NO: 33070 - DNA, 204 bp, Muscodor strobelii
  misc_feature: SGI EST ID NO. CUFF.78142.0
  misc_feature: Variant of the nucleotide sequence at SEQ ID NO 33068
cagcaccccagacctaaacttcgcccaaactctgcatgagagtttgattttccatggcatacagcaggatttcaaagctgtaccggtgcccccaaagcttccagcatgggcgtccactcgccgggtccgctgcaacaaggtgaagctaaaatggagcgcgccccgaacctcttgctatctgcttttcaccaaaatggcaattgc

SEQ ID NO: 33071 - DNA, 954 bp, Muscodor strobelii
  misc_feature: SGI cDNA ID NO. 571401
  misc_feature: Encodes the peptide sequence at SEQ ID NO 33072
atgcttgatttccacatgcgctacgtccagccattcatctgctggtttgctcgacggaccagagcggagtttgattcccaagtacgacgggaacatcgagacttcaaattatcagacacggaacgaacgaggttcactagagcaacctatcgattccagctcctgtgtcaaattgctagtccccgcaccggctttggtaggagatcccgggaggaagttgtgatagacttcgctgcgtcgtttcagccgagagacattgaagaaatgctttctgcttatgattttgtctatgatggatatagtgtgatggcagagcattacgaatacgggcatcgtcagcgcggactcgatcctagggaaactgtgcgcggaattttgaataatggtgtggtagataacggctacctagagggaagcacgcttctcgggttggagttctttcaaggagcaatatatgcggtcgtcaatagactcatgacgcctgtggacaatgctttcctcatcgttccacagatggattattcgcacattcctatcctcggatggaatcaatatgaccaggatggcgaatttatagccgactcggacggagtcctcgatataacagcaattgtagagcgacgagacgcagagatgtccgagaatcaggaacgaatgaccgataattcgccattagcgattgacgaggacgaggaagttcctccgttgggatggacggtgatgtggggcgacagatatgatgaccgatatgaattaccaactgtgtcggagtggcggagttgcggctatgttctttgggacgcagagagtttggaagatggtggagagaagactgcgcaagagatgctggtttctattcgggatgaatgggctggagactgggaggagaatcctatgagggactccgtttgggaacagagcatgtacggtgttgcggtcacgaggcaagaatag

SEQ ID NO: 33072 - protein, 317 aa, Muscodor strobelii
  misc_feature: SGI Peptide ID NO. 571401
  misc_feature (4)..(303): NCBI GI: 238504638 Blast Desc: conserved [Aspergillus flavus NRRL3357] gi|220691021|gb|EED47370.1| conserved [Aspergillus flavus NRRL3357]
  misc_feature (4)..(303): NCBI GI: 169764175 Blast Desc: [Aspergillus oryzae RIB40] gi|83764413|dbj|BAE54557.1| protein product [Aspergillus oryzae]
  misc_feature (1)..(293): NCBI GI: 256725269 Blast Desc: NECHADRAFT_82982 [Nectria haematococca mpVI 77-13-4]
  misc_feature (1)..(267): NCBI GI: 171693521 Blast Desc: protein product [Podospora anserina] gi|170946709|emb|CAP73512.1| protein product [Podospora anserina]
  misc_feature (4)..(107): NCBI GI: 256730223 Blast Desc: NECHADRAFT_82499 [Nectria haematococca mpVI 77-13-4]
  misc_feature (1)..(277): NCBI GI: 145228595 Blast Desc: An01g01670 [Aspergillus niger] gi|134054697|emb|CAK43538.1| protein product [Aspergillus niger]
  misc_feature (1)..(265): NCBI GI: 115449853 Blast Desc: [Aspergillus terreus NIH2624] gi|114187662|gb|EAU29362.1| [Aspergillus terreus NIH2624]
  misc_feature (1)..(100): NCBI GI: 115397721 Blast Desc: [Aspergillus terreus NIH2624] gi|114192643|gb|EAU34343.1| [Aspergillus terreus NIH2624]
MLDFHMRYVQPFICWFARRTRAEFDSQVRREHRDFKLSDTERTRFTRATYRFQLLCQIASPRTGFGRRSREEVVIDFAASFQPRDIEEMLSAYDFVYDGYSVMAEHYEYGHRQRGLDPRETVRGILNNGVVDNGYLEGSTLLGLEFFQGAIYAVVNRLMTPVDNAFLIVPQMDYSHIPILGWNQYDQDGEFIADSDGVLDITAIVERRDAEMSENQERMTDNSPLAIDEDEEVPPLGWTVMWGDRYDDRYELPTVSEWRSCGYVLWDAESLEDGGEKTAQEMLVSIRDEWAGDWEENPMRDSVWEQSMYGVAVTRQE

SEQ ID NO: 33073 - DNA, 1704 bp, Muscodor strobelii
  misc_feature: SGI EST ID NO. CUFF.78154.0
  misc_feature: Variant of the nucleotide sequence at SEQ ID NO 33071
acacagtgtcttatttcaaagttttattaatacattaggcccaaccttcgtcgatgcctatacacttcacctcgcaagaaaacacaaggggaattcgtcggtagatatcacacaatttctaacaaattacaaaacgaatactgcacggagacgagtaaaactcatccaggatcccaccaatgaagacatcatagacatgcttgatttccacatgcgctacgtccagccattcatctgctggtttgctcgacggaccagagcggagtttgattcccaagtacgacgggaacatcgagacttcaaattatcagacacggaacgaacgaggttcactagagcaacctatcgattccagctcctgtgtcaaattgctagtccccgcaccggctttggtaggagatcccgggaggaagttgtgatagacttcgctgcgtcgtttcagccgagagacattgaagaaatgctttctgcttatgattttgtctatgatggatatagtgtgatggcagagcattacgaatacgggcatcgtcagcgcggactcgatcctagggaaactgtgcgcggaattttgaataatggtgtggtagataacggctacctagagggaagcacgcttctcgggttggagttctttcaaggagcaatatatgcggtcgtcaatagactcatgacgcctgtggacaatgctttcctcatcgttccacagatggattattcgcacattcctatcctcggatggaatcaatatgaccaggatggcgaatttatagccgactcggacggagtcctcgatataacagcaattgtagagcgacgagacgcagagatgtccgagaatcaggaacgaatgaccgataattcgccattagcgattgacgaggacgaggaagttcctccgttgggatggacggtgatgtggggcgacagatatgatgaccgatatgaattaccaactgtgtcggagtggcggagttgcggctatgttctttgggacgcagagagtttggaagatggtggagagaagactgcgcaagagatgctggtttctattcgggatgaatgggctggagactgggaggagaatcctatgagggactccgtttgggaacagagcatgtacggtgttgcggtcacgaggcaagaatagttgttctggcagtaaggtgtaggattttatatggttcgggttctaatctttcgtccgtaggaccacgggaatggcatgaagtgatagatctgttgtaggaagccgtcttcggatttgctgattgggagggaaggaggactcacttctggaaatattcttgtttcgtgatgtgtagatcatctggcggggagcacaataaccattgacttggataggaggtcaaattttgttttcttcttggggacctcacctctacctaggaccaagtgcgatggatgggacagtgagtgagtcattgtcctgcgatattgtattcacttacagctttttgtctgggaaatatgttagccatatactgagtaaagacttcatcataatagagtgattcgagctgattgaacctagaagtccagaaattctgcaggtctgattgaacctcatgtttttgtcatgtaagtcatgtactatgcggccccagagacgctatagtatccggaaccccactatacgccgctactcgtgcctgcctaatagtatttagacctcgcgcctcc

SEQ ID NO: 33074 - DNA, 726 bp, Muscodor strobelii
  misc_feature: SGI cDNA ID NO. 571402
  misc_feature: Encodes the peptide sequence at SEQ ID NO 33075
atggactaccagaaccgcgccggctccaaattcggcggcggcggtgtcgcctcacacagcgctacgaatgcagaccgacgtgagcgactgcgcaagctcgcgctcgagacgatcgacctcgacaaagacccctacttcttcaagaaccacgtcggcagcttcgagtgccgcctctgcctcaccgtccaccagaacgacggctcctacctcgcgcacacccagggcaagaaacatcagacgaacctagccaggcgcgccgcccgcgagcagaaagaaggcaagggacagatcgatccgaataccgggctccccgtcggtgtcgtcggggccggcttcggcgcgctggtcaagcggaatgtggtcaagattggacggccgggatacaggattacgaaggtccgggatcaggtcacgaggcagcagggcttgttatttcagttgcagtacccggagatcggccaggggatcacgcccaagattaggtttatgagtgcgtttgagcagcatgtcgatgatccgccggacaaggcgtatcagtatatgcttgttgctgctgagccgtatgatacgtgtgggtttaagctgcaggctagggagatcgataagacgggtgatcggttctggacttggtgggatgctgacttgaaggagttttgggtccaggttatgtttcttactgagagggaggagagatatgttggtgtgcctgggttacctgggagataa

SEQ ID NO: 33075 - protein, 241 aa, Muscodor strobelii
  misc_feature: SGI Peptide ID NO. 571402
  misc_feature (1)..(238): NCBI GI: 156062160 Blast Desc: SS1G_01195 [Sclerotinia sclerotiorum 1980] gi|154696532|gb|EDN96270.1| SS1G_01195 [Sclerotinia sclerotiorum 1980]
  misc_feature (1)..(238): NCBI GI: 154318157 Blast Desc: conserved [Botryotinia fuckeliana B05.10] gi|150842769|gb|EDN17962.1| conserved [Botryotinia fuckeliana B05.10]
  misc_feature (1)..(241): NCBI GI: 85068275 Blast Desc: NCU07299 [Neurospora crassa OR74A] gi|28923750|gb|EAA32917.1| NCU07299 [Neurospora crassa OR74A]
  misc_feature (1)..(241): NCBI GI: 170940173 Blast Desc: protein product [Podospora anserina]
  misc_feature (1)..(238): NCBI GI: 119194461 Blast Desc: conserved [Coccidioides immitis RS]
  misc_feature (1)..(238): NCBI GI: 240105306 Blast Desc: Splicing factor 3A subunit 2 , [Coccidioides posadasii C735 delta SOWgp]
  misc_feature (1)..(238): NCBI GI: 225559794 Blast Desc: splicing factor 3a [Ajellomyces capsulatus G186AR] gi|240276332|gb|EER39844.1| splicing factor 3a [Ajellomyces capsulatus H143]
  misc_feature (1)..(238): NCBI GI: 238843823 Blast Desc: splicing factor 3a [Microsporum canis CBS 113480]
  misc_feature (1)..(241): NCBI GI: 261357825 Blast Desc: splicing factor 3A subunit 2 [Verticillium albo-atrum VaMs.102]
  misc_feature (1)..(238): NCBI GI: 261191813 Blast Desc: splicing factor 3a subunit 2 [Ajellomyces dermatitidis SLH14081] gi|239589630|gb|EEQ72273.1| splicing factor 3a subunit 2 [Ajellomyces dermatitidis SLH14081] gi|239608628|gb|EEQ85615.1|
MDYQNRAGSKFGGGGVASHSATNADRRERLRKLALETIDLDKDPYFFKNHVGSFECRLCLTVHQNDGSYLAHTQGKKHQTNLARRAAREQKEGKGQIDPNTGLPVGVVGAGFGALVKRNVVKIGRPGYRITKVRDQVTRQQGLLFQLQYPEIGQGITPKIRFMSAFEQHVDDPPDKAYQYMLVAAEPYDTCGFKLQAREIDKTGDRFWTWWDADLKEFWVQVMFLTEREERYVGVPGLPGR

SEQ ID NO: 33076 - DNA, 1189 bp, Muscodor strobelii
  misc_feature: SGI EST ID NO. CUFF.78159.0
  misc_feature: Variant of the nucleotide sequence at SEQ ID NO 33074
cgcgaacaagaatttcccgagtaccacattctatccccgacctcatattgccaccaccgcgcagcgaccagcgaaagtctcagcatctctcaaaactgatactgcatctaccaaaatcatagctgcgagtctgcgcgtctaaacccagccatcatccctacaaagagtcacactagactgcgcactgcgagaaggaaataaagggaggaaccaccatcacgatggactaccagaaccgcgccggctccaaattcggcggcggcggtgtcgcctcacacagcgctacgaatgcagaccgacgtgagcgactgcgcaagctcgcgctcgagacgatcgacctcgacaaagacccctacttcttcaagaaccacgtcggcagcttcgagtgccgcctctgcctcaccgtccaccagaacgacggctcctacctcgcgcacacccagggcaagaaacatcagacgaacctagccaggcgcgccgcccgcgagcagaaagaaggcaagggacagatcgatccgaataccgggctccccgtcggtgtcgtcggggccggcttcggcgcgctggtcaagcggaatgtggtcaagattggacggccgggatacaggattacgaaggtccgggatcaggtcacgaggcagcagggcttgttatttcagttgcagtacccggagatcggccaggggatcacgcccaagattaggtttatgagtgcgtttgagcagcatgtcgatgatccgccggacaaggcgtatcagtatatgcttgttgctgctgagccgtatgatacgtgtgggtttaagctgcaggctagggagatcgataagacgggtgatcggttctggacttggtgggatgctgacttgaaggagttttgggtccaggttatgtttcttactgagagggaggagagatatgttggtgtgcctgggttacctgggagataaggtggtgatggtgatggggtttggtacctagtgtctgcggttcgatgggtgctgcagcagtctgatatcaagaacggacaagattgctctgcaccaacgaggccactagctccggtaaacacaaggatgcccggccaaagaaatcatgtatcacaattgtaatgggggccaggctgtattctcacgaatgaacgaaaactctacattgtagcaagtcacaaaaatctctcattactgttcat

SEQ ID NO: 33077 - DNA, 1893 bp, Muscodor strobelii
  misc_feature: SGI cDNA ID NO. 571403
  misc_feature: Encodes the peptide sequence at SEQ ID NO 33078
atggatcccaatcgcttgcacctgaacttcggcaacaacaacgagcggctcgctccctccgaccgaacctatcccaccacgccctcgaccttcccccagcccgttttcccgaacccttcgcaccagcaacaaaacccggggcttcagccgcaggctcaacagtatgctggtggctacgcccaatctaccaactaccctccccagggccaataccagccccaatatgcccagtcgcaggtcgtagactacgccagcccgggccagggtctatatcagcctcgctccaatacccctggcaatgatcccaatgtcggcctcgcccaccagttctcccatcaaaacctcggtggtgccgccagggccaatgcctacgccggccgtggtgtccctcagggccagccgcgtcctcgaactgcaggctctgccggacaacagcccagctacggctatgcaaatgcgccgcccatgccttcgcgacagtctgaatttctggccgcgcctgagcgcaatcccgagagatatgggactaatgctaataacaaccagaagaaatgttcgcagttggcctccgacttcttcaaggacagcgtgaagcgagctcgcgagcgcaatctcagacagagcgagatggagcagaagcttcaagaccccaaccagtctgcgtccaggagagagcagctgtggcagaacaacggcaagaaggaaggaagatacttgcgatttctccgaaccaaggacaagcccgacaactaccagacggtcaagatcatcggcaagggtgccttcggtgaggtcaagctagtgcagaggaagacagatggtgtcgtatacgccatgaagtctctcatcaaaaccgagatgttcaaaaaggaccaattggcccacgtccgcgccgaacgagatatcctggccgagtctgacagcccctgggtcgtcaagctctacaccactttccaggatgccaacttcttgtacatgctcatggagttcttgccaggcggcgatctgatgaccatgttgatcaagtatgaaatcttttccgaagatatcacgcgcttctacattgccgaaatagtgctggccatcgaagcagttcacaagctcggcttcatccaccgagacattaagcccgacaacatcattctggaccgcggaggacacgtcaagctgactgattttggtctgtccactggcttccataagctccacgacaacaactactaccagcaactgctccaaggacggtcaaaccggccacgagaccggaactctgttgcgattgatcagattaacctgacggtcagcaaccgcgcccagatcaatgactggagacgctctcggcgactgatggcgtactcaacggtgggtacacccgactatattgcaccagaaatcttcacgggccatgggtacacatttgactgcgattggtggtcgctgggaacgatcatgttcgagtgtctcgtaggctggcctccgttctgcgctgaagacagccatgacacgtaccgcaagattgtcaattggagacagacgctgtatttccccgacgacatcaccttgggcaccgaggcagagcatctcatccgaagcctcatctgcaatacggagcagcggctgggaagaggcggtgctcacgagatcaagagccacagcttcttcaggggcgtagagttcgacagtcttcgccggatccgagcgccattcgagccacgcttgacatcggccattgacacgacctatttcccgacggacgagattgaccaaacagataacgcgacgcatctgaaggcgcagatgatggcatcgggcaagccgctcgaggaggcaccggagatgagcctgccattcatcggatacacgttcaagcggttcgacaataacttccgctaa

SEQ ID NO: 33078 - protein, 630 aa, Muscodor strobelii
  misc_feature: SGI Peptide ID NO. 571403
  misc_feature (572)..(626): Pfam Id: PF00433 Pfam Desc: Protein kinase C terminal domain
  misc_feature (251)..(554): Pfam Id: PF00069 Pfam Desc: Protein kinase domain
  misc_feature (251)..(396): Pfam Id: PF00069 Pfam Desc: Protein kinase domain
  misc_feature (455)..(554): Pfam Id: PF00069 Pfam Desc: Protein kinase domain
  misc_feature (1)..(626): NCBI GI: 119500172 Blast Desc: serine/threonine protein kinase, [Neosartorya fischeri NRRL 181] gi|119415008|gb|EAW24946.1| serine/threonine protein kinase, [Neosartorya fischeri NRRL 181]
  misc_feature (5)..(626): NCBI GI: 238843822 Blast Desc: serine/threonine-protein kinase cot-1 [Microsporum canis CBS 113480]
  misc_feature (5)..(626): NCBI GI: 189189344 Blast Desc: serine/threonine-protein kinase cot-1 [Pyrenophora tritici-repentis Pt-1C-BFP] gi|187972617|gb|EDU40116.1| serine/threonine-protein kinase cot-1 [Pyrenophora Pt-1C-BFP]
  misc_feature (1)..(626): NCBI GI: 242768752 Blast Desc: serine/threonine protein kinase, [Talaromyces stipitatus ATCC 10500] gi|218724828|gb|EED24245.1| serine/threonine protein kinase, [Talaromyces stipitatus ATCC
  misc_feature (5)..(626): NCBI GI: 154287318 Blast Desc: serine/threonine-protein kinase cot-1 [Ajellomyces capsulatus NAm1] gi|150408095|gb|EDN03636.1| serine/threonine-protein kinase cot-1 [Ajellomyces capsulatus
  misc_feature (1)..(626): NCBI GI: 212542379 Blast Desc: serine/threonine protein kinase, [Penicillium marneffei ATCC 18224] gi|210066251|gb|EEA20344.1| serine/threonine protein kinase, [Penicillium marneffei ATCC
  misc_feature (10)..(626): NCBI GI: 119194459 Blast Desc: CIMG_01604 [Coccidioides immitis RS]
  misc_feature (10)..(626): NCBI GI: 240105307 Blast Desc: Serine/threonine-protein kinase, [Coccidioides posadasii C735 delta SOWgp]
  misc_feature (4)..(626): NCBI GI: 169608307 Blast Desc: SNOG_07224 [Phaeosphaeria nodorum SN15] gi|160701617|gb|EAT85875.2| SNOG_07224 [Phaeosphaeria nodorum SN15]
  misc_feature (20)..(626): NCBI GI: 255947538 Blast Desc: Pc22g04990 [Penicillium chrysogenum Wisconsin 54-1255] gi|211591553|emb|CAP97787.1| Pc22g04990 [Penicillium chrysogenum Wisconsin 54-1255]
  misc_feature (4)..(630): SWISSPROT Homolog: EC 2.7.11.1 Non-specific serine/threonine protein kinase
MDPNRLHLNFGNNNERLAPSDRTYPTTPSTFPQPVFPNPSHQQQNPGLQPQAQQYAGGYAQSTNYPPQGQYQPQYAQSQVVDYASPGQGLYQPRSNTPGNDPNVGLAHQFSHQNLGGAARANAYAGRGVPQGQPRPRTAGSAGQQPSYGYANAPPMPSRQSEFLAAPERNPERYGTNANNNQKKCSQLASDFFKDSVKRARERNLRQSEMEQKLQDPNQSASRREQLWQNNGKKEGRYLRFLRTKDKPDNYQTVKIIGKGAFGEVKLVQRKTDGVVYAMKSLIKTEMFKKDQLAHVRAERDILAESDSPWVVKLYTTFQDANFLYMLMEFLPGGDLMTMLIKYEIFSEDITRFYIAEIVLAIEAVHKLGFIHRDIKPDNIILDRGGHVKLTDFGLSTGFHKLHDNNYYQQLLQGRSNRPRDRNSVAIDQINLTVSNRAQINDWRRSRRLMAYSTVGTPDYIAPEIFTGHGYTFDCDWWSLGTIMFECLVGWPPFCAEDSHDTYRKIVNWRQTLYFPDDITLGTEAEHLIRSLICNTEQRLGRGGAHEIKSHSFFRGVEFDSLRRIRAPFEPRLTSAIDTTYFPTDEIDQTDNATHLKAQMMASGKPLEEAPEMSLPFIGYTFKRFDNNFR

SEQ ID NO: 33079 - DNA, 3065 bp, Muscodor strobelii
  misc_feature: SGI EST ID NO. CUFF.78273.1
  misc_feature: Variant of the nucleotide sequence at SEQ ID NO 33077
cgacggtgctgttgctcaacgtcttgcgagagcaaccccttttcctcgtttgacagagtgtcgtctgaacaatacagactacgggaactcggcttgcctcgtgtgttgttgcaagacggcgatgcatcagcaaagatcagactgaaccctctgttttctcgtcccgctgtcctgggccgccgccctagtgtcaacgtctgaccgtttcaacgtcccctagcttgcacctacctcttctcgcctgatacccaactgcctccttccgtttcacgcccgcattcgacgtcgtcggacaagtaaattgttcaccgtcttgagggagtcgcaatccgaacccgcaatcctgtaagaggggcactttccttaagggcgaccctttggacaagacaacaaacacccacccctcccaagctcatctgtggaatctccaatcgcctgtctggcgaagagaagggataccaacttcgcgcttcaatcctctgttcaaacgacgactttagactacctgggtagttgcatatataccctagctttctaaatttcccctgaagctcaccgactctgccccgccgccgaagctacggtgaatctcaattgcccaaacttgcacgtttcaacgctcgcacaaaaccagacggcgagaccagacgctttatacaaaagagcaggcgaagacagtatccaagatggatcccaatcgcttgcacctgaacttcggcaacaacaacgagcggctcgctccctccgaccgaacctatcccaccacgccctcgaccttcccccagcccgttttcccgaacccttcgcaccagcaacaaaacccggggcttcagccgcaggctcaacagtatgctggtggctacgcccaatctaccaactaccctccccagggccaataccagccccaatatgcccagtcgcaggtcgtagactacgccagcccgggccagggtctatatcagcctcgctccaatacccctggcaatgatcccaatgtcggcctcgcccaccagttctcccatcaaaacctcggtggtgccgccagggccaatgcctacgccggccgtggtgtccctcagggccagccgcgtcctcgaactgcaggctctgccggacaacagcccagctacggctatgcaaatgcgccgcccatgccttcgcgacagtctgaatttctggccgcgcctgagcgcaatcccgagagatatgggactaatgctaataacaaccagaagaaatgttcgcagttggcctccgacttcttcaaggacagcgtgaagcgagctcgcgagcgcaatctcagacagagcgagatggagcagaagcttcaagaccccaaccagtctgcgtccaggagagagcagctgtggcagaacaacggcaagaaggaaggaagatacttgcgatttctccgaaccaaggacaagcccgacaactaccagacggtcaagatcatcggcaagggtgccttcggtgaggtcaagctagtgcagaggaagacagatggtgtcgtatacgccatgaagtctctcatcaaaaccgagatgttcaaaaaggaccaattggcccacgtccgcgccgaacgagatatcctggccgagtctgacagcccctgggtcgtcaagctctacaccactttccaggatgccaacttcttgtacatgctcatggagttcttgccaggcggcgatctgatgaccatgttgatcaagtatgaaatcttttccgaagatatcacgcgcttctacattgccgaaatagtgctggccatcgaagcagttcacaagctcggcttcatccaccgagacattaagcccgacaacatcattctggaccgcggaggacacgtcaagctgactgattttggtctgtccactggcttccataagctccacgacaacaactactaccagcaactgctccaaggacggtcaaaccggccacgagaccggaactctgttgcgattgatcagattaacctgacggtcagcaaccgcgcccagatcaatgactggagacgctctcggcgactgatggcgtactcaacggtgggtacacccgactatattgcaccagaaatcttcacgggccatgggtacacatttgactgcgattggtggtcgctgggaacgatcatgttcgagtgtctcgtaggctggcctccgttctgcgctgaagacagccatgacacgtaccgcaagattgtcaattggagacagacgctgtatttccccgacgacatcaccttgggcaccgaggcagagcatctcatccgaagcctcatctgcaatacggagcagcggctgggaagaggcggtgctcacgagatcaagagccacagcttcttcaggggcgtagagttcgacagtcttcgccggatccgagcgccattcgagccacgcttgacatcggccattgacacgacctatttcccgacggacgagattgaccaaacagataacgcgacgcatctgaaggcgcagatgatggcatcgggcaagccgctcgaggaggcaccggagatgagcctgccattcatcggatacacgttcaagcggttcgacaataacttccgctaatcgtgtatgtcacactctcgcgagcgtttttgtcgaggtcaacgatcaggttagagacatacttggaagtaatgccttgctgatggcagcaaaatccatgatgatggcatttggcccatgggaggagagctgcgtctaagggcatgttctggcatatttggagcggttgcaggggctggttgtgtttggcatgttcgatcttggtagcatcttgcatgagacaagcagggcacattcgacagcattgattccgcatagatagcataaaactgcacaaggaggtcacgagaactcctgagtaatggcagagccaggtcctagagctacaatgagactgcggtcttgacggctgtggaaccattaatcagacacaaagcaatgtagatacgagaaagtctcgacagtaactgttcaggcctcagataaaaagcaatggaaagatcctgcagtaagagctcggcttagttcgtaggaagtgcggatgtg

SEQ ID NO: 33080 - DNA, 1416 bp, Muscodor strobelii
  misc_feature: SGI cDNA ID NO. 571404
  misc_feature: Reduced expression when VOC is produced
  misc_feature: Encodes the peptide sequence at SEQ ID NO 33081
atggcagactcaaaacctcctgcgccagccacgggagctgttgctggcgcctcaccagcaacagcaacggcagcagcaccatacaaatctgcaaccggcgcaaatcgagccctgaaaatgatgggtctccccaatctccccaagaaactcccatcgcggaattggatgatattctggaccctcaccgcatcgttcacagcggctatcatctacgataagcgcgagaagaagcgtgcaacagcccgctgggcacgcgccgtctcccatctcgccaaggagcccatccagcatcctagcgagatgccgcgaaagctcaccatcttcctcgagagcccacctacagacggcttgcgcgtcgcccaggatcacttcactgaatatgtcaagcccgttttggcagcctcgggtctggattgggagtttgtccaggggagaaaagaaggcgatgttcgtgctgccgttgcagagcgcatacggcgtacccgtgacccgagcgcctctgctggtgcgcagactgaagtcgaagtcgttcaggagatccgcaagcgcaacggcacccaggagttcagtggtatgggcggtgacatcgtgatcgggcgaaatacctggaaagagtacgttcggggcatacatgaaggctggctaggacctctcgttgcccctgaagtaccagtatcagaaccagaacctatcgattctgctgaacctacaatagcagcacccacatcagatagtgctcctaaggaaggggttgaagctgaagaaaagaaaccagaagaggataagaaagcggaagaagagaagaaacccgaagagaaaaagccaggacgcccccctcaaccaccaccatacaatagcatcgccgactacccaacatcatccatccccacacaaatccctgccgaattctcacccgcagctcccgtgcaattccctcacatccttggcttctccaacacattcatccgacttggacgctttttaaatcgccgcaaactcgcagacgacatcgggcgagaagttgccgctgtctgcttagcagcaaacagagagtggcgacaagcggacagcacgtcggatgacgaagagtccgcgccagagcagacaaaggcgttgaattgggaagagaagaactggtcaaaatccgtatggaaagaggctgaggaagaaaagaaaactgccgactctcccgccacagcaccagtagagaagatatgggcgaagcccatggttctcgattctcgaatttccatgcgaatgcggcgtttcgaaatgcgcgaggacgacgaagctcgcgcccgcgcaatcgtcgtccccgaagaagaggtcgagggttggatcaagggtagcttccgcagtttataccgctgggctgtcgctgaacctgagccacatgctgcttggatcgacgaatag

SEQ ID NO: 33081 - protein, 471 aa, Muscodor strobelii
  misc_feature: SGI Peptide ID NO. 571404
  misc_feature (1)..(460): NCBI GI: 261357827 Blast Desc: mitochondrial import inner membrane translocase subunit tim-54 [Verticillium albo-atrum VaMs.102]
  misc_feature (1)..(459): NCBI GI: 46108614 Blast Desc: FG01189.1 [Gibberella zeae PH-1]
  misc_feature (1)..(459): NCBI GI: 256735093 Blast Desc: NECHADRAFT_74578 [Nectria haematococca mpVI 77-13-4]
  misc_feature (35)..(459): NCBI GI: 116195674 Blast Desc: CHGG_04435 [Chaetomium globosum CBS 148.51] gi|88180348|gb|EAQ87816.1| CHGG_04435 [Chaetomium globosum CBS 148.51]
  misc_feature (35)..(458): NCBI GI: 164424383 Blast Desc: mitochondrial import inner membrane translocase subunit tim-54 [Neurospora crassa OR74A] gi|166214985|sp|Q9C0Q7.2|TIM54_NEUCR RecName: Full=Mitochondrial
  misc_feature (40)..(458): NCBI GI: 13447151 Blast Desc: AF343072_1 TIM54 [Neurospora crassa] gi|13447153|gb|AAK26642.1|AF343073_1 TIM54 [Neurospora crassa]
  misc_feature (1)..(456): NCBI GI: 156062140 Blast Desc: SS1G_01185 [Sclerotinia sclerotiorum 1980] gi|154696522|gb|EDN96260.1| SS1G_01185 [Sclerotinia sclerotiorum 1980]
  misc_feature (17)..(445): NCBI GI: 121708165 Blast Desc: TIM complex componenet Tim54 [Aspergillus clavatus NRRL 1] gi|119400196|gb|EAW10622.1| TIM complex componenet Tim54 [Aspergillus clavatus NRRL 1]
  misc_feature (21)..(445): NCBI GI: 238486128 Blast Desc: TIM complex component Tim54 [Aspergillus flavus NRRL3357] gi|220699181|gb|EED55520.1| TIM complex component Tim54 [Aspergillus flavus NRRL3357]
  misc_feature (35)..(449): NCBI GI: 225559792 Blast Desc: TIM complex componenet Tim54 [Ajellomyces capsulatus G186AR]
  misc_feature: Useful for introducing or modulating the production of volatile compounds
MADSKPPAPATGAVAGASPATATAAAPYKSATGANRALKMMGLPNLPKKLPSRNWMIFWTLTASFTAAIIYDKREKKRATARWARAVSHLAKEPIQHPSEMPRKLTIFLESPPTDGLRVAQDHFTEYVKPVLAASGLDWEFVQGRKEGDVRAAVAERIRRTRDPSASAGAQTEVEVVQEIRKRNGTQEFSGMGGDIVIGRNTWKEYVRGIHEGWLGPLVAPEVPVSEPEPIDSAEPTIAAPTSDSAPKEGVEAEEKKPEEDKKAEEEKKPEEKKPGRPPQPPPYNSIADYPTSSIPTQIPAEFSPAAPVQFPHILGFSNTFIRLGRFLNRRKLADDIGREVAAVCLAANREWRQADSTSDDEESAPEQTKALNWEEKNWSKSVWKEAEEEKKTADSPATAPVEKIWAKPMVLDSRISMRMRRFEMREDDEARARAIVVPEEEVEGWIKGSFRSLYRWAVAEPEPHAAWIDE

SEQ ID NO: 33082 - DNA, 1960 bp, Muscodor strobelii
  misc_feature: SGI EST ID NO. CUFF.78168.0
  misc_feature: Variant of the nucleotide sequence at SEQ ID NO 33080
cggcgctcgggatactcgagtatttggtgtatttctacttgcatcccccgtgtacgaattccacccaggccggaagcacgctgaccgcgcctctgtgatcacgcactttcacccagtgctcgtgtgagcctgtgaagcatcacatactgccaatatggcagactcaaaacctcctgcgccagccacgggagctgttgctggcgcctcaccagcaacagcaacggcagcagcaccatacaaatctgcaaccggcgcaaatcgagccctgaaaatgatgggtctccccaatctccccaagaaactcccatcgcggaattggatgatattctggaccctcaccgcatcgttcacagcggctatcatctacgataagcgcgagaagaagcgtgcaacagcccgctgggcacgcgccgtctcccatctcgccaaggagcccatccagcatcctagcgagatgccgcgaaagctcaccatcttcctcgagagcccacctacagacggcttgcgcgtcgcccaggatcacttcactgaatatgtcaagcccgttttggcagcctcgggtctggattgggagtttgtccaggggagaaaagaaggcgatgttcgtgctgccgttgcagagcgcatacggcgtacccgtgacccgagcgcctctgctggtgcgcagactgaagtcgaagtcgttcaggagatccgcaagcgcaacggcacccaggagttcagtggtatgggcggtgacatcgtgatcgggcgaaatacctggaaagagtacgttcggggcatacatgaaggctggctaggacctctcgttgcccctgaagtaccagtatcagaaccagaacctatcgattctgctgaacctacaatagcagcacccacatcagatagtgctcctaaggaaggggttgaagctgaagaaaagaaaccagaagaggataagaaagcggaagaagagaagaaacccgaagagaaaaagccaggacgcccccctcaaccaccaccatacaatagcatcgccgactacccaacatcatccatccccacacaaatccctgccgaattctcacccgcagctcccgtgcaattccctcacatccttggcttctccaacacattcatccgacttggacgctttttaaatcgccgcaaactcgcagacgacatcgggcgagaagttgccgctgtctgcttagcagcaaacagagagtggcgacaagcggacagcacgtcggatgacgaagagtccgcgccagagcagacaaaggcgttgaattgggaagagaagaactggtcaaaatccgtatggaaagaggctgaggaagaaaagaaaactgccgactctcccgccacagcaccagtagagaagatatgggcgaagcccatggttctcgattctcgaatttccatgcgaatgcggcgtttcgaaatgcgcgaggacgacgaagctcgcgcccgcgcaatcgtcgtccccgaagaagaggtcgagggttggatcaagggtagcttccgcagtttataccgctgggctgtcgctgaacctgagccacatgctgcttggatcgacgaatagagatcactgccttgctgtcttccacctcgaatggagcgagaagtgtattgtccgatattgtaacaacactaacttaacataatactatagaacgggcttgcgggacatgtagatatggagttgtatttatagaacaatggcgcgatctccaacatgtaccaaccgggaaattcgaatcaggagctcgaatatgccaccagagtgggctttgtatatcaaataggacgatggttggccagcttggccttttctactcatataatgcttcagacgacgagcagtgagtatatgaattaacaccacacattctacctaataagcattcaggcctacttgatcttgtctctcctgcatattcaactgggcaatttgcccatagtatttaaagtc

SEQ ID NO: 33083 - DNA, 1239 bp, Muscodor strobelii
  misc_feature: SGI cDNA ID NO. 571405
  misc_feature: Elevated expression when VOC is produced
  misc_feature: Encodes the peptide sequence at SEQ ID NO 33084
atggcctctcaagctgatctgcaatcgaccggtgccatccccaaaaatgatgcacagcgagcaaccgtgtgctggtcatccatttcgagcatcctagagaagctatggtctgataagttctcggcggagacggcaataaaaccccggtttcttgacaagccgcctgttgaagccctcttgcttgaagaatggaccgatcacgcgaaaaagatcgcctcggatgaccgtacaaggcagtacttgaatctttccatagccattgcgtttctacgtgactcgggacctgacgacctcggtcgcacaggcgtcccacttacgcctaatgagatcgagtctatctggcagctagtgcgcgacgacgtattgtcaaacacaccgatcatcaagactgccaagcggagttctcaggggttcttggctatcactttgtggtacgtgtctaaagacgaaacgaaaatccacgagttcattcgacttcacgtgtggctcccagatggaaagcgaggaaatccacacacccccattcattcacatcagcccttcgctcggagttggatcctcgccggcgaaggtcaagatgtacaatacgatgttgagtcagtgaaaaatcgtcttagttcagacaggtcaatggaggcgacgcatgcggaatacgaagtgctctggagtgacagcaatggtgaaaattacgataagaagtacaaggctgataacaagttctccaaggtacgcgaaacgccacagctcgttcgagcaaaaaagagaacattgaagccggtagtgcatacggcttatgatacgtataccatagaggctggggattttcatcaatctatagtacaaccagaggagatgcatgtgactttctttttcttcgacgctaaacgcgattacaaagaagatgcgtctgttctcgggcctattcacggtcgtcaatacgttgaagagcgtgactctggggatgagacgccacgtacactggtaaacaagatcgaaccgttcaggttgtgggaacgcgcgtataagaaaggcctggcccatacacaagaggccgagctggaaggaatggccgggctggaaagaaaggccgagctggaaaaagcactgcataacttcagagaagcgctatcaatctgtgacaaagaccccaactttctgaagggaacatgctaccggtcaaaagcgctcgctgagttggaaaatgtcgaaaatgggttgagagagtcaattgttagttag

SEQ ID NO: 33084 - protein, 412 aa, Muscodor strobelii
  misc_feature: SGI Peptide ID NO. 571405
  misc_feature (63)..(399): NCBI GI: 238502289 Blast Desc: conserved [Aspergillus flavus NRRL3357] gi|220691188|gb|EED47536.1| conserved [Aspergillus flavus NRRL3357]
  misc_feature (63)..(399): NCBI GI: 169775651 Blast Desc: [Aspergillus oryzae RIB40] gi|83771027|dbj|BAE61159.1| protein product [Aspergillus oryzae]
  misc_feature (55)..(401): NCBI GI: 261187851 Blast Desc: conserved [Ajellomyces dermatitidis SLH14081] gi|239593460|gb|EEQ76041.1| conserved [Ajellomyces dermatitidis SLH14081]
  misc_feature (55)..(401): NCBI GI: 239608440 Blast Desc: conserved [Ajellomyces dermatitidis ER-3]
  misc_feature (79)..(399): NCBI GI: 85111134 Blast Desc: NCU03067 [Neurospora crassa OR74A] gi|28925522|gb|EAA34553.1| [Neurospora crassa OR74A]
  misc_feature (76)..(184): NCBI GI: 156036270 Blast Desc: SS1G_12824 [Sclerotinia sclerotiorum 1980] gi|154698229|gb|EDN97967.1| SS1G_12824 [Sclerotinia sclerotiorum 1980]
  misc_feature (113)..(307): NCBI GI: 284034997 Blast Desc: Slin_0055 [Spirosoma linguale DSM 74] gi|283814290|gb|ADB36128.1| Slin_0055 [Spirosoma linguale DSM 74]
  misc_feature: Useful for introducing or modulating the production of volatile compounds
MASQADLQSTGAIPKNDAQRATVCWSSISSILEKLWSDKFSAETAIKPRFLDKPPVEALLLEEWTDHAKKIASDDRTRQYLNLSIAIAFLRDSGPDDLGRTGVPLTPNEIESIWQLVRDDVLSNTPIIKTAKRSSQGFLAITLWYVSKDETKIHEFIRLHVWLPDGKRGNPHTPIHSHQPFARSWILAGEGQDVQYDVESVKNRLSSDRSMEATHAEYEVLWSDSNGENYDKKYKADNKFSKVRETPQLVRAKKRTLKPVVHTAYDTYTIEAGDFHQSIVQPEEMHVTFFFFDAKRDYKEDASVLGPIHGRQYVEERDSGDETPRTLVNKIEPFRLWERAYKKGLAHTQEAELEGMAGLERKAELEKALHNFREALSICDKDPNFLKGTCYRSKALAELENVENGLRESIVS

SEQ ID NO: 33085 - DNA, 1444 bp, Muscodor strobelii
  misc_feature: SGI EST ID NO. CUFF.78171.0
  misc_feature: Variant of the nucleotide sequence at SEQ ID NO 33083
cggcgcaccagtaacagaattcaatgacaacactgccatgatttcacttagcagcaattgattcagccagcgagaacctacctgagtaaccatggcctctcaagctgatctgcaatcgaccggtgccatccccaaaaatgatgcacagcgagcaaccgtgtgctggtcatccatttcgagcatcctagagaagctatggtctgataagttctcggcggagacggcaataaaaccccggtttcttgacaagccgcctgttgaagccctcttgcttgaagaatggaccgatcacgcgaaaaagatcgcctcggatgaccgtacaaggcagtacttgaatctttccatagccattgcgtttctacgtgactcgggacctgacgacctcggtcgcacaggcgtcccacttacgcctaatgagatcgagtctatctggcagctagtgcgcgacgacgtattgtcaaacacaccgatcatcaagactgccaagcggagttctcaggggttcttggctatcactttgtggtacgtgtctaaagacgaaacgaaaatccacgagttcattcgacttcacgtgtggctcccagatggaaagcgaggaaatccacacacccccattcattcacatcagcccttcgctcggagttggatcctcgccggcgaaggtcaagatgtacaatacgatgttgagtcagtgaaaaatcgtcttagttcagacaggtcaatggaggcgacgcatgcggaatacgaagtgctctggagtgacagcaatggtgaaaattacgataagaagtacaaggctgataacaagttctccaaggtacgcgaaacgccacagctcgttcgagcaaaaaagagaacattgaagccggtagtgcatacggcttatgatacgtataccatagaggctggggattttcatcaatctatagtacaaccagaggagatgcatgtgactttctttttcttcgacgctaaacgcgattacaaagaagatgcgtctgttctcgggcctattcacggtcgtcaatacgttgaagagcgtgactctggggatgagacgccacgtacactggtaaacaagatcgaaccgttcaggttgtgggaacgcgcgtataagaaaggcctggcccatacacaagaggccgagctggaaggaatggccgggctggaaagaaaggccgagctggaaaaagcactgcataacttcagagaagcgctatcaatctgtgacaaagaccccaactttctgaagggaacatgctaccggtcaaaagcgctcgctgagttggaaaatgtcgaaaatgggttgagagagtcaattgttagttagggttaagggagtagtacttggaccgttttgtggtgatgtaataccgttaaattatcttagctaccacgggaataagcaaactcctattgtggcaactgtttgcttcaactggat

SEQ ID NO: 33086 - DNA, 3627 bp, Muscodor strobelii
  misc_feature: SGI cDNA ID NO. 571406
  misc_feature: Encodes the peptide sequence at SEQ ID NO 33087
atgttgatcgaccgacttgctatgaaccttgccgaccgtaattcaccgttcccttcacccgttacatcctcaagcaacgatagagtcccgacgactggagatgtgcatttgtacgccgatccgctatcttactctactcaaactccgatattgtatgcagattgcgaaggtcttgacggaggtgaagctgtaccaaggggtctaaggcatcgagcgaaagacaaatccgaccaagttgagattctctcgtctaatatacacagaaatgctcgcgcatcgaggcgcacgtcgacgggtggtgagaggtcctcttcatccagccgtggaatatcggtcatgcatatcgaggccaagaagaaattgacgaaatcccggcatgcatctcagagagaaattgcttgggcagtgacgcccgaaactaagaagcgagaatacgctgttactcagctgtatccccgccttctatacacattctctgatgtcgttgtgtttgtgttgagaaatccacgcgctttcgaatcaacagtgctcgagaagttactcgactggggctcggcatctatcgacaagtcccttaatcagccggcgctaccccatgccatcattgttttaaacgcgacagaaaacgtggatgaaagggagtgggacgtgggaaccgcgacgaacttgttgttcgaagatatcagaggcgccattttccgcgagcctcgcttcgaggatcatgcacacgcattccgacaaagcggacgtaaaatcgattcaacaaaagaccttttggagtgttactatgcttccgtcactattgttcgcgtgccttctcgcggtagatatatgctaatggataaccaaattgaaaagttatttgatgtagtgaaaagaagatgccaggcatcattgctcaccaaaaaacgagttcgaatgcttgcgacagcagagaaactccagatctatctccaagccgcctacgatcatttctctaagaatctcgacacgcccttcgactttgttaaagaagccttgaaacataacccaattccacgagatctgggcggcaatatattgagccttgcgctttcgatcaagaataattgccaacaaaccatgaaagatgatatcacaaagattttcgaccaaatggttcctatgatatcgtcatgcatcatgcttgactctgtcagacagagccttatgggcacgacggttcaactactgaacgatgcatacgaggagttctgtgagcttgcgctggaagagttcgccaattttcatacaccgtgtaacttcgtacacccgcggtctcgacagcgatgttgcaatgtcaaatcgggccacttgcccaaaggacaccaggacgcaacgggaaaggtgatcggtgctggagcttatcaatccgactttgacttccgcgagtacaaggtgaaatggattgggcaaatcagcagcagattgaatgatttgcaaagtaaattcttcaaccttggccacactctcaaggatcgacccgaaagcttcattgccgcagagttgcatagtcaatcgattaacgacttctatcgcacgcttggcgatgatataacaaaattcagcagccactcaacatgtttctcctgtctgcgagagttgccggagcatgctctcccttgcggccacgttctttgcaccccgtgcgtgagagaatatggtcttaaagcctcgaagacagcaattgagctgaagcagtgtccactccattcgtgggatcgagagtggtcgccgccgtgggttgtaacagtgaaacctgccaacgcgggtgttcgcgtgctgtgtttggatggaggcggcattcgaggcattgtcgagttgatgacactgaaggcaatcgaacgtttccttggtcctaatttacccattcagtattttttcgatctgattgttggtacaagtggcattatagctctgggtcttggtgtcaacaactggcgggtcaatgaatgcattacctatttcaaggagctatgccgtcatgccttcgttcctcgcgaaatgcatggtattcctgtgctcgaacaattagctatgctaaaccacggcagcatatacaaaacaaagcccttcgaggcaatgttagagaaggttttcactacaagaccactatttggcggagtgaatgacgttgatgaaatgtttactaaagtagccatcacgacaacaacgtctgtggcacagcacgctgttgtactggcaaattataatcgtccagactcagtagaatatgatctgccttaccgattcgataggtcggacggccctgcccgagagttcaaagcctgggaagctgctcgggcaacttccgcagcgccgccattcttcaagccctatgtgaaacaggagacacagactggattcatagacggagctctgtatcataataacccagtttgggttgcacatcatgagcgaaaactgatttggggagatgtcgctgcatcacctccggacatcgtgctctcgcttggtacagggaaacgtgacgatgatgatgggaaaatttcgagctctgcgcagtctccagcccagagcagacataaagaacgaagttggccatcatttcctcggcagctgatcaatatcgccatggaccggatcgacaaattactcgaatgtaacacaatctggagcaactatcttgcagaaaatacgtcgtcggacttcaacaaaagctctgacttcaataatcgtcgatttattcgcattaacccaaacttggtttttgctgttcctcgcctggatgatatcaaggagttggagcgcctcgagcaggcggctttgcaaaacgtcttgaaggactaccggaacatcaaagaagtggcccatagattgattgcgagcaccttcttctttgaaaaggatcctggctcggttaggccaactgcgaccggctttgaatgtactggttcgattcattgcagatttgccaattcttcggatcagatgaaggcactaggggcgttcttgaggcaatactggaaggcttcatttgaaccctttttcaccattcgggaggaaggatgctctgatcacaattctcgagttatcatcaccgagaccacactaagcgacatgcgtctgagagggatctttcaactcggaagactacgcatccctctgtccaaagaattggccgtcaccatgatatctctttctttacagacagacgactacgctcctaacgccagcgcactgctacccattagtggattcccacgggagctgatatctgaggagagtgaatttcgagtttcgagttcaaaacctaggtccaatcatccccggccccagagtattgaccttaaggtccctaaaccacatcgatttcagagcttccgagagcgtaacaaacttgataagcgtgcatcattgagcaagcgtaaagtcaggcaatcattatcgcagacaaatctcaaagaagctctcgagaaccttagcgtatcaccatcgatatcccgagcgccatcgggcgcaactctggatggcccccctcaagtaagccctttatcagatcgaccgttctcgccttttgatgtaggaaaatgggctcagagtcgggtactttctccggaagagtttatacatgagctggaagcctaa

SEQ ID NO: 33087 - protein, 1208 aa, Muscodor strobelii
  misc_feature: SGI Peptide ID NO. 571406
  misc_feature (601)..(810): Pfam Id: PF01734 Pfam Desc: Patatin-like phospholipase
  misc_feature (1)..(1172): NCBI GI: 46127523 Blast Desc: FG08139.1 [Gibberella zeae PH-1]
  misc_feature (21)..(1085): NCBI GI: 67525721 Blast Desc: AN3318.2 [Aspergillus nidulans FGSC A4] gi|40744106|gb|EAA63286.1| AN3318.2 [Aspergillus nidulans FGSC A4] gi|259485712|tpe|CBF82965.1| TPA: Patatin-like serine FGSC
  misc_feature (19)..(1085): NCBI GI: 116198629 Blast Desc: CHGG_07470 [Chaetomium globosum CBS 148.51] gi|88178749|gb|EAQ86217.1| CHGG_07470 [Chaetomium globosum CBS 148.51]
  misc_feature (17)..(1090): NCBI GI: 46114440 Blast Desc: FG03062.1 [Gibberella zeae PH-1]
  misc_feature (640)..(1162): NCBI GI: 256725500 Blast Desc: NECHADRAFT_101154 [Nectria haematococca mpVI 77-13-4]
  misc_feature (137)..(557): NCBI GI: 171688346 Blast Desc: protein product [Podospora anserina] gi|170944135|emb|CAP70245.1| protein product [Podospora anserina]
  misc_feature (146)..(1000): NCBI GI: 171689740 Blast Desc: protein product [Podospora anserina] gi|170944832|emb|CAP70944.1| protein product [Podospora anserina]
  misc_feature (506)..(1099): NCBI GI: 189211822 Blast Desc: conserved [Pyrenophora tritici-repentis Pt-1C-BFP] gi|187979438|gb|EDU46064.1| conserved [Pyrenophora tritici-repentis Pt-1C-BFP]
  misc_feature (527)..(983): NCBI GI: 154280477 Blast Desc: [Ajellomyces capsulatus NAm1] gi|150411230|gb|EDN06618.1| [Ajellomyces capsulatus NAm1]
  misc_feature (523)..(994): NCBI GI: 256725180 Blast Desc: NECHADRAFT_88469 [Nectria haematococca mpVI 77-13-4]
MLIDRLAMNLADRNSPFPSPVTSSSNDRVPTTGDVHLYADPLSYSTQTPILYADCEGLDGGEAVPRGLRHRAKDKSDQVEILSSNIHRNARASRRTSTGGERSSSSSRGISVMHIEAKKKLTKSRHASQREIAWAVTPETKKREYAVTQLYPRLLYTFSDVVVFVLRNPRAFESTVLEKLLDWGSASIDKSLNQPALPHAIIVLNATENVDEREWDVGTATNLLFEDIRGAIFREPRFEDHAHAFRQSGRKIDSTKDLLECYYASVTIVRVPSRGRYMLMDNQIEKLFDVVKRRCQASLLTKKRVRMLATAEKLQIYLQAAYDHFSKNLDTPFDFVKEALKHNPIPRDLGGNILSLALSIKNNCQQTMKDDITKIFDQMVPMISSCIMLDSVRQSLMGTTVQLLNDAYEEFCELALEEFANFHTPCNFVHPRSRQRCCNVKSGHLPKGHQDATGKVIGAGAYQSDFDFREYKVKWIGQISSRLNDLQSKFFNLGHTLKDRPESFIAAELHSQSINDFYRTLGDDITKFSSHSTCFSCLRELPEHALPCGHVLCTPCVREYGLKASKTAIELKQCPLHSWDREWSPPWVVTVKPANAGVRVLCLDGGGIRGIVELMTLKAIERFLGPNLPIQYFFDLIVGTSGIIALGLGVNNWRVNECITYFKELCRHAFVPREMHGIPVLEQLAMLNHGSIYKTKPFEAMLEKVFTTRPLFGGVNDVDEMFTKVAITTTTSVAQHAVVLANYNRPDSVEYDLPYRFDRSDGPAREFKAWEAARATSAAPPFFKPYVKQETQTGFIDGALYHNNPVWVAHHERKLIWGDVAASPPDIVLSLGTGKRDDDDGKISSSAQSPAQSRHKERSWPSFPRQLINIAMDRIDKLLECNTIWSNYLAENTSSDFNKSSDFNNRRFIRINPNLVFAVPRLDDIKELERLEQAALQNVLKDYRNIKEVAHRLIASTFFFEKDPGSVRPTATGFECTGSIHCRFANSSDQMKALGAFLRQYWKASFEPFFTIREEGCSDHNSRVIITETTLSDMRLRGIFQLGRLRIPLSKELAVTMISLSLQTDDYAPNASALLPISGFPRELISEESEFRVSSSKPRSNHPRPQSIDLKVPKPHRFQSFRERNKLDKRASLSKRKVRQSLSQTNLKEALENLSVSPSISRAPSGATLDGPPQVSPLSDRPFSPFDVGKWAQSRVLSPEEFIHELEA

SEQ ID NO: 33088 - DNA, 291 bp, Muscodor strobelii
  misc_feature: SGI EST ID NO. CUFF.78184.0
  misc_feature: Variant of the nucleotide sequence at SEQ ID NO 33086
gacactgaaggcaatcgaacgtttccttggtcctaatttacccattcagtattttttcgatctgattgttggtacaagcaccagtggcattatagctctgggtcttggtgtcaacaactggcgggtcaatgaatgcattacctatttcaaggagctatgccgtcatgccttcgttcctcgcgaaatgcatggtattcctggtgagtgtctcgaaatttgcgcttccaatggtgaaggaagtcaaatccaagatgataatcgcataatgaattagtcgtctcctgatctctc

SEQ ID NO: 33089 - DNA, 816 bp, Muscodor strobelii
  misc_feature: SGI cDNA ID NO. 571407
  misc_feature: Encodes the peptide sequence at SEQ ID NO 33090
atgtcgatcactacgaagtgcccccccgctggactcgccggcgaagagctcgcgggctggctggcctgggaagaagagcggactgcactgtctgaagccaaaccccaccacatcaagcagtcgactttcatcgctgaaccccctgccggactcacttccgaagagctggccggctggttggcctgggatgaagaaaccagtgcactatctgaagctgagcccatgcctgccaacgaggagccgacttccatcaccaatcagcctatcccggtggtcaagctgcctcccatcatcgctaagaagcctacacccattatcaagctaccccccaccttcaaggaggctgctagtcccattgctcctgtcggctctgtcaccccggctgctcgtgctacttctactgctcttaccaccactcccaagcgactggaaccggctaccatcagccccaagtgccttcccgcgcctgctaccacgcctgctcccactccctccgagcctcttaccggtctcaattacggcgaggccgaagtcctgttgtccagcgatgacaaacaatcggaagaggagagagtgaaggaaacgatcgccttcttctgctcagacaaacgccaaatcaactccgacctcgccgagttccacagcgaggccagagtccagggattcaaaactctcaaagactcccgttgggccaccaccgagggacataagacaccgaagagttctcgtcgcgccaccgcccagggacacaagaccggaagcattttcgttggtccaaacggacacaaaaagcgaggaaagagtctgttcgcatga

SEQ ID NO: 33090 - protein, 271 aa, Muscodor strobelii
  misc_feature: SGI Peptide ID NO. 571407
MSITTKCPPAGLAGEELAGWLAWEEERTALSEAKPHHIKQSTFIAEPPAGLTSEELAGWLAWDEETSALSEAEPMPANEEPTSITNQPIPVVKLPPIIAKKPTPIIKLPPTFKEAASPIAPVGSVTPAARATSTALTTTPKRLEPATISPKCLPAPATTPAPTPSEPLTGLNYGEAEVLLSSDDKQSEEERVKETIAFFCSDKRQINSDLAEFHSEARVQGFKTLKDSRWATTEGHKTPKSSRRATAQGHKTGSIFVGPNGHKKRGKSLFA

SEQ ID NO: 33091 - DNA, 515 bp, Muscodor strobelii
  misc_feature: SGI EST ID NO. CUFF.78192.0
  misc_feature: Variant of the nucleotide sequence at SEQ ID NO 33089
tcttattatataaggatctattcccacccatctctggtcccgaccttcttcctttctcatcctccatcaacattaacatcttgacaacctccaacatcttgacaacctccaacatcttgacaacctccaacatcttgacaacctccaacatcttgttaccttcatatacaccccatattacctctcactatgtcgatcactacgaagtgcccccccgctggactcgccggcgaagagctcgcgggctggctggcctgggaagaagagcggactgcactgtctgaagccaaaccccaccacatcaagcagtcgactttcatcgctgaaccccctgccggactcacttccgaagagctggccggctggttggcctgggatgaagaaaccagtgcactatctgaagctgagcccatgcctgccaacgaggagccgacttccatcaccaatcagcctatcccggtggtcaagctgcctcccatcatcgctaagaagcctacacccattatcaagctacc

SEQ ID NO: 33092 - DNA, 759 bp, Muscodor strobelii
  misc_feature: SGI cDNA ID NO. 571408
  misc_feature: Encodes the peptide sequence at SEQ ID NO 33093
atggcgtcgcgattcgtgtctggtggcacgatcgcgggacaaggggatggagatgaagctctgacacaaacttcgttgaataatacttcagaaaataaactcgcgtctggaagtgagaaagagacgatcaacagcagggaaagagttaatacgaatgtggaatgggagaaagtgcaacaggagctggaggaagaaaggaagaagcgcgctgatgcccggagagcgaatgttgaaggcaatggggagaagagtctgtttgatattttgcaggctaataaggctgcgaaacaggcggcgttcgaagaagcgaataagatcaagaaccaatttcggagtctggatgatgatgagattgagtttctcgatgaagtgcagagtaagaagagagctgaggaggagaaggcgagacaagagatggaggatggtattgcgaagtttcgggaggcgcagaaaggctctggtggagaccagccaggtacaagagaagatgagggtgaggagggaggaggtgatgcggaatggataggtgctggtggtaggaagcgaaagagggagagggagaaggggttcaaagggcttaagaggagagccagtggcgaggggaaaaaagaagacgacgagaagggcgaagggagggttcaagatggcaagttagttgaggagaagccgaaagaaccggaacctgcgattctcaagacgaagccgaaaccaactttgggtcttgttgattatggatctgacgaggacgatgatgattga

SEQ ID NO: 33093 - protein, 252 aa, Muscodor strobelii
  misc_feature: SGI Peptide ID NO. 571408
  misc_feature (1)..(251): NCBI GI: 46108616 Blast Desc: FG01190.1 [Gibberella zeae PH-1]
  misc_feature (54)..(251): NCBI GI: 145615091 Blast Desc: [Magnaporthe grisea 70-15] gi|145022008|gb|EDK06028.1| [Magnaporthe grisea 70-15]
  misc_feature (54)..(251): NCBI GI: 154318269 Blast Desc: BC1G_03302 [Botryotinia fuckeliana B05.10] gi|150842825|gb|EDN18018.1| BC1G_03302 [Botryotinia fuckeliana B05.10]
  misc_feature (54)..(251): NCBI GI: 212542887 Blast Desc: conserved [Penicillium marneffei ATCC 18224] gi|210066505|gb|EEA20598.1| conserved [Penicillium marneffei ATCC 18224]
  misc_feature (52)..(250): NCBI GI: 238843741 Blast Desc: conserved [Microsporum canis CBS 113480]
  misc_feature (46)..(218): NCBI GI: 119496003 Blast Desc: NFIA_015710 [Neosartorya fischeri NRRL 181] gi|119412937|gb|EAW22878.1| conserved [Neosartorya fischeri NRRL 181]
  misc_feature (54)..(247): NCBI GI: 145239291 Blast Desc: An08g01730 [Aspergillus niger] gi|134076798|emb|CAK39853.1| protein product [Aspergillus niger]
  misc_feature (46)..(247): NCBI GI: 67521636 Blast Desc: AN1275.2 [Aspergillus nidulans FGSC A4] gi|40746712|gb|EAA65868.1| AN1275.2 [Aspergillus nidulans FGSC A4] gi|259488402|tpe|CBF87811.1| TPA: conserved [Aspergillus FGSC
  misc_feature (54)..(201): NCBI GI: 261194723 Blast Desc: conserved [Ajellomyces dermatitidis SLH14081] gi|239588304|gb|EEQ70947.1| conserved [Ajellomyces dermatitidis SLH14081]
  misc_feature (46)..(197): NCBI GI: 121702007 Blast Desc: conserved [Aspergillus clavatus NRRL 1] gi|119397411|gb|EAW07842.1| conserved [Aspergillus clavatus NRRL 1]
MASRFVSGGTIAGQGDGDEALTQTSLNNTSENKLASGSEKETINSRERVNTNVEWEKVQQELEEERKKRADARRANVEGNGEKSLFDILQANKAAKQAAFEEANKIKNQFRSLDDDEIEFLDEVQSKKRAEEEKARQEMEDGIAKFREAQKGSGGDQPGTREDEGEEGGGDAEWIGAGGRKRKREREKGFKGLKRRASGEGKKEDDEKGEGRVQDGKLVEEKPKEPEPAILKTKPKPTLGLVDYGSDEDDDD

SEQ ID NO: 33094 - DNA, 1536 bp, Muscodor strobelii
  misc_feature: SGI EST ID NO. CUFF.78202.0
  misc_feature: Variant of the nucleotide sequence at SEQ ID NO 33092
caacattcctatcgcagtctttattcatgatctgcaactgattgtctctgctacttattgaatatctctgatatttatcttctacagcttgagcttgatcgaaattcataggctcactgcttccgacggcgtcttttccctcaacatggcgtcgcgattcgtgtctggtggcacgatcgcgggacaaggggatggagatgaagctctgacacaaacttcgttgaataatacttcagaaaataaactcgcgtctggaagtgagaaagagacgatcaacagcagggaaagagttaatacgaatgtggaatgggagaaagtgcaacaggagctggaggaagaaaggaagaagcgcgctgatgcccggagagcgaatgttgaaggcaatggggagaagagtctgtttgatattttgcaggctaataaggctgcgaaacaggcggcgttcgaagaagcgaataagatcaagaaccaatttcggagtctggatgatgatgagattgagtttctcgatgaagtgcagagtaagaagagagctgaggaggagaaggcgagacaagagatggaggatggtattgcgaagtttcgggaggcgcagaaaggctctggtggagaccagccaggtacaagagaagatgagggtgaggagggaggaggtgatgcggaatggataggtgctggtggtaggaagcgaaagagggagagggagaaggggttcaaagggcttaagaggagagccagtggcgaggggaaaaaagaagacgacgagaagggcgaagggagggttcaagatggcaagttagttgaggagaagccgaaagaaccggaacctgcgattctcaagacgaagccgaaaccaactttgggtcttgttgattatggatctgacgaggacgatgatgattgaaaggagaccgtcgtccatcgtcaataagtcttctcaccatcaaacgaggaagcgctgcacctccgaaacggcggaaatgacagggaagatgaagatatcgatttcgccccagccttctgcgtcccaactcttgccacatccctaggcatcatggtcaggcccaacaattgaccaactcgccatttgattctatcttaagggattagtctgccgccattacttagtcaagccgatgtggatagtcgtgcctgattccatcaagagcgcgtaacgctcaccatacatagggcgcctatctgaagcattcgccttacgaccggagcctttgttacgccgatagcggaagactttgccagtttccaacgagtaggcaaatgcctagtctgccgtggtagagtcatctatccaagcaagttaaaggggcacagccataaaatgattacgataaattgctcgcaggctaagaattatgttctcatgttatgtttagtttgttcgacaatgatcgtcagtcgccatacattggggtagaagcgacaaaagctgagcgcctatagctgtttcttgttgcaagccccttccttcggtatatcgtctactcaatgctcggaattattatacgagcgttgtgt

SEQ ID NO: 33095 - DNA, 1047 bp, Muscodor strobelii
  misc_feature: SGI cDNA ID NO. 571409
  misc_feature: Reduced expression when VOC is produced
  misc_feature: Encodes the peptide sequence at SEQ ID NO 33096
atgccgggcggcgtgtgcgcaaagctcgactatgagaccgatatgatggcagaatatgtggctgacatggcgacgcgaattgtcataaccaatgccagtgtcacgccagcattccgcaagttcgtcaaccagattctgacatcaactcgtctccccagcaccaccatccttctgggcatgaactatctggccaaatatgtcaatacccataaacagcgaacaggcagcttcgtcgcgactgagagtgaactgtggaaattgttgactgttgccttgttgttaggcagcaagtttttcgatgacaatactttccaaaatcgctcttggtcagatgtgagtggtatcgctgttgcagatctgaacaagctggaaggcaagtggcttcgggacatcagctggtccctctacctcaatcccgatcgtagccatgactacaatgcctggctgagcaactggaaagagcatgaggaaggcaagaagcaacagcagcaatcccaagctctccttcgcgagagattggcgcccattgtcacgaccgtccagaaagacactcatgccagacttcatcatcctctatcctacgaaggttggaccgcagaggaaattgccgattacgagcgtgccaccgtcggtgcgcgacttggtcacgttggcaaatactaccatggccaggaaccacaggctcattggaatggacagtggccacgaacgtggtcccaggcgcctttgacacccccggattctggctatggaacgccagagtacctcaactccgctgcgtcggtaaactcgcactacgacgcatatttcaatcatggtctaatgaacggaaactacggcagaggctatcactccaatgctggccaccacagctacagcacttccagaaatgcaccacaccatcagtcattcgccaatcattaccatcaaaatggctgggatgctcatatggctgactgcaactgctcttcatgcgtgggagccggccgtacgaaggctcccccatacttccatggccacggttacagccaggccgtcatgggataa

SEQ ID NO: 33096 - protein, 348 aa, Muscodor strobelii
  misc_feature: SGI Peptide ID NO. 571409
  misc_feature (87)..(135): Pfam Id: PF08613 Pfam Desc: Cyclin
  misc_feature (1)..(348): NCBI GI: 85068263 Blast Desc: NCU07293 [Neurospora crassa OR74A] gi|28923744|gb|EAA32911.1| conserved [Neurospora crassa OR74A]
  misc_feature (1)..(348): NCBI GI: 116195678 Blast Desc: CHGG_04437 [Chaetomium globosum CBS 148.51] gi|88180350|gb|EAQ87818.1| CHGG_04437 [Chaetomium globosum CBS 148.51]
  misc_feature (1)..(348): NCBI GI: 170940169 Blast Desc: protein product [Podospora anserina]
  misc_feature (1)..(348): NCBI GI: 46108618 Blast Desc: FG01191.1 [Gibberella zeae PH-1]
  misc_feature (1)..(348): NCBI GI: 256734374 Blast Desc: [Nectria haematococca mpVI 77-13-4]
  misc_feature (1)..(348): NCBI GI: 39940930 Blast Desc: MGG_05377 [Magnaporthe grisea 70-15] gi|145022010|gb|EDK06030.1| MGG_05377 [Magnaporthe grisea 70-15]
  misc_feature (3)..(347): NCBI GI: 261357832 Blast Desc: conserved [Verticillium albo-atrum VaMs.102]
  misc_feature (1)..(340): NCBI GI: 156062014 Blast Desc: SS1G_01121 [Sclerotinia sclerotiorum 1980] gi|154696459|gb|EDN96197.1| SS1G_01121 [Sclerotinia sclerotiorum 1980]
  misc_feature (1)..(348): NCBI GI: 154295798 Blast Desc: BC1G_12902 [Botryotinia fuckeliana B05.10] gi|150843935|gb|EDN19128.1| BC1G_12902 [Botryotinia fuckeliana B05.10]
  misc_feature (3)..(325): NCBI GI: 238487110 Blast Desc: cyclin-like protein (Clg1), [Aspergillus flavus NRRL3357] gi|220699672|gb|EED56011.1| cyclin-like protein (Clg1), [Aspergillus flavus NRRL3357]
  misc_feature: Useful for introducing or modulating the production of volatile compounds
MPGGVCAKLDYETDMMAEYVADMATRIVITNASVTPAFRKFVNQILTSTRLPSTTILLGMNYLAKYVNTHKQRTGSFVATESELWKLLTVALLLGSKFFDDNTFQNRSWSDVSGIAVADLNKLEGKWLRDISWSLYLNPDRSHDYNAWLSNWKEHEEGKKQQQQSQALLRERLAPIVTTVQKDTHARLHHPLSYEGWTAEEIADYERATVGARLGHVGKYYHGQEPQAHWNGQWPRTWSQAPLTPPDSGYGTPEYLNSAASVNSHYDAYFNHGLMNGNYGRGYHSNAGHHSYSTSRNAPHHQSFANHYHQNGWDAHMADCNCSSCVGAGRTKAPPYFHGHGYSQAVMG

SEQ ID NO: 33097 - DNA, 3733 bp, Muscodor strobelii
  misc_feature: SGI EST ID NO. CUFF.78995.1
  misc_feature: Variant of the nucleotide sequence at SEQ ID NO 33095
caaatcacttgccatttctaatgtcgcgagtgtccggcctctgctcgctcgtgggaccgtttcgttgcaccctcgccgcccgtccgcacacccagttcgtggtccgcctctcgcctgtccacatccatccgcatccacattcatcttctctccgtcattcattcttcctcatccaccaccaccccatctcctctcctccccccgtgtcctctcccctcaaccacggattgttcgtccttctctaatactctttatcctccttcgctctcgtccgtgcctctcctcctgccgaacgacctgatacacctcgccaattccgtctccgacctgcatcccgtcttcgtcgaggcaaccgttcctttgtgccccgaatctatcgatcacactgggaccgcatccactacaggacagcaagaagacaagtgaagatagcttggcacgacacagtctagacagaatcgtttctatctgcgtgctgcatcgccctcgcccggtcatctttacaaaaagtacttgaccagagtatcggatgtgcttgcatctagaatagctgcatcttcaagcaagcaaccaaccaaccgacgcatccgcggccatctcgaatctccgaccagcccgcccggatcctcttcactgagcgagacgtcacttactgcgtattctctacgccatcattctactgttgcagacaaatccaccgcagcgccactgggcctcgatccggatcaaccaaacactattgtttctcagactacaccgtcaactgcacgctctgttactggtagctatcaattttaaagtagcttaagtctttaaactacttggcttcgaacatagcctttttccgactgcaagacatcgagcaaaacaccttcctgaaatcgaagaagcttttttaacctctgaggcctgtgtttcttgaaccgaaagcagattctgtttcaatcgaccaacatctcgactgggtaaatcaagtcttgatcaacaaagcaattaattgatggctggagcatctcactaaggtttcgataacctcttggccgctccacctcgccagtctcttcagccttggaaccagaagccagttgtcctgcaattgatcttgcacaactgagttttccacgtgctagaagcagataatcactccgacaaaggtcacgcttgggatctttgacggggctcctcctcatcaaccgtcatcatgccgggcggcgtgtgcgcaaagctcgactatgagaccgatatgatggcagaatatgtggctgacatggcgacgcgaattgtcataaccaatgccagtgtcacgccagcattccgcaagttcgtcaaccagattctgacatcaactcgtctccccagcaccaccatccttctgggcatgaactatctggccaaatatgtcaatacccataaacagcgaacaggcagcttcgtcgcgactgagagtgaactgtggaaattgttgactgttgccttgttgttaggcagcaagtttttcgatgacaatactttccaaaatcgctcttggtcagatgtgagtggtatcgctgttgcagatctgaacaagctggaaggcaagtggcttcgggacatcagctggtccctctacctcaatcccgatcgtagccatgactacaatgcctggctgagcaactggaaagagcatgaggaaggcaagaagcaacagcagcaatcccaagctctccttcgcgagagattggcgcccattgtcacgaccgtccagaaagacactcatgccagacttcatcatcctctatcctacgaaggttggaccgcagaggaaattgccgattacgagcgtgccaccgtcggtgcgcgacttggtcacgttggcaaatactaccatggccaggaaccacaggctcattggaatggacagtggccacgaacgtggtcccaggcgcctttgacacccccggattctggctatggaacgccagagtacctcaactccgctgcgtcggtaaactcgcactacgacgcatatttcaatcatggtctaatgaacggaaactacggcagaggctatcactccaatgctggccaccacagctacagcacttccagaaatgcaccacaccatcagtcattcgccaatcattaccatcaaaatggctgggatgctcatatggctgactgcaactgctcttcatgcgtgggagccggccgtacgaaggctcccccatacttccatggccacggttacagccaggccgtcatgggataacgaatttccttctatttttttcacgacagtatgcgagcaattgtttggcattcgcttgcagaatcaaagtcacatagtcacaaaggcgctcagggctacttaccggtcggagttgcctcttgatgacttggacacctttctggtgtattcatgaacataaattttcctattctgataccccctcactggacggcgataaacatatcatgataagagaggcacagaatattcgtgtagggcgcgatctgatgatggctgttcgcgaacaccccctgggccattcagtttaactcgttacacattttgtattgatgttacgtctttgccctgactcgttcgcagccgataaccattcagtgatgcgaatatggttcgcctacccgaacgagcatattctgcacgacttgccgcttcataatcatattttggcgttcatggattcggggattttcaacggttcggcgttttcgattagatctggttacgtcatctatcgcatttcagcggcggtaaaacttttcggctttgtaggcgttcaaaaaaaaccgaaaagaatacaggcgactaccccggaaggggttcattgatcaaccactcgttatattatctatttttgatattcttttaaaaagtcttccgacaaatcgacgccacggggagaacagtatgtcagctatcacttctgccatctgttccgcagtgtttcagtggcaaccttcggaatcgcgaagtcaggactgttttccggtatcatggaatgagggttgaaactatttcatctaggatgaacctccgtggcatagcaccctgcagcactcggatttccaacatgtctgcggaaacggttctggaacacaatgcagttgtgtgccactctcgatatctaatcaagatagttacgttgttgcaattatgatgcataacggtccgacctggaagactcgtggtgcctcgattttagtctgtcactgtttcctaatgcgatgctcgtagcacgcataatttttttctttagatgagagtttcacttcttcaagggctttggttggtttggagtgtttatctttggtggcttcgggtgtactggcatcgagggcagctcaatcgagcctgtgtctctttcatgatttgctacgacattcctattcgatatagttcacaatttgatagcattgaggcgtggtggaattggggaaactggttcattggtgtcctttgtatacctcgagatcacccgaagagtgatcaaatgtcatgctggaggacaggtgataatcggcaaggagggctgggaatgcgtccggttcatcagataggagggcataggcataggctgtgattgcaaacctgtatggaatcactacatatatacatatgcgggcagcgattttcaagtgcaagacaatcctatgccataatacccatctacaaacatttggctggcttcatctcaaaagtgattaagtacgcatattggggtcgttt

SEQ ID NO: 33098 - DNA, 5190 bp, Muscodor strobelii
  misc_feature: SGI cDNA ID NO. 571410
  misc_feature: Encodes the peptide sequence at SEQ ID NO 33099
atggagcccgcctttactcctacggagatggtattacccagcagtgtggacttcctctgggccgaagcccgaaccctcttcctcgccggcttgtcgtcgagacagcaggagaaggaggccctgcgcgataccaccggaaccctggataacacgatcacctccttaaagatcgcacaggagcgcgcgtctaattccttcggcgataagttcaagggcacgcccatcgagttcaacttaggccgggcgctgaagagactggagctgattctcaacctcggcgacaacgccatgaaatttgcgcccgaatcggcgagctacgtctgggctgcttttcggatgatcctcagcggcgtaaccgctaatctagagacatgcgagttcatttccggcgctatcgatcagatgagcgatacgctcttcatctgccaagtctatgcccgccgtcagatgaaacgtctgtacataactacttcggagaccaagttattggccgatagggttctggggaagattcccgtcctcctggctcttgttttgaagttttcgtacgagacgcgcaagttgctcgtcgataagggcaaaattagtcggatgatgtctattcttcttggtcgctctgaggagctgaagggcatcgtcaaagacgcccaagcgcagtccgacgaactccatcgcctggtcgacgcggcctttcaggatgctgcaatggatgtgttcgaagccattcatatcgatacgcaaggtttgagggatctggtgcaagaatccaacgaggaagtcttacgagccgtgcgcgaagctgctgacaagaccgaccagctggcacctgcgatcaaggccatccagaatgagcacgaaagaaagcgggagctgcacgatctcgataccgactgggacaatcaacggtcctggctgcgctccggacacccagccgagaagcaactactggcagagatgctacgagacaacctccgctcacgccatgtcggaacatgcagctggatttttgaaaccgacgagttcaaaacttgggccgctgatggccaaggaacaaacaaacgtctcctgcgggtcattggcgaggcgggctttggcaagtcagtcctgatgtcctccgtcatagagtggctccagagtcgcgagcctgaggaaggggagcaacgtcagcagcctatggtcctgacgttcttctgcaagactggtgacgacgcactccagaacggaaatcagatcatgctcagtctgctgttgcagctgtttgaatgggctgatattgccgatcgcgattcgagcgagaccaaggcagatgaaaaaatacgggattggatcaaccgtaagcgtgcgtgtgtcaatctgatcatcgaggcccgaaacaaatcaaaagatggcaacacaatcacctttcaggactttcaggtgaaatccggtatggccccgctgctatgcagcctggcccggagactcagcgagtcgggcgcaggagaggctcctcgaactgtctacattgtcgtcgatgccctggacgaatgtgtcgatcgtggcaacggcctttgcgatgcgctcatacaagtagccgagacggttggcgtcaacgcgcgcgtcatcgtgtcttcgcgtccgtacaaggacattcaaacagcctttcaggggtatgggcctacttgtattgagctctcaaaggccacgaatgccaaagatgtaaacgcctatgttgcagcctcgctgtcgcaagtcagacgcttttcagcgcagcagaaaaagacagctctaaagacgattgccaagagagcggatggcatgtttagatacgccaacttggctgttgaaagtctcaagaagactgctgcactgaacatcagagctgaagacgttatcaaagacctgcccacaggactcagcggtctctactatcaacaactccaggcattggacgagcaaactcgccaagttctcctcgttgcaatacgctgggccatttgcggagagggcaagataagtgccgaggtagtggcagatgagctagagaataagtattttctggcagacgagcacgagatgagcagtaaaggggcccaaaggattgatgatagtgaggatgaaaccgatgacgaaaccagcgccgacagcgaagagaatgagaaagagaaagataaggagcaggataaagatacagaacgcgacgcaatcgtgcgtcttaaggctgtggatcgcaatttcctcaactttgacgagtggaataacctcgctctccaacacaagtcggtacaggactacatagagagcctcaaaacgtctctagacgacgaggagaaactctgtagacgctgccaggagcgatacgggagcgctgtcgtgatccacgcgtctggtcagaaatatggacatctgaacatggctctgtacagcgtccgcatgctcaacagcagctcttttcggcgcaaattcttcgttgatgacgcaaacaagggaatccctataaccgacgctactcagtttaacccgtcagtcgaccaacgccggatgatcaccaggaacggcataactgcgtggtcgaccgaccagtcagagatgatccatacactcgcaagaattgtaggaggccgccgcggggaagggccggtgcttgatactgcctcacttcacacggacgctacgttagagcggccaaagatcaatgtcgggggcaacacttcgactagtgacgagttgaggtatgagctgacgcattggcactaccacgtgcgtgaggccgagcgacattggtcgaccacagctgaccgagagtcggacaaatgggacaggctcttcagcgagatcgacacgctgttcgccgacagaaattctttggacacctggcagcgactcatcgcacctcgggagacagtcgtcaaagcgcccgatacacctgtacacatcgctgcacgattcggcatcatgcattatctccgccgctacgtcgaggaagagaaaggcgacgtcgatgcccagaacgaaaatggctcgacattgctacacctcgcttgtctcgacacgggcggatttctcggtgtcaaactgctggtcgaacatggggccagcgtcaacgcattcgagtcggacacggtaggaggcggcacgcccttccataatctcgtccgttctggaggcgatcctgacttgattcggtacatgatggcacacggagcggacccgactctacgaacgcgggacaaagagggagccacgccgcttcacctcgccgttctcgcgcgtaacataaagattgtccaggctctactcgagttcaacgaggacggaagaccgcgggtcgacgtaaatgcaccggataacgccggcgagacagcactgcacggtcttttcaaatggccagctgcgcccgagaagctactgcgcatgctgctcgatcacggcgccgacgtcaacgtccaagaccgggacagccaggctccactctacgaggcgacgctgacggacaacgtggcagcagcaagtatcctgcttgagaaaggcgccgacgtgaacgatctcgaggaggtctacggccggacggccctgcacgaggcgtgcgatctcaagagcgccgacatggttcgcgttctcctggacgcgggggccgatcccctcatccgagataaggcgttgcgtaattgtctgagcatcgccacgtacaggaaggacatggccattttggagactctgacagacgtcgtcgtggcgagattcggaccagcgtcgggttgcgacgatgccgcatctgctgccgccgcgactagtttcgccaagaaagatatacggggagaaacgccgctgcacgtagcagcctcgcacggacaagtagccatggtcgtgaagctcctcgcggccgccaccgaggttggaagcgtcgatatcggtgctcttgttacatcgagaaacgagcacgggaatacgccactccactcggctgcggcgcgtggctatgccgagaccgttgatatcctgctatcacacggcgcagacgtgcacataggaaacggcaacaacaccgaggggcgaggcgcttcggcgcttgacttggcaatctccttttggcggacgcgcggcctgcttgataatacgggcggaccacccgacgacgacgggtgcgagtattcgtatccccaccgcgccgtcaagctgttggtcgagaataaggcgacggtggaggacccggggctggctcggcagcttatagacgtggcgattgagacctcgtcggtggatatctgtcaatggttgctggagagtcttggggacgacggccatgacgtcgcggacaggacggatcgccacggctggactccgcttatgcttgcgatccaggcgaagaagacggaccttgtcgtgttgcttcgtcctcgtgatgcccagggactgctggagaagctggaggtggaggtaggtggcgaacagggattcgtggcaggtctgctaccgacccggctggatgcggatatgcacacaactggcaaagatcttcggcctcttgtctctttttcagaggatgggttggttgttactcgctcgaatacttccactcgatatctcccaccgctgaagcggggcggacaagaagtaattatcgctgacactgtgttcttggatggaatattagacggcagtcaaagaacactcatccgggcggatcatccgataccattcaatgcttcgcgattctactttgagataactcttctcgaagttcagtatgcgcgatgcgtggtgagtataggtatagcgtcgcggtatacgaaactggacatccatccgggctggggccaaggaatgggaccctcgttcgggtaccattcggacgacggcggagcgttcagctatcgggacggcggggaaaagatggaggaacgacttggcggcccgtcttacagcgcggctgataccgttggatgcggtgttgactttgggagggcgacgatcttctatacgaagaatggaagtttgataggcgacgcaccgtatgaccttgaaagcggtcggtggttccccgccatcggcctaggcgacgaagatctcgtcgtacgtgctaactttggtcaagacccaggcgtgccgttcgagtatgatcctagcagctacgggactgaggacgcaccgcccgatgggtttagccatgaggcatttaccaataatgcctcgggttgtttggtgatgtaa

SEQ ID NO: 33099 - protein, 1729 aa, Muscodor strobelii
  misc_feature: SGI Peptide ID NO. 571410
  misc_feature (1307)..(1339): Pfam Id: PF00023 Pfam Desc: Ankyrin repeat
  misc_feature (1180)..(1212): Pfam Id: PF00023 Pfam Desc: Ankyrin repeat
  misc_feature (1072)..(1110): Pfam Id: PF00023 Pfam Desc: Ankyrin repeat
  misc_feature (1265)..(1297): Pfam Id: PF00023 Pfam Desc: Ankyrin repeat
  misc_feature (1562)..(1693): Pfam Id: PF00622 Pfam Desc: SPRY domain
  misc_feature (999)..(1032): Pfam Id: PF00023 Pfam Desc: Ankyrin repeat
  misc_feature (544)..(1699): NCBI GI: 154290345 Blast Desc: BC1G_15803 [Botryotinia fuckeliana B05.10] gi|150847787|gb|EDN22980.1| BC1G_15803 [Botryotinia fuckeliana B05.10]
  misc_feature (83)..(1699): NCBI GI: 171677754 Blast Desc: protein product [Podospora anserina] gi|170936945|emb|CAP61604.1| protein product [Podospora anserina]
  misc_feature (904)..(1503): NCBI GI: 169623941 Blast Desc: SNOG_15219 [Phaeosphaeria nodorum SN15] gi|160705081|gb|EAT77444.2| SNOG_15219 [Phaeosphaeria nodorum SN15]
  misc_feature (15)..(345): NCBI GI: 154290345 Blast Desc: BC1G_15803 [Botryotinia fuckeliana B05.10] gi|150847787|gb|EDN22980.1| BC1G_15803 [Botryotinia fuckeliana B05.10]
  misc_feature (968)..(1353): NCBI GI: 225849928 Blast Desc: pfs, nacht and ankyrin domain protein [Persephonella marina EX-H1] gi|225646310|gb|ACO04496.1| pfs, nacht and ankyrin domain protein [Persephonella marina EX-H1]
  misc_feature (968)..(1462): NCBI GI: 189502738 Blast Desc: Aasi_1435 [Candidatus Amoebophilus asiaticus 5a2] gi|189498179|gb|ACE06726.1| Aasi_1435 [Candidatus Amoebophilus asiaticus 5a2]
  misc_feature (968)..(1340): NCBI GI: 123437955 Blast Desc: ankyrin repeat protein [Trichomonas vaginalis G3] gi|121891508|gb|EAX96837.1| ankyrin repeat protein, [Trichomonas vaginalis G3]
  misc_feature (968)..(1353): NCBI GI: 189502738 Blast Desc: Aasi_1435 [Candidatus Amoebophilus asiaticus 5a2] gi|189498179|gb|ACE06726.1| Aasi_1435 [Candidatus Amoebophilus asiaticus 5a2]
  misc_feature (968)..(1463): NCBI GI: 119720190 Blast Desc: ankyrin [Thermofilum pendens Hrk 5] gi|119525310|gb|ABL78682.1| Ankyrin [Thermofilum pendens Hrk 5]
  misc_feature (943)..(1457): NCBI GI: 157106389 Blast Desc: ankyrin 2,3/unc44 [Aedes aegypti] gi|108868849|gb|EAT33074.1| ankyrin 2,3/unc44 [Aedes aegypti]
MEPAFTPTEMVLPSSVDFLWAEARTLFLAGLSSRQQEKEALRDTTGTLDNTITSLKIAQERASNSFGDKFKGTPIEFNLGRALKRLELILNLGDNAMKFAPESASYVWAAFRMILSGVTANLETCEFISGAIDQMSDTLFICQVYARRQMKRLYITTSETKLLADRVLGKIPVLLALVLKFSYETRKLLVDKGKISRMMSILLGRSEELKGIVKDAQAQSDELHRLVDAAFQDAAMDVFEAIHIDTQGLRDLVQESNEEVLRAVREAADKTDQLAPAIKAIQNEHERKRELHDLDTDWDNQRSWLRSGHPAEKQLLAEMLRDNLRSRHVGTCSWIFETDEFKTWAADGQGTNKRLLRVIGEAGFGKSVLMSSVIEWLQSREPEEGEQRQQPMVLTFFCKTGDDALQNGNQIMLSLLLQLFEWADIADRDSSETKADEKIRDWINRKRACVNLIIEARNKSKDGNTITFQDFQVKSGMAPLLCSLARRLSESGAGEAPRTVYIVVDALDECVDRGNGLCDALIQVAETVGVNARVIVSSRPYKDIQTAFQGYGPTCIELSKATNAKDVNAYVAASLSQVRRFSAQQKKTALKTIAKRADGMFRYANLAVESLKKTAALNIRAEDVIKDLPTGLSGLYYQQLQALDEQTRQVLLVAIRWAICGEGKISAEVVADELENKYFLADEHEMSSKGAQRIDDSEDETDDETSADSEENEKEKDKEQDKDTERDAIVRLKAVDRNFLNFDEWNNLALQHKSVQDYIESLKTSLDDEEKLCRRCQERYGSAVVIHASGQKYGHLNMALYSVRMLNSSSFRRKFFVDDANKGIPITDATQFNPSVDQRRMITRNGITAWSTDQSEMIHTLARIVGGRRGEGPVLDTASLHTDATLERPKINVGGNTSTSDELRYELTHWHYHVREAERHWSTTADRESDKWDRLFSEIDTLFADRNSLDTWQRLIAPRETVVKAPDTPVHIAARFGIMHYLRRYVEEEKGDVDAQNENGSTLLHLACLDTGGFLGVKLLVEHGASVNAFESDTVGGGTPFHNLVRSGGDPDLIRYMMAHGADPTLRTRDKEGATPLHLAVLARNIKIVQALLEFNEDGRPRVDVNAPDNAGETALHGLFKWPAAPEKLLRMLLDHGADVNVQDRDSQAPLYEATLTDNVAAASILLEKGADVNDLEEVYGRTALHEACDLKSADMVRVLLDAGADPLIRDKALRNCLSIATYRKDMAILETLTDVVVARFGPASGCDDAASAAAATSFAKKDIRGETPLHVAASHGQVAMVVKLLAAATEVGSVDIGALVTSRNEHGNTPLHSAAARGYAETVDILLSHGADVHIGNGNNTEGRGASALDLAISFWRTRGLLDNTGGPPDDDGCEYSYPHRAVKLLVENKATVEDPGLARQLIDVAIETSSVDICQWLLESLGDDGHDVADRTDRHGWTPLMLAIQAKKTDLVVLLRPRDAQGLLEKLEVEVGGEQGFVAGLLPTRLDADMHTTGKDLRPLVSFSEDGLVVTRSNTSTRYLPPLKRGGQEVIIADTVFLDGILDGSQRTLIRADHPIPFNASRFYFEITLLEVQYARCVVSIGIASRYTKLDIHPGWGQGMGPSFGYHSDDGGAFSYRDGGEKMEERLGGPSYSAADTVGCGVDFGRATIFYTKNGSLIGDAPYDLESGRWFPAIGLGDEDLVVRANFGQDPGVPFEYDPSSYGTEDAPPDGFSHEAFTNNASGCLVM

SEQ ID NO: 33100 - DNA, 4901 bp, Muscodor strobelii
  misc_feature: SGI EST ID NO. CUFF.78231.1
  misc_feature: Variant of the nucleotide sequence at SEQ ID NO 33098
ttttgaagttttcgtacgagacgcgcaagttgctcgtcgataagggcaaaattagtcggatgatgtctattcttcttggtcgctctgaggagctgaagggcatcgtcaaagacgcccaagcgcagtccgacgaactccatcgcctggtcgacgcggcctttcaggatgctgcaatggatgtgttcgaagccattcatatcgatacgcaaggtttgagggatctggtgcaagaatccaacgaggaagtcttacgagccgtgcgcgaagctgctgacaagaccgaccagctggcacctgcgatcaaggccatccagaatgagcacgaaagaaagcgggagctgcacgatctcgataccgactgggacaatcaacggtcctggctgcgctccggacacccagccgagaagcaactactggcagagatgctacgagacaacctccgctcacgccatgtcggaacatgcagctggatttttgaaaccgacgagttcaaaacttgggccgctgatggccaaggaacaaacaaacgtctcctgcgggtcattggcgaggcgggctttggcaagtcagtcctgatgtcctccgtcatagagtggctccagagtcgcgagcctgaggaaggggagcaacgtcagcagcctatggtcctgacgttcttctgcaagactggtgacgacgcactccagaacggaaatcagatcatgctcagtctgctgttgcagctgtttgaatgggctgatattgccgatcgcgattcgagcgagaccaaggcagatgaaaaaatacgggattggatcaaccgtaagcgtgcgtgtgtcaatctgatcatcgaggcccgaaacaaatcaaaagatggcaacacaatcacctttcaggactttcaggtgaaatccggtatggccccgctgctatgcagcctggcccggagactcagcgagtcgggcgcaggagaggctcctcgaactgtctacattgtcgtcgatgccctggacgaatgtgtcgatcgtggcaacggcctttgcgatgcgctcatacaagtagccgagacggttggcgtcaacgcgcgcgtcatcgtgtcttcgcgtccgtacaaggacattcaaacagcctttcaggggtatgggcctacttgtattgagctctcaaaggccacgaatgccaaagatgtaaacgcctatgttgcagcctcgctgtcgcaagtcagacgcttttcagcgcagcagaaaaagacagctctaaagacgattgccaagagagcggatggcatgtttagatacgccaacttggctgttgaaagtctcaagaagactgctgcactgaacatcagagctgaagacgttatcaaagacctgcccacaggactcagcggtctctactatcaacaactccaggcattggacgagcaaactcgccaagttctcctcgttgcaatacgctgggccatttgcggagagggcaagataagtgccgaggtagtggcagatgagctagagaataagtattttctggcagacgagcacgagatgagcagtaaaggggcccaaaggattgatgatagtgaggatgaaaccgatgacgaaaccagcgccgacagcgaagagaatgagaaagagaaagataaggagcaggataaagatacagaacgcgacgcaatcgtgcgtcttaaggctgtggatcgcaatttcctcaactttgacgagtggaataacctcgctctccaacacaagtcggtacaggactacatagagagcctcaaaacgtctctagacgacgaggagaaactctgtagacgctgccaggagcgatacgggagcgctgtcgtgatccacgcgtctggtcagaaatatggacatctgaacatggctctgtacagcgtccgcatgctcaacagcagctcttttcggcgcaaattcttcgttgatgacgcaaacaagggaatccctataaccgacgctactcagtttaacccgtcagtcgaccaacgccggatgatcaccaggaacggcataactgcgtggtcgaccgaccagtcagagatgatccatacactcgcaagaattgtaggaggccgccgcggggaagggccggtgcttgatactgcctcacttcacacggacgctacgttagagcggccaaagatcaatgtcgggggcaacacttcgactagtgacgagttgaggtatgagctgacgcattggcactaccacgtgcgtgaggccgagcgacattggtcgaccacagctgaccgagagtcggacaaatgggacaggctcttcagcgagatcgacacgctgttcgccgacagaaattctttggacacctggcagcgactcatcgcacctcgggagacagtcgtcaaagcgcccgatacacctgtacacatcgctgcacgattcggcatcatgcattatctccgccgctacgtcgaggaagagaaaggcgacgtcgatgcccagaacgaaaatggctcgacattgctacacctcgcttgtctcgacacgggcggatttctcggtgtcaaactgctggtcgaacatggggccagcgtcaacgcattcgagtcggacacggtaggaggcggcacgcccttccataatctcgtccgttctggaggcgatcctgacttgattcggtacatgatggcacacggagcggacccgactctacgaacgcgggacaaagagggagccacgccgcttcacctcgccgttctcgcgcgtaacataaagattgtccaggctctactcgagttcaacgaggacggaagaccgcgggtcgacgtaaatgcaccggataacgccggcgagacagcactgcacggtcttttcaaatggccagctgcgcccgagaagctactgcgcatgctgctcgatcacggcgccgacgtcaacgtccaagaccgggacagccaggctccactctacgaggcgacgctgacggacaacgtggcagcagcaagtatcctgcttgagaaaggcgccgacgtgaacgatctcgaggaggtctacggccggacggccctgcacgaggcgtgcgatctcaagagcgccgacatggttcgcgttctcctggacgcgggggccgatcccctcatccgagataaggcgttgcgtaattgtctgagcatcgccacgtacaggaaggacatggccattttggagactctgacagacgtcgtcgtggcgagattcggaccagcgtcgggttgcgacgatgccgcatctgctgccgccgcgactagtttcgccaagaaagatatacggggagaaacgccgctgcacgtagcagcctcgcacggacaagtagccatggtcgtgaagctcctcgcggccgccaccgaggttggaagcgtcgatatcggtgctcttgttacatcgagaaacgagcacgggaatacgccactccactcggctgcggcgcgtggctatgccgagaccgttgatatcctgctatcacacggcgcagacgtgcacataggaaacggcaacaacaccgaggggcgaggcgcttcggcgcttgacttggcaatctccttttggcggacgcgcggcctgcttgataatacgggcggaccacccgacgacgacgggtgcgagtattcgtatccccaccgcgccgtcaagctgttggtcgagaataaggcgacggtggaggacccggggctggctcggcagcttatagacgtggcgattgagacctcgtcggtggatatctgtcaatggttgctggagagtcttggggacgacggccatgacgtcgcggacaggacggatcgccacggctggactccgcttatgcttgcgatccaggcgaagaagacggaccttgtcgtgttgcttcgtcctcgtgatgcccagggactgctggagaagctggaggtggaggtaggtggcgaacagggattcgtggcaggtctgctaccgacccggctggatgcggatatgcacacaactggcaaagatcttcggcctcttgtctctttttcagaggatgggttggttgttactcgctcgaatacttacggcagtcaaagaacactcatccgggcggatcatccgataccattcaatgcttcgcgattctactttgagataactcttctcgaagttcagtatgcgcgatgcgtggtgagtataggtatagcgtcgcggtatacgaaactggacatccatccgggctggggccaaggaatgggaccctcgttcgggtaccattcggacgacggcggagcgttcagctatcgggacggcggggaaaagatggaggaacgacttggcggcccgtcttacagcgcggctgataccgttggatgcggtgttgactttgggagggcgacgatcttctatacgaagaatggaagtttgataggcgacgcaccgtatgaccttgaaagcggtcggtggttccccgccatcggcctaggcgacgaagatctcgtcgtacgtgctaactttggtcaagacccaggcgtgccgttcgagtatgatcctagcagctacgggactgaggacgcaccgcccgatgggtttagccatgaggcatttaccaataatgcctcgggttgtttggtgatgtaagacgtagagccacaatgtaccactcaaatacgggggcctggcaaatcagacatttgtaatgatacatgccccgtcggaattgagaacgattccgcgaatttggtccccataactaccaaatcttcagaggaagagatgtctatagagatagtggaagcctgacccaagtctcctgacttgtcaaggcagggcaaatactattatctaaggaaagcctgtttctacatacgcaaatataccgttaacaatataaggtttttaatagtataaaatcaataagttgatgactcttagagttcggactattaaacgagccgattatag

SEQ ID NO: 33101 - DNA, 4341 bp, Muscodor strobelii
  misc_feature: SGI cDNA ID NO. 571411
  misc_feature: Encodes the peptide sequence at SEQ ID NO 33102
atgtctgactctccaagtgacggtgctcaaggcacgccgaggcgacaaagagctcctacaataacgatagacactactaatgacagcgagccaccgcctttaaatgctgctcctcgctcgccagcctcgcccgctgaggaaacagctagtcccactactttggcagcgagctggagctcatctgagagaactgctgttccgacaggatcccagccaaccacgtcagccccgcaccaccacgaaatgcgagcttcacactcgttcgatagtaaggatagtcggcctacgagtccgcacaatgtgtctagcccgattacctcccgaggtaacgagaagggacaagcgttcctggcagtcccgacgaatcatcgatcacgccagaactcggtagacagcgatgacggagccagatcggtgtcctcccaaggcgaaaccgtcacggcgacaacatcatggcagggcgaaaaaggaggatcgaggacacctcatgacaatggccacatcaccaacgacgacaacgcattatcacccgacaagggtcaagaagctgatttcgaggtcgataataacccatttggatttagccctggccaactgacaaagatgttcaaccccaagagcttggcagctttctataaactcggcggtctcactgggttggaaaaggggttacggagcaatcgcgatgcgggattaagcatagacgaggtcaggttggatggaaatgtttcattcgaggaggcaactaatcgcgaaccttcaaaactcgcaaccgagggcgtctcgagtccaacaactccgataacgcctgttagacgcaggtccacaactttcagacagtcgtcccccgaagggttcgccgatcgaaaacgagtcttcaaagacaatcgactgcccgagaagaaaggaaagagcttcttacagctcgtatggataacctacaatgacaaggtactcatcctgttgactgcggcggcaatcgtgtcactggcaattggactgtaccagacgttcggtcaaccgcatccagcaggggagcccaagatcgactgggttgaaggagtcgccattattgttgccattgtgatcgtcgtgatagtaggatcgctcaatgactggcaaaaggagagacagtttgcgaagctcaataggaaaaaggatgaccgcattgtgaaagtcattcggtctgggaagacgatcgagatctcggttcacgatatcatggccggtgatgtgctccacctggaacctggagacctgttacctgttgatggcgtcctcatccaaggatttaacgtgaaatgtgatgagtcacaagccacgggcgagtcggacgtgatacgaaaacgaccggcagaggaagtcttcgcagcgatcgacaatggtgaagacccgaagaaactggaccctttcatacagtcaggaggtcgggttatggaaggtgttggcacattcatggcaacctcgactggtatctactccagttacggaaagacattaatgtcccttagtgaggaccccgaaatgacccctctgcaagcaaaacttaacgttattgccgaatacattgccaagcttggcggagctgctggtctcttgctgttcgtggcgctgttcatcgaattcctggttcatatcactggagagggcaaaagtcttagtggaccggcgaaagggcaaagttttatcagcattttcatcgtcgtggttactattatcgtcgttgcagtgcccgaaggactacccctggctgttacgcttgccttagctttcgcaaccaccaggatgctgaaggacaacaatctggttcgtcatttgaaggcgtgtgaagttatgggaaatgcgaccactatctgctcagacaagacgggaacactgacacaaaacaagatgaaagtcgtctcgggcacagttggcgtttctcaccggtttggggcttctgaagcaactgcagagccgaataaagattcgagcgaggcagagggaggtatgaccgagaagcaatttgcgacgaacctcagcaatggcgcacaagacctcttgcgcaagtctattgtcttgaactcgacggcattcgagggtgacaatggtggcgatatgccatttatcgggtccaagactgagactgctcttctgctctttgctagggagtggcttggcatggggcccgtcagtgaagaacgagcaaacggccagatcattcagatgatccccttcgattctggccgaaaatgcatgggggtggtcgcgaaactggataatggtggggctcgactctacgtgaagggtgcttcggaaatccttcttgcgaagtgcaccaaaattctctccgaccctaccaaagatctatctatttcgactatgaccaatgagcagactgagtcaatcaaggctgcgattgaacactacgcctctaagtcactgagaacgattggtatcgtctaccgagactttgaacgttggcctccacgaaatgccaagcgcactgaggacgatccaaatcaagttgcattcgaagacatctttcatagaatgagcttcattggcatggtgggcatccaagatcctcttcgcgatggtgtccctgaagccgtccgaacatgccagacagctggtgttgtcgttcgtatggtgacaggcgacaacgtaatgacagctaaggctattgccacagaatgcggtattctccagccggatgacatagtgatggagggtccggaattccgcaatcttagcaaatatgctcaaaacgaaatcatcccacgtctcagggtcctcgctcgctcaagcccagaagacaagcgcattcttgttcgtcgtctcaaggacaagggagaagttgttgctgttacgggcgatggtacgaatgacgcgcctgcactcaaattggcagatgttggtttctcaatgggcattaccggtactgaagtcgcaaaggaggcttcctcaatcattctcatggacgataatttcaccagtatcgtgaaagcattgaagtggggccgggctgtgaacgatgccgtgaagaagttcctccagtttcaagtcactgtcaacatcactgcagtggtaatcacattcgtatctgctgtgtcgaatcctgcccagcagaactccgtttttactgctgtccaacttctctgggtcaatttgatcatggacacgctggcggcacttgcgttggccactgatccaccacaggacagcgtgattcatcgcaaaccagaaccgaggaacgccagcattatctcgataacaatgtggaagatgattatcgggcaatccctctaccaactggtgattgtattcgtcctctactacgctgacctgggcgcactcaaccctggagcgcctcatgcagccgcgacgaatggaacgacaaacggaacgatgaatgaaatcactcctgatcctacagctaggacaactctggtgttcaacacattcgtgtggatgcagattttcaaccaatggaacaatcgtcggttggacaataacttcaacatctttgaaggccttactaaaaacttgttcttcttgggtatcaacttgattgtcagcggattacaagttctcatcatctttgtcggcggtgctgcgttttacatttatagcggaaagcagaatggcatacagtgggccgcggctattctcttggggctcgcttccgtgcctgtcggctttctgattcgactcgtccccgatgatttcatcagaaaatgtatccctaagtggttcaagcgcagacgcaacctccctggcgttaccgtttccgacgaggagcggttcaatcagctaccagaagttctcggcaatgttagaaatgaactcgccttcctcaagaggctcaagggtggccgactcaataacctcaagttcgcggtcaagcatcctcgcgagaccttcatgtccagaagtagaagcccgtctcattctcggtctaattccatgcggatcccacaaacaccaacgcgagaggacagcctaggagcagcatcattggcacatacgccagactcccgcaggcggtcacggtccatgagatcacgttcgaactccgcattgggagctcctacggtaatggctgggctgatcgctggtagcgtagctgctacttggtcacctgtggagaagggtcatgaacgggatgcttcgcagggctctatacaagctcctcgcccctcgccgtcgccactgtcttatcgacagggcagtggccttgaagacgcaccagttctaaccgaagagcccatggagatggaagaagcagatgcatctaccaacgtgccaaccttgcgtgtgccacagccaccttcacacaagcaaaaagctgtatcttag

SEQ ID NO: 33102 - protein, 1446 aa, Muscodor strobelii
  misc_feature: SGI Peptide ID NO. 571411
  misc_feature (615)..(974): Pfam Id: PF00702 Pfam Desc: haloacid dehalogenase-like hydrolase
  misc_feature (1073)..(1237): Pfam Id: PF00689 Pfam Desc: Cation transporting ATPase, C-terminus
  misc_feature (356)..(611): Pfam Id: PF00122 Pfam Desc: E1-E2 ATPase
  misc_feature (296)..(334): Pfam Id: PF00690 Pfam Desc: Cation transporter/ATPase, N-terminus
  misc_feature (478)..(611): Pfam Id: PF00122 Pfam Desc: E1-E2 ATPase
  misc_feature (356)..(457): Pfam Id: PF00122 Pfam Desc: E1-E2 ATPase
  misc_feature (14)..(1441): NCBI GI: 164426002 Blast Desc: NCU04736 [Neurospora crassa OR74A] gi|157071160|gb|EAA31135.2| NCU04736 [Neurospora crassa OR74A]
  misc_feature (54)..(1441): NCBI GI: 6688829 Blast Desc: calcium P-type ATPase [Neurospora crassa] gi|39979186|emb|CAE85558.1| calcium P-type ATPase NCA-2 [Neurospora crassa]
  misc_feature (15)..(1375): NCBI GI: 46135999 Blast Desc: FG09515.1 [Gibberella zeae PH-1]
  misc_feature (18)..(1381): NCBI GI: 256727697 Blast Desc: [Nectria haematococca mpVI 77-13-4]
  misc_feature (3)..(1439): NCBI GI: 171682054 Blast Desc: protein product [Podospora anserina] gi|170940986|emb|CAP66636.1| protein product [Podospora anserina]
  misc_feature (1)..(1437): NCBI GI: 156053001 Blast Desc: SS1G_06668 [Sclerotinia sclerotiorum 1980] gi|154704446|gb|EDO04185.1| SS1G_06668 [Sclerotinia sclerotiorum 1980]
  misc_feature (1)..(1437): NCBI GI: 154318435 Blast Desc: BC1G_03385 [Botryotinia fuckeliana B05.10] gi|150842908|gb|EDN18101.1| BC1G_03385 [Botryotinia fuckeliana B05.10]
  misc_feature (1)..(1442): NCBI GI: 145606180 Blast Desc: MGG_02487 [Magnaporthe grisea 70-15] gi|145013901|gb|EDJ98542.1| MGG_02487 [Magnaporthe grisea 70-15]
  misc_feature (14)..(1415): NCBI GI: 119184203 Blast Desc: CIMG_06925 [Coccidioides immitis RS]
  misc_feature (14)..(1415): NCBI GI: 240109807 Blast Desc: Calcium transporting P-type ATPase, [Coccidioides posadasii C735 delta SOWgp]
  misc_feature (85)..(1293): SWISSPROT Homolog: EC 3.6.3.8 Calcium-transporting ATPase
MSDSPSDGAQGTPRRQRAPTITIDTTNDSEPPPLNAAPRSPASPAEETASPTTLAASWSSSERTAVPTGSQPTTSAPHHHEMRASHSFDSKDSRPTSPHNVSSPITSRGNEKGQAFLAVPTNHRSRQNSVDSDDGARSVSSQGETVTATTSWQGEKGGSRTPHDNGHITNDDNALSPDKGQEADFEVDNNPFGFSPGQLTKMFNPKSLAAFYKLGGLTGLEKGLRSNRDAGLSIDEVRLDGNVSFEEATNREPSKLATEGVSSPTTPITPVRRRSTTFRQSSPEGFADRKRVFKDNRLPEKKGKSFLQLVWITYNDKVLILLTAAAIVSLAIGLYQTFGQPHPAGEPKIDWVEGVAIIVAIVIVVIVGSLNDWQKERQFAKLNRKKDDRIVKVIRSGKTIEISVHDIMAGDVLHLEPGDLLPVDGVLIQGFNVKCDESQATGESDVIRKRPAEEVFAAIDNGEDPKKLDPFIQSGGRVMEGVGTFMATSTGIYSSYGKTLMSLSEDPEMTPLQAKLNVIAEYIAKLGGAAGLLLFVALFIEFLVHITGEGKSLSGPAKGQSFISIFIVVVTIIVVAVPEGLPLAVTLALAFATTRMLKDNNLVRHLKACEVMGNATTICSDKTGTLTQNKMKVVSGTVGVSHRFGASEATAEPNKDSSEAEGGMTEKQFATNLSNGAQDLLRKSIVLNSTAFEGDNGGDMPFIGSKTETALLLFAREWLGMGPVSEERANGQIIQMIPFDSGRKCMGVVAKLDNGGARLYVKGASEILLAKCTKILSDPTKDLSISTMTNEQTESIKAAIEHYASKSLRTIGIVYRDFERWPPRNAKRTEDDPNQVAFEDIFHRMSFIGMVGIQDPLRDGVPEAVRTCQTAGVVVRMVTGDNVMTAKAIATECGILQPDDIVMEGPEFRNLSKYAQNEIIPRLRVLARSSPEDKRILVRRLKDKGEVVAVTGDGTNDAPALKLADVGFSMGITGTEVAKEASSIILMDDNFTSIVKALKWGRAVNDAVKKFLQFQVTVNITAVVITFVSAVSNPAQQNSVFTAVQLLWVNLIMDTLAALALATDPPQDSVIHRKPEPRNASIISITMWKMIIGQSLYQLVIVFVLYYADLGALNPGAPHAAATNGTTNGTMNEITPDPTARTTLVFNTFVWMQIFNQWNNRRLDNNFNIFEGLTKNLFFLGINLIVSGLQVLIIFVGGAAFYIYSGKQNGIQWAAAILLGLASVPVGFLIRLVPDDFIRKCIPKWFKRRRNLPGVTVSDEERFNQLPEVLGNVRNELAFLKRLKGGRLNNLKFAVKHPRETFMSRSRSPSHSRSNSMRIPQTPTREDSLGAASLAHTPDSRRRSRSMRSRSNSALGAPTVMAGLIAGSVAATWSPVEKGHERDASQGSIQAPRPSPSPLSYRQGSGLEDAPVLTEEPMEMEEADASTNVPTLRVPQPPSHKQKAVS

SEQ ID NO: 33103 - DNA, 5951 bp, Muscodor strobelii
  misc_feature: SGI EST ID NO. CUFF.78305.0
  misc_feature: Variant of the nucleotide sequence at SEQ ID NO 33101
ctccacgctctgcatgctctgctctgctcgcatccaatgcgaattcaccgctgtgtgtttggttcgacgctctgcttcttctcttcgtgatgataccctctaagctcttagtcattgtattctaactactgtacccttctcttctgtgccctccgttttcgacccaagggatgctgcgagctgcgagctgctaacctctgactcccgcgactcctcttcctcttcctggcatagcctgcgtgtcgttgtcacctcgctgccctcgcccacgcgtgccctgctgcgtagctgctgccgtattgtttccagctgctgcttgcccctagagtcctgcctctttggacaccatctgactggatacggagctgctaccgacccgtccgaagcccgatggaaccgactgcatagcctcacttcgcctctgcacggcgttctctacgcccaaagtctaacctgtctgggccccagcactgcatctgtctggtctgcccattcgaaaggccgctgcatctcccaatagcatcatatctggattcgttgacacacgtttggcatatgttcggttctgcgtacgcaaagatcgcgtatgggacacgtttggttggacaaccggtgattacgtttacgcaaagctatcaatagcattttcgacattgacgaccgcctgcctagcaaaccacggcggactgagtattgactcgcatcgtcagagcttgtttcccacgactgtcgacgcattgacctggattcacaaagtctacgaatatcagttaatgatccatatttaattttgtcaatcgccaattttcagacttgcctcctggccaataatattagtcccacttctctaccatatctcgatggcaaagctgccaaacgacaaccacgacaactccgggaacggtatttaagatgtctgactctccaagtgacggtgctcaaggcacgccgaggcgacaaagagctcctacaataacgatagacactactaatgacagcgagccaccgcctttaaatgctgctcctcgctcgccagcctcgcccgctgaggaaacagctagtcccactactttggcagcgagctggagctcatctgagagaactgctgttccgacaggatcccagccaaccacgtcagccccgcaccaccacgaaatgcgagcttcacactcgttcgatagtaaggatagtcggcctacgagtccgcacaatgtgtctagcccgattacctcccgaggtaacgagaagggacaagcgttcctggcagtcccgacgaatcatcgatcacgccagaactcggtagacagcgatgacggagccagatcggtgtcctcccaaggcgaaaccgtcacggcgacaacatcatggcagggcgaaaaaggaggatcgaggacacctcatgacaatggccacatcaccaacgacgacaacgcattatcacccgacaagggtcaagaagctgatttcgaggtcgataataacccatttggatttagccctggccaactgacaaagatgttcaaccccaagagcttggcagctttctataaactcggcggtctcactgggttggaaaaggggttacggagcaatcgcgatgcgggattaagcatagacgaggtcaggttggatggaaatgtttcattcgaggaggcaactaatcgcgaaccttcaaaactcgcaaccgagggcgtctcgagtccaacaactccgataacgcctgttagacgcaggtccacaactttcagacagtcgtcccccgaagggttcgccgatcgaaaacgagtcttcaaagacaatcgactgcccgagaagaaaggaaagagcttcttacagctcgtatggataacctacaatgacaaggtactcatcctgttgactgcggcggcaatcgtgtcactggcaattggactgtaccagacgttcggtcaaccgcatccagcaggggagcccaagatcgactgggttgaaggagtcgccattattgttgccattgtgatcgtcgtgatagtaggatcgctcaatgactggcaaaaggagagacagtttgcgaagctcaataggaaaaaggatgaccgcattgtgaaagtcattcggtctgggaagacgatcgagatctcggttcacgatatcatggccggtgatgtgctccacctggaacctggagacctgttacctgttgatggcgtcctcatccaaggatttaacgtgaaatgtgatgagtcacaagccacgggcgagtcggacgtgatacgaaaacgaccggcagaggaagtcttcgcagcgatcgacaatggtgaagacccgaagaaactggaccctttcatacagtcaggaggtcgggttatggaaggtgttggcacattcatggcaacctcgactggtatctactccagttacggaaagacattaatgtcccttagtgaggaccccgaaatgacccctctgcaagcaaaacttaacgttattgccgaatacattgccaagcttggcggagctgctggtctcttgctgttcgtggcgctgttcatcgaattcctggttcatatcactggagagggcaaaagtcttagtggaccggcgaaagggcaaagttttatcagcattttcatcgtcgtggttactattatcgtcgttgcagtgcccgaaggactacccctggctgttacgcttgccttagctttcgcaaccaccaggatgctgaaggacaacaatctggttcgtcatttgaaggcgtgtgaagttatgggaaatgcgaccactatctgctcagacaagacgggaacactgacacaaaacaagatgaaagtcgtctcgggcacagttggcgtttctcaccggtttggggcttctgaagcaactgcagagccgaataaagattcgagcgaggcagagggaggtatgaccgagaagcaatttgcgacgaacctcagcaatggcgcacaagacctcttgcgcaagtctattgtcttgaactcgacggcattcgagggtgacaatggtggcgatatgccatttatcgggtccaagactgagactgctcttctgctctttgctagggagtggcttggcatggggcccgtcagtgaagaacgagcaaacggccagatcattcagatgatccccttcgattctggccgaaaatgcatgggggtggtcgcgaaactggataatggtggggctcgactctacgtgaagggtgcttcggaaatccttcttgcgaagtgcaccaaaattctctccgaccctaccaaagatctatctatttcgactatgaccaatgagcagactgagtcaatcaaggctgcgattgaacactacgcctctaagtcactgagaacgattggtatcgtctaccgagactttgaacgttggcctccacgaaatgccaagcgcactgaggacgatccaaatcaagttgcattcgaagacatctttcatagaatgagcttcattggcatggtgggcatccaagatcctcttcgcgatggtgtccctgaagccgtccgaacatgccagacagctggtgttgtcgttcgtatggtgacaggcgacaacgtaatgacagctaaggctattgccacagaatgcggtattctccagccggatgacatagtgatggagggtccggaattccgcaatcttagcaaatatgctcaaaacgaaatcatcccacgtctcagggtcctcgctcgctcaagcccagaagacaagcgcattcttgttcgtcgtctcaaggacaagggagaagttgttgctgttacgggcgatggtacgaatgacgcgcctgcactcaaattggcagatgttggtttctcaatgggcattaccggtactgaagtcgcaaaggaggcttcctcaatcattctcatggacgataatttcaccagtatcgtgaaagcattgaagtggggccgggctgtgaacgatgccgtgaagaagttcctccagtttcaagtcactgtcaacatcactgcagtggtaatcacattcgtatctgctgtgtcgaatcctgcccagcagaactccgtttttactgctgtccaacttctctgggtcaatttgatcatggacacgctggcggcacttgcgttggccactgatccaccacaggacagcgtgattcatcgcaaaccagaaccgaggaacgccagcattatctcgataacaatgtggaagatgattatcgggcaatccctctaccaactggtgattgtattcgtcctctactacgctgacctgggcgcactcaaccctggagcgcctcatgcagccgcgacgaatggaacgacaaacggaacgatgaatgaaatcactcctgatcctacagctaggacaactctggtgttcaacacattcgtgtggatgcagattttcaaccaatggaacaatcgtcggttggacaataacttcaacatctttgaaggccttactaaaaacttgttcttcttgggtatcaacttgattgtcagcggattacaagttctcatcatctttgtcggcggtgctgcgttttacatttatagcggaaagcagaatggcatacagtgggccgcggctattctcttggggctcgcttccgtgcctgtcggctttctgattcgactcgtccccgatgatttcatcagaaaatgtatccctaagtggttcaagcgcagacgcaacctccctggcgttaccgtttccgacgaggagcggttcaatcagctaccagaagttctcggcaatgttagaaatgaactcgccttcctcaagaggctcaagggtggccgactcaataacctcaagttcgcggtcaagcatcctcgcgagaccttcatgtccagaagtagaagcccgtctcattctcggtctaattccatgcggatcccacaaacaccaacgcgagaggacagcctaggagcagcatcattggcacatacgccagactcccgcaggcggtcacggtccatgagatcacgttcgaactccgcattgggagctcctacggtaatggctgggctgatcgctggtagcgtagctgctacttggtcacctgtggagaagggtcatgaacgggatgcttcgcagggctctatacaagctcctcgcccctcgccgtcgccactgtcttatcgacagggcagtggccttgaagacgcaccagttctaaccgaagagcccatggagatggaagaagcagatgcatctaccaacgtgccaaccttgcgtgtgccacagccaccttcacacaagcaaaaagctgtatcttaggcagatcaagcatctacaaagaaactcaaaatatcgtgattcgatgcatcggtagactcaggtcaccgtttgggtgcattcctagtcgcgcgtcccccccttgagcccttccaggcctcactccggattccgataatatcatcggtgtctaccacccgatcgcccgccacggagcacgttacttcggctaaggcaggacacccccgctttacaatcgctgtcccaggcagacgtgtatggtcgagcatacgcttcagcccagtcgagcaaagaacccggttcatgtttcactgtgtctcctgttagctcgatcgtataatgttaccaagcactaagcctgtggcgatacctcaaataggctgggtcggaagataaggccaccgcagggattccagagcaaagggattattcatcagcagaagtcgacataaacttgatctaatggaggatgtctagatcctaccctcactaccaagcagcaaagcgaagcctttcgtttaatattcccgtgttcacttctttatgtacctcactaccacacttctaaacaaaattccgctttgggttgttttcggcgcgaggggctcgcatggggctagaggtagcccagatagacaattgagtctcagactcttgtgacaatgcatatctacttgcatgcaatataaaaaaattaaaaaaagtgttagaaatctgag

SEQ ID NO: 33104 - DNA, 1677 bp, Muscodor strobelii
  misc_feature: SGI cDNA ID NO. 571412
  misc_feature: Encodes the peptide sequence at SEQ ID NO 33105
atgaagggcgtgctcaagcccaagaagcccacgaaacgtggcaaagagcgcaaaccttacaccaggagacctcaaccccctccaatccctgactatcgtcctccaccagatgccttcaatcatcaacacatcacccctgtcgtcgacgaccagcaagtaggacatctccccttgccgcaaccccatcatggtgatgtatcagaacttcaggacagagtgaatgaccttggagattcgtgggagaccgagtcaattttcgaagacatcgtggacgactcaacctatgacacgtttccgcaagaagtagatgcttgcacgccagcgcaatctgctgcttaccgccaagaattgcgtgcaatcggacctgatgagttttgcgagaggcacatagactctggtaacatcacagtgaagaaattactgacagcctttggcatcaagccccctgcctttcttgagggaatgcccgacgaatcatacctaagcctactcacgctggccatgactagggagctcactaagagagcaaagatcatgcggtacaattccgtcgatgacgcggtttctctgctccagcgatcgcgcaacatcatggtgttgacaggtgcaggtatttccacatctctgggcattcccgatttccgttctaaggagactggtctctattcacaattggagaagcttggattgggggtcaacgacccgcaggaagtcttcaacatcgacgtgttccgtgacgacccaaccattttctacacagtggccaaagacattttgcccaacaccaaaaagttctcacctacgcatgccttcatcgcccttctacaaaatcaagggaagcttctcactaactattcccaaaacattgacaacctggaggccaatgctggcattagcccggacaaactcgtacagtgccacggctcatttgctactgccacttgccaggcatgtggccacaaagtgtgtggtgatgctatctttggagatgtcaaagctggtaagattcctcgctgcccgaaatgcattgccgcattgcgaaagaggggtctgggtccccttaagcgtaagaggtctagcaacagcacgtcgtcaaagaaacagcgtcgcaatttcgataacttcgacgatgatgacgatgatgatagtgcttacgacattcctgccgctggtgtcatgaaacccgacatcactttcttcggagaggcgctccctgatgaattctctgaccgactcattacccacgatcgagacatcgtcgatcttgtgcttgtcatcggcacctcattgaaagtggcaccagtatctgaggttgcatcttttttaccctcccacgtcccgcagatatacatttcgcgtacgcctgtaactcacatcaactttgacatcgatcttttaggagattgtgatgttgtggtcgaggaactatgccgtcgcgcgaaatggccgttgcatcacccaatggtgccgccaaatcgaaagattaatgtgaagctggaggatggttacgagagtcgccacgttttcactgcagagccgtcggaccatttcgtccctactcaagcggtacttaaatctgaagatgtggaggacaagacactcgagagagttatgaagacacgtcgccctagaagtagtacgtctcggcgatcggaaacctcatccaccgaaggatag

SEQ ID NO: 33105 - protein, 558 aa, Muscodor strobelii
  misc_feature: SGI Peptide ID NO. 571412
  misc_feature (202)..(434): Pfam Id: PF02146 Pfam Desc: Sir2 family
  misc_feature (63)..(510): NCBI GI: 85097046 Blast Desc: NCU04737 [Neurospora crassa OR74A] gi|28921861|gb|EAA31136.1| NCU04737 [Neurospora crassa OR74A] gi|39979187|emb|CAE85559.1| related to NAD-dependent histone
  misc_feature (60)..(537): NCBI GI: 116202215 Blast Desc: CHGG_08992 [Chaetomium globosum CBS 148.51] gi|88177510|gb|EAQ84978.1| CHGG_08992 [Chaetomium globosum CBS 148.51]
  misc_feature (66)..(509): NCBI GI: 256727696 Blast Desc: NECHADRAFT_33808 [Nectria haematococca mpVI 77-13-4]
  misc_feature (66)..(509): NCBI GI: 171682052 Blast Desc: protein product [Podospora anserina] gi|170940985|emb|CAP66635.1| protein product [Podospora anserina]
  misc_feature (67)..(510): NCBI GI: 242768868 Blast Desc: histone deacetylase SIR2, [Talaromyces stipitatus ATCC 10500] gi|218724850|gb|EED24267.1| histone deacetylase SIR2, [Talaromyces stipitatus ATCC 10500]
  misc_feature (74)..(509): NCBI GI: 121708230 Blast Desc: chromatin regulatory protein sir2 [Aspergillus clavatus NRRL 1] gi|119400215|gb|EAW10641.1| chromatin regulatory protein sir2 [Aspergillus clavatus NRRL 1]
  misc_feature (67)..(509): NCBI GI: 259481821 Blast Desc: TPA: histone deacetylase (Eurofung) [Aspergillus nidulans FGSC A4]
  misc_feature (67)..(509): NCBI GI: 119500130 Blast Desc: chromatin regulatory protein sir2 [Neosartorya fischeri NRRL 181] gi|119414987|gb|EAW24925.1| chromatin regulatory protein sir2 [Neosartorya fischeri NRRL 181]
  misc_feature (77)..(509): NCBI GI: 238486184 Blast Desc: histone deacetylase SIR2, [Aspergillus flavus NRRL3357] gi|220699209|gb|EED55548.1| histone deacetylase SIR2, [Aspergillus flavus NRRL3357]
  misc_feature (77)..(509): NCBI GI: 169771275 Blast Desc: [Aspergillus oryzae RIB40] gi|83767966|dbj|BAE58105.1| protein product [Aspergillus oryzae]
MKGVLKPKKPTKRGKERKPYTRRPQPPPIPDYRPPPDAFNHQHITPVVDDQQVGHLPLPQPHHGDVSELQDRVNDLGDSWETESIFEDIVDDSTYDTFPQEVDACTPAQSAAYRQELRAIGPDEFCERHIDSGNITVKKLLTAFGIKPPAFLEGMPDESYLSLLTLAMTRELTKRAKIMRYNSVDDAVSLLQRSRNIMVLTGAGISTSLGIPDFRSKETGLYSQLEKLGLGVNDPQEVFNIDVFRDDPTIFYTVAKDILPNTKKFSPTHAFIALLQNQGKLLTNYSQNIDNLEANAGISPDKLVQCHGSFATATCQACGHKVCGDAIFGDVKAGKIPRCPKCIAALRKRGLGPLKRKRSSNSTSSKKQRRNFDNFDDDDDDDSAYDIPAAGVMKPDITFFGEALPDEFSDRLITHDRDIVDLVLVIGTSLKVAPVSEVASFLPSHVPQIYISRTPVTHINFDIDLLGDCDVVVEELCRRAKWPLHHPMVPPNRKINVKLEDGYESRHVFTAEPSDHFVPTQAVLKSEDVEDKTLERVMKTRRPRSSTSRRSETSSTEG

SEQ ID NO: 33106 - DNA, 3329 bp, Muscodor strobelii
  misc_feature: SGI EST ID NO. CUFF.78410.0
  misc_feature: Variant of the nucleotide sequence at SEQ ID NO 33104
ttccgttcttctgtgctctatagatttgaatgattacacatttcattgtatcattgcgccccggcttcattgattaccttctttacacatctcaacttgacgaacggacgcgtcaaggtttcaataacaatagccacgcacaacctgagtacaagtcacattagcatgattgggatttaatgtacaacctttttcccgatcgcactttactcgacatggcgtagatccctcgatgttatttttcttccaattgcccgagcttattgagcactactacttagaattctctcacactttctggcacatctgaaactctcctcctccatcatcactatttttcttgccttttcgtatggttcatcaacccactttcccttttcaatccgcagcacaaaatatacacccgcaacccctgttccaagtaattgcatcgattgcgaaacgcgcactcttaacagctcgcacgctcttttgattctgtgagattccactactcgtccacgcgcgttttcaacgaagcaagcttccatcacgtcaaaatgaagggcgtgctcaagcccaagaagcccacgaaacgtggcaaagagcgcaaaccttacaccaggagacctcaaccccctccaatccctgactatcgtcctccaccagatgccttcaatcatcaacacatcacccctgtcgtcgacgaccagcaagtaggacatctccccttgccgcaaccccatcatggtgatgtatcagaacttcaggacagagtgaatgaccttggagattcgtgggagaccgagtcaattttcgaagacatcgtggacgactcaacctatgacacgtttccgcaagaagatgcttgcacgccagcgcaatctgctgcttaccgccaagaattgcgtgcaatcggacctgatgagttttgcgagaggcacatagactctggtaacatcacagtgaagaaattactgacagcctttggcatcaagccccctgcctttcttgagggaatgcccgacgaatcatacctaagcctactcacgctggccatgactagggagctcactaagagagcaaagatcatgcggtacaattccgtcgatgacgcggtttctctgctccagcgatcgcgcaacatcatggtgttgacaggtgcaggtatttccacatctctgggcattcccgatttccgttctaaggagactggtctctattcacaattggagaagcttggattgggggtcaacgacccgcaggaagtcttcaacatcgacgtgttccgtgacgacccaaccattttctacacagtggccaaagacattttgcccaacaccaaaaagttctcacctacgcatgccttcatcgcccttctacaaaatcaagggaagcttctcactaactattcccaaaacattgacaacctggaggccaatgctggcattagcccggacaaactcgtacagtgccacggctcatttgctactgccacttgccaggcatgtggccacaaagtgtgtggtgatgctatctttggagatgtcaaagctggtaagattcctcgctgcccgaaatgcattgccgcattgcgaaagaggggtctgggtccccttaagcgtaagaggtctagcaacagcacgtcgtcaaagaaacagcgtcgcaatttcgataacttcgacgatgatgacgatgatgatagtgcttacgacattcctgccgctggtgtcatgaaacccgacatcactttcttcggagaggcgctccctgatgaattctctgaccgactcattacccacgatcgagacatcgtcgatcttgtgcttgtcatcggcacctcattgaaagtggcaccagtatctgaggttgcatcttttttaccctcccacgtcccgcagatatacatttcgcgtacgcctgtaactcacatcaactttgacatcgatcttttaggagattgtgatgttgtggtcgaggaactatgccgtcgcgcgaaatggccgttgcatcacccaatggtgccgccaaatcgaaagattaatgtgaagctggaggatggttacgagagtcgccacgttttcactgcagagccgtcggaccatttcgtccctactcaagcggtacttaaatctgaagatgtggaggacaagacactcgagagagttatgaagacacgtcgccctagaagtagtacgtctcggcgatcggaaacctcatccaccgaaggatagcgaccacgatctggattacatttcccaaacgattatcccatggcgcaaaacgtgccgcaagccccgcgccgcatttctacaatacatacttcccactgtcatatgagcgcattactcctctcaatcaacactcgaaatcagcagcaaatcctatccatcaggttcaatctttggtaacggattccgcgggtttcgacacttatgaacgattaccaaaagagcggattggcttgtttctttactgccggcgtaagggctacggtgtcagctttcctcgcgaattttcccgcatagaggagagatgcgaccggtggatctgcttcccgcgctggaaatgatccacgcagactgtttcagcactactatgataccaattcgcgcatttcgattgcaaagtgccacatgttcgctttttcatgcgcccgatccagattttctacctagggccacattgtttgtgcctacctaataaatcgacctgtggcccctcaaacttagttcggcgataaaaaagtcggcaaaggcctaaatttgcctccgaacgacctaataacctttccacagaactctaaaccctgtttttttcacgctcacgcggcacggaaagaatcgatagggaaacctgtcagaaagactcaagtttctagatcggcgttaggagcgaagaaattgttttcattttctgttttacggtccctctggctctataggcgctttctattggactatattcgcgggacgcgacggtacgtgttctgatgggtaaatcgagatctgccctccccaactagaaccgaaactagcaaagtggggctttcggttttgtgttgtcttacgattagtacgcacgatgactgggatgcgaaagcttctccgaggaattgtacgacagaaggcaaattttcgacaagccggatgctgtgggtctagacaatcagagaagatttcgtgttgagggtgtcattgtgtgggaaggtgtgcataatgtggatgattctgggagagacggttctgtgtggctggttggattgagaatggagagaaaagaagatcggtgttgtacacgagagatagataggtgtatacatttcagtaatgcagaaacccgtcgtaaaa

SEQ ID NO: 33107 - DNA, 1674 bp, Muscodor strobelii
  misc_feature: SGI cDNA ID NO. 571413
  misc_feature: Reduced expression when VOC is produced
  misc_feature: Encodes the peptide sequence at SEQ ID NO 33108
atgaagggcgtgctcaagcccaagaagcccacgaaacgtggcaaagagcgcaaaccttacaccaggagacctcaaccccctccaatccctgactatcgtcctccaccagatgccttcaatcatcaacacatcacccctgtcgtcgacgaccagcaagtaggacatctccccttgccgcaaccccatcatggtgatgtatcagaacttcaggacagagtgaatgaccttggagattcgtgggagaccgagtcaattttcgaagacatcgtggacgactcaacctatgacacgtttccgcaagaagatgcttgcacgccagcgcaatctgctgcttaccgccaagaattgcgtgcaatcggacctgatgagttttgcgagaggcacatagactctggtaacatcacagtgaagaaattactgacagcctttggcatcaagccccctgcctttcttgagggaatgcccgacgaatcatacctaagcctactcacgctggccatgactagggagctcactaagagagcaaagatcatgcggtacaattccgtcgatgacgcggtttctctgctccagcgatcgcgcaacatcatggtgttgacaggtgcaggtatttccacatctctgggcattcccgatttccgttctaaggagactggtctctattcacaattggagaagcttggattgggggtcaacgacccgcaggaagtcttcaacatcgacgtgttccgtgacgacccaaccattttctacacagtggccaaagacattttgcccaacaccaaaaagttctcacctacgcatgccttcatcgcccttctacaaaatcaagggaagcttctcactaactattcccaaaacattgacaacctggaggccaatgctggcattagcccggacaaactcgtacagtgccacggctcatttgctactgccacttgccaggcatgtggccacaaagtgtgtggtgatgctatctttggagatgtcaaagctggtaagattcctcgctgcccgaaatgcattgccgcattgcgaaagaggggtctgggtccccttaagcgtaagaggtctagcaacagcacgtcgtcaaagaaacagcgtcgcaatttcgataacttcgacgatgatgacgatgatgatagtgcttacgacattcctgccgctggtgtcatgaaacccgacatcactttcttcggagaggcgctccctgatgaattctctgaccgactcattacccacgatcgagacatcgtcgatcttgtgcttgtcatcggcacctcattgaaagtggcaccagtatctgaggttgcatcttttttaccctcccacgtcccgcagatatacatttcgcgtacgcctgtaactcacatcaactttgacatcgatcttttaggagattgtgatgttgtggtcgaggaactatgccgtcgcgcgaaatggccgttgcatcacccaatggtgccgccaaatcgaaagattaatgtgaagctggaggatggttacgagagtcgccacgttttcactgcagagccgtcggaccatttcgtccctactcaagcggtacttaaatctgaagatgtggaggacaagacactcgagagagttatgaagacacgtcgccctagaagtagtacgtctcggcgatcggaaacctcatccaccgaaggatag

SEQ ID NO: 33108 - protein, 557 aa, Muscodor strobelii
  misc_feature: SGI Peptide ID NO. 571413
  misc_feature (201)..(433): Pfam Id: PF02146 Pfam Desc: Sir2 family
  misc_feature (63)..(509): NCBI GI: 85097046 Blast Desc: NCU04737 [Neurospora crassa OR74A] gi|28921861|gb|EAA31136.1| NCU04737 [Neurospora crassa OR74A] gi|39979187|emb|CAE85559.1| related to NAD-dependent histone
  misc_feature (60)..(536): NCBI GI: 116202215 Blast Desc: CHGG_08992 [Chaetomium globosum CBS 148.51] gi|88177510|gb|EAQ84978.1| CHGG_08992 [Chaetomium globosum CBS 148.51]
  misc_feature (66)..(508): NCBI GI: 256727696 Blast Desc: NECHADRAFT_33808 [Nectria haematococca mpVI 77-13-4]
  misc_feature (66)..(508): NCBI GI: 171682052 Blast Desc: protein product [Podospora anserina] gi|170940985|emb|CAP66635.1| protein product [Podospora anserina]
  misc_feature (67)..(510): NCBI GI: 242768868 Blast Desc: histone deacetylase SIR2, [Talaromyces stipitatus ATCC 10500] gi|218724850|gb|EED24267.1| histone deacetylase SIR2, [Talaromyces stipitatus ATCC 10500]
  misc_feature (74)..(508): NCBI GI: 121708230 Blast Desc: chromatin regulatory protein sir2 [Aspergillus clavatus NRRL 1] gi|119400215|gb|EAW10641.1| chromatin regulatory protein sir2 [Aspergillus clavatus NRRL 1]
  misc_feature (67)..(508): NCBI GI: 259481821 Blast Desc: TPA: histone deacetylase (Eurofung) [Aspergillus nidulans FGSC A4]
  misc_feature (67)..(508): NCBI GI: 119500130 Blast Desc: chromatin regulatory protein sir2 [Neosartorya fischeri NRRL 181] gi|119414987|gb|EAW24925.1| chromatin regulatory protein sir2 [Neosartorya fischeri NRRL 181]
  misc_feature (57)..(508): NCBI GI: 115391053 Blast Desc: NAD-dependent histone deacetylase SIR2 [Aspergillus terreus NIH2624] gi|114193955|gb|EAU35655.1| NAD-dependent histone deacetylase SIR2 [Aspergillus terreus NIH2624]
  misc_feature (48)..(510): NCBI GI: 212542417 Blast Desc: histone deacetylase SIR2, [Penicillium marneffei ATCC 18224] gi|210066270|gb|EEA20363.1| histone deacetylase SIR2, [Penicillium marneffei ATCC 18224]
  misc_feature: Useful for introducing or modulating the production of volatile compounds
MKGVLKPKKPTKRGKERKPYTRRPQPPPIPDYRPPPDAFNHQHITPVVDDQQVGHLPLPQPHHGDVSELQDRVNDLGDSWETESIFEDIVDDSTYDTFPQEDACTPAQSAAYRQELRAIGPDEFCERHIDSGNITVKKLLTAFGIKPPAFLEGMPDESYLSLLTLAMTRELTKRAKIMRYNSVDDAVSLLQRSRNIMVLTGAGISTSLGIPDFRSKETGLYSQLEKLGLGVNDPQEVFNIDVFRDDPTIFYTVAKDILPNTKKFSPTHAFIALLQNQGKLLTNYSQNIDNLEANAGISPDKLVQCHGSFATATCQACGHKVCGDAIFGDVKAGKIPRCPKCIAALRKRGLGPLKRKRSSNSTSSKKQRRNFDNFDDDDDDDSAYDIPAAGVMKPDITFFGEALPDEFSDRLITHDRDIVDLVLVIGTSLKVAPVSEVASFLPSHVPQIYISRTPVTHINFDIDLLGDCDVVVEELCRRAKWPLHHPMVPPNRKINVKLEDGYESRHVFTAEPSDHFVPTQAVLKSEDVEDKTLERVMKTRRPRSSTSRRSETSSTEG

SEQ ID NO: 33109 - DNA, 3329 bp, Muscodor strobelii; identical to SEQ ID NO: 33106
  misc_feature: SGI EST ID NO. CUFF.78410.0
  misc_feature: Variant of the nucleotide sequence at SEQ ID NO 33107

SEQ ID NO: 33110 - DNA, 2238 bp, Muscodor strobelii
  misc_feature: SGI cDNA ID NO. 571414
  misc_feature: Encodes the peptide sequence at SEQ ID NO 33111
atgcgtctttcgattttcgtcggttcggccgccagagtggctgcggctacgttgtcaagactcactgaccggggctccgcatacgacgtttcggtcacacaaaccaacccgtacactttacgggtaagccgaggcaacacgaatgttataaacgacataaagatcctcaccggccagaatgtttctcctgcgtatcaggccgcacctgttgtcgcttccgaatcaggtgctatcgcggatcatttagggcttattaagacaaatttcatcacgaagtcggtcctgaagatcgacgttgacactagcagcactgccaaatatgtaggagcacagtttgagactgagaaagatgctcgcacatatggagtatggagttatccttggaatggtacgctcgccaacgaagcagtctcctacgaattgaaagggttgatggaaatgagaggagtcaactactgcaatgctcgtgcacctttctacatctccagctcaggatacggcctttacatcgatactctgaagatgggaacatttgacttcagcaaggacgaaagcagaagctttgtcttcaacagcagctctctcgcgatatatgtcgtactccctagatctcccggagatttcaagtcgatcattgaacagtttgcgagtctatcctcaactatatttatgccgcctgattccgcgtatggcccaatcatattttcagatgattggaatcaggacttccacggctccgtgtcgaatgcggttgaaaattactatgatgtcgtggatcacttgtacaccaacaaaatcagagcctccgcaatgtttgcagataggccgtacgggacgggcaacggatcgtggggcaatttcgacttcaatttgaccgaataccccgatccagcatcctttatctcgaatctcacaaagtggggtttcgacttccaggtctgggcgtctaacagagcaacgccggatactctgctttggaacgcttccatcgctgaaggttggcagttcgaggtggatcagagcaaaatcctaggtggtttaccagggccagctctcaacctatctattccagatgcctacgattggttcgccgatgcactgaactacttcacagacgtaggcgtgaaaggttacaaagttgatcgcggggaagaaaacgagatgcccgtcttcgagcaaaacattcagcagaacctcatgctcaaattgacctatgagaacatggaagccaaatggggcaaagggaacttctacaatttcgcccgctcagcaaatgatagaagtcgtagccattcagctgtctggggaggtgactcccacgctaacttcactggtctcgcatattctatcaccgcggccgtccgtgccggtctgatcggcttttccatgtggggaagcgatacagggggttacattcgcaaggccaatgaacagatccctcctgctgcgtcacagccgccgacagaagaagtctgggcacggtggatgcacttctcggccttctgccccatgtacgagctgatgctggggactggagccactccatggtacgactacagcagtgacctggtggatgtatttgcagaaaccgccgctttgcaccatgagttgttgccatatatacggagctacacgtacgcggctcacacatcaggtctaccggtcatgcgatcgctgtggcttgaggcaccgtccgatcccgtaacatggtctgaagtcgccgatcttcagtacttcttcggatctgaatttctcgtcgcacctattacgactgctggtggacaacgcgatgtgtatttccctggggccaaggaagtcaaatatgtcgattatgctaccaagagcatcgtgcacgccggtggcgacacagccgctatccaactggaccttcacggtattcctgtatatgtcaaagccggatcaatcataccgcgcggcgacattttcaaggcgaacgataggtggactgagaattgggaaccttggctcaacactgaagtctttccctcttgggacgtcgagcactctgagttcaagtactataacaaggaggcaaacaaggtagtagatattgttatgatcacttggaaacattctagacaagtggtggtcaagtatggagctactgggtttgggggcagcgtggtgttttacactaagactggcccgaggaaagtgaagatgcagccaagcggcggtgtggctacattgcagaatgtggatactattttcgaatag

SEQ ID NO: 33111 - protein, 745 aa, Muscodor strobelii
  misc_feature: SGI Peptide ID NO. 571414
  misc_feature (198)..(643): Pfam Id: PF01055 Pfam Desc: Glycosyl hydrolases family 31
  misc_feature (431)..(643): Pfam Id: PF01055 Pfam Desc: Glycosyl hydrolases family 31
  misc_feature (132)..(682): NCBI GI: 254445563 Blast Desc: glycosyl hydrolase, family 31 [Verrucomicrobiae bacterium DG1235] gi|198259871|gb|EDY84179.1| glycosyl hydrolase, family 31 [Verrucomicrobiae bacterium DG1235]
  misc_feature (158)..(656): NCBI GI: 146413893 Blast Desc: PGUG_04872 [Pichia guilliermondii ATCC 6260]
  misc_feature (158)..(656): NCBI GI: 190348337 Blast Desc: PGUG_04872 [Pichia guilliermondii ATCC 6260]
  misc_feature (158)..(658): NCBI GI: 256818239 Blast Desc: alpha-xylosidase YicI [Streptomyces griseoflavus Tu4000]
  misc_feature (158)..(644): NCBI GI: 72162014 Blast Desc: alpha-glucosidase [Thermobifida fusca YX] gi|71915746|gb|AAZ55648.1| alpha-glucosidase [Thermobifida fusca YX]
  misc_feature (158)..(647): NCBI GI: 220929855 Blast Desc: glycoside hydrolase family 31 [Clostridium cellulolyticum H10] gi|220000183|gb|ACL76784.1| glycoside hydrolase family 31 [Clostridium cellulolyticum H10]
  misc_feature (158)..(647): NCBI GI: 222099354 Blast Desc: Alpha-xylosidase [Thermotoga neapolitana DSM 4359] gi|221571744|gb|ACM22556.1| Alpha-xylosidase [Thermotoga neapolitana DSM 4359]
  misc_feature (158)..(646): NCBI GI: 32141130 Blast Desc: alpha-xylosidase YicI [Streptomyces coelicolor A3(2)] gi|24419005|emb|CAD55453.1| sugar hydrolase [Streptomyces coelicolor A3(2)]
  misc_feature (158)..(646): NCBI GI: 256789355 Blast Desc: alpha-xylosidase YicI [Streptomyces lividans TK24]
  misc_feature (158)..(666): NCBI GI: 270295042 Blast Desc: glycoside hydrolase, family 31 protein [Bacteroides sp. D20] gi|270274289|gb|EFA20150.1| glycoside hydrolase, family 31 protein [Bacteroides sp. D20]
  misc_feature (158)..(653): SWISSPROT Homolog: EC 3.2.1.20 Alpha-glucosidase
MRLSIFVGSAARVAAATLSRLTDRGSAYDVSVTQTNPYTLRVSRGNTNVINDIKILTGQNVSPAYQAAPVVASESGAIADHLGLIKTNFITKSVLKIDVDTSSTAKYVGAQFETEKDARTYGVWSYPWNGTLANEAVSYELKGLMEMRGVNYCNARAPFYISSSGYGLYIDTLKMGTFDFSKDESRSFVFNSSSLAIYVVLPRSPGDFKSIIEQFASLSSTIFMPPDSAYGPIIFSDDWNQDFHGSVSNAVENYYDVVDHLYTNKIRASAMFADRPYGTGNGSWGNFDFNLTEYPDPASFISNLTKWGFDFQVWASNRATPDTLLWNASIAEGWQFEVDQSKILGGLPGPALNLSIPDAYDWFADALNYFTDVGVKGYKVDRGEENEMPVFEQNIQQNLMLKLTYENMEAKWGKGNFYNFARSANDRSRSHSAVWGGDSHANFTGLAYSITAAVRAGLIGFSMWGSDTGGYIRKANEQIPPAASQPPTEEVWARWMHFSAFCPMYELMLGTGATPWYDYSSDLVDVFAETAALHHELLPYIRSYTYAAHTSGLPVMRSLWLEAPSDPVTWSEVADLQYFFGSEFLVAPITTAGGQRDVYFPGAKEVKYVDYATKSIVHAGGDTAAIQLDLHGIPVYVKAGSIIPRGDIFKANDRWTENWEPWLNTEVFPSWDVEHSEFKYYNKEANKVVDIVMITWKHSRQVVVKYGATGFGGSVVFYTKTGPRKVKMQPSGGVATLQNVDTIFE

SEQ ID NO: 33112 - DNA, 452 bp, Muscodor strobelii
  misc_feature: SGI EST ID NO. CUFF.78325.0
  misc_feature: Variant of the nucleotide sequence at SEQ ID NO 33110
acagccgctatccaactggaccttcacggtattcctgtatatgtcaaagccggatcaatcataccgcgcggcgacattttcaaggcgaacgataggtggactgagaattgggaaccttggctcaacactgaagtctttccctcttgggacgtcgagcactctgagttcaagtactataacaaggaggcaaacaaggtagtagatattgttatgatcacttggaaacattctagacaagtggtggtcaagtatggagctactgggtttgggggcagcgtggtgttttacactaagactggcccgaggaaagtgaagatgcagccaagcggcggtgtggctacattgcagaatgtggatactattttcgaataggtatagatataacatagatgattactattcggcctttgctgaataacatagccctcaactaaatattaggcgtatgttgc

SEQ ID NO: 33113 - DNA, 543 bp, Muscodor strobelii
  misc_feature: SGI cDNA ID NO. 571415
  misc_feature: Encodes the peptide sequence at SEQ ID NO 33114
atggtactgtccatggagggactcaaacatcttgctgatccttctccgctgcctgattccgcctctgccgtgcttgttgctgcctctatcaatcctgctgccaccgctatcgagttgactaccgctgttgtcgagcctactattattgctgtccagtacactgccgcttctgtccagacaaacacgctgaagtgtgaaagatccaacaatataggcataacctcagccgccggacgcatcacagttccatccagtcaccctgaagattctccggcaaagaaacagaagatcccaacagaggagatcgctgtcactgccacgagagccgtcgatgaagtgtctgtgcctaactccaccactccgtcacgccgtcgtatcccgctacgaggggtcctatggaaaaaggcacagaacgagctaattgtcaatcattccctcgcaactcactacgatccacactggctgaaggttctgtcttcaaggaagccagatatatgtggcgacgtgagtccacagggctacaaagagggctttagtagctga

SEQ ID NO: 33114 - protein, 180 aa, Muscodor strobelii
  misc_feature: SGI Peptide ID NO. 571415
MVLSMEGLKHLADPSPLPDSASAVLVAASINPAATAIELTTAVVEPTIIAVQYTAASVQTNTLKCERSNNIGITSAAGRITVPSSHPEDSPAKKQKIPTEEIAVTATRAVDEVSVPNSTTPSRRRIPLRGVLWKKAQNELIVNHSLATHYDPHWLKVLSSRKPDICGDVSPQGYKEGFSS

SEQ ID NO: 33115 - DNA, 525 bp, Muscodor strobelii
  misc_feature: SGI cDNA ID NO. 571416
  misc_feature: Encodes the peptide sequence at SEQ ID NO 33116
atgtcggatggtcaatctcccaacatgtctgccgataggcttcttgatccgtcagacaatctgtcgactgacatctgtgacctccaggccccggaaaccccgcatgatcagtcgcatcctgtatctgtcgacgagtctatcgacacacctacgccttattccgcggtttctctttgtacgacttcgcgtatcagctactaccaagacagatccgatcaccacggtatacatgctccttctgacgaatcagacgacgctcaagagtggtccatgcatcctgaactccacggcgacgttgcggctcgtttgaaagaggtcgggctggacggcattactttccacacagatgacaacccagatacgtgtatcaagaagcgcgatacgcacatcatggggcgctttcagtgtgagaatgtcaaatgtccagcagacggatggcttagcggaaagattgccatcaccattcgtcaatatgcaggcaacgaatacaacgcccgagtctaccaccagcgatgtcaaaagtga

SEQ ID NO: 33116 - protein, 174 aa, Muscodor strobelii
  misc_feature: SGI Peptide ID NO. 571416
  misc_feature (78)..(174): NCBI GI: 239608023 Blast Desc: conserved [Ajellomyces dermatitidis ER-3]
  misc_feature (79)..(173): NCBI GI: 121703902 Blast Desc: conserved [Aspergillus clavatus NRRL 1] gi|119398359|gb|EAW08789.1| conserved [Aspergillus clavatus NRRL 1]
  misc_feature (83)..(174): NCBI GI: 46116014 Blast Desc: FG03849.1 [Gibberella zeae PH-1]
  misc_feature (79)..(173): NCBI GI: 154309750 Blast Desc: BC1G_07345 [Botryotinia fuckeliana B05.10] gi|150851806|gb|EDN26999.1| BC1G_07345 [Botryotinia fuckeliana B05.10]
  misc_feature (87)..(173): NCBI GI: 169777867 Blast Desc: [Aspergillus oryzae RIB40] gi|83772136|dbj|BAE62266.1| protein product [Aspergillus oryzae]
  misc_feature (86)..(173): NCBI GI: 238841695 Blast Desc: conserved [Microsporum canis CBS 113480]
  misc_feature (89)..(172): NCBI GI: 225560056 Blast Desc: conserved [Ajellomyces capsulatus G186AR]
  misc_feature (87)..(173): NCBI GI: 256722733 Blast Desc: NECHADRAFT_53170 [Nectria haematococca mpVI 77-13-4]
  misc_feature (91)..(173): NCBI GI: 255944477 Blast Desc: Pc20g04630 [Penicillium chrysogenum Wisconsin 54-1255] gi|211587741|emb|CAP85792.1| Pc20g04630 [Penicillium chrysogenum Wisconsin 54-1255]
  misc_feature (79)..(173): NCBI GI: 212543157 Blast Desc: conserved [Penicillium marneffei ATCC 18224] gi|210066640|gb|EEA20733.1| conserved [Penicillium marneffei ATCC 18224]
MSDGQSPNMSADRLLDPSDNLSTDICDLQAPETPHDQSHPVSVDESIDTPTPYSAVSLCTTSRISYYQDRSDHHGIHAPSDESDDAQEWSMHPELHGDVAARLKEVGLDGITFHTDDNPDTCIKKRDTHIMGRFQCENVKCPADGWLSGKIAITIRQYAGNEYNARVYHQRCQK

SEQ ID NO: 33117 - DNA, 283 bp, Muscodor strobelii
  misc_feature: SGI EST ID NO. CUFF.78365.0
  misc_feature: Variant of the nucleotide sequence at SEQ ID NO 33115
taccaagacagatccgatcaccacggtatacatgctccttctgacgaatcagacgacgctcaagagtggtccatgcatcctgaactccacggcgacgttgcggctcgtttgaaagaggtcgggctggacggcattactttccacacagatgacaacccagatacgtgtatcaagaagcgcgatacgcacatcatggggcgctttcagtgtgagaatgtcaaatgtccagcagacggatggcttagcggaaagattgccatcaccattcgtcaatatgcaggca

SEQ ID NO: 33118 - DNA, 1008 bp, Muscodor strobelii
  misc_feature: SGI cDNA ID NO. 571417
  misc_feature: Encodes the peptide sequence at SEQ ID NO 33119
atggaatcacttcatgacttcgatggccgaaaatcagttagcgacatcgagaaaaagaccgacaacagtatactgcgcaaagtcgggagcaaagccgaaggggatgttgttgagtcaggaccagcgctgaagaggcagatcaaagctcgtcattcgcagatgattgctattggtgcgtcgattggcacttcgttcttcattgttattggccaatctctttataccggtgggcctgggttgcttctcgcggcctatgttcttgtttgtttcggcgtgtacggtgttgccaccgcaattattgaggcaagttgtaatgtcctgaactatataccgggtggtgtcgcggttggcgtacatttaccagtccctggagccacaatgtcgacacactgcggccgatatgtatcaaaatcgcttggcgtggctcttggatatctctatttctactcctttggcatcctcgcgccttatgaagtcactgcaggtacaatcctgatagattactggccgcagcatgttcatgttgctgtgtggatcaccctcttgctcatcgtcgtcattgcgttaaactgctttcctgttggagtttatgcagaggcagagttctggtttgccagcatcaaagttgctttgatcattggattattgatcttgtctgtggttctgatacttggtgggggccctgatcatcgaagattgggattctactactgggttgaccccggtgctgtccatgagttcatcgttccaggtgctgctggccgcttcgtctcgttcttgtattgtattatccaagcacaattctccttcaacttcagtcctgaattgatcgtggtaacatccggagagatgcaaaacccacgcaagaatctacccaaggcggtcaggactatattttggcgcctcgtcatattttacgtattcagcatcctagctatgggagcaatctgctcatctaaagccccaggtcttgtttctagcgctagcaatgccaatgcttcgccataa

SEQ ID NO: 33119 - protein, 335 aa, Muscodor strobelii
  misc_feature: SGI Peptide ID NO. 571417
  misc_feature (51)..(335): Pfam Id: PF00324 Pfam Desc: Amino acid permease
  misc_feature (133)..(335): Pfam Id: PF00324 Pfam Desc: Amino acid permease
  misc_feature (51)..(99): Pfam Id: PF00324 Pfam Desc: Amino acid permease
  misc_feature (12)..(335): NCBI GI: 238492705 Blast Desc: proline permease PrnB [Aspergillus flavus NRRL3357] gi|220696083|gb|EED52425.1| proline permease PrnB [Aspergillus flavus NRRL3357]
  misc_feature (12)..(335): NCBI GI: 169782968 Blast Desc: [Aspergillus oryzae RIB40] gi|83774690|dbj|BAE64813.1| protein product [Aspergillus oryzae]
  misc_feature (8)..(335): NCBI GI: 154295031 Blast Desc: BC1G_13644 [Botryotinia fuckeliana B05.10] gi|150844420|gb|EDN19613.1| BC1G_13644 [Botryotinia fuckeliana B05.10]
  misc_feature (23)..(335): NCBI GI: 145247622 Blast Desc: An12g10130 [Aspergillus niger] gi|134080799|emb|CAL00913.1| protein product [Aspergillus niger]
  misc_feature (5)..(335): NCBI GI: 212532267 Blast Desc: proline permease PrnB [Penicillium marneffei ATCC 18224] gi|210071654|gb|EEA25743.1| proline permease PrnB [Penicillium marneffei ATCC 18224]
  misc_feature (33)..(335): NCBI GI: 189193517 Blast Desc: histidine permease [Pyrenophora tritici-repentis Pt-1C-BFP] gi|187978661|gb|EDU45287.1| histidine permease [Pyrenophora tritici-repentis Pt-1C-BFP]
  misc_feature (2)..(319): NCBI GI: 156050323 Blast Desc: SS1G_07748 [Sclerotinia sclerotiorum 1980] gi|154692149|gb|EDN91887.1| SS1G_07748 [Sclerotinia sclerotiorum 1980]
  misc_feature (12)..(335): NCBI GI: 242775252 Blast Desc: glycogen branching enzyme GbeA, [Talaromyces stipitatus ATCC 10500] gi|218722225|gb|EED21643.1| glycogen branching enzyme GbeA, [Talaromyces stipitatus ATCC 10500]
  misc_feature (2)..(335): NCBI GI: 226292157 Blast Desc: proline-specific permease [Paracoccidioides brasiliensis Pb18]
  misc_feature (2)..(335): NCBI GI: 225681137 Blast Desc: amino-acid permease inda1 [Paracoccidioides brasiliensis Pb03]
MESLHDFDGRKSVSDIEKKTDNSILRKVGSKAEGDVVESGPALKRQIKARHSQMIAIGASIGTSFFIVIGQSLYTGGPGLLLAAYVLVCFGVYGVATAIIEASCNVLNYIPGGVAVGVHLPVPGATMSTHCGRYVSKSLGVALGYLYFYSFGILAPYEVTAGTILIDYWPQHVHVAVWITLLLIVVIALNCFPVGVYAEAEFWFASIKVALIIGLLILSVVLILGGGPDHRRLGFYYWVDPGAVHEFIVPGAAGRFVSFLYCIIQAQFSFNFSPELIVVTSGEMQNPRKNLPKAVRTIFWRLVIFYVFSILAMGAICSSKAPGLVSSASNANASP

SEQ ID NO: 33120 - DNA, 603 bp, Muscodor strobelii
  misc_feature: SGI cDNA ID NO. 571418
  misc_feature: Encodes the peptide sequence at SEQ ID NO 33121
atggacgtccccggttacgcgatagtcaccggtgcgggatccggcattggccgagaatgtgccaaaaccttcgcccgagacggtgctgccggtgtggcgttgttcgatatcagcctagagagcctggactctgtaaaggctgagatcgaaggtggaaattacacaccaaacggcaaatcatgtcacatcatcgttcgacgagttgatgtatcaatagaagaagaagtgttcgctggcgtccgagctgttgctgaggaatttggacgcatagactatgttgccaacgcagcgggcattgcaatgaaacacgaaggcggcgctgcctatgctcaagccagcgactggcagcggatccttgacataaacttgaacggttcactgttcattcttaaagctgccgctcagatcatgctgaagcaggagccgatcctctcagcgattgacgggcgacccttacaaagaggatcaatcgtcctcttcggctctatacagtcagtcgcaggcatcccgctggtcgacggcatatgccgcctccaaggctggtgttctcggccttatgaggtctgcttccgaagactacagtcgagatggcttacggattaa

SEQ ID NO: 33121 - protein, 200 aa, Muscodor strobelii
  misc_feature: SGI Peptide ID NO. 571418
  misc_feature (5)..(184): Pfam Id: PF00106 Pfam Desc: short chain dehydrogenase
  misc_feature (5)..(170): Pfam Id: PF00106 Pfam Desc: short chain dehydrogenase
  misc_feature (1)..(171): NCBI GI: 238492713 Blast Desc: oxidoreductase, [Aspergillus flavus NRRL3357] gi|220696087|gb|EED52429.1| oxidoreductase, [Aspergillus flavus NRRL3357]
  misc_feature (1)..(171): NCBI GI: 255941206 Blast Desc: Pc16g10650 [Penicillium chrysogenum Wisconsin 54-1255] gi|211585995|emb|CAP93735.1| Pc16g10650 [Penicillium chrysogenum Wisconsin 54-1255]
  misc_feature (1)..(171): NCBI GI: 169782976 Blast Desc: [Aspergillus oryzae RIB40] gi|83774694|dbj|BAE64817.1| protein product [Aspergillus oryzae]
  misc_feature (1)..(171): NCBI GI: 46139491 Blast Desc: FG11260.1 [Gibberella zeae PH-1]
  misc_feature (1)..(171): NCBI GI: 256722072 Blast Desc: [Nectria haematococca mpVI 77-13-4]
  misc_feature (3)..(144): NCBI GI: 70996937 Blast Desc: oxidoreductase, short-chain dehydrogenase/reductase family, [Aspergillus fumigatus Af293] gi|66850859|gb|EAL91185.1| oxidoreductase, short-chain dehydrogenase/reductase family,
  misc_feature (3)..(144): NCBI GI: 159127052 Blast Desc: oxidoreductase, short-chain dehydrogenase/reductase family, [Aspergillus fumigatus A1163]
  misc_feature (13)..(170): NCBI GI: 242773388 Blast Desc: short-chain dehydrogenase, [Talaromyces stipitatus ATCC 10500] gi|218721849|gb|EED21267.1| short-chain dehydrogenase, [Talaromyces stipitatus ATCC 10500]
  misc_feature (3)..(170): NCBI GI: 119477069 Blast Desc: NADP(+)-dependent dehydrogenase, [Neosartorya fischeri NRRL 181] gi|119407391|gb|EAW17340.1| NADP(+)-dependent dehydrogenase, [Neosartorya fischeri NRRL 181]
  misc_feature (3)..(142): NCBI GI: 121714184 Blast Desc: short chain dehydrogenase/reductase family oxidoreductase, [Aspergillus clavatus NRRL 1] gi|119402856|gb|EAW13277.1| short chain dehydrogenase/reductase
  misc_feature (8)..(170): SWISSPROT Homolog: EC 1.1.1.100 3-oxoacyl-[acyl-carrier-protein] reductase
MDVPGYAIVTGAGSGIGRECAKTFARDGAAGVALFDISLESLDSVKAEIEGGNYTPNGKSCHIIVRRVDVSIEEEVFAGVRAVAEEFGRIDYVANAAGIAMKHEGGAAYAQASDWQRILDINLNGSLFILKAAAQIMLKQEPILSAIDGRPLQRGSIVLFGSIQSVAGIPLVDGICRLQGWCSRPYEVCFRRLQSRWLTD

SEQ ID NO: 33122 - DNA, 352 bp, Muscodor strobelii
  misc_feature: SGI EST ID NO. CUFF.78392.0
  misc_feature: Variant of the nucleotide sequence at SEQ ID NO 33120
ttacgcgatagtcaccggtgcgggatccggcattggccgagaatgtgccaaaaccttcgcccgagacggtgctgccggtgtggcgttgttcgatatcagcctagagagcctggactctgtaaaggctgagatcgaaggtggaaattacacaccaaacggcaaatcatgtcacatcatcgttcgacgagttgatgtatcaatagaagaagaagtgttcgctggcgtccgagctgttgctgaggaatttggacgcatagactatgttgccaacgcagcgggcattgcaatgaaacacgaaggcggcgctgcctatgctcaagccagcgactggcagcggatccttgacataaac

SEQ ID NO: 33123 - DNA, 1674 bp, Muscodor strobelii
  misc_feature: SGI cDNA ID NO. 571419
  misc_feature: Elevated expression when VOC is produced
  misc_feature: Encodes the peptide sequence at SEQ ID NO 33124
atgccatctgcttatccgccagtccaagagctagacgtgctcatcattggcgccgggttctcgggtatatgctctcttcatcacattcgcgaacggtttccttcatggcgcattagagttctggaggcatcaccaggagctggtggaacatggtatacaaacagataccctggcgcgagagtggacactgagtctctaacttatcaattttcgtgggacaaggaactcttgaatgagtggcactggaaagagacattctcttctcagcccgatgttcttaaatacattgaacgagtatgtgaaaagcatgatctgtataaagatatgcaattcaatactcgcattgcatccgcacattgggttgaagattcctacttctggcgtgtgacggtcaccaatggcttcgaatatagagcgaggtttttcattagctgcatgggcttcctatctaggcctgtgttgcccctgattcccggcatcgagagtttcaagggcacctcttttcatacatcatcgtggccgaaagatctgaatcacaaaaaagatcttactgggaagaaggtcggcgtgataggtaccggagcgaccggcattcaaaccatcacggcaatagccaaggagtccaatagcgagtctcttacagtatttcaacgaacggcaaactggtcggcgccgctccgtaataccccaatctcaccagagcaaatgcaacagcacatgaaagagtacgacgagacatttgctcagtgcgcccgcacttcgtcaggatttttgtattccgcagatcctcgaggctctttcgaagtaacacaagccgagcgtctcgcgctctgggaccaactttatagtcaacaaggatttggcaaatggcttgcggttttcaaagatacttatacagaccgcgcggcaaacacgctgtattccgaatacatagcagagaaaatgagagcgcgcatcagtgaccctgagactgcagattccttaattcccaaggatcacggatttgggatgaggcgagtacccctagaaagcggctacttcgagatttacaaccgatccaacgtccatctagtcgatttgaagaagacaccaatcaagaaagtcactgagactggaattgagactaaggacggaaagacgcatgtcttggacgttgtgatatacgcaactggctttaacgccataacgggtgcttttggtgaggttgacttcacttgcaaagacggcagacctctgttaggatacagcgattcagaaaaagggaaacgggcgatatgggtcgatcaccgtccaaaaaccttcctcggaatcatggtcccggatatgcccaatgcattcctggtcctaggcccacatcagccgtttggcaatggaacacgtagcctggagaacgccgtcgatgttgtaatttccatgctgcaacatatttccgaccatgaatacaaatacgtggcgcctaaggcagaggcggtccaagcttggggagaacatgtcatagagtgcagtaaaggtcaattagtcaatgaggtagacagttggatgacaggtgtgaatagtaatgtcaaagggaagcaggagagaagcgtggcaagatatacgggtaacgtcgtagcatacagagaacgctgtgctgattgcgcgcggaatggttggaaggacctgatattcgcatag

SEQ ID NO: 33124 - protein, 557 aa, Muscodor strobelii
  misc_feature: SGI Peptide ID NO. 571419
  misc_feature (12)..(50): Pfam Id: PF01266 Pfam Desc: FAD dependent oxidoreductase
  misc_feature (9)..(557): NCBI GI: 255941210 Blast Desc: Pc16g10670 [Penicillium chrysogenum Wisconsin 54-1255] gi|211585997|emb|CAP93737.1| Pc16g10670 [Penicillium chrysogenum Wisconsin 54-1255]
  misc_feature (9)..(557): NCBI GI: 169782970 Blast Desc: [Aspergillus oryzae RIB40] gi|238492707|ref|XP_002377590.1| dimethylaniline monooxygenase, [Aspergillus flavus NRRL3357] gi|83774691|dbj|BAE64814.1| protein
  misc_feature (1)..(557): NCBI GI: 256722073 Blast Desc: NECHADRAFT_51160 [Nectria haematococca mpVI 77-13-4]
  misc_feature (1)..(557): NCBI GI: 46139493 Blast Desc: FG11261.1 [Gibberella zeae PH-1]
  misc_feature (10)..(556): NCBI GI: 256722387 Blast Desc: [Nectria haematococca mpVI 77-13-4]
  misc_feature (9)..(557): NCBI GI: 115388561 Blast Desc: conserved [Aspergillus terreus NIH2624] gi|114195870|gb|EAU37570.1| conserved [Aspergillus terreus NIH2624]
  misc_feature (1)..(556): NCBI GI: 46140079 Blast Desc: FG11554.1 [Gibberella zeae PH-1]
  misc_feature (4)..(557): NCBI GI: 259489788 Blast Desc: TPA: steroid monooxygenase, (AFU_orthologue; AFUA_8G00440) [Aspergillus nidulans FGSC A4]
  misc_feature (2)..(556): NCBI GI: 255956389 Blast Desc: Pc21g19560 [Penicillium chrysogenum Wisconsin 54-1255] gi|211590658|emb|CAP96853.1| Pc21g19560 [Penicillium chrysogenum Wisconsin 54-1255]
  misc_feature (10)..(555): NCBI GI: 169774167 Blast Desc: [Aspergillus oryzae RIB40] gi|83769414|dbj|BAE59549.1| protein product [Aspergillus oryzae]
  misc_feature (7)..(556): SWISSPROT Homolog: EC 1.14.13.92 Phenylacetone monooxygenase
  misc_feature: Useful for introducing or modulating the production of volatile compounds
MPSAYPPVQELDVLIIGAGFSGICSLHHIRERFPSWRIRVLEASPGAGGTWYTNRYPGARVDTESLTYQFSWDKELLNEWHWKETFSSQPDVLKYIERVCEKHDLYKDMQFNTRIASAHWVEDSYFWRVTVTNGFEYRARFFISCMGFLSRPVLPLIPGIESFKGTSFHTSSWPKDLNHKKDLTGKKVGVIGTGATGIQTITAIAKESNSESLTVFQRTANWSAPLRNTPISPEQMQQHMKEYDETFAQCARTSSGFLYSADPRGSFEVTQAERLALWDQLYSQQGFGKWLAVFKDTYTDRAANTLYSEYIAEKMRARISDPETADSLIPKDHGFGMRRVPLESGYFEIYNRSNVHLVDLKKTPIKKVTETGIETKDGKTHVLDVVIYATGFNAITGAFGEVDFTCKDGRPLLGYSDSEKGKRAIWVDHRPKTFLGIMVPDMPNAFLVLGPHQPFGNGTRSLENAVDVVISMLQHISDHEYKYVAPKAEAVQAWGEHVIECSKGQLVNEVDSWMTGVNSNVKGKQERSVARYTGNVVAYRERCADCARNGWKDLIFA

SEQ ID NO: 33125 - DNA, 3230 bp, Muscodor strobelii
  misc_feature: SGI EST ID NO. CUFF.78395.0
  misc_feature: Variant of the nucleotide sequence at SEQ ID NO 33123
ggtgttctcggccttatgaggtctgcttccgaagactacagtcgagatggcttacggattaatgcaatatgcccaggatacactgaaacaccgctcacgacaaagaacccaggcgtcttcaaggccatgcaagaaagggtatatacggttgtgccaatggcgagagtgggcaaacctcaggaaatcgctgatggcgttgtgtatctcgcgggaggaagaagctcgtttgtaactggcatagctcacatggtagatggtggatacactgagagatgataatctcgatatgacggcaaggaatagggacgaatgttgcctcataaacagaagctaactaatattacttgatgaagttggttcatgccaactttggaccaatatatcctatactcatagtgtgcacttattcggtattctgcgtacttgtacttgcacctcgtagcgtgatcacagcggaactaaatcaatctccaaattgttatacgggtatgatataaacatccgtgtccattgattaccgtgcatctctaacaatgcgcaggatgtatctgctttgattgtagaggggggctaatgcctacataagcttgtaagtcaggcacgcttgcagccgtgatcgtctgccataaggttggctgcatggtggggcgacattacctaagaagcctatgttttctgacatatctccccgcgttcgtttggaaagaacgcgactcgaacaatggcttgcctcctccaacctcgcgcgatcgcatgcaattggctcggtgccggccagaatcacttgtttatctttccgagatatgatcggcctgccttcaatcctgctgcgattcagctcgtctgcacaccgatccatccgtgtcagatatgggattgatcgggagctctacgggaggcgctggggtctggttaaggaaagtcatccctcatgcccctgtctagcctggacccagactcacaatccctgcaacacactctacgataggcataaatcgcgggtagatgctctggagatcctcatcatgtctaatggcaagactttccttgcgaagtgtcttcggggtttaggatggcagattatccaaaattcggctgcaaggacctctgcagagctcatgaagtgaagttacgattgtcaacagcacgcttagctatcaagtctccacacgcgataggactggctcaaatcccccctttcaaagaggcgacgacatctcgcagacctcgataccctatttaacattctgaacgagtgcaatcaatacacataagcctactttcaacttcatgctttacgctctatcacctctattttatccgtggaacatcgcgttcttgctatccagtgcgatttccagatttcgagttctacactacatttgaattgtgtctattgcaatgccatctgcttatccgccagtccaagagctagacgtgctcatcattggcgccgggttctcgggtatatgctctcttcatcacattcgcgaacggtttccttcatggcgcattagagttctggaggcatcaccaggagctggtggaacatggtatacaaacagataccctggcgcgagagtggacactgagtctctaacttatcaattttcgtgggacaaggaactcttgaatgagtggcactggaaagagacattctcttctcagcccgatgttcttaaatacattgaacgagtatgtgaaaagcatgatctgtataaagatatgcaattcaatactcgcattgcatccgcacattgggttgaagattcctacttctggcgtgtgacggtcaccaatggcttcgaatatagagcgaggtttttcattagctgcatgggcttcctatctaggcctgtgttgcccctgattcccggcatcgagagtttcaagggcacctcttttcatacatcatcgtggccgaaagatctgaatcacaaaaaagatcttactgggaagaaggtcggcgtgataggtaccggagcgaccggcattcaaaccatcacggcaatagccaaggagtccaatagcgagtctcttacagtatttcaacgaacggcaaactggtcggcgccgctccgtaataccccaatctcaccagagcaaatgcaacagcacatgaaagagtacgacgagacatttgctcagtgcgcccgcacttcgtcaggatttttgtattccgcagatcctcgaggctctttcgaagtaacacaagccgagcgtctcgcgctctgggaccaactttatagtcaacaaggatttggcaaatggcttgcggttttcaaagatacttatacagaccgcgcggcaaacacgctgtattccgaatacatagcagagaaaatgagagcgcgcatcagtgaccctgagactgcagattccttaattcccaaggatcacggatttgggatgaggcgagtacccctagaaagcggctacttcgagatttacaaccgatccaacgtccatctagtcgatttgaagaagacaccaatcaagaaagtcactgagactggaattgagactaaggacggaaagacgcatgtcttggacgttgtgatatacgcaactggctttaacgccataacgggtgcttttggtgaggttgacttcacttgcaaagacggcagacctctgttaggatacagcgattcagaaaaagggaaacgggcgatatgggtcgatcaccgtccaaaaaccttcctcggaatcatggtcccggatatgcccaatgcattcctggtcctaggcccacatcagccgtttggcaatggaacacgtagcctggagaacgccgtcgatgttgtaatttccatgctgcaacatatttccgaccatgaatacaaatacgtggcgcctaaggcagaggcggtccaagcttggggagaacatgtcatagagtgcagtaaaggtcaattagtcaatgaggtagacagttggatgacaggtgtgaatagtaatgtcaaagggaagcaggagagaagcgtggcaagatatacgggtaacgtcgtagcatacagagaacgctgtgctgattgcgcgcggaatggttggaaggacctgatattcgcatagtattgctattaaccaagttacgtgactatatgtttcacacttcaaatgcaggctccaataatatacatagagcgtgtattgatcaatactctcaaatagatgctacgaaaagagttccaagcagtcttatcctctcacgaactccagttcacttt

SEQ ID NO: 33126 - DNA, 591 bp, Muscodor strobelii
  misc_feature: SGI cDNA ID NO. 571420
  misc_feature: Elevated expression when VOC is produced
  misc_feature: Encodes the peptide sequence at SEQ ID NO 33127
atggtgtgcatgtgtctcgactgtgatcatatctggagcaaaacaacatgcgatccgagaaaaaattgcaaatcgacatgttgccagtgcggaggcaagatgtatgagagcaacgtccacacgcccgcgtctgactgtagcggcaactcagtgctctccagcggccctattcccactgaaatacatgtcgacgacttcgaaaagcagctggatgagaggctgaaggaactccagtccatgaaagcgcaagatgacgtacagaccagcacaaacgtcgtcagcgaagctgacaagataacgagatggaaacaaagtatggccgacctatttgaggaggaccaacctgcaggtattgagttagacatgaaagtcgaccaaccttcattccccccgaaggaaagagcagatgcctcgattaacaatgtcagaagccggaagagatatctggaagtcgaagaagtggaatatccttgttctaaagctaacccgacaaaacccggtagtcgtcacatgggacgtaggaactacgagactcctaatacccaatccttgtccgactcagctccaaagaatataacaagaacagagtaa

SEQ ID NO: 33127 - protein, 196 aa, Muscodor strobelii
  misc_feature: SGI Peptide ID NO. 571420
  misc_feature: Useful for introducing or modulating the production of volatile compounds
MVCMCLDCDHIWSKTTCDPRKNCKSTCCQCGGKMYESNVHTPASDCSGNSVLSSGPIPTEIHVDDFEKQLDERLKELQSMKAQDDVQTSTNVVSEADKITRWKQSMADLFEEDQPAGIELDMKVDQPSFPPKERADASINNVRSRKRYLEVEEVEYPCSKANPTKPGSRHMGRRNYETPNTQSLSDSAPKNITRTE

SEQ ID NO: 33128 - DNA, 4510 bp, Muscodor strobelii
  misc_feature: SGI EST ID NO. CUFF.78537.0
  misc_feature: Variant of the nucleotide sequence at SEQ ID NO 33126
cacggcatgaggcatcgaggcatcgaggcacaggcatgctatagccaatcggaacatgtagccagcggccaagctgaaaaacatgttttgcaacaactagatgaaagcatctcgacttaaaaacccggcaaacacacgcgtgaaggtcgatgactcgaattttcccgtttccgaattagcaggcgacaagtgatcccaatttccctgtgccattttttggctttgacgcctggcttgcaaacagtcgggacgtcggtagtgctactccgacaccagttcttaagatggtgtgcatgtgtctcgactgtgatcatatctggagcaaaacaacatgcgatccgagaaaaaattgcaaatcgacatgttgcggaggcaagatgtatgagagcaacgtccacacgcccgcgtctgactgtagcggcaactcagtgctctccagcggccctattcccactgaaatacatgtcgacgacttcgaaaagcagctggatgagaggctgaaggaactccagtccatgaaagcgcaagatgacgtacagaccagcacaaacgtcgtcagcgaagctgacaagataacgagatggaaacaaagtatggccgacctatttgaggaggaccaacctgcaggtattgagttagacatgaaagtcgaccaaccttcattccccccgaaggaaagagcagatgcctcgattaacaatgtcagaagccggaagagatatctggaagtcgaagaagtggaatatccttgttctaaagctaacccgacaaaacccggtagtcgtcacatgggacgtaggaactacgagactcctaatacccaatccttgtccgactcagctccaaagaatataacaagaacagagtaactcaaatcgcgagacagtaactatagccaagtgcacaacatatcggccttagaaattggcctgagacaaatgcatggttgatcaacatagtctagaaattagtgatttggacatctctatcaagatagccctcgtgttacatcggcaacaattcatctggctgctttttgctcagagtaggtagtttgaatatgacgtcagagtcatctccctgattgcctgtttcgatcatgttcactctcagttcgacgagcaatctctcaatggcttttgaagccagtcgtttccaatgatcgcccacctcgccttccgagggccctatgattttctccgctcgttcatatgcgtctaaggcttgaccttgatcgccccagttttcgtacatggaccctaacagataggcggttttggtgtactgatacgtcatcttgagaagctgagaatcttgcctggatccataccagctcaatgcctctttaaaaagagattgcgactcttcgaatcttttcaattgctccaagataatggcaagactgacgcccgcattcaccctactccatgacacggcgtttctatcattatcatgctctacctgcccctcataggcaagacgatgagctttcaaagcagcactaatattaccaatatcgtgttgaaatattccgaagttctggagggtcgttagggtgtcaaggtggtttggggagaggttctctcgctgccaggtcaatgcagcatggaagcaggtggtggctttgtcaaaaaagccgccaccatgatacgcgacggccaacgcggctgtggtctccattgtccgtctatcttcagccccaagaagagagtctctgtgatcccttgttctctcaaatagggatatagattttttccagtcttttttgatcctgtacgcaattgcagtgtcgtgcataatggcatagatgcgtcttttcccgatttcagggtgttgcattgcttgagcaagggtatcagtcaatatatcgcttccgagtaacgttctacccatctcaagattgacgacgccagatgcatgttttagaagaatgctggcagtgatgctcagggcttggaactcggtcatcgcaagttgcgataacatgaaagccttcctgtactcctccaatgccagatgtacccatatactgttgacaatgatctcgatcatagtttgacattcggtcagctttgcacttcgaagtactgtttcggcccgcccaaaacacgtccgcgcaaaagcataatcgccttcatgaaagctagccagacccatgttgttgtagagctcggccagtcgcatgtcagacagtttgagaagattatatttcgttacgactgctccctctctagagtgggtcgttaggcgatagcaatagccgtataactcgatcgctttgctattgttacaacagaggcgaagtagagatgcaatgcgctctatattgtaaatatcttttgcagtgggagtctgcagctttttcctatccatcaagcaagccatgagcggttccgcatgcggtcctaagaggcccacaacctgccggtgatcgttctcagagctgcggggaacccttctagcaaagagcccaaccaccctagataagattgcggggcttcccgttgtagtatcggaaagacatgttgatcttcggatgtatatatgaagggccgctgagaaggaacagacgaccctctgttgcgagatatgtattttgacgaggccatattttgcgaggcactgcataatttggccaaaggaggaaagatactcgcgtaggcccagaaactctaatagctcatatgaaatgtgcttatgattaagtagagcacacatctgaagtagatgattctctgacaatggttttccatgcttgaagagctccgtcctgaatacgtattctattttcgaagagattacgtctggtaaagctatttgaccgtctttgaagcggaatgtgaggtcagaaacgctcttgcaatatggtagcatgtccgcagcatgtcgcaggagagctggatgaaagtcaagagcctctatcaatgatcgataatactgggcatctacatgacgtgagcttcctaacagggtcaattgattatgatacttgcctgtgcaggctttcttcacatctcctgtagggtttctgagcgacatcattaacactgccgctgactcgtctagatgaccaacctcgatacacgggtggtcgtatgacggcagttgaggtgtcgaaatcacgatgattgtgcccctctttaaaggtcttaaaaattctttgagtgccggttcagccagatcgtcgataacgagaacccaattgccgctagcatcgccctctaaaaataggaatagccgttcaatactcccagccagactatctcgcttacttaaaggccaggtaagataatcagtccacctcttgttaagtcggtctagatctttgttgagagtcaaccggagtctttcatcagtggccgcacttagccagaacacggaatcaaatacatccctgcttcgttccaggaagtgggccacgagctgcgttttaccgattccaggttggccaaataccgatatgatactttgtttgccaccggacatagattccaatagggtttgcatagactggatgtctttttctcgcccataaagtgctgtcctctgaggctcattcgcactgttcccgagattagggcaaaaccgtctgtagtggcagtatatgctgctaagtatggatttaaagttctttcggggcttaatttagcgcttgagcagagcgactctttatgctcttggtcgtgaggggtttgctcgatcgaagcaagatgtgacattgaggcatcattagtgattcttcgtattaggctgataactccatctagatctgcgtcatgaatcttcgcgaatttcaccatacctgaatgatctgtatccaccgagaatgtttgagtacattgtctaggatcactccatagttgtctggtagcggaatctcgctcaactagtttcagttgtgcagcacccttaacatggttagaccatgaatcatcagtcgtagatcgctgcgaatttttgaccttgttgttagcacaagaccaaataaagtgcaggcaacaagcacaagacttactattggaatacttgactccttggtctcatatccccagaaaaaagctttgttcctcagaccgccggagctgatagcccgagagaactggtcttcgagcttctgtaagtaagggcttctttctctcaattgttcgactagctgctggtttggcattccatgaacaatggcatcgaagtgtgatatcaccatgccatgattcggaacaccaaagaagacagcgccagccagcatcttcaagaatccccattctataatgcccgagctgctagcaaggatcaccaaagcttgtttcagtacaattccacctaggctatgcgcaagaaaaatgagattacgacctcctgcgttcgagtcatgtaaggagcgaagatctttgactagattcagcgcaatgtcctcaactttcttgaaagaagatgacttcatcatctgtgtattgtagccataaagtatcgatcttgtttgtggtagatgctttggcagagcatcccgtag

SEQ ID NO: 33129 - DNA, 1179 bp, Muscodor strobelii
  misc_feature: SGI cDNA ID NO. 571421
  misc_feature: Encodes the peptide sequence at SEQ ID NO 33130
atgcgactggccgagctctacaacaacatgggtctggctagctttcatgaaggcgattatgcttttgcgcggacgtgttttgggcgggccgaaacagtacttcgaagtgcaaagctgaccgaatgtcaaactatgatcgagatcattgtcaacagtatatgggtacatctggcattggaggagtacaggaaggctttcatgttatcgcaacttgcgatgaccgagttccaagccctgagcatcactgccagcattcttctaaaacatgcatctggcgtcgtcaatcttgagatgggtagaacgttactcggaagcgatatattgactgatacccttgctcaagcaatgcaacaccctgaaatcgggaaaagacgcatctatgccattatgcacgacactgcaattgcgtacaggatcaaaaaagactggaaaaaatctatatccctatttgagagaacaagggatcacagagactctcttcttggggctgaagatagacggacaatggagaccacagccgcgttggccgtcgcgtatcatggtggcggcttttttgacaaagccaccacctgcttccatgctgcattgacctggcagcgagagaacctctccccaaaccaccttgacaccctaacgaccctccagaacttcggaatatttcaacacgatattggtaatattagtgctgctttgaaagctcatcgtcttgcctatgaggggcaggtagagcatgataatgatagaaacgccgtgtcatggagtagggtgaatgcgggcgtcagtcttgccattatcttggagcaattgaaaagattcgaagagtcgcaatctctttttaaagaggcattgagctggtatggatccaggcaagattctcagcttctcaagatgacgtatcagtacaccaaaaccgcctatctgttagggtccatgtacgaaaactggggcgatcaaggtcaagccttagacgcatatgaacgagcggagaaaatcatagggccctcggaaggcgaggtgggcgatcattggaaacgactggcttcaaaagccattgagagattgctcgtcgaactgagagtgaacatgatcgaaacaggcaatcagggagatgactctgacgtcatattcaaactacctactctgagcaaaaagcagccagatgaattgttgccgatgtaa

SEQ ID NO: 33130 - protein, 392 aa, Muscodor strobelii
  misc_feature: SGI Peptide ID NO. 571421
  misc_feature (134)..(344): NCBI GI: 116195872 Blast Desc: CHGG_04534 [Chaetomium globosum CBS 148.51] gi|88180447|gb|EAQ87915.1| CHGG_04534 [Chaetomium globosum CBS 148.51]
  misc_feature (86)..(334): NCBI GI: 67526179 Blast Desc: AN3547.2 [Aspergillus nidulans FGSC A4] gi|40740565|gb|EAA59755.1| AN3547.2 [Aspergillus nidulans FGSC A4] gi|259481930|tpe|CBF75912.1| TPA: conserved [Aspergillus FGSC
  misc_feature (130)..(334): NCBI GI: 119482507 Blast Desc: TPR repeat protein [Neosartorya fischeri NRRL 181] gi|119409436|gb|EAW19385.1| TPR repeat protein [Neosartorya fischeri NRRL 181]
  misc_feature (55)..(347): NCBI GI: 20089086 Blast Desc: MA0188 [Methanosarcina acetivorans C2A] gi|19913948|gb|AAM03641.1| (multi-domain) [Methanosarcina acetivorans C2A]
  misc_feature (130)..(333): NCBI GI: 116195872 Blast Desc: CHGG_04534 [Chaetomium globosum CBS 148.51] gi|88180447|gb|EAQ87915.1| CHGG_04534 [Chaetomium globosum CBS 148.51]
  misc_feature (96)..(283): NCBI GI: 218438775 Blast Desc: Tetratricopeptide TPR_2 repeat protein [Cyanothece sp. PCC 7424] gi|218171503|gb|ACK70236.1| Tetratricopeptide TPR_2 repeat protein [Cyanothece sp. PCC 7424]
  misc_feature (8)..(332): NCBI GI: 73668892 Blast Desc: Mbar_A1366 [Methanosarcina barkeri str. Fusaro] gi|72396054|gb|AAZ70327.1| conserved [Methanosarcina barkeri str. Fusaro]
  misc_feature (148)..(328): NCBI GI: 116195872 Blast Desc: CHGG_04534 [Chaetomium globosum CBS 148.51] gi|88180447|gb|EAQ87915.1| CHGG_04534 [Chaetomium globosum CBS 148.51]
  misc_feature (130)..(348): NCBI GI: 119482507 Blast Desc: TPR repeat protein [Neosartorya fischeri NRRL 181] gi|119409436|gb|EAW19385.1| TPR repeat protein [Neosartorya fischeri NRRL 181]
  misc_feature (137)..(333): NCBI GI: 116195872 Blast Desc: CHGG_04534 [Chaetomium globosum CBS 148.51] gi|88180447|gb|EAQ87915.1| CHGG_04534 [Chaetomium globosum CBS 148.51]
MRLAELYNNMGLASFHEGDYAFARTCFGRAETVLRSAKLTECQTMIEIIVNSIWVHLALEEYRKAFMLSQLAMTEFQALSITASILLKHASGVVNLEMGRTLLGSDILTDTLAQAMQHPEIGKRRIYAIMHDTAIAYRIKKDWKKSISLFERTRDHRDSLLGAEDRRTMETTAALAVAYHGGGFFDKATTCFHAALTWQRENLSPNHLDTLTTLQNFGIFQHDIGNISAALKAHRLAYEGQVEHDNDRNAVSWSRVNAGVSLAIILEQLKRFEESQSLFKEALSWYGSRQDSQLLKMTYQYTKTAYLLGSMYENWGDQGQALDAYERAEKIIGPSEGEVGDHWKRLASKAIERLLVELRVNMIETGNQGDDSDVIFKLPTLSKKQPDELLPM

SEQ ID NO: 33131 - DNA, 3329 bp, Muscodor strobelii
  misc_feature: SGI EST ID NO. CUFF.78538.2
  misc_feature: Variant of the nucleotide sequence at SEQ ID NO 33129
ggctctctggaggaggaggcttctcaaactacttcggccgtccctcatatcaagagaacacagtctcatcttggttgtccgcgaatactgacgactttgaaaagtactacaactcgtctgggcgtgcctatcccgatgttgctgcttatgcttcctactacgagatcgtcactgccggccaatacggagccgttttcgggacgtctgctagtactccggttttcgctagtgtcatccagttgataaactctcaacgtcttgacgcaggtaaaagagatgtgaagaaagcctgcacagatgcccagtattatcgatcattgatagaggctcttgactttcatccagctctcctgcgacatgctgcggacatgctaccatattgcaagagcgtttctgacctcacattccgcttcaaagacggtcaaatagctttaccagacgtaatctcttcgaaaatagaatacgtattcaggacggagctcttcaagcatggaaaaccattgtcagagaatcatctacttcagatgtgtgctctacttaatcataagcacatttcatatgagctattagagtttctgggcctacgcgagtatctttcctcctttggccaaattatgcagtgcctcgcaaaatatggcctcgtcaaaatacatatctcgcaacagagggtcgtctgttccttctcagcggcccttcatatatacatccgaagatcaacatgtctttccgatactacaacgggaagccccgcaatcttatctagggtggttgggctctttgctagaagggttccccgcagctctgagaacgatcaccggcaggttgtgggcctcttaggaccgcatgcggaaccgctcatggcttgcttgatggataggaaaaagctgcagactcccactgcaaaagatatttacaatatagagcgcattgcatctctacttcgcctctgttgtaacaatagcaaagcgatcgagttatacggctattgctatcgcctaacgacccactctagagagggagcagtcgtaacgaaatataatcttctcaaactgtctgacatgcgactggccgagctctacaacaacatgggtctggctagctttcatgaaggcgattatgcttttgcgcggacgtgttttgggcgggccgaaacagtacttcgaagtgcaaagctgaccgaatgtcaaactatgatcgagatcattgtcaacagtatatgggtacatctggcattggaggagtacaggaaggctttcatgttatcgcaacttgcgatgaccgagttccaagccctgagcatcactgccagcattcttctaaaacatgcatctggcgtcgtcaatcttgagatgggtagaacgttactcggaagcgatatattgactgatacccttgctcaagcaatgcaacaccctgaaatcgggaaaagacgcatctatgccattatgcacgacactgcaattgcgtacaggatcaaaaaagactggaaaaaatctatatccctatttgagagaacaagggatcacagagactctcttcttggggctgaagatagacggacaatggagaccacagccgcgttggccgtcgcgtatcatggtggcggcttttttgacaaagccaccacctgcttccatgctgcattgacctggcagcgagagaacctctccccaaaccaccttgacaccctaacgaccctccagaacttcggaatatttcaacacgatattggtaatattagtgctgctttgaaagctcatcgtcttgcctatgaggggcaggtagagcatgataatgatagaaacgccgtgtcatggagtagggtgaatgcgggcgtcagtcttgccattatcttggagcaattgaaaagattcgaagagtcgcaatctctttttaaagaggcattgagctggtatggatccaggcaagattctcagcttctcaagatgacgtatcagtacaccaaaaccgcctatctgttagggtccatgtacgaaaactggggcgatcaaggtcaagccttagacgcatatgaacgagcggagaaaatcatagggccctcggaaggcgaggtgggcgatcattggaaacgactggcttcaaaagccattgagagattgctcgtcgaactgagagtgaacatgatcgaaacaggcaatcagggagatgactctgacgtcatattcaaactacctactctgagcaaaaagcagccagatgaattgttgccgatgtaacacgagggctatcttgatagagatgtccaaatcactaatttctagactatgttgatcaaccatgcatttgtctcaggccaatttctaaggccgatatgttgtgcacttggctatagttactgtctcgcgatttgagttactctgttcttgttatattctttggagctgagtcggacaaggattgggtattaggagtctcgtagttcctacgtcccatgtgacgactaccgggttttgtcgggttagctttagaacaaggatattccacttcttcgacttccagatatctcttccggcttctgacattgttaatcgaggcatctgctctttccttcggggggaatgaaggttggtcgactttcatgtctaactcaatacctgcaggttggtcctcctcaaataggtcggccatactttgtttccatctcgttatcttgtcagcttcgctgacgacgtttgtgctggtctgtacgtcatcttgcgctttcatggactggagttccttcagcctctcatccagctgcttttcgaagtcgtcgacatgtatttcagtgggaatagggccgctggagagcactgagttgccgctacagtcagacgcgggcgtgtggacgttgctctcatacatcttgcctccgcactggcactggcgatagtcagccatgttgtaattagcttgatattttgatctcggaagtcttgtatgaaacccgtcatgtttacttacacatgtcgatttgcaattttttctcggatcgcatgttgttttgctccagatatgatcacagtcgagacacatgcacaccatcttaagaactggtgtcggagtagcactaccgacgtcccgactgtttgcaagccaggcgtcaaagccaaaaaatggcacagggaaattgggatcacttgtcgcctgctaattcggaaacgggaaaattcgagtcatcgaccttcacgcgtgtgtttgccgggtttttaagtcgagatgctttcatctagttgttgcaaaacatgtttttcagcttggccgctggctacatgttccgattggctatagcatgcctgtgcctcgatgcctcgatgcctcatgccgtg

SEQ ID NO: 33132 - DNA, 1713 bp, Muscodor strobelii
  misc_feature: SGI cDNA ID NO. 571422
  misc_feature: Encodes the peptide sequence at SEQ ID NO 33133
atgtatgtttctaatcaagtctccggcttcgtggctctggtcagtgctgcgatagctataccctcggttgtggcattgccttccgctgttcccatggctttatttgagtcgattaaggccgctccgaaagattggacggtggacaaggcggcggcgaagagtgatattattgaacttcgcttcaatctcgcaaagcagaatgttgcagagtttcaagaaatagcactaaatattgcaacacctgggcatagtcagtacggcaagcatttgtccttggagcagatcgatgctattgtagccccaaagcctgaatctaaagatcttctctttgaatggcttggaaatcatagtctcgccggttcggcctatttgaataaacgtggaaacgtcgtaaaagttaagacgactattagtcaagccgaagcgcttctagcgaccaactatcactcttatgtgaacaaaaagacaggcgctagagcatctagagccctgtctgttcatataccagagactctggttggccacctcgatgtgatccaccctacaacgtctttcgccgttcagccagtccggccagcagccaagtcgcgagctatcaagtcccggcaacagactgttccccccgagcttgttcagctctacaagctagatggcatctctaacaatcttacccaagggaaactagggatcgctgggttcctcgagcaatggccgaatcattatgatctcaccgtttttctgaatgactacgcataccaaaacaacacagaccatttctatgattgcgtcactgtcaacaatgggcagtgtccaacagaccagttcggcgggatagaggccaacttagatattcagcttgcggctgtcttcacgagcgagataccctacacattctactctaccggaggagacggctcggtgactgacttgcaggagcttaccgactatcttctcggactcgatgcatccctgaaacccaatgtgctatcggtatcctacgggtcggatgaagtcgacgtaggccgaagtcttggcgacactgtttgcaactcgtatgccgagctcggcgccgccggtgtgtctgtcctctatgcatctggtgattatggtgtcggtcaagtatgcaatattgacggcgagcctgcctattccccattctttcctgccagctgtccttgggtcaccgctgtcggtggtactgacggcggcttcaaagtcgaagagccttggctctctggaggaggaggcttctcaaactacttcggccgtccctcatatcaagagaacacagtctcatcttggttgtccgcgaatactgacgactttgaaaagtactacaactcgtctgggcgtgcctatcccgatgttgctgcttatgcttcctactacgagatcgtcactgccggccaatacggagccgttttcgggacgtctgctagtactccggttttcgctagtgtcatccagttgataaactctcaacgtcttgacgcaggtaaaagtgctctcgggttcttgaacccttggatttacggtactgtgggagggacgaatgcattgaatgacattactggatcgaagatcggcggctgtactacaagtggttcggagattatgggtgccggcttcaatgctatccccggatgggaccccgccacaggctggggtagccccaactaccctaatctattggcagccggcatgtccgtttga

SEQ ID NO: 33133 - protein, 570 aa, Muscodor strobelii
  misc_feature: SGI Peptide ID NO. 571422
  misc_feature (42)..(185): Pfam Id: PF09286 Pfam Desc: Pro-kumamolisin, activation domain
  misc_feature (10)..(565): NCBI GI: 156050137 Blast Desc: SS1G_07655 [Sclerotinia sclerotiorum 1980] gi|154692056|gb|EDN91794.1| SS1G_07655 [Sclerotinia sclerotiorum 1980]
  misc_feature (10)..(565): NCBI GI: 154317922 Blast Desc: BC1G_02944 [Botryotinia fuckeliana B05.10] gi|150843602|gb|EDN18795.1| BC1G_02944 [Botryotinia fuckeliana B05.10]
  misc_feature (1)..(564): NCBI GI: 169619485 Blast Desc: SNOG_12941 [Phaeosphaeria nodorum SN15] gi|160703835|gb|EAT79741.2| SNOG_12941 [Phaeosphaeria nodorum SN15]
  misc_feature (33)..(513): NCBI GI: 189190588 Blast Desc: tripeptidyl-peptidase 1 precursor [Pyrenophora tritici-repentis Pt-1C-BFP] gi|187973239|gb|EDU40738.1| tripeptidyl-peptidase 1 precursor [Pyrenophora tritici-repentis
  misc_feature (11)..(568): NCBI GI: 242209238 Blast Desc: [Postia placenta Mad-698-R] gi|220730500|gb|EED84356.1| [Postia placenta Mad-698-R]
  misc_feature (25)..(564): NCBI GI: 258576237 Blast Desc: [Uncinocarpus reesii 1704] gi|237902566|gb|EEP76967.1| [Uncinocarpus reesii 1704]
  misc_feature (25)..(566): NCBI GI: 82408360 Blast Desc: family S53 protease [Phanerochaete chrysosporium]
  misc_feature (17)..(570): NCBI GI: 146323370 Blast Desc: tripeptidyl peptidase SED3 [Aspergillus fumigatus Af293] gi|74628147|sp|Q70GH4.1|SED3_ASPFU RecName: Full=Tripeptidyl-peptidase sed3; AltName: Full=Sedolisin-C; SED3
  misc_feature (17)..(570): NCBI GI: 159127732 Blast Desc: tripeptidyl peptidase SED3 [Aspergillus fumigatus A1163]
  misc_feature (1)..(563): NCBI GI: 242823298 Blast Desc: tripeptidyl peptidase SED3 [Talaromyces stipitatus ATCC 10500] gi|218712973|gb|EED12398.1| tripeptidyl peptidase SED3 [Talaromyces stipitatus ATCC 10500]
  misc_feature (39)..(564): SWISSPROT Homolog: EC 3.4.14.9 Tripeptidyl-peptidase I
MYVSNQVSGFVALVSAAIAIPSVVALPSAVPMALFESIKAAPKDWTVDKAAAKSDIIELRFNLAKQNVAEFQEIALNIATPGHSQYGKHLSLEQIDAIVAPKPESKDLLFEWLGNHSLAGSAYLNKRGNVVKVKTTISQAEALLATNYHSYVNKKTGARASRALSVHIPETLVGHLDVIHPTTSFAVQPVRPAAKSRAIKSRQQTVPPELVQLYKLDGISNNLTQGKLGIAGFLEQWPNHYDLTVFLNDYAYQNNTDHFYDCVTVNNGQCPTDQFGGIEANLDIQLAAVFTSEIPYTFYSTGGDGSVTDLQELTDYLLGLDASLKPNVLSVSYGSDEVDVGRSLGDTVCNSYAELGAAGVSVLYASGDYGVGQVCNIDGEPAYSPFFPASCPWVTAVGGTDGGFKVEEPWLSGGGGFSNYFGRPSYQENTVSSWLSANTDDFEKYYNSSGRAYPDVAAYASYYEIVTAGQYGAVFGTSASTPVFASVIQLINSQRLDAGKSALGFLNPWIYGTVGGTNALNDITGSKIGGCTTSGSEIMGAGFNAIPGWDPATGWGSPNYPNLLAAGMSV

SEQ ID NO: 33134 - DNA, 915 bp, Muscodor strobelii
  misc_feature: SGI cDNA ID NO. 571423
  misc_feature: Encodes the peptide sequence at SEQ ID NO 33135
atgtttgaactacctacctggccatctcgtacccctcaggaaaaatccgacgaagaaaacagtgtggcaccaagcgtaagcccaccagagccgtcgcctgaggatatcggacgaaagccatggaagcatgttggatacaagcgctatgctgagttcttgtcttctgacgatgatctactcatatttagacggtttacaactttgaacgcccgagttgcgctattactccaggatcgagtaagcatactagaggagcaacttaagaagctggacgatcgatatagcgatgttaatgcagaggatatccacaatggatcgttcagagatgaaatgccggaacgtgagaagttgatgaatgagatagccgagagcctggataaatacaacaacttcttaattcagcaggcccatcttcgggagttcacgagggcaccaaagcgagacatagaaagcttgcgaacctggcacgagaactatgacaacagggcgattgacgaggatgaacaagtctatctgtcaaaaacacaagatctcttccgattgaaatctcaagataaaacggtcctccgcgagtggattgatagctctctacagttgcggacactcaatttatggaggaagaaaagtcgagaggttcccaaatacgaagcgaataatgttgcatactattcagataccgccatgaatgcttttgcctccagtgtaattgtcttcatcggagcggcgatattaattacaccactttgggtgcttcagtcaatcgacagtctgactaagaaattggctgtgattaccgtgtttgtccttgtatttctattagtattgtcgttcatgctggtggccaaaccttttgaagctctaggcgctactgctgcatatgcggctgtacttatggtgttcatccaggttggataa

SEQ ID NO: 33135 - protein, 304 aa, Muscodor strobelii
  misc_feature: SGI Peptide ID NO. 571423
  misc_feature (7)..(304): NCBI GI: 256732079 Blast Desc: NECHADRAFT_80333 [Nectria haematococca mpVI 77-13-4]
  misc_feature (25)..(292): NCBI GI: 171685542 Blast Desc: protein product [Podospora anserina] gi|170942732|emb|CAP68385.1| protein product [Podospora anserina]
  misc_feature (41)..(304): NCBI GI: 189204077 Blast Desc: PTRG_08042 [Pyrenophora tritici-repentis Pt-1C-BFP] gi|187985473|gb|EDU50961.1| PTRG_08042 [Pyrenophora tritici-repentis Pt-1C-BFP]
  misc_feature (32)..(302): NCBI GI: 169619281 Blast Desc: SNOG_12835 [Phaeosphaeria nodorum SN15] gi|111058515|gb|EAT79635.1| SNOG_12835 [Phaeosphaeria nodorum SN15]
  misc_feature (132)..(304): NCBI GI: 116199503 Blast Desc: [Chaetomium globosum CBS 148.51] gi|88179186|gb|EAQ86654.1| [Chaetomium globosum CBS 148.51]
  misc_feature (31)..(293): NCBI GI: 256721705 Blast Desc: NECHADRAFT_82461 [Nectria haematococca mpVI 77-13-4]
  misc_feature (45)..(301): NCBI GI: 256722189 Blast Desc: NECHADRAFT_52473 [Nectria haematococca mpVI 77-13-4]
  misc_feature (9)..(293): NCBI GI: 261355016 Blast Desc: conserved [Verticillium albo-atrum VaMs.102]
  misc_feature (21)..(128): NCBI GI: 169605277 Blast Desc: SNOG_05661 [Phaeosphaeria nodorum SN15] gi|111065605|gb|EAT86725.1| SNOG_05661 [Phaeosphaeria nodorum SN15]
  misc_feature (45)..(301): NCBI GI: 145244036 Blast Desc: An11g05410 [Aspergillus niger] gi|134079214|emb|CAL00388.1| protein product [Aspergillus niger]
MFELPTWPSRTPQEKSDEENSVAPSVSPPEPSPEDIGRKPWKHVGYKRYAEFLSSDDDLLIFRRFTTLNARVALLLQDRVSILEEQLKKLDDRYSDVNAEDIHNGSFRDEMPEREKLMNEIAESLDKYNNFLIQQAHLREFTRAPKRDIESLRTWHENYDNRAIDEDEQVYLSKTQDLFRLKSQDKTVLREWIDSSLQLRTLNLWRKKSREVPKYEANNVAYYSDTAMNAFASSVIVFIGAAILITPLWVLQSIDSLTKKLAVITVFVLVFLLVLSFMLVAKPFEALGATAAYAAVLMVFIQVG

SEQ ID NO: 33136 - DNA, 1314 bp, Muscodor strobelii
  misc_feature: SGI EST ID NO. CUFF.78468.1
  misc_feature: Variant of the nucleotide sequence at SEQ ID NO 33134
cgcacgttcagcacagttggccaggatttgtcagaacgacttcttcatcttcctttaagggaattgcagaatgaacaccttttgggatagcagctcaacttcaattttggaagacaattggaacgtcctttgatgtttgaactacctacctggccatctcgtacccctcaggaaaaatccgacgaagaaaacagtgtggcaccaagcgtaagcccaccagagccgtcgcctgaggatatcggacgaaagccatggaagcatgttggatacaagcgctatgctgagttcttgtcttctgacgatgatctactcatatttagacggtttacaactttgaacgcccgagttgcgctattactccaggatcgagtaagcatactagaggagcaacttaagaagctggacgatcgatatagcgatgttaatgcagaggatatccacaatggatcgttcagagatgaaatgccggaacgtgagaagttgatgaatgagatagccgagagcctggataaatacaacaacttcttaattcagcaggcccatcttcgggagttcacgagggcaccaaagcgagacatagaaagcttgcgaacctggcacgagaactatgacaacagggcgattgacgaggatgaacaagtctatctgtcaaaaacacaagatctcttccgattgaaatctcaagataaaacggtcctccgcgagtggattgatagctctctacagttgcggacactcaatttatggaggaagaaaagtcgagaggttcccaaatacgaagcgaataatgttgcatactattcagataccgccatgaatgcttttgcctccagtgtaattgtcttcatcggagcggcgatattaattacaccactttgggtgcttcagtcaatcgacagtctgactaagaaattggctgtgattaccgtatatgcggctgtacttatggtgttcatccaggttggataagctgatcaccaagcctagtagagaaatgactctgttcacaaagatcgttgattagctgttgaggaggacttctaatagatgattacagatttcatagtgggaattaccaatgttcctctgatcctaactagcaggggcaaggccatcaaactgagcatgtatagttgtcaagtagttcaattcggcatagaacaagcagaagattcacgatgaaacgaaaatagagagtttggcgtcaatgatcgcagactatcttttgggaactcatagcgctcttgtgcttttgagacaactctcaactctcaccccacatgagattgcatccccgcacaatgctgttaagcg

SEQ ID NO: 33137 - DNA, 1482 bp, Muscodor strobelii
  misc_feature: SGI cDNA ID NO. 571424
  misc_feature: Encodes the peptide sequence at SEQ ID NO 33138
atgccaacgaaaagaaagcgtcaacgaaatgcgccggctaacttgcccaacaaaaagaccgccgtcaacacgactctgcctctctcaccctcgccagatgcgacgtctgcattatcggccaacccctccgatcatttagacccgaagagcctagccagcgttgtttcggaagaggagatcgaaatcgccgtcgagacgctagactcactttctcggcatcccgctctcatcaagtccaaggcatgtcgcaccctgcgcaccgccgtgtatggcttcaagcaggcatgcaccaccggcatgaacacagctgctgagacgaatctcacctcccgcgtgtcggctgctatcattgatggcaagtatgtcgatgctgttgtgttgctagccgagatgcgaatcagagcccaggccccgaaactaggcgcgctcaacaggtgggtgcgcgatctagacgtcgtttcaggtctctcgagcgaaaaacccgacatccgaaccgatacacaactggaactattgagagtgatggacatgatccttcgggtaacgggacccgtagacgaggtatcgaaagtgccattttctcacatgggcccgctggctttacaaccgatatgggataacggagacaaagtaaaaccgagagggtgtgtccgacaaagtgtaatagacagatctatctttgagaactttgcgagagacgtgaaggacagattccgcatactcgagacgatcccgggccccgatcgaaagccaccgaatgtgcaccccgcagtcgttcacctcagcagcgacaatgcagtgcaattagatttaaagggaccatctactacactgcataagcatccgacggtccccaatttatcgctcatgaagaatgtactctcgaagaaggagtgcatgtccatcgtcgcagcgatggagacaattggcttcctgccggattgccctctgcgtgacgatggttctgcttcaagtatcttggcgcataatgtctactggatggtagacaaagcttttcatgatgctttgtggaaccgcgtatctccacatataccttctcatgtgggcagacgcaaggcacgtggtatcaacaggcgtttcagagtgtaccgttatgtgcctggtgctgagtatcgatgtcacttcgacggtggttggccgccctccggtgtcgacccaaagacgggtgcttatgtttatgatgcttcgcctgcgggagcaaaacagtcaagcttattcacgtttttggtatacttgaatgacgagttcgagggcggagaaacgaccttcttcacccctagcatcagggagggcgtcatgaatgcgcatccagtgcggccaacgatgggatctgtcgcgctctttcctcatggcgatgcaaagggcgcgctgctccatgaaggaacaggcgtcagaacaggggcaaagtacatcatacgcacagatgtagagttcgacgttgagcccgagtgtgtcctttag

SEQ ID NO: 33138 - protein, 493 aa, Muscodor strobelii
  misc_feature: SGI Peptide ID NO. 571424
  misc_feature (30)..(489): NCBI GI: 85081481 Blast Desc: NCU03445 [Neurospora crassa OR74A] gi|9368561|emb|CAB98222.1| [Neurospora crassa] gi|28917806|gb|EAA27495.1| conserved [Neurospora crassa OR74A]
  misc_feature (5)..(490): NCBI GI: 145609485 Blast Desc: MGG_13440 [Magnaporthe grisea 70-15] gi|145016848|gb|EDK01278.1| MGG_13440 [Magnaporthe grisea 70-15]
  misc_feature (4)..(488): NCBI GI: 189198161 Blast Desc: prolyl 4-hydroxylase [Pyrenophora tritici-repentis Pt-1C-BFP] gi|187981366|gb|EDU47992.1| prolyl 4-hydroxylase [Pyrenophora tritici-repentis Pt-1C-BFP]
  misc_feature (5)..(491): NCBI GI: 261354748 Blast Desc: prolyl 4-hydroxylase [Verticillium albo-atrum VaMs.102]
  misc_feature (6)..(489): NCBI GI: 115402291 Blast Desc: conserved [Aspergillus terreus NIH2624] gi|114189068|gb|EAU30768.1| conserved [Aspergillus terreus NIH2624]
  misc_feature (6)..(489): NCBI GI: 238506791 Blast Desc: conserved [Aspergillus flavus NRRL3357] gi|220689310|gb|EED45661.1| conserved [Aspergillus flavus NRRL3357]
  misc_feature (6)..(489): NCBI GI: 169785881 Blast Desc: [Aspergillus oryzae RIB40] gi|83776149|dbj|BAE66268.1| protein product [Aspergillus oryzae]
  misc_feature (6)..(489): NCBI GI: 255946551 Blast Desc: Pc20g15710 [Penicillium chrysogenum Wisconsin 54-1255] gi|211588778|emb|CAP86900.1| Pc20g15710 [Penicillium chrysogenum Wisconsin 54-1255]
  misc_feature (5)..(487): NCBI GI: 154293968 Blast Desc: BC1G_14163 [Botryotinia fuckeliana B05.10] gi|150845135|gb|EDN20328.1| BC1G_14163 [Botryotinia fuckeliana B05.10]
  misc_feature (6)..(489): NCBI GI: 145245203 Blast Desc: An11g09110 [Aspergillus niger] gi|134079565|emb|CAK97041.1| protein product [Aspergillus niger]
MPTKRKRQRNAPANLPNKKTAVNTTLPLSPSPDATSALSANPSDHLDPKSLASVVSEEEIEIAVETLDSLSRHPALIKSKACRTLRTAVYGFKQACTTGMNTAAETNLTSRVSAAIIDGKYVDAVVLLAEMRIRAQAPKLGALNRWVRDLDVVSGLSSEKPDIRTDTQLELLRVMDMILRVTGPVDEVSKVPFSHMGPLALQPIWDNGDKVKPRGCVRQSVIDRSIFENFARDVKDRFRILETIPGPDRKPPNVHPAVVHLSSDNAVQLDLKGPSTTLHKHPTVPNLSLMKNVLSKKECMSIVAAMETIGFLPDCPLRDDGSASSILAHNVYWMVDKAFHDALWNRVSPHIPSHVGRRKARGINRRFRVYRYVPGAEYRCHFDGGWPPSGVDPKTGAYVYDASPAGAKQSSLFTFLVYLNDEFEGGETTFFTPSIREGVMNAHPVRPTMGSVALFPHGDAKGALLHEGTGVRTGAKYIIRTDVEFDVEPECVL

SEQ ID NO: 33139 - DNA, 2227 bp, Muscodor strobelii
  misc_feature: SGI EST ID NO. CUFF.78417.0
  misc_feature: Variant of the nucleotide sequence at SEQ ID NO 33137
accacataatcctcatttcaattgacgagctctgaataagacttttccaaatcaatcattcgacgacaaacaaagttaaaatgccaacgaaaagaaagcgtcaacgaaatgcgccggctaacttgcccaacaaaaagaccgccgtcaacacgactctgcctctctcaccctcgccagatgcgacgtctgcattatcggccaacccctccgatcatttagacccgaagagcctagccagcgttgtttcggaagaggagatcgaaatcgccgtcgagacgctagactcactttctcggcatcccgctctcatcaagtccaaggcatgtcgcaccctgcgcaccgccgtgtatggcttcaagcaggcatgcaccaccggcatgaacacagctgctgagacgaatctcacctcccgcgtgtcggctgctatcattgatggcaagtatgtcgatgctgttgtgttgctagccgagatgcgaatcagagcccaggccccgaaactaggcgcgctcaacaggtgggtgcgcgatctagacgtcgtttcaggtctctcgagcgaaaaacccgacatccgaaccgatacacaactggaactattgagagtgatggacatgatccttcgggtaacgggacccgtagacgaggtatcgaaagtgccattttctcacatgggcccgctggctttacaaccgatatgggataacggagacaaagtaaaaccgagagggtgtgtccgacaaagtgtaatagacagatctatctttgagaactttgcgagagacgtgaaggacagattccgcatactcgagacgatcccgggccccgatcgaaagccaccgaatgtgcaccccgcagtcgttcacctcagcagcgacaatgcagtgcaattagatttaaagggaccatctactacactgcataagcatccgacggtccccaatttatcgctcatgaagaatgtactctcgaagaaggagtgcatgtccatcgtcgcagcgatggagacaattggcttcctgccggattgccctctgcgtgacgatggttctgcttcaagtatcttggcgcataatgtctactggatggtagacaaagcttttcatgatgctttgtggaaccgcgtatctccacatataccttctcatgtgggcagacgcaaggcacgtggtatcaacaggcgtttcagagtgtaccgttatgtgcctggtgctgagtatcgatgtcacttcgacggtggttggccgccctccggtgtcgacccaaagacgggtgcttatgtttatgatgcttcgcctgcgggagcaaaacagtcaagcttattcacgtttttggtatacttgaatgacgagttcgagggcggagaaacgaccttcttcacccctagcatcagggagggcgtcatgaatgcgcatccagtgcggccaacgatgggatctgtcgcgctctttcctcatggcgatgcaaagggcgcgctgctccatgaaggaacaggcgtcagaacaggggcaaagtacatcatacgcacagatgtagagttcgacgttgagcccgagtgtgtcctttaggggcacatcaatcaattgagaattaacttcaaccatgtcgcagtgccttagctcacgaatcattcttgctgattcaaatatgcatcttattgacatgcagagtgttcgattatactcttgtacatcactgcaccagacgccttactggatgacacgtttgtcagtcaatctgatcgcttggactgagttccagtaggtcgatgtcattttctagacaacatttttggtgactctatagtatgttggacaattctatgttcgagatacctcgtgtggtttgtacaaagagtaatgctttgtcagagttcaggttcttgtacgacttatcgtgggttgccggatgcggcaaattagtatcgtctttatggtcctgtaatcgcctaaattgaaatcttccacaatatcgagcttgggcgttagagatctcggtaataggagcatgagtatactaaacacgaagggtccttgttagcggttcgaagttcgattgtcacgactaagccagccgatacttgaaaatagtaggacaattgttccagcactagaagtctttagagtcagtcttgagcgttaccacttggctcttctcttcgaccacaatagtgtatcctgatgggtagacgacctggcaattcctcgctaggagcacctaatcctccgcctcc

SEQ ID NO: 33140 - DNA, 1917 bp, Muscodor strobelii
  misc_feature: SGI cDNA ID NO. 571425
  misc_feature: Encodes the peptide sequence at SEQ ID NO 33141
atggaaaggcgaggagcaggttccaattcaagcgtgtacggacaggcgtgtgtgcagtgctacaaggccaaatgccgttgcgtaccacgatctgaaggtggtggttgcgagagatgcactcgtcttaggaagcaatgtcaaccttcagagtcgactcgaaagcgtgccaatgacccgaacgcccaaattgcgaagcttgagggcaagattgaagcacttacatcagcgctccaatctgtcgttaaagctggtggggtccaagaagcatccattgccctatctccgccggtcactgacctggaagacacaacgagaacccgcgacaataccatagtgtctgataatcacccagctaacgtagcgtcggagcaaaattcgtttatcgatctcagtcagtcgccagatccgaactcgctttacacggaagccttcccgcaatcgtttccgactattccagacacaccaagtttagatgagattgatatacatttcatttgttttcgtgaaagactactaccatgctttccgttcatgaatataccttcggatgccacagctttggagttgcgccaagagagacctttcttactccacgcaatcgtcgcggtgaccacaccctcgatacaacgcaaagtagagcgtattgaatatttaagacacatactgacaagggccattattctcgagaatcaatctaatcttgacatgctacagagtttgttgacgtatatagcttggagcaccgacccttttctcaagcgtgcaagtaacttgtcccgcatgatgatgctggcaatttctctagtctatgacctgcaattgactaaaccgaagtcatcacctgaatcgtacttcataagcagaatggcgcccgggctcacagaaacagaccaaaaggcacatgcacattctatacaaggctcgcttgaacagcatcgagctgtgctcgcgtgctttgcactcagctccataatttccacttatcttcgacgaatcgatagtatgcagtggacctctcaaatggaagacagcatgcgcttcattcagaataacaccgaaagaccttcagacgaggctttcatatttcaagtgcgcctacaggcactggcgcagaaagtggcccacctccgagatcagcacgtcggcgatagtacacaatcaatgagcggagcatcggcggcgtcagtcgggccagtccttctctatactaaagtgctccgtgagcagctccaggagctcagaagctcgctctcctctgatgtcgaacaaagagtgatagaggtccttctcgtatatgcgcattacatagatctttgcatcagcgaggccacacgtctcgctagctcggaagcccctctgctcgccccggatcagatgtcaagcgttatgggaggtgatctgagcggctttgagaaaatagattgtctgtggcgatccgtacatgctattaagtcatggctagacgcgttctacgacgtcgcgccggctgcatacgtaggaatgcctttcttctattggtttcaattagtacgctgcattattcttgccaaacatcttgctacgttcaaagacccagcttgggattctcaagccgtttacaatacatttgaccttgtaggaactttgggatggctagcgacgaagatagaaatggctagcaaggaagcgggcgagcagtcggacgacgatctatttcgaaaactcggaaggatgctccgaatgtcactggcgtggattgatgcaaagagaaacgcagcgggcaatgagacgatcagtccggcctctgggttgacactttctaatgaagacaacactgctaccttaaatgaatcgccttggatgggaggagttcaacttggtgacgatgcgtggtttgaggagtatttaggctggtccccaggtggccttggaccatga

SEQ ID NO: 33141 - protein, 638 aa, Muscodor strobelii
  misc_feature: SGI Peptide ID NO. 571425
  misc_feature (1)..(633): NCBI GI: 212531877 Blast Desc: C6 transcription factor, [Penicillium marneffei ATCC 18224] gi|210071459|gb|EEA25548.1| C6 transcription factor, [Penicillium marneffei ATCC 18224]
  misc_feature (1)..(630): NCBI GI: 242774209 Blast Desc: tRNA processing endoribonuclease Trz1, [Talaromyces stipitatus ATCC 10500] gi|218722014|gb|EED21432.1| tRNA processing endoribonuclease Trz1, [Talaromyces stipitatus ATCC
  misc_feature (156)..(633): NCBI GI: 145249260 Blast Desc: An14g03440 [Aspergillus niger] gi|134081647|emb|CAK46581.1| protein product [Aspergillus niger]
  misc_feature (1)..(630): NCBI GI: 119474159 Blast Desc: NFIA_004140 [Neosartorya fischeri NRRL 181] gi|119407108|gb|EAW17058.1| conserved [Neosartorya fischeri NRRL 181]
  misc_feature (4)..(626): NCBI GI: 259488675 Blast Desc: TPA: Zn(II)2Cys6 transcription factor (Eurofung) [Aspergillus nidulans FGSC A4]
  misc_feature (1)..(630): NCBI GI: 159128267 Blast Desc: C6 transcription factor, [Aspergillus fumigatus A1163]
  misc_feature (1)..(630): NCBI GI: 70986195 Blast Desc: C6 transcription factor [Aspergillus fumigatus Af293] gi|66846221|gb|EAL86554.1| C6 transcription factor, [Aspergillus fumigatus Af293]
  misc_feature (1)..(630): NCBI GI: 255955227 Blast Desc: Pc21g13490 [Penicillium chrysogenum Wisconsin 54-1255] gi|211590077|emb|CAP96246.1| Pc21g13490 [Penicillium chrysogenum Wisconsin 54-1255]
  misc_feature (30)..(630): NCBI GI: 261193705 Blast Desc: C6 transcription factor [Ajellomyces dermatitidis SLH14081] gi|239588863|gb|EEQ71506.1| C6 transcription factor [Ajellomyces dermatitidis SLH14081]
  misc_feature (136)..(627): NCBI GI: 67517692 Blast Desc: AN1028.2 [Aspergillus nidulans FGSC A4] gi|40746440|gb|EAA65596.1| AN1028.2 [Aspergillus nidulans FGSC A4]
MERRGAGSNSSVYGQACVQCYKAKCRCVPRSEGGGCERCTRLRKQCQPSESTRKRANDPNAQIAKLEGKIEALTSALQSVVKAGGVQEASIALSPPVTDLEDTTRTRDNTIVSDNHPANVASEQNSFIDLSQSPDPNSLYTEAFPQSFPTIPDTPSLDEIDIHFICFRERLLPCFPFMNIPSDATALELRQERPFLLHAIVAVTTPSIQRKVERIEYLRHILTRAIILENQSNLDMLQSLLTYIAWSTDPFLKRASNLSRMMMLAISLVYDLQLTKPKSSPESYFISRMAPGLTETDQKAHAHSIQGSLEQHRAVLACFALSSIISTYLRRIDSMQWTSQMEDSMRFIQNNTERPSDEAFIFQVRLQALAQKVAHLRDQHVGDSTQSMSGASAASVGPVLLYTKVLREQLQELRSSLSSDVEQRVIEVLLVYAHYIDLCISEATRLASSEAPLLAPDQMSSVMGGDLSGFEKIDCLWRSVHAIKSWLDAFYDVAPAAYVGMPFFYWFQLVRCIILAKHLATFKDPAWDSQAVYNTFDLVGTLGWLATKIEMASKEAGEQSDDDLFRKLGRMLRMSLAWIDAKRNAAGNETISPASGLTLSNEDNTATLNESPWMGGVQLGDDAWFEEYLGWSPGGLGP

SEQ ID NO: 33142 - DNA, 1313 bp, Muscodor strobelii
  misc_feature: SGI EST ID NO. CUFF.78436.0
  misc_feature: Variant of the nucleotide sequence at SEQ ID NO 33140
aacggactcaacccgttctcctactgcgaattgacaatcgccgtgcatcctattcatcgccaatggaaaggcgaggagcaggttccaattcaagcgtgtacggacaggcgtgtgtgcagtgctacaaggccaaatgccgttgcgtaccacgatctgaaggtggtggttgcgagagatgcactcgtcttaggaagcaatgtcaaccttcagagtcgactcgaaagcgtgccaatgacccgaacgcccaaattgcgaagcttgagggcaagattgaagcacttacatcagcgctccaatctgtcgttaaagctggtggggtccaagaagcatccattgccctatctccgccggtcactgacctggaagacacaacgagaacccgcgacaataccatagtgtctgataatcacccagctaacgtagcgtcggagcaaaattcgtttatcgatctcagtcagtcgccagatccgaactcgctttacacggaagccttcccgcaatcgtttccgactattccagacacaccaagtttagatgagattgatatacatttcatttgttttcgtgaaagactactaccatgctttccgttcatgaatataccttcggatgccacagctttggagttgcgccaagagagacctttcttactccacgcaatcgtcgcggtgaccacaccctcgatacaacgcaaagtagagcgtattgaatatttaagacacatactgacaagggccattattctcgagaatcaatctaatcttgacatgctacagagtttgttgacgtatatagcttggagcaccgacccttttctcaagcgtgcaagtaacttgtcccgcatgatgatgctggcaatttctctagtctatgacctgcaattgactaaaccgaagtcatcacctgaatcgtacttcataagcagaatggcgcccgggctcacagaaacagaccaaaaggcacatgcacattctatacaaggctcgcttgaacagcatcgagctgtgctcgcgtgctttgcactcagctccataatttccacttatcttcgacgaatcgatagtatgcagtggacctctcaaatggaagacagcatgcgcttcattcagaataacaccgaaagaccttcagacgaggctttcatatttcaagtgcgcctacaggcactggcgcagaaagtggcccacctccgagatcagcacgtcggcgatagtacacaatcaatgagcggagcatcggcggcgtcagtcgggccagtccttctctatactaaagtgctccgtgagcagctccaggagctcagaagctcgctc

SEQ ID NO: 33143 - DNA, 996 bp, Muscodor strobelii
  misc_feature: SGI cDNA ID NO. 571426
  misc_feature: Encodes the peptide sequence at SEQ ID NO 33144
atggtatcaattgccgaagtcaaggcttcgaatgttagaatcactgagaagacagcgccacaaaccgctgtgttcaccggtggcacagatggaattggtaaagcaactctcatccgatttgtcgcaacgaaagtaccaatgaaggtgtacgtcattggcagaaatggcgacaaacaaaagtcgtttcttgaagaactccgaagatccaacgaccaagccgacatcgtgtgggttcaaggacaaatttcattgcttgcggaggttcagagagtatccgaagtaatcaaatcgcaagagacaagcattgattttctgttcatgagcgcaggatttgtctatcttggaaacgaacgaattgaaacgccggagggcaacttgatatcgctggctcttacatactatggtcgaacgctgctcatgatgcagcttttgcccttacttaacgcatcgtcgaagcgcccccgcgttctcagtgttctagcagcgggcagagaatcaacctcaatttattttgacgatatcgacctcaagaagccgggtgcatttggtctcgcagcagggtcaagatcatcagcgacttacaacactcttacaatgtcacgactggcgaaagaaaatcccaaagtggtcttcattcaccactatcctggcggcgtcaataccagtctgttcaaaaagatcttcggtgacaaatggtggttcccagccttcgatatgctcctcatactcttcgcatacacccctgaacaggctggagaaaagaacacgttcatgttgacaagtgcgaaatatgggggtgaaggtgttcccttggggcctaaggagcgcccagcactgaacatagacaaggtcgcaaagccaggatcattgtatttggtcgatgacaagttgcgtgagcttcagcaggaaaagatcctaggggagctacgcaacatgaacgctggaaacatcgtttgggatcatacgcaagagacaattggcaaatatgtttcttga

SEQ ID NO: 33144 - protein, 331 aa, Muscodor strobelii
  misc_feature: SGI Peptide ID NO. 571426
  misc_feature (1)..(331): NCBI GI: 145249262 Blast Desc: An14g03450 [Aspergillus niger] gi|134081648|emb|CAK46582.1| protein product [Aspergillus niger]
  misc_feature (1)..(330): NCBI GI: 116201161 Blast Desc: CHGG_08465 [Chaetomium globosum CBS 148.51] gi|88176983|gb|EAQ84451.1| CHGG_08465 [Chaetomium globosum CBS 148.51]
  misc_feature (1)..(330): NCBI GI: 238502025 Blast Desc: short-chain dehydrogenase, [Aspergillus flavus NRRL3357] gi|220691056|gb|EED47404.1| short-chain dehydrogenase, [Aspergillus flavus NRRL3357]
  misc_feature (1)..(330): NCBI GI: 256721572 Blast Desc: NECHADRAFT_37353 [Nectria haematococca mpVI 77-13-4]
  misc_feature (1)..(330): NCBI GI: 238844935 Blast Desc: conserved [Microsporum canis CBS 113480]
  misc_feature (1)..(330): NCBI GI: 169776860 Blast Desc: [Aspergillus oryzae RIB40] gi|83771632|dbj|BAE61763.1| protein product [Aspergillus oryzae]
  misc_feature (1)..(330): NCBI GI: 171677734 Blast Desc: protein product [Podospora anserina] gi|170936935|emb|CAP61594.1| protein product [Podospora anserina]
  misc_feature (1)..(268): NCBI GI: 46137637 Blast Desc: FG10334.1 [Gibberella zeae PH-1]
  misc_feature (1)..(322): NCBI GI: 154290826 Blast Desc: BC1G_15452 [Botryotinia fuckeliana B05.10] gi|150847403|gb|EDN22596.1| BC1G_15452 [Botryotinia fuckeliana B05.10]
  misc_feature (1)..(328): NCBI GI: 145247548 Blast Desc: An12g09700 [Aspergillus niger] gi|134080762|emb|CAL00876.1| protein product [Aspergillus niger]
MVSIAEVKASNVRITEKTAPQTAVFTGGTDGIGKATLIRFVATKVPMKVYVIGRNGDKQKSFLEELRRSNDQADIVWVQGQISLLAEVQRVSEVIKSQETSIDFLFMSAGFVYLGNERIETPEGNLISLALTYYGRTLLMMQLLPLLNASSKRPRVLSVLAAGRESTSIYFDDIDLKKPGAFGLAAGSRSSATYNTLTMSRLAKENPKVVFIHHYPGGVNTSLFKKIFGDKWWFPAFDMLLILFAYTPEQAGEKNTFMLTSAKYGGEGVPLGPKERPALNIDKVAKPGSLYLVDDKLRELQQEKILGELRNMNAGNIVWDHTQETIGKYVS

SEQ ID NO: 33145 - DNA, 1104 bp, Muscodor strobelii
  misc_feature: SGI cDNA ID NO. 571427
  misc_feature: Encodes the peptide sequence at SEQ ID NO 33146
atgctcgaaaatgctatccctagtcacctacagtgggagagatccgttcccgagagactgcccaagaaggactacagcccaccatacccgagttatgtcgctcggttccccgaatctatgacggatcttgtgttgggagttcttggcgctcaatctgtgtctccaactgacgatgccagcgatgcaatgtcaaaactcgtgtcgtttataacttcgggctccgtccaaccctctgctatgcctagattccacgaggtcgcatcttttactgacgcgcttggctactacaataaggctctgcttgtatactggaccagcacaccagcttatgatcaatgggcctctgagagcgggtttgggaaatggtggagtgaactcgatccccaaatcgagtcgcatggttggtttatagagatattcttcccgacagtggaccgtgtcgagtcagtgttctctcacaatgatattgttgaaggagccgctcacatgcgagagaattggagtgattctattcaacaacatgcgtattggggctcaatgagggatcgcgttcctctttcgcaaaccgacagtctcgaaggcaagaagatggagcccagagatgtcgtcgatacaccagacacccgaagtcgccgcgtgcgcatagccgggctacctaatctgactgtcatccgctcgggccaagattgggcagcgacggacacaaatgagcgtgaactctacctgagtgagatgcatcctatattagccgcaggcatggattttcttcgtgatcatgggaacgaggttgggtgctacagctgcaggctcatggacatcgtgaatctaagctcaggtcaggctgaccttgatcgtacattcgggctcgcatatttcgatgaacttaactctctcgagaagtggagcaaagagcatccaacacatctgaagatatttggcggatttcatcaatatgcgcgaaaacttcaagggaaagcaaaattgcgattgtttcatgaggtgttcgttttgaaaccggaacagcagctgttcgaatatgtcggctgtcatggggcaacaggcatgctgacctcggtgaatggccaccctcgaaatgatgaatga

SEQ ID NO: 33146 - protein, 367 aa, Muscodor strobelii
  misc_feature: SGI Peptide ID NO. 571427
  misc_feature (1)..(359): NCBI GI: 226281534 Blast Desc: phenylacetaldoxime dehydratase [Paracoccidioides brasiliensis Pb01]
  misc_feature (1)..(347): NCBI GI: 116204105 Blast Desc: CHGG_09936 [Chaetomium globosum CBS 148.51] gi|88176064|gb|EAQ83532.1| CHGG_09936 [Chaetomium globosum CBS 148.51]
  misc_feature (1)..(359): NCBI GI: 239606370 Blast Desc: phenylacetaldoxime dehydratase [Ajellomyces dermatitidis ER-3]
  misc_feature (1)..(359): NCBI GI: 261190142 Blast Desc: aldoxime dehydratase [Ajellomyces dermatitidis SLH14081] gi|239591309|gb|EEQ73890.1| aldoxime dehydratase [Ajellomyces dermatitidis SLH14081]
  misc_feature (2)..(360): NCBI GI: 238838313 Blast Desc: phenylacetaldoxime dehydratase [Microsporum canis CBS 113480]
  misc_feature (2)..(358): NCBI GI: 261359769 Blast Desc: phenylacetaldoxime dehydratase [Verticillium albo-atrum VaMs.102]
  misc_feature (45)..(359): NCBI GI: 225678877 Blast Desc: phenylacetaldoxime dehydratase [Paracoccidioides brasiliensis Pb03]
  misc_feature (1)..(357): NCBI GI: 226293713 Blast Desc: phenylacetaldoxime dehydratase [Paracoccidioides brasiliensis Pb18]
  misc_feature (40)..(359): NCBI GI: 189210417 Blast Desc: aldoxime dehydratase [Pyrenophora tritici-repentis Pt-1C-BFP] gi|187977633|gb|EDU44259.1| aldoxime dehydratase [Pyrenophora tritici-repentis Pt-1C-BFP]
  misc_feature (2)..(357): NCBI GI: 66043277 Blast Desc: phenylacetaldoxime dehydratase. [Pseudomonas syringae pv. syringae B728a] gi|63253984|gb|AAY35080.1| phenylacetaldoxime dehydratase [Pseudomonas syringae pv. syringae B728a]
  misc_feature (33)..(356): SWISSPROT Homolog: EC 4.99.1.7 Phenylacetaldoxime dehydratase
MLENAIPSHLQWERSVPERLPKKDYSPPYPSYVARFPESMTDLVLGVLGAQSVSPTDDASDAMSKLVSFITSGSVQPSAMPRFHEVASFTDALGYYNKALLVYWTSTPAYDQWASESGFGKWWSELDPQIESHGWFIEIFFPTVDRVESVFSHNDIVEGAAHMRENWSDSIQQHAYWGSMRDRVPLSQTDSLEGKKMEPRDVVDTPDTRSRRVRIAGLPNLTVIRSGQDWAATDTNERELYLSEMHPILAAGMDFLRDHGNEVGCYSCRLMDIVNLSSGQADLDRTFGLAYFDELNSLEKWSKEHPTHLKIFGGFHQYARKLQGKAKLRLFHEVFVLKPEQQLFEYVGCHGATGMLTSVNGHPRNDE

SEQ ID NO: 33147 - DNA, 901 bp, Muscodor strobelii
  misc_feature: SGI EST ID NO. CUFF.78442.0
  misc_feature: Variant of the nucleotide sequence at SEQ ID NO 33145
acaacatgcgtattggggctcaatgagggatcgcgttcctctttcgcaaaccgacagtctcgaaggcaagaagatggagcccagagatgtcgtcgatacaccagacacccgaagtcgccgcgtgcgcatagccgggctacctaatctgactgtcatccgctcgggccaagattgggcagcgacggacacaaatgagcgtgaactctacctgagtgagatgcatcctatattagccgcaggcatggattttcttcgtgatcatgggaacgaggttgggtgctacagctgcaggctcatggacatcgtgaatctaagctcaggtcaggctgaccttgatcgtacattcgggctcgcatatttcgatgaacttaactctctcgagaagtggagcaaagagcatccaacacatctgaagatatttggcggatttcatcaatatgcgcgaaaacttcaagggaaagcaaaattgcgattgtttcatgaggtgttcgttttgaaaccggaacagcagctgttcgaatatgtcggctgtcatggggcaacaggcatgctgacctcggtgaatggccaccctcgaaatgatgaatgagttcgttccagtgcgatttttgaggggccatgatgaatgcgttgtgtccgtatcgcagatatatttctaggtatatcgggaaaagtagtcaaattcaatcatcgcgatcttgtaaaatccggtgttgttgggcttccgaaacatacggaacgctctccacattgatgctcatgacacttctgccggccattccatttgattgaccctcgacgtgacactggcataacattcactgcagcacatgttttgtgttccactatgctatcgcggtctgccgcgcttgagaaagtactcaccagagctagaaattgt

SEQ ID NO: 33148 - DNA, 3570 bp, Muscodor strobelii
  misc_feature: SGI cDNA ID NO. 571428
  misc_feature: Encodes the peptide sequence at SEQ ID NO 33149
atgcagccaactaccgttctgtcggccgcgtaccgatttctgtcggagttgagtgactcagtgccacatgtcaatctgctccttggcaatcacgatcttgcctatcgtcgggattacgggactaccgccctggaggcactgaacatgccacgccttagaccctttatatcagtgcacgatgaagtgtgctcgtacgactgggacggtaggcgtgtgctagttcttccgtttcgcgaggatcagagtgagttgacggccgctgtggcgaaactcgatgcggttgaagcggccgacaccgtggcattcgcccaccttgccattaatcgagctgtgacgcagcgtcatgtcgtccgtagcgacaatacttcgggccaatctgtcagatatcggggacttactggcccagaccacttcgcccaacttgctagaacgttcacgggtcattttcatagtcatcaagtcatcctacagacagacagacaggcactaccacctgaccatgaagaccgtctgaagggcagcgttacgtacctaggctcaccacttcagctgacatgggcagatctccacgatgaaagtcgaggtgttgtcttgttaaaccctatgacgctggagcatgaattgattgtcaatcctcatgcagtaggctacatcagtcttaataaggcgcaaatattagatgacgaaattccggccgccatagtgagaggcaagcatgttatggtgacagggaagctgacccagtaccaatattggagcgcccgagataagttgcttgcgctcggaaccagtagtgtgcgagaatggcatcccaccccgccaactttgctaagacggtcggaactcagtgcacgtaatacttttggctcgtcagtaccagccagcgaccgccaagttgtgccttcatttgcccaaactcccgatgccttcgaagcggcgtcagattcgcctcaaatcgtggccggtgagcctgctgctgccttggccgaatctcaaaatatgcaattcaacgaagtggaccttggcggttctgtgcgcgactacattcaatcactcagcttagaagcaatcgatacaaatgaagagagcatcattgagtttggtcaacgactggtacaagcatcgaatagtgaagatgaggtgacatatgagacactgttggataccactggctatcccactcaacgtgatgagtcaaaccacactcaacaggtttttgttgctaggcccagctctctcacaatcaataatttcctcggcattcaacgagaatgttctgttgactttgagggcgatcttggacgaggtctgacttttgtcgtgggagccaatggttcaggaaaaagtacactaatcgaagccatcgtgtggtgtcagtttggacgcactcttcggaagggattatcagttagcgacattgtcaacgatatctccggtaaggactgtaaggtttgccttactttctcaaatggctacgcaatcagtcgttaccgaaaacacaaggtatttggaaatcgcgtcattgtctcgcttcacggagtcgagcagcctcgcttcgagcatggcgaagctcgtgccacccaactagcaattgatgagctcctaggtattaactatgaagagttcattaagacagtagtactgggtcacgagagcgcagcaagtttcctaagctctacgccttctcaacgccatgacctgatcgagtcaacactcaatctatccaaattagacacttgtgccaacctgtgccggaaaacattgaaggaaatcgacacagatattatagcggctcggagcctacaagaaacaatacaggggacaatcgctctcacacaagaccgaatctcgagtcgcgagagtgatgtaaatcgtctacggattgaaatcgaagagatcagaaataagcgaggcctagttcatgaaatatctagtaccccagattgcgaaggagaagacggcgacgccaatgttagcgcagatgacatcggctcatcttcattacgagccccaattgtgagccgtagcgggttatctgagcacctgaaccagttgaaaacacagatcagagagagtcaggaagccgtgcataaagctcagtcggttgtggaagaaatcgacattcgagatgctgtacgaatgcggcaatctcaggttgagatgcaaatacaccagactggagaacgatgccattctttacgacgcactcttgcttactcagaggcgccaatcgccgaacacactcgttccattcgcgcaatggctcgttggcttaatcacacggtatcatggcttcggcgatatgctctgaccagcgcctggtactcagcccaagacagcctgaagaaccgtgctacgaatcacttcatcgagattgggttcaagtcattggagcgaattgctctcaatcttgagcagcttggtcagcaaatgacctcatcatcagacagcttctcaaaagctgttgcatccgacggcgatgtagacaatgctcaacagcagctcgaccgtactgaagtgcgcctggctgagttgcaagatgagaaaaatgatgtttgcgcccgcatcgcccttgataaggacatcgaaagagactatgtccttgctgtggtcgcaagtacctcgaatatagacgcaaatcaagcgcgaaagaatctcaaagcatcattagaccatctctacaagctgttagaagagcaacgtattgcgcacagcctgcagtctagataccagcaggaagatatgctccggctcaagactggggaaaatgccagacgtcgagatgatgtcatcgaatcgcagctgtcgatgaaaggacaggaggtctctacatacctccgaatcctaggagaggaaagagctacacttgaaaaggagctcgtcagacgcgccaaggctgaaatagaacagcaatctctcgtgtcaaaacgtacactatttaccttttgggttgaagctttttcgaagcgcaagacaaaatccgctaatactccgactttccgcgaatatgttctgaacaaaagtctagagcagctcaatactgttgcatctagtatcctagtcgctctatacgaaaacacgcgccatgcgcgtgagcttacaacgggcatgttacgaaccatgattgatgaagataccgatgatgaagcattgagcaatttggaggtgtcatcaacgagctctcgtccggttctgctcgatcaaacgctaggcgtaagtaagactttatcatacgctaagagaagcggaggtgagcgcaaaagaatcgatctcgctgtttttttcgcccttgtgcagatcgcacaagcgtatagcacgcatcgcgctcgctacatattggtcgacgaggcttttgacagcttagacgccgccggacagggcgccgtaattaggtggtgctcacagctcatggctagaacggacttccagctcatcgtcactcatagcgagcatctaacttccgcccgaaatgaggagcaaggctgggaggatgatgcagaaagccggttctctgtcatgtctgcaactatgacgaaagagggcacgagattcacctacaacatggtatga

SEQ ID NO: 33149 - protein, 1189 aa, Muscodor strobelii
  misc_feature: SGI Peptide ID NO. 571428
  misc_feature (411)..(1130): Pfam Id: PF02463 Pfam Desc: RecF/RecN/SMC N terminal domain
  misc_feature (430)..(458): Pfam Id: PF02463 Pfam Desc: RecF/RecN/SMC N terminal domain
  misc_feature (67)..(1181): NCBI GI: 171691462 Blast Desc: protein product [Podospora anserina] gi|170945679|emb|CAP71792.1| protein product [Podospora anserina]
  misc_feature (1)..(599): NCBI GI: 46124223 Blast Desc: FG06489.1 [Gibberella zeae PH-1]
  misc_feature (1)..(616): NCBI GI: 46140137 Blast Desc: FG11583.1 [Gibberella zeae PH-1]
  misc_feature (907)..(1185): NCBI GI: 46140137 Blast Desc: FG11583.1 [Gibberella zeae PH-1]
  misc_feature (883)..(1182): NCBI GI: 116194916 Blast Desc: CHGG_04056 [Chaetomium globosum CBS 148.51] gi|88179969|gb|EAQ87437.1| CHGG_04056 [Chaetomium globosum CBS 148.51]
  misc_feature (924)..(1127): NCBI GI: 46124223 Blast Desc: FG06489.1 [Gibberella zeae PH-1]
  misc_feature (412)..(590): NCBI GI: 56693118 Blast Desc: LP65_gp070 [Lactobacillus phage LP65] gi|54633619|gb|AAV35890.1| orf70 [Lactobacillus phage LP65]
  misc_feature (414)..(590): NCBI GI: 239502688 Blast Desc: RecF/RecN/SMC domain-containing protein [Acinetobacter baumannii AB900]
  misc_feature (413)..(592): NCBI GI: 48696462 Blast Desc: exonuclease [Staphylococcus phage K] gi|66394958|ref|YP_240940.1| ORF009 [Staphylococcus phage G1] gi|37729156|gb|AAO47523.1| ORF74 [Staphylococcus phage K] ORF009
  misc_feature (410)..(627): NCBI GI: 75907930 Blast Desc: exonuclease SbcC [Anabaena variabilis ATCC 29413] gi|75701655|gb|ABA21331.1| Exonuclease SbcC [Anabaena variabilis ATCC 29413]
MQPTTVLSAAYRFLSELSDSVPHVNLLLGNHDLAYRRDYGTTALEALNMPRLRPFISVHDEVCSYDWDGRRVLVLPFREDQSELTAAVAKLDAVEAADTVAFAHLAINRAVTQRHVVRSDNTSGQSVRYRGLTGPDHFAQLARTFTGHFHSHQVILQTDRQALPPDHEDRLKGSVTYLGSPLQLTWADLHDESRGVVLLNPMTLEHELIVNPHAVGYISLNKAQILDDEIPAAIVRGKHVMVTGKLTQYQYWSARDKLLALGTSSVREWHPTPPTLLRRSELSARNTFGSSVPASDRQVVPSFAQTPDAFEAASDSPQIVAGEPAAALAESQNMQFNEVDLGGSVRDYIQSLSLEAIDTNEESIIEFGQRLVQASNSEDEVTYETLLDTTGYPTQRDESNHTQQVFVARPSSLTINNFLGIQRECSVDFEGDLGRGLTFVVGANGSGKSTLIEAIVWCQFGRTLRKGLSVSDIVNDISGKDCKVCLTFSNGYAISRYRKHKVFGNRVIVSLHGVEQPRFEHGEARATQLAIDELLGINYEEFIKTVVLGHESAASFLSSTPSQRHDLIESTLNLSKLDTCANLCRKTLKEIDTDIIAARSLQETIQGTIALTQDRISSRESDVNRLRIEIEEIRNKRGLVHEISSTPDCEGEDGDANVSADDIGSSSLRAPIVSRSGLSEHLNQLKTQIRESQEAVHKAQSVVEEIDIRDAVRMRQSQVEMQIHQTGERCHSLRRTLAYSEAPIAEHTRSIRAMARWLNHTVSWLRRYALTSAWYSAQDSLKNRATNHFIEIGFKSLERIALNLEQLGQQMTSSSDSFSKAVASDGDVDNAQQQLDRTEVRLAELQDEKNDVCARIALDKDIERDYVLAVVASTSNIDANQARKNLKASLDHLYKLLEEQRIAHSLQSRYQQEDMLRLKTGENARRRDDVIESQLSMKGQEVSTYLRILGEERATLEKELVRRAKAEIEQQSLVSKRTLFTFWVEAFSKRKTKSANTPTFREYVLNKSLEQLNTVASSILVALYENTRHARELTTGMLRTMIDEDTDDEALSNLEVSSTSSRPVLLDQTLGVSKTLSYAKRSGGERKRIDLAVFFALVQIAQAYSTHRARYILVDEAFDSLDAAGQGAVIRWCSQLMARTDFQLIVTHSEHLTSARNEEQGWEDDAESRFSVMSATMTKEGTRFTYNMV

SEQ ID NO: 33150 - DNA, 5802 bp, Muscodor strobelii
  misc_feature: SGI EST ID NO. CUFF.78447.0
  misc_feature: Variant of the nucleotide sequence at SEQ ID NO 33148
tcacagaattgaattgttaagctgcacggtattttactattcatctgcgaagaagtcatcaagttgttgtgtttcttttgcctcctttgcttgatataaccatgtgcgcttctcactgctactaccctgcatttacctcagcgggggccctgggttgtgatgagcgaccctgcgctaggctcgtccttgtcaaggcgatcagcgtgaacaaagttatctgatggcggtgtgaattgaagaaaagaacagccgacggattcgaggcatcaatttacgagcattcatgaaattgatactggttatttcatccaaatggcatccccgattgatgacgtaggggtgtcataaactttttagacccgccttatgtgcccaagctctgcgatcacacgcgcacagtccgccactccgattttcagctgtgctctccagtgccctccagcacgaactttgagacttcaagtctgtgagcagatctcgctttgctcacaggtacgatgcggtcatgccattattgtcaaagccgcgatggctacttttgagtgatattcatttccggcagcgtgacttcgagcgcacaaaaaagaccacggaatggattttgtccttgacgcgtcgcacacccggcatcagccgtgtcgtggtctgcggcgacgtgctgacatcgcgttcaatgcagccaactaccgttctgtcggccgcgtaccgatttctgtcggagttgagtgactcagtgccacatgtcaatctgctccttggcaatcacgatcttgcctatcgtcgggattacgggactaccgccctggaggcactgaacatgccacgccttagaccctttatatcagtgcacgatgaagtgtgctcgtacgactgggacggtaggcgtgtgctagttcttccgtttcgcgaggatcagagtgagttgacggccgctgtggcgaaactcgatgcggttgaagcggccgacaccgtggcattcgcccaccttgccattaatcgagctgtgacgcagcgtcatgtcgtccgtagcgacaatacttcgggccaatctgtcagatatcggggacttactggcccagaccacttcgcccaacttgctagaacgttcacgggtcattttcatagtcatcaagtcatcctacagacagacagacaggcactaccacctgaccatgaagaccgtctgaagggcagcgttacgtacctaggctcaccacttcagctgacatgggcagatctccacgatgaaagtcgaggtgttgtcttgttaaaccctatgacgctggagcatgaattgattgtcaatcctcatgcagtaggctacatcagtcttaataaggcgcaaatattagatgacgaaattccggccgccatagtgagaggcaagcatgttatggtgacagggaagctgacccagtaccaatattggagcgcccgagataagttgcttgcgctcggaaccagtagtgtgcgagaatggcatcccaccccgccaactttgctaagacggtcggaactcagtgcacgtaatacttttggctcgtcagtaccagccagcgaccgccaagttgtgccttcatttgcccaaactcccgatgccttcgaagcggcgtcagattcgcctcaaatcgtggccggtgagcctgctgctgccttggccgaatctcaaaatatgcaattcaacgaagtggaccttggcggttctgtgcgcgactacattcaatcactcagcttagaagcaatcgatacaaatgaagagagcatcattgagtttggtcaacgactggtacaagcatcgaatagtgaagatgaggtgacatatgagacactgttggataccactggctatcccactcaacgtgatgagtcaaaccacactcaacaggtttttgttgctaggcccagctctctcacaatcaataatttcctcggcattcaacgagaatgttctgttgactttgagggcgatcttggacgaggtctgacttttgtcgtgggagccaatggttcaggaaaaagtacactaatcgaagccatcgtgtggtgtcagtttggacgcactcttcggaagggattatcagttagcgacattgtcaacgatatctccggtaaggactgtaaggtttgccttactttctcaaatggctacgcaatcagtcgttaccgaaaacacaaggtatttggaaatcgcgtcattgtctcgcttcacggagtcgagcagcctcgcttcgagcatggcgaagctcgtgccacccaactagcaattgatgagctcctaggtattaactatgaagagttcattaagacagtagtactgggtcacgagagcgcagcaagtttcctaagctctacgccttctcaacgccatgacctgatcgagtcaacactcaatctatccaaattagacacttgtgccaacctgtgccggaaaacattgaaggaaatcgacacagatattatagcggctcggagcctacaagaaacaatacaggggacaatcgctctcacacaagaccgaatctcgagtcgcgagagtgatgtaaatcgtctacggattgaaatcgaagagatcagaaataagcgaggcctagttcatgaaatatctagtaccccagattgcgaaggagaagacggcgacgccaatgttagcgcagatgacatcggctcatcttcattacgagccccaattgtgagccgtagcgggttatctgagcacctgaaccagttgaaaacacagatcagagagagtcaggaagccgtgcataaagctcagtcggttgtggaagaaatcgacattcgagatgctgtacgaatgcggcaatctcaggttgagatgcaaatacaccagactggagaacgatgccattctttacgacgcactcttgcttactcagaggcgccaatcgccgaacacactcgttccattcgcgcaatggctcgttggcttaatcacacggtatcatggcttcggcgatatgctctgaccagcgcctggtactcagcccaagacagcctgaagaaccgtgctacgaatcacttcatcgagattgggttcaagtcattggagcgaattgctctcaatcttgagcagcttggtcagcaaatgacctcatcatcagacagcttctcaaaagctgttgcatccgacggcgatgtagacaatgctcaacagcagctcgaccgtactgaagtgcgcctggctgagttgcaagatgagaaaaatgatgtttgcgcccgcatcgcccttgataaggacatcgaaagagactatgtccttgctgtggtcgcaagtacctcgaatatagacgcaaatcaagcgcgaaagaatctcaaagcatcattagaccatctctacaagctgttagaagagcaacgtattgcgcacagcctgcagtctagataccagcaggaagatatgctccggctcaagactggggaaaatgccagacgtcgagatgatgtcatcgaatcgcagctgtcgatgaaaggacaggaggtctctacatacctccgaatcctaggagaggaaagagctacacttgaaaaggagctcgtcagacgcgccaaggctgaaatagaacagcaatctctcgtgtcaaaacgtacactatttaccttttgggttgaagctttttcgaagcgcaagacaaaatccgctaatactccgactttccgcgaatatgttctgaacaaaagtctagagcagctcaatactgttgcatctagtatcctagtcgctctatacgaaaacacgcgccatgcgcgtgagcttacaacgggcatgttacgaaccatgattgatgaagataccgatgatgaagcattgagcaatttggaggtgtcatcaacgagctctcgtccggttctgctcgatcaaacgctaggcgtaagtaagactttatcatacgctaagagaagcggaggtgagcgcaaaagaatcgatctcgctgtttttttcgcccttgtgcagatcgcacaagcgtatagcacgcatcgcgctcgctacatattggtcgacgaggcttttgacagcttagacgccgccggacagggcgccgtaattaggtggtgctcacagctcatggctagaacggacttccagctcatcgtcactcatagcgagcatctaacttccgcccgaaatgaggagcaaggctgggaggatgatgcagaaagccggttctctgtcatgtctgcaactatgacgaaagagggcacgagattcacctacaacatggtatgagaatgctaagaccacttaccaaagtatatacgatggttacgaggcgcagcagcgatgtaccaagtgtactagacgctaccagatgtcaatttgcaagtacgatcgccctaccagcaagacgcgaaattacaacacaacgattcattgtaaaagactgtatatgctcttgtccgtgcaacacccaatctcattgtgacgatgacaaaccatacagcagataatgctaatgtgatagatgttgtcttgacctacatctccatgccgggaagcttggtgagccctgtaaattcgtgtcagcacgttattgtggcaggttgtcactgatatggcacggccacgagcgaataggaagcaaaagacattgtcactcacatccatcagtctcctcgccaacgaagtccttgaccttgcactggtttgctgtggacatggcctgcttcttgatagagccgcatccatcgtagaagcactgcgacttattcatcgcgcgctggagcgcatcgccctgccagccgaacatgtaatcggcatgtgtgccatagccacttgtgccctcaaagctccagacgaatgggttgggtgtgccagaaggccacaaggagttgaacttcgtggtgtcccacactgtctcatatgtgacctgaggcattcgcaccggatgagatgctgggcacgccgctgccgggacaaagccacctgatttcattgtgttgtacatgtgactctgatgatcgggactgtcaaggttcttgccgtcccaacagctatggggaattagtaaagtgggcttcatgtggccttagaaactgagtgtgacagacacgactcacgctgggaagtggtgcacggcgaagataccacccgggcagggctttgtagggaagtcaaccatctccgcaccacggttgatcgttgtcgtaaggcagttatatcgaagcccaacgtgttgatttgcctcttgaagggtgctggtggttggcgatccgaccgtcatgcggaatccctgagggtttgtgagcgacacaatatcaaattcgggcgggaagacaactggtaatgagaataggattaaataccttgggaaaagcagtgatatattgattcgccagattgtcgttcgagaaatcatactgggtgtagtagaccgtgattccgccagacgtgcccgcggcaagagcagcgttgtttatgacaggcacgcgatggtaggagccgttggtcgggtgcttaaagtacatcgcagcagtccagtagttcgagaaatcctcggccatctcacaagtggtgcaactacctcttgctccaacgtcaccctccattgtcgcgttgaaggcatttccacctacgatgtggtgaacgtgcgagctaggagtcttgccgggctcgacgacggggtcaagacgctggattgtgagtgtgctgcatccgaaccgaagtccagcttgtacttgcagcggcgcaataagcgcgagggctgttgcgaatgacttcattttcctgtcaatgctaatgaaagtgactgtgaggatccgggagaaaaagaatggacgagggcgagg

SEQ ID NO: 33151 - DNA, 1014 bp, Muscodor strobelii
  misc_feature: SGI cDNA ID NO. 571429
  misc_feature: Encodes the peptide sequence at SEQ ID NO 33152
atgaagtcattcgcaacagccctcgcgcttattgcgccgctgcaagtacaagctggacttcggttcggatgcagcacactcacaatccagcgtcttgaccccgtcgtcgagcccggcaagactcctagctcgcacgttcaccacatcgtaggtggaaatgccttcaacgcgacaatggagggtgacgttggagcaagaggtagttgcaccacttgtgagatggccgaggatttctcgaactactggactgctgcgatgtactttaagcacccgaccaacggctcctaccatcgcgtgcctgtcataaacaacgctgctcttgccgcgggcacgtctggcggaatcacggtctactacacccagtatgatttctcgaacgacaatctggcgaatcaatatatcactgcttttcccaagggattccgcatgacggtcggatcgccaaccaccagcacccttcaagaggcaaatcaacacgttgggcttcgatataactgccttacgacaacgatcaaccgtggtgcggagatggttgacttccctacaaagccctgcccgggtggtatcttcgccgtgcaccacttcccagcctgttgggacggcaagaaccttgacagtcccgatcatcagagtcacatgtacaacacaatgaaatcaggtggctttgtcccggcagcggcgtgcccagcatctcatccggtgcgaatgcctcaggtcacatatgagacagtgtgggacaccacgaagttcaactccttgtggccttctggcacacccaacccattcgtctggagctttgagggcacaagtggctatggcacacatgccgattacatgttcggctggcagggcgatgcgctccagcgcgcgatgaataagtcgcagtgcttctacgatggatgcggctctatcaagaagcaggccatgtccacagcaaaccagtgcaaggtcaaggacttcgttggcgaggagactgatggatggctcaccaagcttcccggcatggagatgtag

SEQ ID NO: 33152 - protein, 337 aa, Muscodor strobelii
  misc_feature: SGI Peptide ID NO. 571429
  misc_feature (33)..(282): Pfam Id: PF09362 Pfam Desc: Domain of function (DUF1996)
  misc_feature (1)..(335): NCBI GI: 116179322 Blast Desc: CHGG_00289 [Chaetomium globosum CBS 148.51] gi|88184586|gb|EAQ92054.1| CHGG_00289 [Chaetomium globosum CBS 148.51]
  misc_feature (1)..(336): NCBI GI: 116208234 Blast Desc: CHGG_03410 [Chaetomium globosum CBS 148.51] gi|88184007|gb|EAQ91475.1| CHGG_03410 [Chaetomium globosum CBS 148.51]
  misc_feature (1)..(336): NCBI GI: 171680022 Blast Desc: protein product [Podospora anserina] gi|170939637|emb|CAP64864.1| protein product [Podospora anserina]
  misc_feature (1)..(337): NCBI GI: 169611997 Blast Desc: SNOG_09113 [Phaeosphaeria nodorum SN15] gi|111062185|gb|EAT83305.1| SNOG_09113 [Phaeosphaeria nodorum SN15]
  misc_feature (1)..(326): NCBI GI: 164425163 Blast Desc: NCU11317 [Neurospora crassa OR74A] gi|157070815|gb|EAA33351.2| conserved [Neurospora crassa OR74A]
  misc_feature (1)..(337): NCBI GI: 116178994 Blast Desc: conserved [Chaetomium globosum CBS 148.51] gi|88184422|gb|EAQ91890.1| conserved [Chaetomium globosum CBS 148.51]
  misc_feature (9)..(325): NCBI GI: 171680783 Blast Desc: protein product [Podospora anserina] gi|27764287|emb|CAD60567.1| protein product [Podospora anserina] gi|170940019|emb|CAP65245.1| protein product [Podospora anserina]
  misc_feature (20)..(337): NCBI GI: 169596100 Blast Desc: SNOG_00801 [Phaeosphaeria nodorum SN15] gi|111071176|gb|EAT92296.1| SNOG_00801 [Phaeosphaeria nodorum SN15]
  misc_feature (21)..(334): NCBI GI: 39975065 Blast Desc: MGG_00321 [Magnaporthe grisea 70-15] gi|145018793|gb|EDK03072.1| MGG_00321 [Magnaporthe grisea 70-15]
  misc_feature (1)..(334): NCBI GI: 169868148 Blast Desc: CC1G_10434 [Coprinopsis cinerea okayama7#130] gi|116498252|gb|EAU81147.1| CC1G_10434 [Coprinopsis cinerea okayama7#130]
MKSFATALALIAPLQVQAGLRFGCSTLTIQRLDPVVEPGKTPSSHVHHIVGGNAFNATMEGDVGARGSCTTCEMAEDFSNYWTAAMYFKHPTNGSYHRVPVINNAALAAGTSGGITVYYTQYDFSNDNLANQYITAFPKGFRMTVGSPTTSTLQEANQHVGLRYNCLTTTINRGAEMVDFPTKPCPGGIFAVHHFPACWDGKNLDSPDHQSHMYNTMKSGGFVPAAACPASHPVRMPQVTYETVWDTTKFNSLWPSGTPNPFVWSFEGTSGYGTHADYMFGWQGDALQRAMNKSQCFYDGCGSIKKQAMSTANQCKVKDFVGEETDGWLTKLPGMEM

SEQ ID NO: 33153 - DNA, 405 bp, Muscodor strobelii
  misc_feature: SGI cDNA ID NO. 571430
  misc_feature: Encodes the peptide sequence at SEQ ID NO 33154
atgaagttcaacacaaatttgctctctttcgccgctattctgtactacagcgccactgccatcgctgcaccggtcggtgcttccgccgacaatgtggcacgggcagaggatgctactgatgagacagtctactacgtccctgccaagcgctcggaggatgctactgatgagacggtgtattatgtcccagcaaaacggtcagaagattccacggatgagacggtatactacgtccctgcgaaacgctcagaggacgcaaccgacgagacggtatactatgtacctgctaagcgttcggtggacgcaaccgatgagactgtgtactatgttcctgccaagcgctcagaagatgctactgatgagaccgtatactatgtccccgctaagcgcgagatgggcaattaa

SEQ ID NO: 33154 - protein, 134 aa, Muscodor strobelii
  misc_feature: SGI Peptide ID NO. 571430
  misc_feature (37)..(127): NCBI GI: 241572461 Blast Desc: conserved [Ixodes scapularis] gi|215502097|gb|EEC11591.1| conserved [Ixodes scapularis]
  misc_feature (33)..(127): NCBI GI: 241572461 Blast Desc: conserved [Ixodes scapularis] gi|215502097|gb|EEC11591.1| conserved [Ixodes scapularis]
  misc_feature (33)..(127): NCBI GI: 241572461 Blast Desc: conserved [Ixodes scapularis] gi|215502097|gb|EEC11591.1| conserved [Ixodes scapularis]
  misc_feature (33)..(127): NCBI GI: 241747923 Blast Desc: secreted salivary gland peptide, [Ixodes scapularis] gi|215505923|gb|EEC15417.1| secreted salivary gland peptide, [Ixodes scapularis]
  misc_feature (33)..(127): NCBI GI: 241747923 Blast Desc: secreted salivary gland peptide, [Ixodes scapularis] gi|215505923|gb|EEC15417.1| secreted salivary gland peptide, [Ixodes scapularis]
  misc_feature (33)..(127): NCBI GI: 241747923 Blast Desc: secreted salivary gland peptide, [Ixodes scapularis] gi|215505923|gb|EEC15417.1| secreted salivary gland peptide, [Ixodes scapularis]
  misc_feature (33)..(127): NCBI GI: 241747923 Blast Desc: secreted salivary gland peptide, [Ixodes scapularis] gi|215505923|gb|EEC15417.1| secreted salivary gland peptide, [Ixodes scapularis]
  misc_feature (33)..(127): NCBI GI: 241747923 Blast Desc: secreted salivary gland peptide, [Ixodes scapularis] gi|215505923|gb|EEC15417.1| secreted salivary gland peptide, [Ixodes scapularis]
  misc_feature (33)..(125): NCBI GI: 240956899 Blast Desc: mucin-1, [Ixodes scapularis] gi|215490652|gb|EEC00295.1| mucin-1, [Ixodes scapularis]
  misc_feature (33)..(127): NCBI GI: 240956899 Blast Desc: mucin-1, [Ixodes scapularis] gi|215490652|gb|EEC00295.1| mucin-1, [Ixodes scapularis]
MKFNTNLLSFAAILYYSATAIAAPVGASADNVARAEDATDETVYYVPAKRSEDATDETVYYVPAKRSEDSTDETVYYVPAKRSEDATDETVYYVPAKRSVDATDETVYYVPAKRSEDATDETVYYVPAKREMGN

SEQ ID NO: 33155 - DNA, 864 bp, Muscodor strobelii
  misc_feature: SGI cDNA ID NO. 571431
  misc_feature: Encodes the peptide sequence at SEQ ID NO 33156
atgtcttcaaagttgaagagaatacttctaggtcctcaataccagatcgtaaacggcagagaagatgtgtcgttggtggacgagattcaatcgtcaaaagaggggcgaacgacaaatctcagcaaacgtctatgggccgtacatgcgttgttacttgtggccggcttgctgttgctcgtgatggattgtattattgctttcaagttatcattgagcctcgagtctccgccttcgcccgatttttccactcctggttttgacaagctcactcgaaaggacacaaaatttgtcggtagtttcgaagccacatcaccctttcgaggacccccgggtccagaagtcgacgcacagtggaatagatttaccgtcagcccttggattgatggcacatctgttgtgctaggtgcgggcgatgaacaaatcgctcatgcacggaaagatagagacgaggaatggctcaattccacagtcaaacttggcaacgaaaatggcggtggcatcatggcatcgctcgaaatgtttcatcagttgcattgcctggacttgcttcgtaaatacagccatttcaattacgattattaccgatcaatgggcggtacatttgaccaagatcttgacattcagatgaatcacatcgaccactgcgtcgaaatgattcgtcaggttattatgtgctatggagacacaggtttgatcttgtttcattggattgagcggacacgggttccctacccggacttcaacgcttggcattcttgtagagatccggaggagatcttagccctagccaaaagccgggaggcccccattgtgacacgcgtgacgaagactaatggcgatgtgattatgccaacgccaccttga

SEQ ID NO: 33156 - protein, 287 aa, Muscodor strobelii
  misc_feature: SGI Peptide ID NO. 571431
  misc_feature (52)..(262): NCBI GI: 242215559 Blast Desc: POSPLDRAFT_130143 [Postia placenta Mad-698-R] gi|220727314|gb|EED81237.1| POSPLDRAFT_130143 [Postia placenta Mad-698-R]
  misc_feature (93)..(267): NCBI GI: 242222427 Blast Desc: [Postia placenta Mad-698-R] gi|220723760|gb|EED77873.1| [Postia placenta Mad-698-R]
  misc_feature (83)..(261): NCBI GI: 242211074 Blast Desc: [Postia placenta Mad-698-R] gi|220729542|gb|EED83414.1| [Postia placenta Mad-698-R]
  misc_feature (83)..(261): NCBI GI: 242207340 Blast Desc: [Postia placenta Mad-698-R] gi|220731553|gb|EED85397.1| [Postia placenta Mad-698-R]
  misc_feature (36)..(287): NCBI GI: 67902778 Blast Desc: AN8376.2 [Aspergillus nidulans FGSC A4] gi|40747740|gb|EAA66896.1| AN8376.2 [Aspergillus nidulans FGSC A4] gi|259484308|tpe|CBF80416.1| TPA: [Aspergillus nidulans FGSC
  misc_feature (89)..(287): NCBI GI: 240277353 Blast Desc: conserved [Ajellomyces capsulatus H143]
  misc_feature (89)..(282): NCBI GI: 226288946 Blast Desc: conserved [Paracoccidioides brasiliensis Pb18]
  misc_feature (84)..(261): NCBI GI: 242214710 Blast Desc: [Postia placenta Mad-698-R] gi|220727755|gb|EED81665.1| [Postia placenta Mad-698-R]
  misc_feature (23)..(250): NCBI GI: 145244821 Blast Desc: An11g07050 [Aspergillus niger] gi|134079372|emb|CAK97001.1| protein product [Aspergillus niger]
  misc_feature (26)..(286): NCBI GI: 261357696 Blast Desc: conserved [Verticillium albo-atrum VaMs.102]
MSSKLKRILLGPQYQIVNGREDVSLVDEIQSSKEGRTTNLSKRLWAVHALLLVAGLLLLVMDCIIAFKLSLSLESPPSPDFSTPGFDKLTRKDTKFVGSFEATSPFRGPPGPEVDAQWNRFTVSPWIDGTSVVLGAGDEQIAHARKDRDEEWLNSTVKLGNENGGGIMASLEMFHQLHCLDLLRKYSHFNYDYYRSMGGTFDQDLDIQMNHIDHCVEMIRQVIMCYGDTGLILFHWIERTRVPYPDFNAWHSCRDPEEILALAKSREAPIVTRVTKTNGDVIMPTPP

SEQ ID NO: 33157 - DNA, 828 bp, Muscodor strobelii
  misc_feature: SGI cDNA ID NO. 571432
  misc_feature: Encodes the peptide sequence at SEQ ID NO 33158
atgtcgcaagagcaacggcacatccaccatgatctaccatatcctacggaatctacgatccctagtggcccatcactagacctcgataacatacagcttctccacccctcgaacgcaatacaattaggtcctgaggtcaaacccgaagaccgattttctataattgatgacttcctgccatggatcctgatcgacgacacagaatcgatgaaatcttgctgggacgagatcggcaacatactcgggaaactaggtccaatttacacaaagtacggccatcgcggaatgaacatcgagttcttgaaacaccgcgctaggggatatcttcttcttggcggccagtcaggatattacaacatcacaatcgcaaatggcagcctcgcaatgcaggacaatgttgcaggcatttacgaacacgtcaagccgaagggacattatgacatggaattgagggtggaacggatactgcgtaaatgggtgcttgccgtcaaggcggtcgacaaggagacgctggaacacctgaggccatggcgtctccttgtcatttcaaattggaacaaagaaaatgtcgaaaaaatcctgagactcattcgaaaattatcgcatgagcttgaagagcatgatgcgccgcgcggtatatttgggattcagctgttacaagtcgggaatcacgccgaagactggaccagttgggaggtatggaaaagatataaccacgcggacacaattgcactactactggcaagccacactgcttcggagttatctccggatcgcacattgaaattgatattgggaaactacaagctgtatgactgctatcaatag

SEQ ID NO: 33158 - protein, 275 aa, Muscodor strobelii
  misc_feature: SGI Peptide ID NO. 571432
  misc_feature (37)..(223): NCBI GI: 46121577 Blast Desc: FG05167.1 [Gibberella zeae PH-1]
  misc_feature (49)..(224): NCBI GI: 261352979 Blast Desc: conserved [Verticillium albo-atrum VaMs.102]
  misc_feature (49)..(223): NCBI GI: 256732974 Blast Desc: NECHADRAFT_92552 [Nectria haematococca mpVI 77-13-4]
  misc_feature (49)..(266): NCBI GI: 116200135 Blast Desc: CHGG_08223 [Chaetomium globosum CBS 148.51] gi|88179502|gb|EAQ86970.1| CHGG_08223 [Chaetomium globosum CBS 148.51]
  misc_feature (52)..(266): NCBI GI: 154312266 Blast Desc: BC1G_06166 [Botryotinia fuckeliana B05.10] gi|150850129|gb|EDN25322.1| BC1G_06166 [Botryotinia fuckeliana B05.10]
  misc_feature (49)..(266): NCBI GI: 256725189 Blast Desc: NECHADRAFT_6600 [Nectria haematococca mpVI 77-13-4]
  misc_feature (58)..(266): NCBI GI: 46110749 Blast Desc: FG02256.1 [Gibberella zeae PH-1]
  misc_feature (21)..(222): NCBI GI: 169598380 Blast Desc: SNOG_01992 [Phaeosphaeria nodorum SN15] gi|160704384|gb|EAT90204.2| SNOG_01992 [Phaeosphaeria nodorum SN15]
  misc_feature (52)..(272): NCBI GI: 240274541 Blast Desc: conserved [Ajellomyces capsulatus H143]
  misc_feature (37)..(226): NCBI GI: 189208939 Blast Desc: von Willebrand factor [Pyrenophora tritici-repentis Pt-1C-BFP] gi|187976895|gb|EDU43521.1| von Willebrand factor [Pyrenophora tritici-repentis Pt-1C-BFP]
MSQEQRHIHHDLPYPTESTIPSGPSLDLDNIQLLHPSNAIQLGPEVKPEDRFSIIDDFLPWILIDDTESMKSCWDEIGNILGKLGPIYTKYGHRGMNIEFLKHRARGYLLLGGQSGYYNITIANGSLAMQDNVAGIYEHVKPKGHYDMELRVERILRKWVLAVKAVDKETLEHLRPWRLLVISNWNKENVEKILRLIRKLSHELEEHDAPRGIFGIQLLQVGNHAEDWTSWEVWKRYNHADTIALLLASHTASELSPDRTLKLILGNYKLYDCYQ

SEQ ID NO: 33159 - DNA, 564 bp, Muscodor strobelii
  misc_feature: SGI cDNA ID NO. 571433
  misc_feature: Encodes the peptide sequence at SEQ ID NO 33160
atgtcactatcgattctcaagaaagcgcaatattcaaagcgcatgacaaaatctgatctcacgaaatctgtgcagaaacttagttcgcttccctggctttctgacaagcctcaagttaatgttcttgatggccggactcgcaactttgactccagttacgctggccaggaatgggcggcctatctccgtgtcagaagtcctgacgccattgttttgagagtgtaccccaaagacaagagagcttcgcccgagaacatccttgtccagatcctcatttctcttgtggtcaacatgattaaactcgcaccagcagattttcagcttaagcctgccccatgcaaaggggactttgagaacttggctcgaggaggaccagaaggattagctgctggacttctcattctcgacatgcttccacccctagaaaagcgcaacaatatgctatgtgttgttgatggactgcatttggccaagaccagacagaatgaagagcggatagtggctttcaaggaggtgcttgaaagagtgttgaagagaaacaacagccatctactctacacctag

SEQ ID NO: 33160 - protein, 187 aa, Muscodor strobelii
  misc_feature: SGI Peptide ID NO. 571433
MSLSILKKAQYSKRMTKSDLTKSVQKLSSLPWLSDKPQVNVLDGRTRNFDSSYAGQEWAAYLRVRSPDAIVLRVYPKDKRASPENILVQILISLVVNMIKLAPADFQLKPAPCKGDFENLARGGPEGLAAGLLILDMLPPLEKRNNMLCVVDGLHLAKTRQNEERIVAFKEVLERVLKRNNSHLLYT

SEQ ID NO: 33161 - DNA, 642 bp, Muscodor strobelii
  misc_feature: SGI cDNA ID NO. 571434
  misc_feature: Encodes the peptide sequence at SEQ ID NO 33162
atggtgtccagtatacagaaaagcgcgcgtttgttcacattgcctgacgaggttcgcgatcgtatctacgacttctatctctcacctacccacgacgactttgtggacacgctgcgcccccaactggttttcctcgatggcgtcgcctactcacgaccactcccagccctgatgcgcagttgcaaacaagcatatcatgatatgctccctcacgttcatggccaagctaccatgcgagtcgaagtcactggccgtgccgaccgtcgtatcggatttgctgtgtatggcaagctacgcttcgagcgtttgcgtaggctctggctcttgattcccttggaacgacctaattggaatggctggctgtacttttttgccgaagtcgttcgtcgatgcgacaaccttgagactctagtcgttgactggagcccccgaccagcattactggtcaacaagtgggagcggaaggcaaatgaaaacaaagaggatgagttcttgaagactattgagagtctcgagaggctccataccgtaaggttccatggtattatccctgatagatgggttgatcagctacggaattcgggaacgcgcgtcatccgggattcctatcgctggtggcgggagccgggaatggatttgtga

SEQ ID NO: 33162 - protein, 213 aa, Muscodor strobelii
  misc_feature: SGI Peptide ID NO. 571434
MVSSIQKSARLFTLPDEVRDRIYDFYLSPTHDDFVDTLRPQLVFLDGVAYSRPLPALMRSCKQAYHDMLPHVHGQATMRVEVTGRADRRIGFAVYGKLRFERLRRLWLLIPLERPNWNGWLYFFAEVVRRCDNLETLVVDWSPRPALLVNKWERKANENKEDEFLKTIESLERLHTVRFHGIIPDRWVDQLRNSGTRVIRDSYRWWREPGMDL

SEQ ID NO: 33163 - DNA, 4964 bp, Muscodor strobelii
  misc_feature: SGI EST ID NO. CUFF.78462.0
  misc_feature: Variant of the nucleotide sequence at SEQ ID NO 33161
gcggcgatcgtttatgcggccaaaacatgtcgaagtttcttgcccggaatacgcatatgaacaagacaagacagcggttcttgaaatcactagcaagacccaccaaagtcagacatggtgcagactacttatagtgaatgcgaaagctatccttacctagcgcttcccatgcatcattcagcagctacagcaaaattaacacacctcttaatcagcgatgcgcaaccaagcaagaactcacccgttttgagtcctctgagaactccgcctatggaacttccatctggatcaaatggggtattggactcgtcctcaacacctatggttaacacaagtgagcctcaggcccgggaagacggtccgagcctacaaaaccaaggagaacctgcgagaacttttcgaactgtgccaaacctgcccaccggcattcaagctacttattatctgcgaaaacttgccgaaaaagatggtgccaatgttgagccaattgcgtttaaagctaacgatccaaagaatgagggaccaaactcgggagaacccctgagaacattccgaactatccaatacccctcgtcttttcaagctcaaacccagcagattgcatctattatcgaagatttaaagaaaaaagaacacaatgaagagggccatacgccgcgagagcgattgactgacgtcccgtatcgcaacttctacttatccaatgtcagcgcacaagctcgctacaggcaaaagtatcctgatggttcgagttgctattcacttgcacctaaagagcgtagtatgcttgatcaaggcaacgggaagtctgaactgcgagcgttaacgccatcagattctgccctgcctagtagcgacgaaagccaagggaatttcttcaccgatgttccattccctgagcttgcccaagctaatggcgctgcggtcgagtatcgcgcggatgggagagcaccaccactcgtaaacaacggcgttgatagccatgagagaacaacttgctcgcgagggcagtttactgatgtcccgttcgcttcttgtgtcctgtctaatcgcgctcgagccccctatcgacaatatccgcggagtctgtctcgtagtaggagccgcgacaagagtcgcccgcgcccgagacgcggctcttcttcttctgaggacggtgacactgctcataagagaataaaggcaagcagcaacaagacttcgaggcctacttgcgagcgacttgaagttggtgacacagttcaaggaacatcaacgccgttggggcacgttaagctcatcaaactcctcgataaacgcggagataccatcgatgccgtcctgcatgagtttcccatcgaaaatgcacctgcgtattttgctctttcatacgtttggggatacgatatacctggaaccaaaatcaacgtaaacgagatggaggtgacaattcgagacaatctgtttatggcattgagacagcttgggttactttgtcctggggtacatatggaccgacgcgctgtgcattgaacaatccaacgaggaggagaaatcgcatgttgtgcagcatatgggagagatctttcacgctgctgaaaaggtatatgcatggcttgggccgtcagacgcaggagaggaaggtgcaaatgaatccagtgaggtgctatggcatcatttacaggacatcggcgaactcttttgggaacaggctggtcatgatagacggttggatcgaactccctttgatatggagcccatactggcgaaattgctaccagctctggatacaagatttgcaagatcaccctgggaaggggggttttcgagtcaggcatataccaacttttcgaatcgcgtctattggcggcgcgtatgggtgcttcaagaagtctatctcgcaaggaaattgatcttttgctgcggcgagcagacaatggactccataacgctagcgggagcgctcattctccttgaatcgtatcaaaaacatgtagcgctcgacgagaagcgcatagccagcaacccaagacttcaggacttcgcctttacggccccttgttatccagaaatgcatagactacttatttacacatctatttatcctcaagaagttcactcattgcgaatcgcgatgaccaacttctgtgtgaaggagttgcctcgcggctcccagtcgactgacccgcgagatatgatcttcgcattattgggattcgctaatgaggaggagcgcaaatatatcaaagtcgactacagcaagtcgatacaagaagtataccgcgattcgacccggattcttatgcagagaggttggacagacgttcttgcctggtctcaaccgtcagagaagcacatacttgatctaccaacctgggtaccagatttctccggcacaattttcgaaacgatgtgcagtcagtggcaggcgaaacactggctttgtcagtttcaagcttcgaaaaacttgaagcctcgcacttattcaggggatgtccagggtgactcaaccttacgatgggcaggcgtgataattgacacaattgatcaagttggctcgctctggtatccgagagtaagcgacgaagccaggggacggacacaagggatatcaactatgcagtcacgatcggcggattatgatgcgattctcacattcttgaccgagatcaaagattttacgggacagtccatccagcaggcgatagagaagtcacctgaatacatcatcggccagtcttcagattatccaatcagggactcaatggacattggccagcagacacctcgtcctcttctcaacgacaacatgacacgtcgcgaagcaatgtggcgcgtgccttgcgcagatcagttacttattgaatctaaactcgttcgtagccatgccggtatggaaagcgcatataacgcagtattctccgatgtccagaagacttcgactgagccggagaacggctcaaagaccaatattgcggatgaaggtagaccatacgtagaaacaatgctacgatgggtcaagaaacggccagttttaagcgaaaagggactcgtcgggcttgcgcctggcgatgcacggaagggagacattgtggtgctcttacagaattgcaatgctccgtacattcttcgaaaacacggcgagacagatgagagaacgatgtataagcttgttggcgaagcttatgtttggggcatcatggatggcgagtatcatggagacagcgaccagatattcgatatcgtatagagttattgtatgtaagataacccatcaccttgtatatccttaatacaacatcaatagtgacttgagttgccaattgcgtctaaatgaactcagttgtttattcaggggcattgtttcagcaccgttgtgaagtattgaattgtatggatgcaaatcttacaggcttttggagtccaccagctagtgaaacggttaggcgtgggggaacctggccaaacccggtccagcaaatcaattgagaggaccaactccgtcagaagtacgcccttagcggtgaactattatcttaagtcaaggttcaatagaagcctagaatccgcatgcccgctcatttagaagtgaatttaggcttccatgaaatgtttgtatggttctcggtctgtcggaatttgttattcggatgcctggcccacctaaatccgaggtgaagattagccaccatttaaagagatgcgaggttcaagtcgtgatctgtatctcaaatcactcggtaaacaatggtgtccagtatacagaaaagcgcgcgtttgttcacattgcctgacgaggttcgcgatcgtatctacgacttctatctctcacctacccacgacgactttgtggacacgctgcgcccccaactggttttcctcgatggcgtcgcctactcacgaccactcccagccctgatgcgcagttgcaaacaagcatatcatgatatgctccctcacgttcatggccaagctaccatgcgagtcgaagtcactggccgtgccgaccgtcgtatcggatttgctgtgtatggcaagctacgcttcgagcgtttgcgtaggctctggctcttgattcccttggaacgacctaattggaatggctggctgtacttttttgccgaagtcgttcgtcgatgcgacaaccttgagactctagtcgttgactggagcccccgaccagcattactggtcaacaagtgggagcggaaggcaaatgaaaacaaagaggatgagttcttgaagactattgagagtctcgagaggctccataccgtaaggttccatggtattatccctgatagatgggttgatcagctacggaattcgggaacgcgcgtcatccgggattcctatcgctggtggcgggagccgggaatggatttgtgagatgctgtcgtttaccataacatccaaagtcgccaataaggataatagcccgagcgcatgagggcgggaatgatcctctctcaagctctcttagggttctaaaattgatgcagtttcatcatggcacgattgcatacacgcaaccctgcctaaacctgtcttggcatctatcgaaacaactagaggacagactaatgatcgaatgcgcaacacgtatctgtgccatcaaagacaattgagcatctaggaaatggtgtcaacgattcggatatgagaagaacttttgcgaaagtgcgcccgtgagaaggccgtgttttgtattgtgtggtcatgccagacaaacacttacacttcgtactggcaggcatcgaaatcgtgccaagaagattactgcaaatcttcggctgaaggcacctctgtctgttatgattcatgttacctagttatcatggggaacaagcggtcacagataaaggacctggctagtcgtatttggtcatgagctctgcatttgttcgttgatatctaaaaatgcgtatatttccactctgcgtgcattaatacctattcattgtattaataatattgaatgattg

SEQ ID NO: 33164 - DNA, 1116 bp, Muscodor strobelii
  misc_feature: SGI cDNA ID NO. 571435
  misc_feature: Encodes the peptide sequence at SEQ ID NO 33165
atgaccaacttctgtgtgaaggagttgcctcgcggctcccagtcgactgacccgcgagatatgatcttcgcattattgggattcgctaatgaggaggagcgcaaatatatcaaagtcgactacagcaagtcgatacaagaagtataccgcgattcgacccggattcttatgcagagaggttggacagacgttcttgcctggtctcaaccgtcagagaagcacatacttgatctaccaacctgggtaccagatttctccggcacaattttcgaaacgatgtgcagtcagtggcaggcgaaacactggctttgtcagtttcaagcttcgaaaaacttgaagcctcgcacttattcaggggatgtccagggtgactcaaccttacgatgggcaggcgtgataattgacacaattgatcaagttggctcgctctggtatccgagagtaagcgacgaagccaggggacggacacaagggatatcaactatgcagtcacgatcggcggattatgatgcgattctcacattcttgaccgagatcaaagattttacgggacagtccatccagcaggcgatagagaagtcacctgaatacatcatcggccagtcttcagattatccaatcagggactcaatggacattggccagcagacacctcgtcctcttctcaacgacaacatgacacgtcgcgaagcaatgtggcgcgtgccttgcgcagatcagttacttattgaatctaaactcgttcgtagccatgccggtatggaaagcgcatataacgcagtattctccgatgtccagaagacttcgactgagccggagaacggctcaaagaccaatattgcggatgaaggtagaccatacgtagaaacaatgctacgatgggtcaagaaacggccagttttaagcgaaaagggactcgtcgggcttgcgcctggcgatgcacggaagggagacattgtggtgctcttacagaattgcaatgctccgtacattcttcgaaaacacggcgagacagatgagagaacgatgtataagcttgttggcgaagcttatgtttggggcatcatggatggcgagtatcatggagacagcgaccagatattcgatatcgtatag

SEQ ID NO: 33165 - protein, 371 aa, Muscodor strobelii
  misc_feature: SGI Peptide ID NO. 571435
  misc_feature (12)..(370): NCBI GI: 171678824 Blast Desc: protein product [Podospora anserina] gi|170937482|emb|CAP62140.1| protein product [Podospora anserina]
  misc_feature (14)..(359): NCBI GI: 171690382 Blast Desc: protein product [Podospora anserina] gi|170945139|emb|CAP71250.1| protein product [Podospora anserina]
  misc_feature (14)..(365): NCBI GI: 169780508 Blast Desc: [Aspergillus oryzae RIB40] gi|83773458|dbj|BAE63585.1| protein product [Aspergillus oryzae]
  misc_feature (13)..(359): NCBI GI: 256729728 Blast Desc: NECHADRAFT_47029 [Nectria haematococca mpVI 77-13-4]
  misc_feature (14)..(365): NCBI GI: 238505332 Blast Desc: Ankyrin and HET domain protein [Aspergillus flavus NRRL3357] gi|220690009|gb|EED46359.1| Ankyrin and HET domain protein [Aspergillus flavus NRRL3357]
  misc_feature (11)..(359): NCBI GI: 171680414 Blast Desc: protein product [Podospora anserina] gi|170939834|emb|CAP65059.1| protein product [Podospora anserina]
  misc_feature (8)..(359): NCBI GI: 119179507 Blast Desc: CIMG_08498 [Coccidioides immitis RS]
  misc_feature (11)..(359): NCBI GI: 67538668 Blast Desc: AN5504.2 [Aspergillus nidulans FGSC A4] gi|40743474|gb|EAA62664.1| AN5504.2 [Aspergillus nidulans FGSC A4] gi|259485046|tpe|CBF81783.1| TPA: HET domain protein nidulans
  misc_feature (14)..(370): NCBI GI: 119473861 Blast Desc: Ankyrin and HET domain protein [Neosartorya fischeri NRRL 181] gi|119406959|gb|EAW16909.1| Ankyrin and HET domain protein [Neosartorya fischeri NRRL 181]
  misc_feature (11)..(359): NCBI GI: 145234110 Blast Desc: An02g12950 [Aspergillus niger] gi|134057368|emb|CAK37923.1| protein product [Aspergillus niger]
MTNFCVKELPRGSQSTDPRDMIFALLGFANEEERKYIKVDYSKSIQEVYRDSTRILMQRGWTDVLAWSQPSEKHILDLPTWVPDFSGTIFETMCSQWQAKHWLCQFQASKNLKPRTYSGDVQGDSTLRWAGVIIDTIDQVGSLWYPRVSDEARGRTQGISTMQSRSADYDAILTFLTEIKDFTGQSIQQAIEKSPEYIIGQSSDYPIRDSMDIGQQTPRPLLNDNMTRREAMWRVPCADQLLIESKLVRSHAGMESAYNAVFSDVQKTSTEPENGSKTNIADEGRPYVETMLRWVKKRPVLSEKGLVGLAPGDARKGDIVVLLQNCNAPYILRKHGETDERTMYKLVGEAYVWGIMDGEYHGDSDQIFDIV

SEQ ID NO: 33166 - DNA, 4964 bp, Muscodor strobelii; identical to SEQ ID NO: 33163
  misc_feature: SGI EST ID NO. CUFF.78462.0
  misc_feature: Variant of the nucleotide sequence at SEQ ID NO 33164

SEQ ID NO: 33167 - DNA, 1344 bp, Muscodor strobelii
  misc_feature: SGI cDNA ID NO. 571436
  misc_feature: Encodes the peptide sequence at SEQ ID NO 33168
atgcatcattcagcagctacagcaaaattaacacacctcttaatcagcgatgcgcaaccaagcaagaactcacccgttttgagtcctctgagaactccgcctatggaacttccatctggatcaaatggggtattggactcgtcctcaacacctatggttaacacaagtgagcctcaggcccgggaagacggtccgagcctacaaaaccaaggagaacctgcgagaacttttcgaactgtgccaaacctgcccaccggcattcaagctacttattatctgcgaaaacttgccgaaaaagatggtgccaatgttgagccaattgcgtttaaagctaacgatccaaagaatgagggaccaaactcgggagaacccctgagaacattccgaactatccaatacccctcgtcttttcaagctcaaacccagcagattgcatctattatcgaagatttaaagaaaaaagaacacaatgaagagggccatacgccgcgagagcgattgactgacgtcccgtatcgcaacttctacttatccaatgtcagcgcacaagctcgctacaggcaaaagtatcctgatggttcgagttgctattcacttgcacctaaagagcgtagtatgcttgatcaaggcaacgggaagtctgaactgcgagcgttaacgccatcagattctgccctgcctagtagcgacgaaagccaagggaatttcttcaccgatgttccattccctgagcttgcccaagctaatggcgctgcggtcgagtatcgcgcggatgggagagcaccaccactcgtaaacaacggcgttgatagccatgagagaacaacttgctcgcgagggcagtttactgatgtcccgttcgcttcttgtgtcctgtctaatcgcgctcgagccccctatcgacaatatccgcggagtctgtctcgtagtaggagccgcgacaagagtcgcccgcgcccgagacgcggctcttcttcttctgaggacggtgacactgctcataagagaataaaggcaagcagcaacaagacttcgaggcctacttgcgagcgacttgaagttggtgacacagttcaaggaacatcaacgccgttggggcacgttaagctcatcaaactcctcgataaacgcggagataccatcgatgccgtcctgcatgagtttcccatcgaaaatgcacctgcgtattttgctctttcatacgtttggggatacgatatacctggaaccaaaatcaacgtaaacgagatggaggtgacaattcgagacaatctgtttatggcattgagacagcttgggttactttgtcctggggtacatatggaccgacgcgctgtgcattga

SEQ ID NO: 33168 - protein, 447 aa, Muscodor strobelii
  misc_feature: SGI Peptide ID NO. 571436
  misc_feature (377)..(432): NCBI GI: 115437410 Blast Desc: conserved [Aspergillus terreus NIH2624] gi|114188618|gb|EAU30318.1| conserved [Aspergillus terreus NIH2624]
MHHSAATAKLTHLLISDAQPSKNSPVLSPLRTPPMELPSGSNGVLDSSSTPMVNTSEPQAREDGPSLQNQGEPARTFRTVPNLPTGIQATYYLRKLAEKDGANVEPIAFKANDPKNEGPNSGEPLRTFRTIQYPSSFQAQTQQIASIIEDLKKKEHNEEGHTPRERLTDVPYRNFYLSNVSAQARYRQKYPDGSSCYSLAPKERSMLDQGNGKSELRALTPSDSALPSSDESQGNFFTDVPFPELAQANGAAVEYRADGRAPPLVNNGVDSHERTTCSRGQFTDVPFASCVLSNRARAPYRQYPRSLSRSRSRDKSRPRPRRGSSSSEDGDTAHKRIKASSNKTSRPTCERLEVGDTVQGTSTPLGHVKLIKLLDKRGDTIDAVLHEFPIENAPAYFALSYVWGYDIPGTKINVNEMEVTIRDNLFMALRQLGLLCPGVHMDRRAVH

SEQ ID NO: 33169 - DNA, 4964 bp, Muscodor strobelii; identical to SEQ ID NO: 33163
  misc_feature: SGI EST ID NO. CUFF.78462.0
  misc_feature: Variant of the nucleotide sequence at SEQ ID NO 33167

SEQ ID NO: 33170 - DNA, 954 bp, Muscodor strobelii
  misc_feature: SGI cDNA ID NO. 571437
  misc_feature: Reduced expression when VOC is produced
  misc_feature: Encodes the peptide sequence at SEQ ID NO 33171
atgtctcagacccaaaaagccatcatcctccgcgaaatcggtcaacccgtagtccttacaaactcccatcccatcccgcagccaggcgagaaccaagtccaagttcgcgtctccgtcgcaggactcaacccacacgacgagaagatacaggcctacaacttgttcaaagacactctccccactgtcttgacccacgatgtcgtaggtcgtgtctcagctctgggacctggaatcgaggacctcgccatcggagaccgcgtagtctacctcccggccttcaaatcaggcggtgttcaaaatggactccaggaatttgccatcgcggaccgattcgcacttgcgaaaatccctgactctgtatctgatgatcaagcggcgaccctgcccgtcaacatcttcgcacccctggtagcgctgttccaaactcttgccatccccgcgccttggaccgaagtagcctcatccttcgactacgctggtaccactctcctcgttgtgggtggaggctcaaactgtggccgttttggtgtgcaactcgctgctctcgcgggcattggccgaatcgtcgtcgttggcggcaatgaagaggagcttcgctcctacggcgctacacatgtcgttaatcgccatggtgggcacgacgtagttctgagccgaattcgtgatatcgttggagattcgttgctctatgcctacgatgctattacgcctgatcaagtcctggccctcaatgctctctcctcttcgaagcggggggctatggcccggctcttgcctctcggaccagtcgatgactcgaaagtcgtcggcaagaaagctggctacgacgtcagggatgtaggtggtactgctcatgcctaccctaagttctcgagggaattttgggacagggttatgggttggattgcagagggcaagatcaagcccctgggctttgttgtgaagaggggttga

SEQ ID NO: 33171 - protein, 317 aa, Muscodor strobelii
  misc_feature: SGI Peptide ID NO. 571437
  misc_feature (30)..(116): Pfam Id: PF08240 Pfam Desc: Alcohol dehydrogenase GroES-like domain
  misc_feature (159)..(296): Pfam Id: PF00107 Pfam Desc: Zinc-binding dehydrogenase
  misc_feature (159)..(238): Pfam Id: PF00107 Pfam Desc: Zinc-binding dehydrogenase
  misc_feature (1)..(317): NCBI GI: 242818452 Blast Desc: alcohol dehydrogenase, zinc-containing, [Talaromyces stipitatus ATCC 10500] gi|218713585|gb|EED13009.1| alcohol dehydrogenase, zinc-containing, [Talaromyces stipitatus ATCC
  misc_feature (4)..(317): NCBI GI: 261361534 Blast Desc: conserved [Verticillium albo-atrum VaMs.102]
  misc_feature (1)..(317): NCBI GI: 154312762 Blast Desc: BC1G_05082 [Botryotinia fuckeliana B05.10] gi|150849784|gb|EDN24977.1| BC1G_05082 [Botryotinia fuckeliana B05.10]
  misc_feature (4)..(317): NCBI GI: 119479279 Blast Desc: alcohol dehydrogenase, zinc-containing, [Neosartorya fischeri NRRL 181] gi|119407822|gb|EAW17771.1| alcohol dehydrogenase, zinc-containing, [Neosartorya fischeri NRRL 181]
  misc_feature (4)..(317): NCBI GI: 70997768 Blast Desc: alcohol dehydrogenase, zinc-containing [Aspergillus fumigatus Af293] gi|66851254|gb|EAL91580.1| alcohol dehydrogenase, zinc-containing, [Aspergillus fumigatus Af293]
  misc_feature (5)..(317): NCBI GI: 121713422 Blast Desc: alcohol dehydrogenase, zinc-containing, [Aspergillus clavatus NRRL 1] gi|119402475|gb|EAW12896.1| alcohol dehydrogenase, zinc-containing, [Aspergillus clavatus NRRL 1]
  misc_feature (4)..(317): NCBI GI: 46105212 Blast Desc: FG00234.1 [Gibberella zeae PH-1]
  misc_feature (62)..(317): NCBI GI: 121713426 Blast Desc: zinc-binding dehydrogenase family oxidoreductase, [Aspergillus clavatus NRRL 1] gi|119402477|gb|EAW12898.1| zinc-binding dehydrogenase family oxidoreductase, [Aspergillus 1]
  misc_feature (165)..(285): NCBI GI: 115443506 Blast Desc: [Aspergillus terreus NIH2624] gi|114188429|gb|EAU30129.1| [Aspergillus terreus NIH2624]
  misc_feature (4)..(310): NCBI GI: 169864033 Blast Desc: CC1G_07820 [Coprinopsis cinerea okayama7#130] gi|116500243|gb|EAU83138.1| CC1G_07820 [Coprinopsis cinerea okayama7#130]
  misc_feature (15)..(226): SWISSPROT Homolog: EC 1.1.1.103 L-threonine 3-dehydrogenase
  misc_feature: Useful for introducing or modulating the production of volatile compounds
MSQTQKAIILREIGQPVVLTNSHPIPQPGENQVQVRVSVAGLNPHDEKIQAYNLFKDTLPTVLTHDVVGRVSALGPGIEDLAIGDRVVYLPAFKSGGVQNGLQEFAIADRFALAKIPDSVSDDQAATLPVNIFAPLVALFQTLAIPAPWTEVASSFDYAGTTLLVVGGGSNCGRFGVQLAALAGIGRIVVVGGNEEELRSYGATHVVNRHGGHDVVLSRIRDIVGDSLLYAYDAITPDQVLALNALSSSKRGAMARLLPLGPVDDSKVVGKKAGYDVRDVGGTAHAYPKFSREFWDRVMGWIAEGKIKPLGFVVKRG

SEQ ID NO: 33172 - DNA, 1401 bp, Muscodor strobelii
  misc_feature: SGI cDNA ID NO. 571438
  misc_feature: Elevated expression when VOC is produced
  misc_feature: Encodes the peptide sequence at SEQ ID NO 33173
atgcctgtgacgacctttgaagtacctgagcggtatcgataccaaaacggctttgggtcttacttcgaatccgaagccgtccctggcgctctaccgattgctcagaactcaccccaaaagccacctcatggcctctatgccgagaagctgtccggcactgccttcacggcccctcgacacgaaaaccagcagtcatggctgtacagaattctgccatcatgcgcccatccacccttcgcctccacagccgatggccccttcagcgccaataagcccacagaccctgctagacttgaatacatacccaaccagttgagatgggatcctttcgaccacgatgatcagacagattgggtatccggtatgcacctcgttgcgggtgcaggtgacccaacgctgaaacagggcatcggcatgtatatctactctgtcggcaaatccatggataacaactcagccttttattcagcagacggtgatttgttgatcgtagcgcaagaggggcctctcgatatcaggactgagctgggatggcttttagtcaggcccatggagatctgcgtcattcctcggggtgtgaagtatcaggtttatctcccctccggcccagccagagggtatgctctggagctgtatcagggacatttctccttaccggagctcggcccaattggatctaattgtctcgcaaatgcacgcgacttccaagctccggtcgcctgcttcagcgaggactttggtgccacggccgctgaagggcctaatacctacacaattactgtgaaattcaacaactcgctgttccagactaagcagcctcacaccccgttcgatgtcgtcgcctggcacggtaactactatccctacaagtatgatctaggccgtttcaataccatcggctctatttcgtacgaccacccagacccatccatcttcacagtgctctccgcattgtcagatcatccaggcacagcaatagctgactttgtcatcttcccacctcgctggctcgtggcagaagacaccttccgcccgccctggtatcaccgcaacaccatgtccgaattcatgggcttgatcgctggtgaatacgatgcaaagaagggcggtcaaggcggatttatgcctggtggtgctagcttacacaacgtgatgagcggtcacggtcccgatgccaagagcttcgagggcgccagcaatgccgagctgaagccggccttagtcggtaagggaagttgtgctttcatgtttgagagctgtttgatggtcggcgtgactgaatggggtctgaaaatgtgtaaaaaggtccaagaaggatataatgatgagagctggggcggtgttcaggctcactggaaacggcccgatggtgtcagcactgatggacatttgctgaaatag

SEQ ID NO: 33173 - protein, 466 aa, Muscodor strobelii
  misc_feature: SGI Peptide ID NO. 571438
  misc_feature (11)..(452): Pfam Id: PF04209 Pfam Desc: homogentisate 1,2-dioxygenase
  misc_feature (1)..(455): NCBI GI: 67522881 Blast Desc: HGD_EMENI Homogentisate 1,2-dioxygenase (Homogentisicase) (Homogentisate oxygenase) (Homogentisic acid oxidase) [Aspergillus nidulans FGSC A4] RecName: 1,2-dioxygenase;
  misc_feature (1)..(456): NCBI GI: 212529480 Blast Desc: homogentisate 1,2-dioxygenase (HmgA), [Penicillium marneffei ATCC 18224] gi|210074295|gb|EEA28382.1| homogentisate 1,2-dioxygenase (HmgA), [Penicillium marneffei ATCC 18224]
  misc_feature (1)..(453): NCBI GI: 171681764 Blast Desc: protein product [Podospora anserina] gi|170940841|emb|CAP66491.1| protein product [Podospora anserina]
  misc_feature (1)..(453): NCBI GI: 121710296 Blast Desc: homogentisate 1,2-dioxygenase (HmgA), [Aspergillus clavatus NRRL 1] gi|119400914|gb|EAW11338.1| homogentisate 1,2-dioxygenase (HmgA), [Aspergillus clavatus NRRL 1]
  misc_feature (1)..(456): NCBI GI: 242763018 Blast Desc: homogentisate 1,2-dioxygenase (HmgA), [Talaromyces stipitatus ATCC 10500] gi|218723690|gb|EED23107.1| homogentisate 1,2-dioxygenase (HmgA), [Talaromyces stipitatus ATCC 10500]
  misc_feature (1)..(455): NCBI GI: 46124145 Blast Desc: FG06450.1 [Gibberella zeae PH-1]
  misc_feature (1)..(456): NCBI GI: 226282871 Blast Desc: homogentisate 1,2-dioxygenase [Paracoccidioides brasiliensis Pb01]
  misc_feature (1)..(456): NCBI GI: 255932351 Blast Desc: Pc12g09040 [Penicillium chrysogenum Wisconsin 54-1255] gi|211582351|emb|CAP80531.1| Pc12g09040 [Penicillium chrysogenum Wisconsin 54-1255]
  misc_feature (1)..(455): NCBI GI: 169607635 Blast Desc: SNOG_06876 [Phaeosphaeria nodorum SN15] gi|160701454|gb|EAT85527.2| SNOG_06876 [Phaeosphaeria nodorum SN15]
  misc_feature (1)..(465): NCBI GI: 85097536 Blast Desc: homogentisate 1,2-dioxygenase [Neurospora crassa OR74A] gi|28921953|gb|EAA31225.1| homogentisate 1,2-dioxygenase [Neurospora crassa OR74A]
  misc_feature (1)..(455): SWISSPROT Homolog: EC 1.13.11.5 Homogentisate 1,2-dioxygenase
  misc_feature: Useful for introducing or modulating the production of volatile compounds
MPVTTFEVPERYRYQNGFGSYFESEAVPGALPIAQNSPQKPPHGLYAEKLSGTAFTAPRHENQQSWLYRILPSCAHPPFASTADGPFSANKPTDPARLEYIPNQLRWDPFDHDDQTDWVSGMHLVAGAGDPTLKQGIGMYIYSVGKSMDNNSAFYSADGDLLIVAQEGPLDIRTELGWLLVRPMEICVIPRGVKYQVYLPSGPARGYALELYQGHFSLPELGPIGSNCLANARDFQAPVACFSEDFGATAAEGPNTYTITVKFNNSLFQTKQPHTPFDVVAWHGNYYPYKYDLGRFNTIGSISYDHPDPSIFTVLSALSDHPGTAIADFVIFPPRWLVAEDTFRPPWYHRNTMSEFMGLIAGEYDAKKGGQGGFMPGGASLHNVMSGHGPDAKSFEGASNAELKPALVGKGSCAFMFESCLMVGVTEWGLKMCKKVQEGYNDESWGGVQAHWKRPDGVSTDGHLLK

SEQ ID NO: 33174 - DNA, 2887 bp, Muscodor strobelii
  misc_feature: SGI EST ID NO. CUFF.78523.0
  misc_feature: Variant of the nucleotide sequence at SEQ ID NO 33172
gcaagagctcccattgtttccgacatggccgattttgcaacctgcgggtactacttttatcattttcccttttcaaaggacacgagaggtttgattatttgcgtgcatcctccctgatcaaaggcaagttagttacctctaagaagcgcgtaaccaccgtagttccggccaccacaaaaatgcctgtgacgacctttgaagtacctgagcggtatcgataccaaaacggctttgggtcttacttcgaatccgaagccgtccctggcgctctaccgattgctcagaactcaccccaaaagccacctcatggcctctatgccgagaagctgtccggcactgccttcacggcccctcgacacgaaaaccagcagtcatggctgtacagaattctgccatcatgcgcccatccacccttcgcctccacagccgatggccccttcagcgccaataagcccacagaccctgctagacttgaatacatacccaaccagttgagatgggatcctttcgaccacgatgatcagacagattgggtatccggtatgcacctcgttgcgggtgcaggtgacccaacgctgaaacagggcatcggcatgtatatctactctgtcggcaaatccatggataacaactcagccttttattcagcagacggtgatttgttgatcgtagcgcaagaggggcctctcgatatcaggactgagctgggatggcttttagtcaggcccatggagatctgcgtcattcctcggggtgtgaagtatcaggtttatctcccctccggcccagccagagggtatgctctggagctgtatcagggacatttctccttaccggagctcggcccaattggatctaattgtctcgcaaatgcacgcgacttccaagctccggtcgcctgcttcagcgaggactttggtgccacggccgctgaagggcctaatacctacacaattactgtgaaattcaacaactcgctgttccagactaagcagcctcacaccccgttcgatgtcgtcgcctggcacggtaactactatccctacaagtatgatctaggccgtttcaataccatcggctctatttcgtacgaccacccagacccatccatcttcacagtgctctccgcattgtcagatcatccaggcacagcaatagctgactttgtcatcttcccacctcgctggctcgtggcagaagacaccttccgcccgccctggtatcaccgcaacaccatgtccgaattcatgggcttgatcgctggtgaatacgatgcaaagaagggcggtcaaggcggatttatgcctggtggtgctagcttacacaacgtgatgagcggtcacggtcccgatgccaagagcttcgagggcgccagcaatgccgagctgaagccggccttagtcggtaagggaagttgtgctttcatgtttgagagctgtttgatggtcggcgtgactgaatggggtctgaaaatgtgtaaaaaggtccaagaaggatataatgatgagagctggggcggtgttcaggctcactggaaacggcccgatggtgtcagcactgatggacatttgctgaaatagtgtgatacccggtatgatataatgatcacgcgactttgatttcttgtacttatcgcataaaagagaatgagatacatgatgatacagacagaaatgtctctttaaactactctttcgaatccacatcatgagatacgatagcatacctcagacaactgatgttgccctgagactgacatcctcagagatggatatgggtcttggaaaccgatttcccctctctatacgcatcaagtacctcattgacgttctcagcagtcaacccctcttcacaacaaagcccaggggcttgatcttgccctctgcaatccaacccataaccctgtcccaaaattccctcgagaacttagggtaggcatgagcagtaccacctacatccctgacgtcgtagccagctttcttgccgacgactttcgagtcatcgactggtccgagaggcaagagccgggccatagccccccgcttcgaagaggagagagcattgagggccaggacttgatcaggcgtaatagcatcgtaggcatagagcaacgaatctccaacgatatcacgaattcggctcagaactacgtcgtgcccaccatggcgattaacgacatgtgtagcgccgtaggagcgaagctcctcttcattgccgccaacgacgacgattcggccaatgcccgcgagagcagcgagttgcacaccaaaacggccacagtttgagcctccacccacaacgaggagagtggtaccagcgtagtcgaaggatgaggctacttcggtccaaggcgcggggatggcaagagtttggaacagcgctaccaggggtgcgaagatgttgacgggcagggtcgccgcttgatcatcagatacagagtcagggattttcgcaagtgcgaatcggtccgcgatggcaaattcctggagtccattttgaacaccgcctgatttgaaggccgggaggtagactacgcggtctccgatggcgaggtcctcgattccaggtcccagagctgagacacgacctacgacatcgtgggtcaagacagtggggagagtgtctttgaacaagttgtaggcctgtatcttctcgtcgtgtgggttgagtcctgcgacggagacgcgaacttggacttggttctcgcctggctgcgggatgggatgggagtttgtaaggactacgggttgaccgatttcgcggaggatgatggctttttgggtctgagacattgtgatcttgctttttgagatatgttgctcagttaaaatgttcaatgaaatagaattgatattgttcttattgatgctcttaatgttgttgctgc

SEQ ID NO: 33175 - DNA, 1332 bp, Muscodor strobelii
  misc_feature: SGI cDNA ID NO. 571439
  misc_feature: Reduced expression when VOC is produced
  misc_feature: Encodes the peptide sequence at SEQ ID NO 33176
atgcccctaaaaatcctcatcatcggcgctggtgtttgcggccccgcgctagccaccctactcacacgcgcagacccaaatcactcaattacaattgtcgagcggtctcccactctacgtaaatcaggtttacaaatcgacctccgcgcgcatggcgttcctatcgtgcagaaaatggggctcatggaagcacttcggaaacgtgttgtgcccgagaacggtatcgcaatcatgaatgaaaaaggtggagaagtcgcgagcttcgggaaattcgagagtggcacgggtcaacagagtatggtcagcgaatttgagttgatgagatcggacatcgtcgatgtgttttatcgcgcgagtttgggtctgagcacggataaacctgatgatgggtcggacgaggaactcccgacaagcgcgggaaatgtgcgttatgagttcggagtcacggttgagtcttttgctcagcatgatgcggacagtgtcgaagtcaggttttctgacgggcgaaatgagaaatacgacttgctgattggcgccgatggtcaagcatcgaggactaggaggaccttattgggcaaggagaagagcgatgcatgtttcaagagcttggatatgttcgttgcgtatttcacgattccgagacaggagaaggacgacgatatgttaagggtttataacagcacggggaagcgatcggtatcaatacgttcggcagatccgaaagcgcctacgcaggtttatatgagtgttatgaccagtaagggtggtaatgagcggggtatgagaacgggcatccatcagtccgtgccggagcggaaacaattatttgtgaaggcattcgaagatgagcatggatggaggattgacgaattcagggataggctgatgaaggacgaagttccagatgggaacttttatgctcaggagatcggccaggtcaaatgcgatacgctggcagttgggagggttgcgctacttggtgatgctggttataccccgtcacctattaccggtatggggacaacgctctcactaataggcgcgtatatcctcgccggcgagatctcgaagcacggtgatgacgtaccatctggacttcagagttacgcgaaggtcgtgcgaccgtatgtcacggagggacagaaattactcccgggaggccctaggatttttcatctggagacatggtgggctattgctctgctacattcagtcgtctggttcatgtcgaagtcgggactggctgatttgatcggctgggtactagttaagtttatgccagaaggaaagattgggttgaagctgccggagtatcccagattgaaactgtag

SEQ ID NO: 33176 - protein, 443 aa, Muscodor strobelii
  misc_feature: SGI Peptide ID NO. 571439
  misc_feature (2)..(380): Pfam Id: PF01494 Pfam Desc: FAD binding domain
  misc_feature (1)..(441): NCBI GI: 169607675 Blast Desc: SNOG_06896 [Phaeosphaeria nodorum SN15] gi|111064427|gb|EAT85547.1| SNOG_06896 [Phaeosphaeria nodorum SN15]
  misc_feature (2)..(442): NCBI GI: 256735574 Blast Desc: NECHADRAFT_103269 [Nectria haematococca mpVI 77-13-4]
  misc_feature (1)..(441): NCBI GI: 238840427 Blast Desc: oxidoreductase [Microsporum canis CBS 113480]
  misc_feature (3)..(441): NCBI GI: 242804424 Blast Desc: monooxygenase, [Talaromyces stipitatus ATCC 10500] gi|218717717|gb|EED17138.1| monooxygenase, [Talaromyces stipitatus ATCC 10500]
  misc_feature (1)..(443): NCBI GI: 255933606 Blast Desc: Pc12g13750 [Penicillium chrysogenum Wisconsin 54-1255] gi|211582801|emb|CAP81002.1| Pc12g13750 [Penicillium chrysogenum Wisconsin 54-1255]
  misc_feature (3)..(441): NCBI GI: 145234785 Blast Desc: An03g01390 [Aspergillus niger] gi|134057714|emb|CAK38112.1| protein product [Aspergillus niger]
  misc_feature (1)..(441): NCBI GI: 212539466 Blast Desc: monoxygenase, [Penicillium marneffei ATCC 18224] gi|210067187|gb|EEA21279.1| monoxygenase, [Penicillium marneffei ATCC 18224]
  misc_feature (2)..(441): NCBI GI: 115388779 Blast Desc: conserved [Aspergillus terreus NIH2624] gi|114195979|gb|EAU37679.1| conserved [Aspergillus terreus NIH2624]
  misc_feature (1)..(443): NCBI GI: 261361107 Blast Desc: oxidoreductase [Verticillium albo-atrum VaMs.102]
  misc_feature (3)..(442): NCBI GI: 169765404 Blast Desc: [Aspergillus oryzae RIB40] gi|83765028|dbj|BAE55171.1| protein product [Aspergillus oryzae]
  misc_feature (3)..(382): SWISSPROT Homolog: EC 1.14.13.1 Salicylate 1-monooxygenase
  misc_feature: Useful for introducing or modulating the production of volatile compounds
MPLKILIIGAGVCGPALATLLTRADPNHSITIVERSPTLRKSGLQIDLRAHGVPIVQKMGLMEALRKRVVPENGIAIMNEKGGEVASFGKFESGTGQQSMVSEFELMRSDIVDVFYRASLGLSTDKPDDGSDEELPTSAGNVRYEFGVTVESFAQHDADSVEVRFSDGRNEKYDLLIGADGQASRTRRTLLGKEKSDACFKSLDMFVAYFTIPRQEKDDDMLRVYNSTGKRSVSIRSADPKAPTQVYMSVMTSKGGNERGMRTGIHQSVPERKQLFVKAFEDEHGWRIDEFRDRLMKDEVPDGNFYAQEIGQVKCDTLAVGRVALLGDAGYTPSPITGMGTTLSLIGAYILAGEISKHGDDVPSGLQSYAKVVRPYVTEGQKLLPGGPRIFHLETWWAIALLHSVVWFMSKSGLADLIGWVLVKFMPEGKIGLKLPEYPRLKL

SEQ ID NO: 33177 - DNA, 2911 bp, Muscodor strobelii
  misc_feature: SGI EST ID NO. CUFF.78471.0
  misc_feature: Variant of the nucleotide sequence at SEQ ID NO 33175
cgaggtggcatcgatgactaatcatatcgatcgcgccagatgacaatgtagcatgagtcatacttatcaattatacaaaatgtgcaaggtagaaagaatatgactatcgaaaacaaacatgttatatttgacgtggtgagtacagcaagaccgaccccgaccccgatgccgaacaactgttgaaaatgccgggccccgccctgatttctgactgcattttccaatttaatctgtcctgctgggagatgagccattgcatctatgacgcactatattccagcctatatctcgccgaacattgtcgagtttctcgtcaatggaaatgcaactaaagtgcaacacggaatcctgcaggtctcgaaccccggcagattttggctagtagtggtgacgtcaaaaccgtcccacagccattattagcattctgtcctactgcaactgagaaaggaaatatgcgcgacatttaggtgtgaagaagaatgagtcaatgagtcgcgtagaatcttgcgacgtcaggatgatatagacacatctcatttcacggacacgtaagcatccccgagcccgaccccgggctaccgttgaaaggcaccatacactggtagcgagcacacagctgcctgcgggcatatcatacgtggcattctcatcgtaaacttcatttcatggtcgtatttctaataagatctcaccaacctccatatgatcatccctttctcacttggtctcagcatcacacctaatatctcacaatgcccctaaaaatcctcatcatcggcgctggtgtttgcggccccgcgctagccaccctactcacacgcgcagacccaaatcactcaattacaattgtcgagcggtctcccactctacgtaaatcaggtttacaaatcgacctccgcgcgcatggcgttcctatcgtgcagaaaatggggctcatggaagcacttcggaaacgtgttgtgcccgagaacggtatcgcaatcatgaatgaaaaaggtggagaagtcgcgagcttcgggaaattcgagagtggcacgggtcaacagagtatggtcagcgaatttgagttgatgagatcggacatcgtcgatgtgttttatcgcgcgagtttgggtctgagcacggataaacctgatgatgggtcggacgaggaactcccgacaagcgcgggaaatgtgcgttatgagttcggagtcacggttgagtcttttgctcagcatgatgcggacagtgtcgaagtcaggttttctgacgggcgaaatgagaaatacgacttgctgattggcgccgatggtcaagcatcgaggactaggaggaccttattgggcaaggagaagagcgatgcatgtttcaagagcttggatatgttcgttgcgtatttcacgattccgagacaggagaaggacgacgatatgttaagggtttataacagcacggggaagcgatcggtatcaatacgttcggcagatccgaaagcgcctacgcaggtttatatgagtgttatgaccagtaagggtggtaatgagcggggtatgagaacgggcatccatcagtccgtgccggagcggaaacaattatttgtgaaggcattcgaagatgagcatggatggaggattgacgaattcagggataggctgatgaaggacgaagttccagatgggaacttttatgctcaggagatcggccaggtcaaatgcgatacgctggcagttgggagggttgcgctacttggtgatgctggttataccccgtcacctattaccggtatggggacaacgctctcactaataggcgcgtatatcctcgccggcgagatctcgaagcacggtgatgacgtaccatctggacttcagagttacgcgaaggtcgtgcgaccgtatgtcacggagggacagaaattactcccgggaggccctaggatttttcatctggagacatggtgggctattgctctgctacattcagtcgtctggttcatgtcgaagtcgggactggctgatttgatcggctgggtactagttaagtttatgccagaaggaaagattgggttgaagctgccggagtatcccagattgaaactgtagcgttaaggattgaggatgttgtaattttcgttgtcttgagcgagcttgtatcattaggtgacttatacccctcttacattattgagactacgtgttataaaatagttgagcactccacccataatgcgtgaatatttcccatcaattagcctgctaaaccggcagcgaaccatcttaagttgggagggaaaactgaatgctcgacaagtctactaacaatcctacggcctaagtagatgctcgatggactgaatctcgatttgatggacgtgtaagcgctattcgtttatgtattcgcactgtttgtaatgaaatagataagacggtagccaggaaacagaggtgttatggattcttgtaacgaccgggtgtttggtcctggagttgtaatcgtctcgtcgcagttgaggtgttgggtgctatactagatgactcttgctgccgttgcaagattttcttctatctcatacatttctgcaatgtctctgccagtgtgcgaacatgtagaaggtaagtgcacctatcgtcaattcatcaacaacaaccttaataatatgatggggacaaatgcaaccgacttggctcaacagccaacaatgcgcatgatcttctggataatcaataacatcaattgagagaatatcatgagactatgccttcctatcgattgtccaattgtaactcgagcccggttttttttttcaatacatttactattgaggttcactttcgaatcaatgttgagcttcaatagctgaggtccattgaggtagtagtgatagcgggtattaagggctaacgtcggtgtaccgtccgccccagaaacg

SEQ ID NO: 33178 - DNA, 1575 bp, Muscodor strobelii
  misc_feature: SGI cDNA ID NO. 571440
  misc_feature: Encodes the peptide sequence at SEQ ID NO 33179
atgagtgtcgccttcaacaacaaccccacgcttctcctgtgcgtcgccatagccacagcggtttgcctcgcagctcgaaggctgctcagtcatgatccgcgcgagccgccacttgcaccgcaatcaattccatttattggacatgttattggattctcacaaaagagattcaactactatgtcgatcttagccagtcgatagtatctcctatcttcgccgtgcgaatcgctggtcaaaagatgtacattgttacgaagccagagctcatcgtggaggtccagaaacagcaccgaacgcttgcatttccacctatagcggccaaatttgcacgcatagcttgcggtacaagtcatgaagtgcaagctatcctggcaagaaacatgactggcgaagacgccgactttggcttatcgatggaatcgcatgccgcaatgcagtctgcactcaagcccggcgccgagctcgacaatatgaatcgcttcatgattcgagaggtcgcgcagtcgctagataatctacttgagaatgacacttgcagaataaagttatatcattggctgacgaatacactgacatcagctactactaggtctgtgtatggtcctatgatcccgtacgaagatcggaatatcattgacgctttctggaaatttgaaagcggccttatgtcgattctcgttggaattcttccgtcaattatcgcttcgagacccgtcgctgcccgagaaaaggtcgtcggcgcttttgtcaaatacttcgaagcaggtggggtgcagaaagcatctgcttttgctcagaaacgatatcagacacggattgatcatggggttgggttggaagacattgcgcgctttgaagtaggaggctctgtcgctgtccttgtaaacacagtgcccgcagctttctggacacttctgctcatcaactcgtatcccggtctcctagaagatgttcgtaaggagattgatgcttgcacgcggtccggaaacgatatccaggtcggcgtcgatgtcagagagcttgatattaatgccctgaaagagaggtgcccattgctgctttcggcttatcaagaaatgcttcgttatcgatctatgggagtatcggtgcgcgaggtcatggaggacacatatcttgatcgattgctgctcaaaaagggtgcattgttgcaaatgccgagccgtgtagtccatgaagacagtcaattctgcggcgacgatgcggatgcattcaatccccgcagattcctgcagcgccaaagagacacatgctttcgtgcctttggaggcggcaatactctctgccctggtcgacacttcgccacaaacgaggttttggctcttgttgctacctttgtttcgcgattcgacattacaccaactagaggtagttggacattgccaacgacatttaacacaaacgtttctgccgttatcatgcgaccagataatgatgttgaagtcgacatcacagtacgtcgtgggattgagaagagtgtgcagtggcgtatcaatctgagagattcagattccatctttgcattggcgacggatgatcaggacgaagcttcttga

SEQ ID NO: 33179 - protein, 524 aa, Muscodor strobelii
  misc_feature: SGI Peptide ID NO. 571440
  misc_feature (36)..(488): Pfam Id: PF00067 Pfam Desc: Cytochrome P450
  misc_feature (359)..(488): Pfam Id: PF00067 Pfam Desc: Cytochrome P450
  misc_feature (8)..(519): NCBI GI: 171678379 Blast Desc: protein product [Podospora anserina] gi|170937259|emb|CAP61916.1| protein product [Podospora anserina]
  misc_feature (32)..(520): NCBI GI: 154303094 Blast Desc: BC1G_09567 [Botryotinia fuckeliana B05.10] gi|150855030|gb|EDN30222.1| BC1G_09567 [Botryotinia fuckeliana B05.10]
  misc_feature (74)..(520): NCBI GI: 156058692 Blast Desc: SS1G_03358 [Sclerotinia sclerotiorum 1980] gi|154701145|gb|EDO00884.1| SS1G_03358 [Sclerotinia sclerotiorum 1980]
  misc_feature (13)..(519): NCBI GI: 39969489 Blast Desc: MGG_10355 [Magnaporthe grisea 70-15] gi|149211359|ref|XP_001523054.1| MGCH7_ch7g1132 [Magnaporthe grisea 70-15] gi|86197087|gb|EAQ71725.1| MGCH7_ch7g1132 grisea
  misc_feature (31)..(520): NCBI GI: 169609679 Blast Desc: SNOG_07932 [Phaeosphaeria nodorum SN15] gi|160701894|gb|EAT84208.2| SNOG_07932 [Phaeosphaeria nodorum SN15]
  misc_feature (13)..(515): NCBI GI: 119467107 Blast Desc: cytochrome P450, [Neosartorya fischeri NRRL 181] gi|119405512|gb|EAW15463.1| cytochrome P450, [Neosartorya fischeri NRRL 181]
  misc_feature (54)..(519): NCBI GI: 169608169 Blast Desc: SNOG_07153 [Phaeosphaeria nodorum SN15] gi|160701581|gb|EAT85804.2| SNOG_07153 [Phaeosphaeria nodorum SN15]
  misc_feature (54)..(418): NCBI GI: 258567094 Blast Desc: conserved [Uncinocarpus reesii 1704] gi|237905737|gb|EEP80138.1| conserved [Uncinocarpus reesii 1704]
  misc_feature (29)..(518): NCBI GI: 212542749 Blast Desc: cytochrome P450, [Penicillium marneffei ATCC 18224] gi|210066436|gb|EEA20529.1| cytochrome P450, [Penicillium marneffei ATCC 18224]
  misc_feature (13)..(515): NCBI GI: 70984779 Blast Desc: cytochrome P450 oxidoreductase [Aspergillus fumigatus Af293] gi|66845523|gb|EAL85858.1| cytochrome P450 oxidoreductase, [Aspergillus fumigatus Af293]
  misc_feature (33)..(486): SWISSPROT Homolog: EC 1.14.13.100 25-hydroxycholesterol 7-alpha-hydroxylase
MSVAFNNNPTLLLCVAIATAVCLAARRLLSHDPREPPLAPQSIPFIGHVIGFSQKRFNYYVDLSQSIVSPIFAVRIAGQKMYIVTKPELIVEVQKQHRTLAFPPIAAKFARIACGTSHEVQAILARNMTGEDADFGLSMESHAAMQSALKPGAELDNMNRFMIREVAQSLDNLLENDTCRIKLYHWLTNTLTSATTRSVYGPMIPYEDRNIIDAFWKFESGLMSILVGILPSIIASRPVAAREKVVGAFVKYFEAGGVQKASAFAQKRYQTRIDHGVGLEDIARFEVGGSVAVLVNTVPAAFWTLLLINSYPGLLEDVRKEIDACTRSGNDIQVGVDVRELDINALKERCPLLLSAYQEMLRYRSMGVSVREVMEDTYLDRLLLKKGALLQMPSRVVHEDSQFCGDDADAFNPRRFLQRQRDTCFRAFGGGNTLCPGRHFATNEVLALVATFVSRFDITPTRGSWTLPTTFNTNVSAVIMRPDNDVEVDITVRRGIEKSVQWRINLRDSDSIFALATDDQDEAS

SEQ ID NO: 33180 - DNA, 843 bp, Muscodor strobelii
  misc_feature: SGI cDNA ID NO. 571441
  misc_feature: Encodes the peptide sequence at SEQ ID NO 33181
atgtcgtgcccgggttgcttcaagggagctattcatgaaggcgagcccacagggaaagtgacgaaacttcacaatttagatgtgtacgtcgcggagcctgccagtggcaatgcgccgaaggccatacttgtcctcgttcccgatatcttcggctgggactttgtgaatatccgattgatggccgatgcctttgccaggaggaaggattatcgagtatacgcgcccgactttatggatggccatgcggcccatccttcatccctagagctcatggacaaagtgatgaacccgggaaaaacatggatgcagactctggctaaaccatattatctcgttggtctgctaagagttgccctacctgctgtcttcaacaatcgagccggtaaaacgttcccggttgttaagagattcatggaatctctacgacaaaacgaagcagctcatcttccagtcggcgttactggatactgctggggaggcaaacacgtcgttctacttgctgagggatacagcattgatgataagccgctaatggatgtcggctttgcagcacatcccagtctggtctccatcccgagcgatatacagaagatgaccgttcctgtcgcgttcgcatcaggcgataaagacacaaatatgtcggttgagcaattcaaaaaacttgaagagattgtcactgccaaacccgatggtcaaaagggcgaatgcaagttgtatcccggttacggacatggattcgcgtgcagagcggacgtgaccaacgatgacccaaaaggccaagttgaagttgaagaccagacgatagagtggttagaaagacatttcgagaaaatcagctattga

SEQ ID NO: 33181 - protein, 280 aa, Muscodor strobelii
  misc_feature: SGI Peptide ID NO. 571441
  misc_feature (26)..(275): Pfam Id: PF01738 Pfam Desc: Dienelactone hydrolase family
  misc_feature (26)..(77): Pfam Id: PF01738 Pfam Desc: Dienelactone hydrolase family
  misc_feature (144)..(275): Pfam Id: PF01738 Pfam Desc: Dienelactone hydrolase family
  misc_feature (1)..(276): NCBI GI: 256723345 Blast Desc: NECHADRAFT_97226 [Nectria haematococca mpVI 77-13-4]
  misc_feature (1)..(278): NCBI GI: 119500770 Blast Desc: dienelactone hydrolase family protein [Neosartorya fischeri NRRL 181] gi|119415307|gb|EAW25245.1| dienelactone hydrolase family protein [Neosartorya fischeri NRRL 181]
  misc_feature (1)..(279): NCBI GI: 146323765 Blast Desc: dienelactone hydrolase family protein [Aspergillus fumigatus Af293] gi|129557547|gb|EAL89907.2| dienelactone hydrolase family protein [Aspergillus fumigatus Af293] hydrolase
  misc_feature (1)..(280): NCBI GI: 121707227 Blast Desc: dienelactone hydrolase family protein [Aspergillus clavatus NRRL 1] gi|119399918|gb|EAW10344.1| dienelactone hydrolase family protein [Aspergillus clavatus NRRL 1]
  misc_feature (1)..(279): NCBI GI: 115397751 Blast Desc: conserved [Aspergillus terreus NIH2624] gi|114192658|gb|EAU34358.1| conserved [Aspergillus terreus NIH2624]
  misc_feature (1)..(274): NCBI GI: 255950142 Blast Desc: Pc22g19350 [Penicillium chrysogenum Wisconsin 54-1255] gi|211592855|emb|CAP99223.1| Pc22g19350 [Penicillium chrysogenum Wisconsin 54-1255]
  misc_feature (1)..(280): NCBI GI: 145257439 Blast Desc: An04g03680 [Aspergillus niger] gi|134058649|emb|CAK38633.1| protein product [Aspergillus niger]
  misc_feature (1)..(276): NCBI GI: 261353697 Blast Desc: dienelactone hydrolase family protein [Verticillium albo-atrum VaMs.102]
  misc_feature (1)..(252): NCBI GI: 67522415 Blast Desc: AN1664.2 [Aspergillus nidulans FGSC A4] gi|40745628|gb|EAA64784.1| AN1664.2 [Aspergillus nidulans FGSC A4] gi|259487003|tpe|CBF85325.1| TPA: dienelactone hydrolase FGSC
  misc_feature (1)..(275): NCBI GI: 256725123 Blast Desc: NECHADRAFT_55340 [Nectria haematococca mpVI 77-13-4]
MSCPGCFKGAIHEGEPTGKVTKLHNLDVYVAEPASGNAPKAILVLVPDIFGWDFVNIRLMADAFARRKDYRVYAPDFMDGHAAHPSSLELMDKVMNPGKTWMQTLAKPYYLVGLLRVALPAVFNNRAGKTFPVVKRFMESLRQNEAAHLPVGVTGYCWGGKHVVLLAEGYSIDDKPLMDVGFAAHPSLVSIPSDIQKMTVPVAFASGDKDTNMSVEQFKKLEEIVTAKPDGQKGECKLYPGYGHGFACRADVTNDDPKGQVEVEDQTIEWLERHFEKISY

SEQ ID NO: 33182 - DNA, 1059 bp, Muscodor strobelii
  misc_feature: SGI cDNA ID NO. 571442
  misc_feature: Encodes the peptide sequence at SEQ ID NO 33183
atgaggaacaatgttcttttcttcagtttggcggccagtcgagctctggcctatccaggaatgggccaagtgatggcagagatcaaagcccgtgacgactttgctcttgaagctcggtctactgttgtctttggcgacttagtgcatggtagtctaactaaaagaggagatgacatcaaaggcattctccagggtggacctgctacaagtagcgaaagtagcgcatacacgccacccggtagtctgaactcaactgcttgcagcaaagatccactttgtctctggcactatgtcgcccaagagatgtcagacgacttcgcagatgccaatggctgtacagatctggcccgtggtgcaatacgacagggcttccacgatgcagcagcatgggacgtcaacgcgccgtatggtggagctgacggatcgctcttactttctgacgagctctctcgacccgagaacgcgggtctgcaaccaataggcgacagaaccagagaatactacgacaaatatcacccgtacggcgctagcatggccgacatcattcagaccgctgcaattgttggcgttgtctcttgtccaggcgggccgaggatacgggcctttgccggaagaaacgatgacgcgcgagcagctcttcccaatcttctaccatcaccattccaggtggcacaagagctcattgaccttttcgtcgctaagacatttaccgccagcgatcttgtcgcccttgtaggtgcacatacagcttcgaggcagttcttcgtcgatcctagtcgggcaggagcatcacaagacaccgatcctcaaatatgggatacgaaattttatcgagagaccttagatggagacaataaaacgattcttatcttccctagtgacaaggctcttgcaacctactcaaccacgaagggccaatggaacgcctttgctagtcctggcggacaaggccagtggggtccggccttcgctcaagcatatttccgtatgagcatgctcggtgttgataacatgaatgaccttacggagattacgaaggtcgttcctctgcctcgatag

SEQ ID NO: 33183 - protein, 352 aa, Muscodor strobelii
  misc_feature: SGI Peptide ID NO. 571442
  misc_feature (98)..(313): Pfam Id: PF00141 Pfam Desc: Peroxidase
  misc_feature (177)..(313): Pfam Id: PF00141 Pfam Desc: Peroxidase
  misc_feature (17)..(352): NCBI GI: 169620674 Blast Desc: SNOG_13539 [Phaeosphaeria nodorum SN15] gi|160704086|gb|EAT78986.2| SNOG_13539 [Phaeosphaeria nodorum SN15]
  misc_feature (17)..(352): NCBI GI: 189194071 Blast Desc: ligninase H2 precursor [Pyrenophora tritici-repentis Pt-1C-BFP] gi|187978938|gb|EDU45564.1| ligninase H2 precursor [Pyrenophora tritici-repentis Pt-1C-BFP]
  misc_feature (16)..(349): NCBI GI: 261361667 Blast Desc: ligninase H2 [Verticillium albo-atrum VaMs.102]
  misc_feature (1)..(349): NCBI GI: 261352643 Blast Desc: peroxidase manganese-dependent 1 [Verticillium albo-atrum VaMs.102]
  misc_feature (62)..(352): NCBI GI: 171695770 Blast Desc: protein product [Podospora anserina] gi|170948127|emb|CAP60291.1| protein product [Podospora anserina]
  misc_feature (43)..(349): NCBI GI: 169616924 Blast Desc: SNOG_11639 [Phaeosphaeria nodorum SN15] gi|111060227|gb|EAT81347.1| SNOG_11639 [Phaeosphaeria nodorum SN15]
  misc_feature (47)..(351): NCBI GI: 256725786 Blast Desc: NECHADRAFT_4582 [Nectria haematococca mpVI 77-13-4]
  misc_feature (9)..(349): NCBI GI: 145606935 Blast Desc: MGG_03873 [Magnaporthe grisea 70-15] gi|145014564|gb|EDJ99132.1| MGG_03873 [Magnaporthe grisea 70-15]
  misc_feature (40)..(352): NCBI GI: 39972991 Blast Desc: MGG_07790 [Magnaporthe grisea 70-15] gi|145012565|gb|EDJ97219.1| MGG_07790 [Magnaporthe grisea 70-15]
  misc_feature (17)..(349): NCBI GI: 261361376 Blast Desc: versatile peroxidase VPL1 [Verticillium albo-atrum VaMs.102]
  misc_feature (93)..(351): SWISSPROT Homolog: EC 1.11.1.16 Versatile peroxidase
MRNNVLFFSLAASRALAYPGMGQVMAEIKARDDFALEARSTVVFGDLVHGSLTKRGDDIKGILQGGPATSSESSAYTPPGSLNSTACSKDPLCLWHYVAQEMSDDFADANGCTDLARGAIRQGFHDAAAWDVNAPYGGADGSLLLSDELSRPENAGLQPIGDRTREYYDKYHPYGASMADIIQTAAIVGVVSCPGGPRIRAFAGRNDDARAALPNLLPSPFQVAQELIDLFVAKTFTASDLVALVGAHTASRQFFVDPSRAGASQDTDPQIWDTKFYRETLDGDNKTILIFPSDKALATYSTTKGQWNAFASPGGQGQWGPAFAQAYFRMSMLGVDNMNDLTEITKVVPLPR

SEQ ID NO: 33184 - DNA, 970 bp, Muscodor strobelii
  misc_feature: SGI EST ID NO. CUFF.78504.0
  misc_feature: Variant of the nucleotide sequence at SEQ ID NO 33182
ccactttgtctctggcactatgtcgcccaagagatgtcagacgacttcgcagatgccaatggctgtacagatctggcccgtggtgcaatacgacagggcttccacgatgcagcagcatgggacgtcaacgcgccgtatggtggagctgacggatcgctcttactttctgacgagctctctcgacccgagaacgcgggtctgcaaccaataggcgacagaaccagagaatactacgacaaatatcacccgtacggcgctagcatggccgacatcattcagaccgctgcaattgttggcgttgtctcttgtccaggcgggccgaggatacgggcctttgccggaagaaacgatgacgcgcgagcagctcttcccaatcttctaccatcaccattccaggtggcacaagagctcattgaccttttcgtcgctaagacatttaccgccagcgatcttgtcgcccttgtaggtgcacatacagcttcgaggcagttcttcgtcgatcctagtcgggcaggagcatcacaagacaccgatcctcaaatatgggatacgaaattttatcgagagaccttagatggagacaataaaacgattcttatcttccctagtgacaaggctcttgcaacctactcaaccacgaagggccaatggaacgcctttgctagtcctggcggacaaggccagtggggtccggccttcgctcaagcatatttccgtatgagcatgctcggtgttgataacatgaatgaccttacggagattacgaaggtcgttcctctgcctcgatagacgagatcaattctgccgctgtacataagtcatttgatttcgcagcacattagactgttttgaatggcgatgatacgattgatgcgctgtttggttatttgatctctcatagatacatttgtagatcactactgcttgtcatatatactaggtgtacaatcaaggcaattatgatgtttcc

SEQ ID NO: 33185 - DNA, 1083 bp, Muscodor strobelii
  misc_feature: SGI cDNA ID NO. 571443
  misc_feature: Encodes the peptide sequence at SEQ ID NO 33186
atgcaacctgaaatgattgaccctgaagtcgctcgctgtttcaatcttgatagtgttgtcaaatctgtcgagcgttcgggaaaatcaggatggtgccgcactttcaagatctgcacatcaaccaaagattacttcctcaaagactgcagtaatgtagaatttgccgaacccatgtttagaggcgagtttgctgctctgcagcatctgtataatcaaatgccaagagcctgtcctaaaccctatggctggggacggtatgcaaacaactcagggacctggttcctagttatggacttcttagacttcactccggaaatcacaacgcatgaggaaaccgttcaagaccaatgggttccgtcaagacttaacacacaagccgaaatcctctcgcctaaaaaggacgcacgtatccaacttccaactccacaacagatcgcaggctttgtgtcacagatgcatataaaaacagctggtacttctcccgatagaaaatttgggttccaagtccctacatgccatggaaagttcgtgcaacccaataactggaatttgtcatggagccagtacttctcgaatctgctcactttgatctttgaaatggatgttaaggtcaacggcgcaactccagattacgaaaaagcattcaagactcttcaaaagaacgtcataccacacattctcgaaccactacaagcagacggtcgcatgttgaatccttgccttgttcacggtgacttatgggagggaaacatggggttgagtaaggagactaacgaaccaatggtctatgaccctgctctcttctacgcacataacgaattcgagcttggcatgtggcgaacaaccttcatcccacacagttctggtctgtcctatcgagagaactatcttgaacacattcccccaagtgagccaaaagaggaatatgaagatcgaattattctttatagcttgttcttcaacatttcgcattcggcacactggccaaaggtttcattccaaacccgacagagcatacttgaagatataaaatacttgaccgcgaagtatttcgcaaaggaggatgcgaggatcgttgagtga

SEQ ID NO: 33186 - protein, 360 aa, Muscodor strobelii
  misc_feature: SGI Peptide ID NO. 571443
  misc_feature (8)..(348): Pfam Id: PF03881 Pfam Desc: Fructosamine kinase
  misc_feature (239)..(266): Pfam Id: PF03881 Pfam Desc: Fructosamine kinase
  misc_feature (6)..(356): NCBI GI: 261356147 Blast Desc: conserved [Verticillium albo-atrum VaMs.102]
  misc_feature (6)..(356): NCBI GI: 145228563 Blast Desc: An01g01490 [Aspergillus niger] gi|134054681|emb|CAK43522.1| protein product [Aspergillus niger]
  misc_feature (6)..(350): NCBI GI: 116206070 Blast Desc: CHGG_02328 [Chaetomium globosum CBS 148.51] gi|88182925|gb|EAQ90393.1| CHGG_02328 [Chaetomium globosum CBS 148.51]
  misc_feature (1)..(350): NCBI GI: 116214451 Blast Desc: CHGG_11066 [Chaetomium globosum CBS 148.51] gi|88175421|gb|EAQ82890.1| CHGG_11066 [Chaetomium globosum CBS 148.51]
  misc_feature (8)..(354): NCBI GI: 240110347 Blast Desc: CPC735_063790 [Coccidioides posadasii C735 delta SOWgp]
  misc_feature (6)..(358): NCBI GI: 145603980 Blast Desc: MGG_10482 [Magnaporthe grisea 70-15] gi|145012092|gb|EDJ96748.1| MGG_10482 [Magnaporthe grisea 70-15]
  misc_feature (20)..(334): NCBI GI: 258563734 Blast Desc: [Uncinocarpus reesii 1704] gi|237908119|gb|EEP82520.1| [Uncinocarpus reesii 1704]
  misc_feature (8)..(354): NCBI GI: 119180471 Blast Desc: CIMG_08864 [Coccidioides immitis RS]
  misc_feature (6)..(326): NCBI GI: 169765035 Blast Desc: [Aspergillus oryzae RIB40] gi|83764843|dbj|BAE54987.1| protein product [Aspergillus oryzae]
  misc_feature (6)..(326): NCBI GI: 256728903 Blast Desc: NECHADRAFT_104325 [Nectria haematococca mpVI 77-13-4]
MQPEMIDPEVARCFNLDSVVKSVERSGKSGWCRTFKICTSTKDYFLKDCSNVEFAEPMFRGEFAALQHLYNQMPRACPKPYGWGRYANNSGTWFLVMDFLDFTPEITTHEETVQDQWVPSRLNTQAEILSPKKDARIQLPTPQQIAGFVSQMHIKTAGTSPDRKFGFQVPTCHGKFVQPNNWNLSWSQYFSNLLTLIFEMDVKVNGATPDYEKAFKTLQKNVIPHILEPLQADGRMLNPCLVHGDLWEGNMGLSKETNEPMVYDPALFYAHNEFELGMWRTTFIPHSSGLSYRENYLEHIPPSEPKEEYEDRIILYSLFFNISHSAHWPKVSFQTRQSILEDIKYLTAKYFAKEDARIVE

SEQ ID NO: 33187 - DNA, 1210 bp, Muscodor strobelii
  misc_feature: SGI EST ID NO. CUFF.78507.0
  misc_feature: Variant of the nucleotide sequence at SEQ ID NO 33185
tgaaatgattgaccctgaagtcgctcgctgtttcaatcttgatagtgttgtcaaatctgtcgagcgttcgggaaaatcaggatggtgccgcactttcaagatctgcacatcaaccaaagattacttcctcaaagactgcagtaatgtagaatttgccgaacccatgtttagaggcgagtttgctgctctgcagcatctgtataatcaaatgccaagagcctgtcctaaaccctatggctggggacggtatgcaaacaactcagggacctggttcctagttatggacttcttagacttcactccggaaatcacaacgcatgaggaaaccgttcaagaccaatgggttccgtcaagacttaacacacaagccgaaatcctctcgcctaaaaaggacgcacgtatccaacttccaactccacaacagatcgcaggctttgtgtcacagatgcatataaaaacagctggtacttctcccgatagaaaatttgggttccaagtccctacatgccatggaaagttcgtgcaacccaataactggaatttgtcatggagccagtacttctcgaatctgctcactttgatctttgaaatggatgttaaggtcaacggcgcaactccagattacgaaaaagcattcaagactcttcaaaagaacgtcataccacacattctcgaaccactacaagcagacggtcgcatgttgaatccttgccttgttcacggtgacttatgggagggaaacatggggttgagtaaggagactaacgaaccaatggtctatgaccctgctctcttctacgcacataacgaattcgagcttggcatgtggcgaacaaccttcatcccacacagttctggtctgtcctatcgagagaactatcttgaacacattcccccaagtgagccaaaagaggaatatgaagatcgaattattctttatagcttgttcttcaacatttcgcattcggcacactggccaaaggtttcattccaaacccgacagagcatacttgaagatataaaatacttgaccgcgaagtatttcgcaaaggaggatgcgaggatcgttgagtgaaggagaacgtagatggtgcggatgaaatacctgctagaaacgctaggccaaatggaaagcatgggcaaatttcagcatcgctccaagcgtagtcgaacaagaagagttctacaaaccaagtcaattcatctacaa

SEQ ID NO: 33188 - DNA, 885 bp, Muscodor strobelii
  misc_feature: SGI cDNA ID NO. 571444
  misc_feature: Reduced expression when VOC is produced
  misc_feature: Encodes the peptide sequence at SEQ ID NO 33189
atggccacgaaggccatattttccaatcgcacagcaacagtgctggggggcgtcgccgtagctggcgttggccttagcatctactcgcggtacaatatggcttacgctgataacaatgctccgccaaaggcctttggaagtagtccagcatttttatctctacagctgcaaagctcagaaaatgtcaatcacaatacaaagagactgcgattcgcattaccaacagaggaacatgtcagcggcttaaatctcacgtctgcgctgctcacatactcatggccgaaaggcgccatgttaccctgcgtcaggccgtacacccctatcagcgcgtcagatgagcctgggatcttagaattcctagtgaagaaataccccaatggcaaacaaagcacacacttgcactcattgcaacccggcgaatcactacgcttcgtgacgccaattccagggtacaaatggacacccaacaagcactcagacatcacactaatagccggcggcgctggaataacaccgatgtaccaattgatccaaggcattcttcgcaaccctgaagacaagacaaaaatcacactcgtcttcggtgtcaacaccgacgcggatgttctcctcgaatccgaatttaaggatttcgagcggcgatttccaggccagtttaaggcagtgtatacagttagcaaccccgtgcccggatcgccataccccaagggttacgtgacgaaggagctattgagcaaggtcatgactgccagtcccgagacgcaaaacacgaaggtttttgtttgcggacccccggctatggaagcggcagtcgtcggtaccaagaaacagccaggcatcttgggagagctagggttcacgaaagagcagattcataagttttga

SEQ ID NO: 33189 - protein, 294 aa, Muscodor strobelii
  misc_feature: SGI Peptide ID NO. 571444
  misc_feature (53)..(153): Pfam Id: PF00970 Pfam Desc: Oxidoreductase FAD-binding domain
  misc_feature (162)..(273): Pfam Id: PF00175 Pfam Desc: Oxidoreductase NAD-binding domain
  misc_feature (101)..(144): Pfam Id: PF00970 Pfam Desc: Oxidoreductase FAD-binding domain
  misc_feature (53)..(82): Pfam Id: PF00970 Pfam Desc: Oxidoreductase FAD-binding domain
  misc_feature (158)..(193): Pfam Id: PF08030 Pfam Desc: Ferric reductase NAD binding domain
  misc_feature (15)..(294): NCBI GI: 256735602 Blast Desc: NECHADRAFT_57725 [Nectria haematococca mpVI 77-13-4]
  misc_feature (10)..(294): NCBI GI: 261352697 Blast Desc: NADH-cytochrome b5 reductase [Verticillium albo-atrum VaMs.102]
  misc_feature (1)..(294): NCBI GI: 242806380 Blast Desc: NADH-cytochrome B5 reductase, [Talaromyces stipitatus ATCC 10500] gi|218715357|gb|EED14779.1| NADH-cytochrome B5 reductase, [Talaromyces stipitatus ATCC 10500]
  misc_feature (1)..(294): NCBI GI: 212538585 Blast Desc: NADH-cytochrome B5 reductase, [Penicillium marneffei ATCC 18224] gi|210069190|gb|EEA23281.1| NADH-cytochrome B5 reductase, [Penicillium marneffei ATCC 18224]
  misc_feature (9)..(294): NCBI GI: 115397353 Blast Desc: conserved [Aspergillus terreus NIH2624] gi|114192459|gb|EAU34159.1| conserved [Aspergillus terreus NIH2624]
  misc_feature (11)..(294): NCBI GI: 67540432 Blast Desc: AN6386.2 [Aspergillus nidulans FGSC A4] gi|40739218|gb|EAA58408.1| AN6386.2 [Aspergillus nidulans FGSC A4] gi|259479390|tpe|CBF69569.1| TPA: mitochondrial b5 reductase
  misc_feature (14)..(294): NCBI GI: 238841967 Blast Desc: NADH-cytochrome b-5 reductase [Microsporum canis CBS 113480]
  misc_feature (18)..(294): NCBI GI: 255953541 Blast Desc: Pc21g04770 [Penicillium chrysogenum Wisconsin 54-1255] gi|211589234|emb|CAP95374.1| Pc21g04770 [Penicillium chrysogenum Wisconsin 54-1255]
  misc_feature (10)..(294): NCBI GI: 145251391 Blast Desc: An15g06810 [Aspergillus niger] gi|134082741|emb|CAK42633.1| protein product [Aspergillus niger]
  misc_feature (36)..(294): NCBI GI: 116196700 Blast Desc: CHGG_04948 [Chaetomium globosum CBS 148.51] gi|88180861|gb|EAQ88329.1| CHGG_04948 [Chaetomium globosum CBS 148.51]
  misc_feature (30)..(294): SWISSPROT Homolog: EC 1.6.2.2 Cytochrome-b5 reductase
  misc_feature: Useful for introducing or modulating the production of volatile compounds
MATKAIFSNRTATVLGGVAVAGVGLSIYSRYNMAYADNNAPPKAFGSSPAFLSLQLQSSENVNHNTKRLRFALPTEEHVSGLNLTSALLTYSWPKGAMLPCVRPYTPISASDEPGILEFLVKKYPNGKQSTHLHSLQPGESLRFVTPIPGYKWTPNKHSDITLIAGGAGITPMYQLIQGILRNPEDKTKITLVFGVNTDADVLLESEFKDFERRFPGQFKAVYTVSNPVPGSPYPKGYVTKELLSKVMTASPETQNTKVFVCGPPAMEAAVVGTKKQPGILGELGFTKEQIHKF

SEQ ID NO: 33190 - DNA, 1401 bp, Muscodor strobelii
  misc_feature: SGI EST ID NO. CUFF.78516.0
  misc_feature: Variant of the nucleotide sequence at SEQ ID NO 33188
gcgggctccattgtccgaagatcaaggaggtactgcaccaacacatcgggaccgaaagcatcaagaggaatacttataacgggcaatcatctcactgtcatcagccgtactgtctttcgatcattcgtattacttagagcaagaatataattgtcctactcactggcttcgctaaaaccacaaactatcgcctctacgtcgccctattctgccacctatctatctgactccttgttcagttcatcccttaaaatcgactattgtacatcaagatggccacgaaggccatattttccaatcgcacagcaacagtgctggggggcgtcgccgtagctggcgttggccttagcatctactcgcggtacaatatggcttacgctgataacaatgctccgccaaaggcctttggaagtagtccagcatttttatctctacagctgcaaagctcagaaaatgtcaatcacaatacaaagagactgcgattcgcattaccaacagaggaacatgtcagcggcttaaatctcacgtctgcgctgctcacatactcatggccgaaaggcgccatgttaccctgcgtcaggccgtacacccctatcagcgcgtcagatgagcctgggatcttagaattcctagtgaagaaataccccaatggcaaacaaagcacacacttgcactcattgcaacccggcgaatcactacgcttcgtgacgccaattccagggtacaaatggacacccaacaagcactcagacatcacactaatagccggcggcgctggaataacaccgatgtaccaattgatccaaggcattcttcgcaaccctgaagacaagacaaaaatcacactcgtcttcggtgtcaacaccgacgcggatgttctcctcgaatccgaatttaaggatttcgagcggcgatttccaggccagtttaaggcagtgtatacagttagcaaccccgtgcccggatcgccataccccaagggttacgtgacgaaggagctattgagcaaggtcatgactgccagtcccgagacgcaaaacacgaaggtttttgtttgcggacccccggctatggaagcggcagtcgtcggtaccaagaaacagccaggcatcttgggagagctagggttcacgaaagagcagattcataagttttgaaacacggagcgaaccgcaattccctttcgtcagtatggaatattaagagtattagatacccaatgatagatcatgatatattatatctagctttccacaaagtgtatgaggagttgtgtcgtcgagagcgacacgcgcctgaaagcgaggagtagaagtcgcgaatctgcctgaggcaagtacgcgccgcctcggctgcttcgtgtgccatatcaattcccaggtaggatctaccacatggccg

SEQ ID NO: 33191 - DNA, 1296 bp, Muscodor strobelii
  misc_feature: SGI cDNA ID NO. 571445
  misc_feature: Encodes the peptide sequence at SEQ ID NO 33192
atggcttcaacctgggtcccaaacgtgtcgcctgacagcccgttctcgctggcaaatataccattcggtatcatcagaactcgccatgaccccgcgctccgcgctggtgttgccatcggcgatcacgttctcgacttgaaggcattgactactcaccagaagttctatgaagtattccctagcttgaaagatcatgaggatatcttcgccaaatcgacactcaatgactttgctgcactcggacgatcagttcacagagaagttcgcaagaccatacaagggcttttatctacagatgcgcttcaccccgacgtcttgagagacaatgaagagctacgggagaaagccctgtttcaccagagcgatgtcaagaatcatctgccgatgagcattggagattacacagatttctacgcggggtaccatcatgcttttgctgttggctgtatgttccgtggaccagacaatgcactgcagccgaattatacacatcttccagtcggatatcatggacgagcatccagtattgtcgtctctggcacgaaaatacgtcgacccaatggacagatcttgcttgacccggccgccaatccgaaacagcctaccaccggcccatgtcgacgattagatatggagcttgagttaggatgcttcatctcgaagcctaacgagatggggtcttcggtcaagattggcgatgctgaggagcacatattcggatacgtcattctcaatgattggagtgcacgagacatccaatcatgggaatacgttcctttaggcccgttcaatagcaagaactttgcctcgaccgttagcccatgggtagtgctagctgatgcgctggagccattcagaacaaaagcgatcgagaacaagacaccattgcaggactatctcaaggaatctagagaagacactgtattcgatatcagtttcgaggtagacctcacgacgccggaaggagatgcgacgacaatctgtcaaactagttcgaagaatctcatgtggtcattcccacagatgctatcgcatcactcccttggtggctgtcccatgaacacgggcgatttattaggctcaggcactatcagcggcccggatgcgcgacagagcggtagcttattagaattgagtgagggtgggaagaaggatattatgctctacggcatggacgtgcgacggtttctgaaagacggagatacgattaccattcgaggaagctgtggaaaacccggggagagagtcggcttcggcgagtgcgtcggacggattgagacagcgctgccactatag

SEQ ID NO: 33192 - protein, 431 aa, Muscodor strobelii
  misc_feature: SGI Peptide ID NO. 571445
  misc_feature (4)..(128): Pfam Id: PF09298 Pfam Desc: Domain of function (DUF1969)
  misc_feature (155)..(372): Pfam Id: PF01557 Pfam Desc: Fumarylacetoacetate (FAA) hydrolase family
  misc_feature (1)..(429): NCBI GI: 39975073 Blast Desc: MGG_00317 [Magnaporthe grisea 70-15] gi|145018799|gb|EDK03078.1| MGG_00317 [Magnaporthe grisea 70-15]
  misc_feature (1)..(426): NCBI GI: 85097692 Blast Desc: fumarylacetoacetase [Neurospora crassa OR74A] gi|28921991|gb|EAA31263.1| fumarylacetoacetase [Neurospora crassa OR74A]
  misc_feature (4)..(425): NCBI GI: 171681590 Blast Desc: protein product [Podospora anserina] gi|170940754|emb|CAP66403.1| protein product [Podospora anserina]
  misc_feature (4)..(428): NCBI GI: 156053423 Blast Desc: SS1G_06879 [Sclerotinia sclerotiorum 1980] gi|154704657|gb|EDO04396.1| SS1G_06879 [Sclerotinia sclerotiorum 1980]
  misc_feature (1)..(426): NCBI GI: 258575083 Blast Desc: fumarylacetoacetase [Uncinocarpus reesii 1704] gi|237901989|gb|EEP76390.1| fumarylacetoacetase [Uncinocarpus reesii 1704]
  misc_feature (1)..(425): NCBI GI: 261192569 Blast Desc: fumarylacetoacetase [Ajellomyces dermatitidis SLH14081] gi|239589173|gb|EEQ71816.1| fumarylacetoacetase [Ajellomyces dermatitidis SLH14081]
  misc_feature (1)..(425): NCBI GI: 239610294 Blast Desc: fumarylacetoacetase [Ajellomyces dermatitidis ER-3]
  misc_feature (3)..(431): NCBI GI: 70989411 Blast Desc: fumarylacetoacetate hydrolase FahA [Aspergillus fumigatus Af293] gi|66847186|gb|EAL87517.1| fumarylacetoacetate hydrolase FahA [Aspergillus fumigatus Af293] fumarylacetoacetate
  misc_feature (3)..(431): NCBI GI: 119480053 Blast Desc: fumarylacetoacetate hydrolase FahA [Neosartorya fischeri NRRL 181] gi|119408209|gb|EAW18158.1| fumarylacetoacetate hydrolase FahA [Neosartorya fischeri NRRL
  misc_feature (1)..(431): NCBI GI: 169607631 Blast Desc: SNOG_06874 [Phaeosphaeria nodorum SN15] gi|160701453|gb|EAT85525.2| SNOG_06874 [Phaeosphaeria nodorum SN15]
  misc_feature (3)..(425): SWISSPROT Homolog: EC 3.7.1.2 Fumarylacetoacetase
MASTWVPNVSPDSPFSLANIPFGIIRTRHDPALRAGVAIGDHVLDLKALTTHQKFYEVFPSLKDHEDIFAKSTLNDFAALGRSVHREVRKTIQGLLSTDALHPDVLRDNEELREKALFHQSDVKNHLPMSIGDYTDFYAGYHHAFAVGCMFRGPDNALQPNYTHLPVGYHGRASSIVVSGTKIRRPNGQILLDPAANPKQPTTGPCRRLDMELELGCFISKPNEMGSSVKIGDAEEHIFGYVILNDWSARDIQSWEYVPLGPFNSKNFASTVSPWVVLADALEPFRTKAIENKTPLQDYLKESREDTVFDISFEVDLTTPEGDATTICQTSSKNLMWSFPQMLSHHSLGGCPMNTGDLLGSGTISGPDARQSGSLLELSEGGKKDIMLYGMDVRRFLKDGDTITIRGSCGKPGERVGFGECVGRIETALPL

SEQ ID NO: 33193 - DNA, 1531 bp, Muscodor strobelii
  misc_feature: SGI EST ID NO. CUFF.78761.0
  misc_feature: Variant of the nucleotide sequence at SEQ ID NO 33191
ttgctcccgactcatagacgctcatgaagcaccatatctgggtgacttcagcttttcgcaaagcaatacgcccaatcatggcttcaacctgggtcccaaacgtgtcgcctgacagcccgttctcgctggcaaatataccattcggtatcatcagaactcgccatgaccccgcgctccgcgctggtgttgccatcggcgatcacgttctcgacttgaaggcattgactactcaccagaagttctatgaagtattccctagcttgaaagatcatgaggatatcttcgccaaatcgacactcaatgactttgctgcactcggacgatcagttcacagagaagttcgcaagaccatacaagggcttttatctacagatgcgcttcaccccgacgtcttgagagacaatgaagagctacgggagaaagccctgtttcaccagagcgatgtcaagaatcatctgccgatgagcattggagattacacagatttctacgcggggtaccatcatgcttttgctgttggctgtatgttccgtggaccagacaatgcactgcagccgaattatacacatcttccagtcggatatcatggacgagcatccagtattgtcgtctctggcacgaaaatacgtcgacccaatggacagatcttgcttgacccggccgccaatccgaaacagcctaccaccggcccatgtcgacgattagatatggagcttgagttaggatgcttcatctcgaagcctaacgagatggggtcttcggtcaagattggcgatgctgaggagcacatattcggatacgtcattctcaatgattggagtgcacgagacatccaatcatgggaatacgttcctttaggcccgttcaatagcaagaactttgcctcgaccgttagcccatgggtagtgctagctgatgcgctggagccattcagaacaaaagcgatcgagaacaagacaccattgcaggactatctcaaggaatctagagaagacactgtattcgatatcagtttcgaggtagacctcacgacgccggaaggagatgcgacgacaatctgtcaaactagttcgaagaatctcatgtggtcattcccacagatgctatcgcatcactcccttggtggctgtcccatgaacacgggcgatttattaggctcaggcactatcagcggcccggatgcgcgacagagcggtagcttattagaattgagtgagggtgggaagaaggatattatgctctacggcatggacgtgcgacggtttctgaaagacggagatacgattaccattcgaggaagctgtggaaaacccggggagagagtcggcttcggcgagtgcgtcggacggattgagacagcgctgccactatagtcatcaattcatctttggcttgtccatgtagcaagctatcgtctactaatgaggcatctgccgtatttgagcattgcgagtcgcgactagtcatgacaaatgagcagttcgaattggtgtttggcaccagactatccttcaacgctagatgcttacta

SEQ ID NO: 33194 - DNA, 2556 bp, Muscodor strobelii
  misc_feature: SGI cDNA ID NO. 571446
  misc_feature: Encodes the peptide sequence at SEQ ID NO 33195
atggaattcttcgagaaccaggtcggcgaggtgcgctacctcaccaacctcgccgacgcccccagcaccatcccgcccatctctcccggctcgtcgctgtcgcctggcaccgccgtagcacccgatgtagctgcacgcaccacgcaccgcgtcatgaatgcgcagcgcgagagcaccggccatcccaagactgacaagaagactaagaaacaagcgcccgccgccaaacgccacgcctctgtagcgtccgcagccgcatctgcaacgacgccctcacactcacactcacactcacactcgcaggccaccagcgccgccaaacgcaaagcctccgacgacctcgacgactacgacgacgacgaagagccagccagtgccaccaagtcagccccgcagcagcggagcaagcgaaacagatacatctctatcgcctgcaacgagtgcaagcgacgcaagatcaaatgcaatggcgagacgccttgccagcgatgtggtcatctcaacctacagtgtctctacgcgcccaattgctgctcaagcagcgttaaggactcggaagagttcaagcagatggccgcgcaaataagcagcctgcaggaacaggtcgactctctcttcagcagtatggatgcgctgagaaacgagaccagccgtcctgcgccaatccaacaacacgatcgaatcttacccatgccctctgccagcagcacgccgtcgtcaacttcaatgacgatgccttctcttcagagacccgactttttactgccccgccagccgacattccgcggaccgacgagcaacctcttcagtcttgacgtggctaagaatacactgcataaaatgggctacacatatcccggcgaaggtgtcgattcagaggggaacgtccaggacacgcctggtgtatcgcccaagatgatgccgcaaatgagcacaaaccaggagaatcctactctcgacgtactttgggaattcggcatcgatgagatgatacgactttgccaagtgtatcaggaggaggttggtgtgctgtaccctgttctacaaatagactccattatcagacatgccaggactctccatacgatgatgatggccgccaagaagaatggatttacgcgctctctcagcggtcaagacggtgggatcaaggacccaaatacgttactactcaaaatcgtgctttgcggtggactgcaagtggaaggacatggaagcagtgcactggcacagaaagtttttgatagcatcaagccaatcgctaataagatgcttatgagcgacttgccgaatgcgcagagcttgccatttctggctcttgtggctggtttctatttcctagcaggtgatgaagtgttatgcagtcgggtcattggccaggtatttcggcttgcgatggaactaggattgcatcgacgagatggctacgagcagattcatgatgacgaagaacgtagaacggccctccacacattctggactgtttatgtcttagaccgacggtggtcattctctgctggtcttcctttttctgtagcagatgaagagattgaccccagcttaccattccctgacaattacccgtttatggagacaatggtaaactatgcgagacttagctctcaagtatggcgggtagtgcgggcatatgacttcaatataccgctagattcaccagcggacgatatagacacgcttgaccaaagaatcaagaagtggtatagtgatttaccggtcatagcgcagctcgaaatggccggctgggaggatctgccgcagttcttaaaccctccaacaacatcgagaaaagactacgatatccaacgtttacagatctggacctggcttcggctcaaccagatacgcatctggctcattacccccatattacatactcatagcagcatcatggataatcttggctatgcggaaatcgccgtcaaacttgccaaaaacaccattcgctatctaacgcatttaaacaacacgacaaatctgtataggaagatgcagatattctatcatcaattcctctcttcagcaataacggtcttattcgtcgcatcatgccatgcacccgtcaattttagctcgtcctgccgtgacgaattctacatggccttggatctagtcaaggatatgtcagcaaaatcatgggtgtctaagcggttgtgggggaccgttaaatcgctccgggatgtggctccccggtttggtcttgctgaagatcctcattcaagtgccgctctgaccatggccgggttagctaccgggcatgggcaagcaggagcaacagccacaactggttcaccattcggaaaccaacaccccatacccgtttcttcaccgagttatgatggcatgcagaacgggcttcaaatgagcagtgaaatgtcccgcattttcgaaggcgtctctggtaaaagcggccagcatgatgtcggtctagggaatggcgatgtaggtgtcgttggcccaggacctgccccagctccggcatctattccgtaccctccacgtaatagtgtgtacccgcctttcagggatgcattttaa

SEQ ID NO: 33195 - protein, 851 aa, Muscodor strobelii
  misc_feature: SGI Peptide ID NO. 571446
  misc_feature (143)..(181): Pfam Id: PF00172 Pfam Desc: Fungal Zn(2)-Cys(6) binuclear cluster domain
  misc_feature (428)..(526): Pfam Id: PF04082 Pfam Desc: Fungal specific transcription factor domain
  misc_feature (143)..(171): Pfam Id: PF00172 Pfam Desc: Fungal Zn(2)-Cys(6) binuclear cluster domain
  misc_feature (1)..(851): NCBI GI: 261360729 Blast Desc: fungal specific transcription factor domain-containing protein [Verticillium albo-atrum VaMs.102]
  misc_feature (104)..(851): NCBI GI: 85097688 Blast Desc: NCU05536 [Neurospora crassa OR74A] gi|28921990|gb|EAA31262.1| [Neurospora crassa OR74A]
  misc_feature (102)..(851): NCBI GI: 256733930 Blast Desc: NECHADRAFT_35775 [Nectria haematococca mpVI 77-13-4]
  misc_feature (68)..(819): NCBI GI: 46128005 Blast Desc: FG08380.1 [Gibberella zeae PH-1]
  misc_feature (98)..(807): NCBI GI: 171681588 Blast Desc: protein product [Podospora anserina] gi|170940753|emb|CAP66402.1| protein product [Podospora anserina]
  misc_feature (191)..(826): NCBI GI: 116201875 Blast Desc: CHGG_08822 [Chaetomium globosum CBS 148.51] gi|88177340|gb|EAQ84808.1| CHGG_08822 [Chaetomium globosum CBS 148.51]
  misc_feature (80)..(822): NCBI GI: 240107880 Blast Desc: Fungal specific transcription factor, [Coccidioides posadasii C735 delta SOWgp]
  misc_feature (80)..(822): NCBI GI: 119188317 Blast Desc: CIMG_04206 [Coccidioides immitis RS]
  misc_feature (118)..(809): NCBI GI: 212528534 Blast Desc: fungal specific transcription factor, [Penicillium marneffei ATCC 18224] gi|210073822|gb|EEA27909.1| fungal specific transcription factor, [Penicillium marneffei ATCC 18224]
  misc_feature (129)..(805): NCBI GI: 242766142 Blast Desc: fungal specific transcription factor, [Talaromyces stipitatus ATCC 10500] gi|218724310|gb|EED23727.1| fungal specific transcription factor, [Talaromyces stipitatus ATCC
MEFFENQVGEVRYLTNLADAPSTIPPISPGSSLSPGTAVAPDVAARTTHRVMNAQRESTGHPKTDKKTKKQAPAAKRHASVASAAASATTPSHSHSHSHSQATSAAKRKASDDLDDYDDDEEPASATKSAPQQRSKRNRYISIACNECKRRKIKCNGETPCQRCGHLNLQCLYAPNCCSSSVKDSEEFKQMAAQISSLQEQVDSLFSSMDALRNETSRPAPIQQHDRILPMPSASSTPSSTSMTMPSLQRPDFLLPRQPTFRGPTSNLFSLDVAKNTLHKMGYTYPGEGVDSEGNVQDTPGVSPKMMPQMSTNQENPTLDVLWEFGIDEMIRLCQVYQEEVGVLYPVLQIDSIIRHARTLHTMMMAAKKNGFTRSLSGQDGGIKDPNTLLLKIVLCGGLQVEGHGSSALAQKVFDSIKPIANKMLMSDLPNAQSLPFLALVAGFYFLAGDEVLCSRVIGQVFRLAMELGLHRRDGYEQIHDDEERRTALHTFWTVYVLDRRWSFSAGLPFSVADEEIDPSLPFPDNYPFMETMVNYARLSSQVWRVVRAYDFNIPLDSPADDIDTLDQRIKKWYSDLPVIAQLEMAGWEDLPQFLNPPTTSRKDYDIQRLQIWTWLRLNQIRIWLITPILHTHSSIMDNLGYAEIAVKLAKNTIRYLTHLNNTTNLYRKMQIFYHQFLSSAITVLFVASCHAPVNFSSSCRDEFYMALDLVKDMSAKSWVSKRLWGTVKSLRDVAPRFGLAEDPHSSAALTMAGLATGHGQAGATATTGSPFGNQHPIPVSSPSYDGMQNGLQMSSEMSRIFEGVSGKSGQHDVGLGNGDVGVVGPGPAPAPASIPYPPRNSVYPPFRDAF

SEQ ID NO: 33196 - DNA, 3285 bp, Muscodor strobelii
  misc_feature: SGI EST ID NO. CUFF.78842.1
  misc_feature: Variant of the nucleotide sequence at SEQ ID NO 33194
agatggactgcatgagcttgcatcttgcctggatctgtcttggttcagcgcatcatcgattggccatccaatggccaccagctgaacttgagctggagaaagcacggacgccccgaaaccattgcaggccttgcgccgatggttaggaggtggaggtggcggtttgcacagagcagcgggttagactattcgcagttagttagcatggcgttagtccagcatgtccagcatgtcctcttgcgatctggtctgcgcagttcatcaccgtgttacctcttcttgctctgtctgctatgatcaattctgcgatgtgggcgtctagcagcaggaggagtagtatgcatccgacgcgcgatgcaaattcggtcctgtgactccgcatctctctcctcacccgcggctcgtgcccatcgtcatcgccccgtcgcgacgtctccgcccggcctctcatcgcccggtcctgaggtctgaggccgccatgtcgatgcgagacaggacggcagccagctcagacacacggaacagggtatggaattcttcgagaaccaggtcggcgaggtgcgctacctcaccaacctcgccgacgcccccagcaccatcccgcccatctctcccggctcgtcgctgtcgcctggcaccgccgtagcacccgatgtagctgcacgcaccacgcaccgcgtcatgaatgcgcagcgcgagagcaccggccatcccaagactgacaagaagactaagaaacaagcgcccgccgccaaacgccacgcctctgtagcgtccgcagccgcatctgcaacgacgccctcacactcacactcacactcacactcgcaggccaccagcgccgccaaacgcaaagcctccgacgacctcgacgactacgacgacgacgaagagccagccagtgccaccaagtcagccccgcagcagcggagcaagcgaaacagatacatctctatcgcctgcaacgagtgcaagcgacgcaagatcaaatgcaatggcgagacgccttgccagcgatgtggtcatctcaacctacagtgtctctacgcgcccaattgctgctcaagcagcgttaaggactcggaagagttcaagcagatggccgcgcaaataagcagcctgcaggaacaggtcgactctctcttcagcagtatggatgcgctgagaaacgagaccagccgtcctgcgccaatccaacaacacgatcgaatcttacccatgccctctgccagcagcacgccgtcgtcaacttcaatgacgatgccttctcttcagagacccgactttttactgccccgccagccgacattccgcggaccgacgagcaacctcttcagtcttgacgtggctaagaatacactgcataaaatgggctacacatatcccggcgaaggtgtcgattcagaggggaacgtccaggacacgcctggtgtatcgcccaagatgatgccgcaaatgagcacaaaccaggagaatcctactctcgacgtactttgggaattcggcatcgatgagatgatacgactttgccaagtgtatcaggaggaggttggtgtgctgtaccctgttctacaaatagactccattatcagacatgccaggactctccatacgatgatgatggccgccaagaagaatggatttacgcgctctctcagcggtcaagacggtgggatcaaggacccaaatacgttactactcaaaatcgtgctttgcggtggactgcaagtggaaggacatggaagcagtgcactggcacagaaagtttttgatagcatcaagccaatcgctaataagatgcttatgagcgacttgccgaatgcgcagagcttgccatttctggctcttgtggctggtttctatttcctagcaggtgatgaagtgttatgcagtcgggtcattggccaggtatttcggcttgcgatggaactaggattgcatcgacgagatggctacgagcagattcatgatgacgaagaacgtagaacggccctccacacattctggactgtttatgtcttagaccgacggtggtcattctctgctggtcttcctttttctgtagcagatgaagagattgaccccagcttaccattccctgacaattacccgtttatggagacaatggtaaactatgcgagacttagctctcaagtatggcgggtagtgcgggcatatgacttcaatataccgctagattcaccagcggacgatatagacacgcttgaccaaagaatcaagaagtggtatagtgatttaccggtcatagcgcagctcgaaatggccggctgggaggatctgccgcagttcttaaaccctccaacaacatcgagaaaagactacgatatccaacgtttacagatctggacctggcttcggctcaaccagatacgcatctggctcattacccccatattacatactcatagcagcatcatggataatcttggctatgcggaaatcgccgtcaaacttgccaaaaacaccattcgctatctaacgcatttaaacaacacgacaaatctgtataggaagatgcagatattctatcatcaattcctctcttcagcaataacggtcttattcgtcgcatcatgccatgcacccgtcaattttagctcgtcctgccgtgacgaattctacatggccttggatctagtcaaggatatgtcagcaaaatcatgggtgtctaagcggttgtgggggaccgttaaatcgctccgggatgtggctccccggtttggtcttgctgaagatcctcattcaagtgccgctctgaccatggccgggttagctaccgggcatgggcaagcaggagcaacagccacaactggttcaccattcggaaaccaacaccccatacccgtttcttcaccgagttatgatggcatgcagaacgggcttcaaatgagcagtgaaatgtcccgcattttcgaaggcgtctctggtaaaagcggccagcatgatgtcggtctagggaatggcgatgtaggtgtcgttggcccaggacctgccccagctccggcatctattccgtaccctccacgtaatagtgtgtacccgcctttcagggatgcattttaacatttgcaattatgaggccggatgaggtatgggccacggggctgtggggaggtcttgtggcttgcgtaatgagctcccgagtaataatgccatgtctaagagatgtatgctgttgacgaagggcatgaatgtgtttatagtccatccaaatacgatctattcatatttctccatgttttcaaccttaattcacgtgctaaa

SEQ ID NO: 33197 - DNA, 1026 bp, Muscodor strobelii
  misc_feature: SGI cDNA ID NO. 571447
  misc_feature: Reduced expression when VOC is produced
  misc_feature: Encodes the peptide sequence at SEQ ID NO 33198
atgggaaacggtattcctgttgggtttgaggaacccactgtggccgtgttgctagaaaaaggcaccggcaggataggcatggcgagtagcttgctgtcatcggccctacgactcacaggctacaacaataatatcaactgcaacgcacaaccacccgaggaatcagaaaaggcaccaatctcaagagcgaggtacatacaggctctaccggttgacattgagccgatccgggcatttctatcggcgtacagcggcatcgatgcggctgttgtcgacgatcatgtatacagaattcgagacacactctgggacatgtacccctatgcctgcgtcgggcacttccgcttcttgtcgcttcagttcgcctcagaccctcactaccagacggcactgcagagcctcctgcaagaatctcccttacagacggaaagggataggcaagccaggctgttggatgtcggatgctgcgtcggacaagtcctccgaaaactagcgcaagacggtgtcgactcgacccgattgtacggtacagacatcgaaccccggttctttgacgtcggctacgatcttttcagggatcgtgagacatttgaggctactttcatcgttggagacctactcaaacaaccaaacgccaggagaagcgggtttgggtgtgaggatgttgaggtgtttgatgggaggatgacatttatacatgcgcattcctttttccaccttttcacttgggatgatcaagtgaaggctgcgataaggattatacgattcctggactggaaaaggaacgatgctatgattttcggtcagcaggttggcacgatgagcccgaggttgaatggcaagttggggagtgacaaggtgtatctgcataatgctgatacgtggcaatcactttggaacgaggttggcgaacgcacgggaaccaggtggaagacgacgatggaaccgatcgcaaagatcgagacaggtgctggaggtgtcgagagtgcgatgcggaagatgagcttctctgttagaagaggttga

SEQ ID NO: 33198 - protein, 341 aa, Muscodor strobelii
  misc_feature: SGI Peptide ID NO. 571447
  misc_feature (65)..(338): NCBI GI: 46128027 Blast Desc: FG08391.1 [Gibberella zeae PH-1]
  misc_feature (65)..(338): NCBI GI: 256733938 Blast Desc: [Nectria haematococca mpVI 77-13-4]
  misc_feature (63)..(340): NCBI GI: 242809401 Blast Desc: conserved [Talaromyces stipitatus ATCC 10500] gi|218715986|gb|EED15408.1| conserved [Talaromyces stipitatus ATCC 10500]
  misc_feature (53)..(340): NCBI GI: 169615148 Blast Desc: SNOG_10728 [Phaeosphaeria nodorum SN15] gi|111061002|gb|EAT82122.1| SNOG_10728 [Phaeosphaeria nodorum SN15]
  misc_feature (74)..(340): NCBI GI: 255936301 Blast Desc: Pc13g07470 [Penicillium chrysogenum Wisconsin 54-1255] gi|211583797|emb|CAP91816.1| Pc13g07470 [Penicillium chrysogenum Wisconsin 54-1255]
  misc_feature (97)..(340): NCBI GI: 154320562 Blast Desc: BC1G_01753 [Botryotinia fuckeliana B05.10] gi|150853442|gb|EDN28634.1| BC1G_01753 [Botryotinia fuckeliana B05.10]
  misc_feature (74)..(340): NCBI GI: 145246226 Blast Desc: An12g02830 [Aspergillus niger] gi|134080076|emb|CAK41122.1| protein product [Aspergillus niger]
  misc_feature (65)..(340): NCBI GI: 189207667 Blast Desc: conserved [Pyrenophora tritici-repentis Pt-1C-BFP] gi|187976260|gb|EDU42886.1| conserved [Pyrenophora tritici-repentis Pt-1C-BFP]
  misc_feature (72)..(311): NCBI GI: 238501122 Blast Desc: conserved [Aspergillus flavus NRRL3357] gi|220692032|gb|EED48379.1| conserved [Aspergillus flavus NRRL3357]
  misc_feature (45)..(340): NCBI GI: 169610844 Blast Desc: SNOG_08529 [Phaeosphaeria nodorum SN15] gi|111062577|gb|EAT83697.1| SNOG_08529 [Phaeosphaeria nodorum SN15]
  misc_feature: Useful for introducing or modulating the production of volatile compounds
MGNGIPVGFEEPTVAVLLEKGTGRIGMASSLLSSALRLTGYNNNINCNAQPPEESEKAPISRARYIQALPVDIEPIRAFLSAYSGIDAAVVDDHVYRIRDTLWDMYPYACVGHFRFLSLQFASDPHYQTALQSLLQESPLQTERDRQARLLDVGCCVGQVLRKLAQDGVDSTRLYGTDIEPRFFDVGYDLFRDRETFEATFIVGDLLKQPNARRSGFGCEDVEVFDGRMTFIHAHSFFHLFTWDDQVKAAIRIIRFLDWKRNDAMIFGQQVGTMSPRLNGKLGSDKVYLHNADTWQSLWNEVGERTGTRWKTTMEPIAKIETGAGGVESAMRKMSFSVRRG

SEQ ID NO: 33199 - DNA, 1920 bp, Muscodor strobelii
  misc_feature: SGI EST ID NO. CUFF.78942.0
  misc_feature: Variant of the nucleotide sequence at SEQ ID NO 33197
cgtgtagtcgctatctcgaagcggtaaccatactaacatgccattcatgcaaggtcctacattctgcagcactgtactgtagggacctttcggcaattctaatctcgcccattccaaccgccaagccttgtgtcttccacgtcggaaggtacaaggaactagctaaccttagggatggaacccagatcctagcccagattgaggccccatttcatccacgggacgagagaattagactcattgcgacctgcaagttcaagtgctaaaaaaagttgctacacatgcgtatattacaactagtctccttcatttcaaagttccctttttgtctcaccgaagtgaaccacactgttgctcacccatcctacgtgcgagcattcgcgcgcggataaacctccggagagccgcaatgctcattacaaagcatgtgaactggatttgaaggggcactccctagaatacggacgaatagtcagcctctcggaagtttaattcccgggagcccggtggtccccaaaccacgtttacgacaaagtacgacaaagacgggaaagacaatgggaaacggtattcctgttgggtttgaggaacccactgtggccgtgttgctagaaaaaggcaccggcaggataggcatggcgagtagcttgctgtcatcggccctacgactcacaggctacaacaataatatcaactgcaacgcacaaccacccgaggaatcagaaaaggcaccaatctcaagagcgaggtacatacaggctctaccggttgacattgagccgatccgggcatttctatcggcgtacagcggcatcgatgcggctgttgtcgacgatcatgtatacagaattcgagacacactctgggacatgtacccctatgcctgcgtcgggcacttccgcttcttgtcgcttcagttcgcctcagaccctcactaccagacggcactgcagagcctcctgcaagaatctcccttacagacggaaagggataggcaagccaggctgttggatgtcggatgctgcgtcggacaagtcctccgaaaactagcgcaagacggtgtcgactcgacccgattgtacggtacagacatcgaaccccggttctttgacgtcggctacgatcttttcagggatcgtgagacatttgaggctactttcatcgttggagacctactcaaacaaccaaacgccaggagaagcgggtttgggtgtgaggatgttgaggtgtttgatgggaggatgacatttatacatgcgcattcctttttccaccttttcacttgggatgatcaagtgaaggctgcgataaggattatacgattcctggactggaaaaggaacgatgctatgattttcggtcagcaggttggcacgatgagcccgaggttgaatggcaagttggggagtgacaaggtgtatctgcataatgctgatacgtggcaatcactttggaacgaggttggcgaacgcacgggaaccaggtggaagacgacgatggaaccgatcgcaaagatcgagacaggtgctggaggtgtcgagagtgcgatgcggaagatgagcttctctgttagaagaggttgagctgatagaaagcgttgccttaatgacggatcatgatacaaggtgcattgcacggatatagcatacatggatatagcatatgatgggtttacacgcagcatactgatggagtttaggaggctatttgatcattctactcatagaatacgaaatatgattctatcattctaccaagccacgtcagagtccttcacgctctaggtgacggtttcatgccatgagcaagcaggcagccagccatcagcgctattggctatctaggcatcttgtcagtccacaacataacgccgacgttgatatcttacccagtcagttaccacacgatctcttcgccctg

SEQ ID NO: 33200 - DNA, 1704 bp, Muscodor strobelii
  misc_feature: SGI cDNA ID NO. 571448
  misc_feature: Encodes the peptide sequence at SEQ ID NO 33201
atggctcaaaccgtcacgacagtcggtacgaccaacggcgcgtcagactatcacgccttcctctctcaggacgaggataactggagcaatatcatggcttctcgaccaggcgcattggctccccgcaaccaatacctccctattacaagcaatcgccaagcccgtccacacgtcaatcctaatgtagtggccgacaccaagaccaacagctcgagcgcctggcagaactatgcaatccagaacaaggaggcacatgcccaacaggatgcgctcgaaaccaagcttgccttagttaaacaaggcggcttcgctcctagcgacacctgccagccgaaccccatccgattctacggcccaggacccgacggtttttcccagaacggcgccccggttggtactcttcactacgctcgctaccgacatgagctcgctggtgtcgcagatcccaacggagaggcttacttccacgagcaatatcctgtgctcaaggcaagtggtgagcgctgccgccctatatacagaactgaaggaaatcagcccgcacgcgaggtcaatttcttccgctggcatcttgttcccgccatttacttcacggataacaacatcaatacgtttcccggacctggcactatcaaagtccacgcagagtaccttctcaatcacagcaacttcaacgaccccgatgctaggcaaccgaaggttggtcttgatctgaacaatcggatgggtgagcctgtagacaagatctgcccgcgtggttacgcgctcttgaagaaatggtccaagacgggtggccatcctgagtggcagatcggtcaacctctcgaccgctccaatccagatgcgcttacaacgcaccttggatggttccccaagcgacttcgctcgcgcaacgccggccttggagctgatcctggcgatgccgtttggaaagagatcttccacggcaacgtcgatgcaaagcgttctactccctttgtggctcctgaggagccctggtcggaggacgcgacgagagtcttgtcgatgattcgcgctggtgacaaggataagacgttcgaggttctgtcacttgatgggctgctgcagacgctgccgggcccggaacccgagtctattactgctcgaatcacttggattcatacctataacgtcgagtataagagccgaaagttcgccgatctcactgagaacaatttctcaatcccgactgcccattcgacccgacgatccgaaccaaagcagtcacaggcgattcccactgctccgcgcgtgaagatccgagaaatccttgagccgatagagagctcggacgatgaaaacattgactcaatcacgagcccggctgagtctactccccgtgacgcccgtgctatcgatcccatcacagagcctcagatcacaaatcaatctgtccacagttcggacagcagcctcaagactatcacagaaggtatgaaggccatcgccattggcagtaagaccaggattccgcctagcccttcgtctcttctcattcaagtcgacacgaccaagccctacatcatcacacccctcaaccgtccgatcggtgtcccgatgcatttcacgaacccaaatgacatcttccagcgagattcagacggaaatctcatccgaaacgagtttcgatcccgtctctttggattcgactgctatcagatgaagtacttttggagcgagtaa

SEQ ID NO: 33201 - protein, 567 aa, Muscodor strobelii
  misc_feature: SGI Peptide ID NO. 571448
MAQTVTTVGTTNGASDYHAFLSQDEDNWSNIMASRPGALAPRNQYLPITSNRQARPHVNPNVVADTKTNSSSAWQNYAIQNKEAHAQQDALETKLALVKQGGFAPSDTCQPNPIRFYGPGPDGFSQNGAPVGTLHYARYRHELAGVADPNGEAYFHEQYPVLKASGERCRPIYRTEGNQPAREVNFFRWHLVPAIYFTDNNINTFPGPGTIKVHAEYLLNHSNFNDPDARQPKVGLDLNNRMGEPVDKICPRGYALLKKWSKTGGHPEWQIGQPLDRSNPDALTTHLGWFPKRLRSRNAGLGADPGDAVWKEIFHGNVDAKRSTPFVAPEEPWSEDATRVLSMIRAGDKDKTFEVLSLDGLLQTLPGPEPESITARITWIHTYNVEYKSRKFADLTENNFSIPTAHSTRRSEPKQSQAIPTAPRVKIREILEPIESSDDENIDSITSPAESTPRDARAIDPITEPQITNQSVHSSDSSLKTITEGMKAIAIGSKTRIPPSPSSLLIQVDTTKPYIITPLNRPIGVPMHFTNPNDIFQRDSDGNLIRNEFRSRLFGFDCYQMKYFWSE

SEQ ID NO: 33202 - DNA, 4293 bp, Muscodor strobelii
  misc_feature: SGI EST ID NO. CUFF.78943.1
  misc_feature: Variant of the nucleotide sequence at SEQ ID NO 33200
ccctcgcctcagatacggccattgcaatggctcaaaccgtcacgacagtcggtacgaccaacggcgcgtcagactatcacgccttcctctctcaggacgaggataactggagcaatatcatggcttctcgaccaggcgcattggctccccgcaaccaatacctccctattacaagcaatcgccaagcccgtccacacgtcaatcctaatgtagtggccgacaccaagaccaacagctcgagcgcctggcagaactatgcaatccagaacaaggaggcacatgcccaacaggatgcgctcgaaaccaagcttgccttagttaaacaaggcggcttcgctcctagcgacacctgccagccgaaccccatccgattctacggcccaggacccgacggtttttcccagaacggcgccccggttggtactcttcactacgctcgctaccgacatgagctcgctggtgtcgcagatcccaacggagaggcttacttccacgagcaatatcctgtgctcaaggcaagtggtgagcgctgccgccctatatacagaactgaaggaaatcagcccgcacgcgaggtcaatttcttccgctggcatcttgttcccgccatttacttcacggataacaacatcaatacgtttcccggacctggcactatcaaagtccacgcagagtaccttctcaatcacagcaacttcaacgaccccgatgctaggcaaccgaaggttggtcttgatctgaacaatcggatgggtgagcctgtagacaagatctgcccgcgtggttacgcgctcttgaagaaatggtccaagacgggtggccatcctgagtggcagatcggtcaacctctcgaccgctccaatccagatgcgcttacaacgcaccttggatggttccccaagcgacttcgctcgcgcaacgccggccttggagctgatcctggcgatgccgtttggaaagagatcttccacggcaacgtcgatgcaaagcgttctactccctttgtggctcctgaggagccctggtcggaggacgcgacgagagtcttgtcgatgattcgcgctggtgacaaggataaggtatgtgctgtttatttatttactcattcacgttctcggatggaatactgattcgtaacggtagacgttcgaggttctgtcacttgatgggctgctgcagacgctgccgggcccggaacccgagtctattactgctcgaatcacttggattcatacctataacgtcgagtataagagccgaaagttcgccgatctcactgagaacaatttctcaatcccgactgcccattcgacccgacgatccgaaccaaagcagtcacaggcgattcccactgctccgcgcgtgaagatccgagaaatccttgagccgatagagagctcggacgatgaaaacattgactcaatcacgagcccggctgagtctactccccgtgacgcccgtgctatcgatcccatcacagagcctcagatcacaaatcaatctgtccacagttcggacagcagcctcaagactatcacagaaggtatgaaggccatcgccattggcagtaagaccaggattccgcctagcccttcgtctcttctcattcaagtcgacacgaccaagccctacatcatcacacccctcaaccgtccgatcggtgtcccgatgcatttcacgaacccaaatgacatcttccagcgagattcagacggaaatctcatccgaaacgagtttcgatcccgtctctttggattcgactgctatcagatgaagtacttttggagcgagtaagggcaggcaatcagtggcccaaccatctgacgttgaaaatagtgcaagttcttttgtttcacccggtgtcagcgcttgtatgaatcaagcgacggagtgattttcagagccttgtctcacagatacgaggaagagatcagacagagcgttagggcgattggtgtataagggaggtttctgaacaagcaacagttggctcatgagtgatgatcggagtggaccgtgctggacggtactggatggtgtaggaatgttcagtcccatgacagttcgcagggaagctacatggtagtaaatactctgcagaagtatcgtaatagatgaccatgttcatacgacacgaaatgtgcgaacactctcccagatcggtccattgagttgtttctcatacatgttctgccatggtacaatatttatcacgaagaggccagtctgatagtcatatgctcatcagggcgaagagatcgtgtggtaactgactgggtaagatatcaacgtcggcgttatgttgtggactgacaagatgcctagatagccaatagcgctgatggctggctgcctgcttgctcatggcatgaaaccgtcacctagagcgtgaaggactctgacgtggcttggtagaatgatagaatcatatttcgtattctatgagtagaatgatcaaatagcctcctaaactccatcagtatgctgcgtgtaaacccatcatatgctatatccatgtatgctatatccgtgcaatgcaccttgtatcatgatccgtcattaaggcaacgctttctatcagctcaacctcttctaacagagaagctcatcttccgcatcgcactctcgacacctccagcacctgtctcgatctttgcgatcggttccatcgtcgtcttccacctggttcccgtgcgttcgccaacctcgttccaaagtgattgccacgtatcagcattatgcagatacaccttgtcactccccaacttgccattcaacctcgggctcatcgtgccaacctgctgaccgaaaatcatagcatcgttccttttccagtccaggaatcgtataatccttatcgcagccttcacttgatcatcccaagtgaaaaggtggaaaaaggaatgcgcatgtataaatgtcatcctcccatcaaacacctcaacatcctcacacccaaacccgcttctcctggcgtttggttgtttgagtaggtctccaacgatgaaagtagcctcaaatgtctcacgatccctgaaaagatcgtagccgacgtcaaagaaccggggttcgatgtctgtaccgtacaatcgggtcgagtcgacaccgtcttgcgctagttttcggaggacttgtccgacgcagcatccgacatccaacagcctggcttgcctatccctttccgtctgtaagggagattcttgcaggaggctctgcagtgccgtctggtagtgagggtctgaggcgaactgaagcgacaagaagcggaagtgcccgacgcaggcataggggtacatgtcccagagtgtgtctcgctgtttcggcggtgagcaattggcgtcgcggaagatggttttgcgtcatgcagttcgtgatacatcgcaaactgagagtgagggtagggttgggatggcaggggtaatgagggcggtattacacatacaattctgtatacatgatcgtcgacaacagccgcatcgatgccgctgtacgccgatagaaatgcccggatcggctcaatgtcaaccggtagagcctgtatgtacctcgctcttgagattggtgccttttctgattcctcgggtggttgtgcgttgcagttgatattattgttgtagcctgtgagtcgtagggccgatgacagcaagctactcgccatgcctatcctgccggtgcctttttctagcaacacggccacagtgggttcctcaaacccaacaggaataccgtttcccattgtctttcccgtctttgtcgtactttgtcgtaaacgtggtttggggaccaccgggctcccgggaattaaacttccgagaggctgactattcgtccgtattctagggagtgccccttcaaatccagttcacatgctttgtaatgagcattgcggctctccggaggtttatccgcgcgcgaatgctcgcacgtaggatgggtgagcaacagtgtggttcacttcggtgagacaaaaagggaactttgaaatgaaggagactagttgtaatatacgcatgtgtagcaactttttttagcacttgaacttgcaggtcgcaatgagtctaattctctcgtcccgtggatgaaatggggcctcaatctgggctaggatctgggttccatccctaaggttagctagttccttgtaccttccgacgtggaagacacaaggcttggcggttggaatgggcgagattagaattgccgaaaggtccctacagtacagtgctgcagaatgtaggaccttgcatgaatggcatgttagtatggttaccgcttcgagatagcgactacacg

SEQ ID NO: 33203 - DNA, 891 bp, Muscodor strobelii
  misc_feature: SGI cDNA ID NO. 571449
  misc_feature: Encodes the peptide sequence at SEQ ID NO 33204
atggagcaaaaagaaggcattacgaagcgtatagcagaaatccaaaaggaactggtctaccaccataacaacagccctagcatagggacgctccactccgaagaagggcaaagaggcgatatgccatcaacctttcccgggccactggtttccatcgaatttttcatggtagatcgtatttactacaacatcccgcgaggccccttccattcgagccacgcttggcttgacgcgcagctcagaattatcatcttggagcagcaagcggctctcgacgacgagaataatgatgaagacgacaaggaagatgcccaggaagctctggacgcggctcgtcgattgcaattcctccttccaaagttcttccctatggagatcgaggaatcattagcagagccgacaatcatctggcatgaagatttgaacctgcataacatcttggtggacgaccaaagcggcgagatcacggccattgtagattgggaatgcgtctcggtagtacctttatgggtagctgcaaccatcccaaaatttctccaggggaagaaccgattagaggagccaaaacgtggtgaatactcggacgaggcgcctgtcaacattacagcggcagccttgggagagaataatccagaagatgatctagacaattctctatactgggagcataagatggaatacgaagcgacgtgtctacgcaaagtgtttcacgaaagattggagcaactctggctctactggcctccgggagacagtcacagaaaggttgacttctacgaggctgtcttgcaatgtagcaacgctttcggaatgaagaaagtgaatcaatgggccgatcacgtggaaaggggtgaatatataccatgggacgacgcctgggagctctattga

SEQ ID NO: 33204 - protein, 296 aa, Muscodor strobelii
  misc_feature: SGI Peptide ID NO. 571449
  misc_feature (1)..(292): NCBI GI: 171678899 Blast Desc: protein product [Podospora anserina] gi|170937520|emb|CAP62178.1| protein product [Podospora anserina]
  misc_feature (1)..(288): NCBI GI: 116194270 Blast Desc: CHGG_03733 [Chaetomium globosum CBS 148.51] gi|88179646|gb|EAQ87114.1| CHGG_03733 [Chaetomium globosum CBS 148.51]
  misc_feature (3)..(287): NCBI GI: 171683677 Blast Desc: protein product [Podospora anserina] gi|170941798|emb|CAP67452.1| protein product [Podospora anserina]
  misc_feature (1)..(292): NCBI GI: 85068518 Blast Desc: NCU05162 [Neurospora crassa OR74A] gi|28923448|gb|EAA32630.1| [Neurospora crassa OR74A]
  misc_feature (1)..(294): NCBI GI: 212540336 Blast Desc: conserved [Penicillium marneffei ATCC 18224] gi|210067622|gb|EEA21714.1| conserved [Penicillium marneffei ATCC 18224]
  misc_feature (2)..(285): NCBI GI: 154292660 Blast Desc: BC1G_14656 [Botryotinia fuckeliana B05.10] gi|150845870|gb|EDN21063.1| BC1G_14656 [Botryotinia fuckeliana B05.10]
  misc_feature (1)..(294): NCBI GI: 256723758 Blast Desc: NECHADRAFT_97336 [Nectria haematococca mpVI 77-13-4]
  misc_feature (46)..(286): NCBI GI: 116191235 Blast Desc: CHGG_05335 [Chaetomium globosum CBS 148.51] gi|88181248|gb|EAQ88716.1| CHGG_05335 [Chaetomium globosum CBS 148.51]
  misc_feature (2)..(287): NCBI GI: 256722198 Blast Desc: NECHADRAFT_86821 [Nectria haematococca mpVI 77-13-4]
  misc_feature (1)..(286): NCBI GI: 256720179 Blast Desc: NECHADRAFT_56350 [Nectria haematococca mpVI 77-13-4]
MEQKEGITKRIAEIQKELVYHHNNSPSIGTLHSEEGQRGDMPSTFPGPLVSIEFFMVDRIYYNIPRGPFHSSHAWLDAQLRIIILEQQAALDDENNDEDDKEDAQEALDAARRLQFLLPKFFPMEIEESLAEPTIIWHEDLNLHNILVDDQSGEITAIVDWECVSVVPLWVAATIPKFLQGKNRLEEPKRGEYSDEAPVNITAAALGENNPEDDLDNSLYWEHKMEYEATCLRKVFHERLEQLWLYWPPGDSHRKVDFYEAVLQCSNAFGMKKVNQWADHVERGEYIPWDDAWELY

SEQ ID NO: 33205 - DNA, 905 bp, Muscodor strobelii
  misc_feature: SGI EST ID NO. CUFF.78525.0
  misc_feature: Variant of the nucleotide sequence at SEQ ID NO 33203
attgggaatgcgtctcggtagtacctttatgggtagctgcaaccatcccaaaatttctccaggggaagaaccgattagaggagccaaaacgtggtgaatactcggacgaggcgcctgtcaacattacagcggcagccttgggagagaataatccagaagatgatctagacaattctctatactgggagcataagatggaatacgaagcgacgtgtctacgcaaagtgtttcacgaaagattggagcaactctggctctactggcctccgggagacagtcacagaaaggttgacttctacgaggctgtcttgcaatgtagcaacgctttcggaatgaagaaagtgaatcaatgggccgatcacgtggaaaggggtgaatatataccatgggacgacgcctgggagctctattgatagaactgctgacatcttatatgtggctgttgtcacggtcatgagggcattaggggcaaggcgactggactctatggatgaagattctaaggcgaagaagaaagaaggaaaggcaacaattgcggcgacgcaatcgtagttttgtgggtagcagaatcagaccaaggtatgcgctacgactattcagcaagtaccacataacatactaccaattaagcatagaaatccagtattatgtcccttagcctccagactcacccgtaccccaatccagagaccatcgcaacccacctagacagaaccaaggcatacgtagctgaagacaaaattcgcaagactcctaagttgacccatcagaacacaatgaccaagtctactttcgtcaagcccattcgctcgtcccagcaggccaaagcagaaaagcatgacaattgccgtgttccacgtcgagtcgacattggcaaaacgattacccccatctccactggctat

SEQ ID NO: 33206 - DNA, 768 bp, Muscodor strobelii
  misc_feature: SGI cDNA ID NO. 571450
  misc_feature: Encodes the peptide sequence at SEQ ID NO 33207
atgcgcttcaacccatttataataacttgcgcatctatcatagactcagttcgcgctgaagccagtggatgcggcaacgattccgtcggatatgtacctgtcaaatcaactatccctgagagtactgtcttcagcttcggcagcaactatgcggttgtcaatcttgatctgatcaatggaatcgtcggtagtgttgagaatacggccgagggtaaagaatggatagaatcgacggcgcgctggattgatgccgtgcatgcaaagatcaacagtccgctgcaaatcttcacaagtctgtactttcaaaatggccaccctgaagtcgtgagtactagtccgttcgggcaagtgattgatgggctcatcaataatattgcgacgagtgatgcctcacagatatacggcgctttcagagttgacacggagggatacgtcgatggcactagcagagatgtcttgcttcagaaaactagatttgatgcttcgtactcaagtcagctgctggagatccttactgcgcagaatattgacactgtgatcatttctggcatcaagacctctggtgttgtgttgtccacaatatacagactcttcgatatggactaccagatctacgtcatcagcaacaataccattcagtcgccaaccgatcaacaagctaatgcgcctgcaactgactttgccatcaaaggcgggatattccccagtctgttggtgaatgtaatcaatattgaccaagcgcttgctgctctggccgcgagtggttag

SEQ ID NO: 33207 - protein, 255 aa, Muscodor strobelii
  misc_feature: SGI Peptide ID NO. 571450
  misc_feature (41)..(254): NCBI GI: 242781250 Blast Desc: cysteine hydrolase family protein [Talaromyces stipitatus ATCC 10500] gi|218719910|gb|EED19329.1| cysteine hydrolase family protein [Talaromyces stipitatus ATCC 10500]
  misc_feature (45)..(254): NCBI GI: 145246260 Blast Desc: An12g03010 [Aspergillus niger] gi|134080093|emb|CAK41139.1| protein product [Aspergillus niger]
  misc_feature (46)..(255): NCBI GI: 115391693 Blast Desc: [Aspergillus terreus NIH2624] gi|114194275|gb|EAU35975.1| [Aspergillus terreus NIH2624]
  misc_feature (46)..(254): NCBI GI: 70986290 Blast Desc: cysteine hydrolase family protein [Aspergillus fumigatus Af293] gi|66846268|gb|EAL86601.1| cysteine hydrolase family protein [Aspergillus fumigatus Af293] cysteine hydrolase
  misc_feature (44)..(251): NCBI GI: 212526576 Blast Desc: cysteine hydrolase family protein [Penicillium marneffei ATCC 18224] gi|210072843|gb|EEA26930.1| cysteine hydrolase family protein [Penicillium marneffei ATCC 18224]
  misc_feature (44)..(181): NCBI GI: 145231587 Blast Desc: An02g01300 [Aspergillus niger] gi|134056172|emb|CAK96347.1| protein product [Aspergillus niger]
  misc_feature (73)..(231): NCBI GI: 186472078 Blast Desc: isochorismatase hydrolase [Burkholderia phymatum STM815] gi|184194410|gb|ACC72374.1| isochorismatase hydrolase [Burkholderia phymatum STM815]
  misc_feature (49)..(214): NCBI GI: 187477227 Blast Desc: isochorismatase-family hydrolase [Bordetella avium 197N] gi|115421813|emb|CAJ48325.1| isochorismatase-family hydrolase [Bordetella avium 197N]
  misc_feature (48)..(209): NCBI GI: 229542129 Blast Desc: isochorismatase hydrolase [Bacillus coagulans 36D1] gi|229326549|gb|EEN92224.1| isochorismatase hydrolase [Bacillus coagulans 36D1]
  misc_feature (95)..(209): NCBI GI: 258634565 Blast Desc: isochorismatase hydrolase [Pantoea sp. At-9b] gi|258536243|gb|EEW04593.1| isochorismatase hydrolase [Pantoea sp. At-9b]
MRFNPFIITCASIIDSVRAEASGCGNDSVGYVPVKSTIPESTVFSFGSNYAVVNLDLINGIVGSVENTAEGKEWIESTARWIDAVHAKINSPLQIFTSLYFQNGHPEVVSTSPFGQVIDGLINNIATSDASQIYGAFRVDTEGYVDGTSRDVLLQKTRFDASYSSQLLEILTAQNIDTVIISGIKTSGVVLSTIYRLFDMDYQIYVISNNTIQSPTDQQANAPATDFAIKGGIFPSLLVNVINIDQALAALAASG

SEQ ID NO: 33208 - DNA, 402 bp, Muscodor strobelii
  misc_feature: SGI cDNA ID NO. 571451
  misc_feature: Reduced expression when VOC is produced
  misc_feature: Encodes the peptide sequence at SEQ ID NO 33209
atgccgatccagaaagacttcagtccaccagactcgcccgaggctttcgcctcctcaacaaacttatccgacagtccgttttttattgctttcatagcttccaaagacccagtgaccttgcagccatggtgcccggatgtacgaaaggcactgccaatacttgagtcgaccttcggtgccggcgacgcaccaactatggcggtcatcgaagttggcgagaagcttgcgtacaaatctccagacaatcactaccgcactacctggaaagtcacagctgtacctacacttgcccggtatgaacgcaggggcggagggttggtggaagtcggaagactggtagaggaggagatattcgctgttgagaaagtacagaagtttgtcaacggcccgtcgcttcaatag

SEQ ID NO: 33209 - protein, 133 aa, Muscodor strobelii
  misc_feature: SGI Peptide ID NO. 571451
  misc_feature (14)..(129): Pfam Id: PF06110 Pfam Desc: Eukaryotic protein of function (DUF953)
  misc_feature (24)..(101): Pfam Id: PF06110 Pfam Desc: Eukaryotic protein of function (DUF953)
  misc_feature (1)..(131): NCBI GI: 226496081 Blast Desc: thioredoxin-like protein 5 [Zea mays] gi|195656203|gb|ACG47569.1| thioredoxin-like protein 5 [Zea mays]
  misc_feature (1)..(130): NCBI GI: 212527158 Blast Desc: DUF953 domain protein [Penicillium marneffei ATCC 18224] gi|210073134|gb|EEA27221.1| DUF953 domain protein [Penicillium marneffei ATCC 18224]
  misc_feature (1)..(131): NCBI GI: 242782847 Blast Desc: TSTA_029240 [Talaromyces stipitatus ATCC 10500] gi|218720228|gb|EED19647.1| TSTA_029240 [Talaromyces stipitatus ATCC 10500]
  misc_feature (1)..(127): NCBI GI: 255954761 Blast Desc: Pc21g11010 [Penicillium chrysogenum Wisconsin 54-1255] gi|211589844|emb|CAP95998.1| Pc21g11010 [Penicillium chrysogenum Wisconsin 54-1255]
  misc_feature (1)..(128): NCBI GI: 169609607 Blast Desc: SNOG_07896 [Phaeosphaeria nodorum SN15] gi|111063052|gb|EAT84172.1| SNOG_07896 [Phaeosphaeria nodorum SN15]
  misc_feature (1)..(128): NCBI GI: 121717284 Blast Desc: DUF953 domain protein [Aspergillus clavatus NRRL 1] gi|119404220|gb|EAW14637.1| DUF953 domain protein [Aspergillus clavatus NRRL 1]
  misc_feature (1)..(127): NCBI GI: 238507974 Blast Desc: AFLA_009430 [Aspergillus flavus NRRL3357] gi|220688707|gb|EED45059.1| AFLA_009430 [Aspergillus flavus NRRL3357]
  misc_feature (1)..(127): NCBI GI: 145245049 Blast Desc: An11g08260 [Aspergillus niger] gi|134079487|emb|CAK46019.1| protein product [Aspergillus niger]
  misc_feature (1)..(128): NCBI GI: 39976223 Blast Desc: [Magnaporthe grisea 70-15] gi|145011766|gb|EDJ96422.1| [Magnaporthe grisea 70-15]
  misc_feature (7)..(128): NCBI GI: 169784804 Blast Desc: [Aspergillus oryzae RIB40] gi|83775610|dbj|BAE65730.1| protein product [Aspergillus oryzae]
  misc_feature: Useful for introducing or modulating the production of volatile compounds
MPIQKDFSPPDSPEAFASSTNLSDSPFFIAFIASKDPVTLQPWCPDVRKALPILESTFGAGDAPTMAVIEVGEKLAYKSPDNHYRTTWKVTAVPTLARYERRGGGLVEVGRLVEEEIFAVEKVQKFVNGPSLQ

SEQ ID NO: 33210 - DNA, 3332 bp, Muscodor strobelii
  misc_feature: SGI EST ID NO. CUFF.78702.1
  misc_feature: Variant of the nucleotide sequence at SEQ ID NO 33208
tgatatgcctaatggaaagcttgacataatccagagacacaactcacctcaagcctgtaaatccgccaaacaactggtttacgacgatatcatttggtttggcccaagtcagaaatgcaaaaacggagagaccctgccataatactcccggtatccaatagtaaagaaacatgccagccgtgcaatagaagaacttgttcgattgttagtcttacattcaaagactcatagacactcatttttgaatcaattggccataacctggagccagtcttcaactgcggggctgttttcttgaaaccaaatgactaggtactcactatgactcgtgtcagtagtgttacttctgaaagatctcgcatctaagacagaggtacttgccgtatttataacggctaacgtgccatccatttgcatcgcgttcatccctcttgctcttgtcatgcaatgcgttgagcaggcttgtgttgctaaaaagcgtaggccatatcatagaggcaggccacacgaggaaccgtcgaaacatccccgcgatcgagataccgatcaactgagaacttaatgtgaacagaagcgcaaagccccatccgaggttgatgtcgtagaacggcttcccctgaagagctagaagagcatcggtagcgtatgcgtagccgatggacacatttgccattatagtaatgatggtgtgttctttgatggtgaacggtccggtgtttaatgtccattccacgccaaaggtcttgaacacccgagtgggcattactttcgcccagagattgccaatcggataagagagcaggagaaccactatggctggaaagttaatagccggcgatcttaaggaaagaaacatgtttgcaccacttcctgcggtgacgaagatcatccctattacccaagcacctgccagaatctaggtcagcggcactcgtgaagttcggttctccatccgatgctactcctgtgatatgggcgtgcaatggtcgtgaggtgaggatacatacggatggtattggcagcttcaccgccatcatagttcctcaccgcagctcgaacttcttcatagggcgagttgtcagtgaagaggcgatctgcctcagcaatctcagccgcatccccatgctcaagggcgttcttcacagcatcgagcttctcttgtggcagatttggatcccattgatgagcgtgttgtatcttgtcgagatcagcaaccgccgttgcaacatctatccctcgacctttctccgcagaattctttggctgactttctcctgtagaactaacatcggcctcgcgtgagattgcggccgtcgatttccgacgccagaataccatcttgaggagtagtttacccagagcccatgagatgagaagattatctcccaaaataatcgcgcagaaagacaagcagcattcttatctcctgtactgtcctccttgcgcccaaccgtacggtatacctgggaggtggcccatctgcccacatccaccactctggcagccatcatattccctgttgccataggccaatgacttatcgtaccccagccggaagaggaagaagcagggagggcggggtttatattggaccgcttgtcgctcggcccattgccaccacgagatagttgaagtgggaaggtgacatgggagcgatatgcggggttagaattcccgccctatcgcgcgcggtgaccgtagattgaaattgccgtcaaacgcgctggcttgatgtctaggttctgcaccggcagataagctgaaagcttcgtggatcactatgatgcggcaagataatcatttgatttgacgcgatattcaaagcgtaggcgccgcgttgtcgcgcgagactgaggtctcttggctccatagccagactccctagtctcaactaggttagcagagcaccgatgcaggaacaccaggagatctataccttgccgagcttgcttgctgctgaagcaacggttcccgcaagtaagcgcatcgaattttgaaagcatccaagacaaagttttgacaatatgtttttggaaaggcaggtgtgctgctgttactgtctcatatttggagtggatgtcgcaattggcaaacaatggcgccgacccgacatcgctctcagagcccgctagaacagtccagtgcagatgaccaactgctaattagtggcaaaatcattgcactatatgtgtcccgttgcgatggcagtctcttgacatcggctctcataaaggacaactcagatatcagacctcaacactacatgtaaagtgaacaacacgattgtctctgtccaacaaatccttgtcctacctcgtctcaacgtcatgccgatccagaaagacttcagtccaccagactcgcccgaggctttcgcctcctcaacaaacttatccgacagtccgttttttattgctttcatagcttccaaagacccagtgaccttgcagccatggtgcccggatgtacgaaaggcactgccaatacttgagtcgaccttcggtgccggcgacgcaccaactatggcggtcatcgaagttggcgagaagcttgcgtacaaatctccagacaatcactaccgcactacctggaaagtcacagctgtacctacacttgcccggtatgaacgcaggggcggagggttggtggaagtcggaagactggtagaggaggagatattcgctgttgagaaagtacagaagtttgtcaacggcccgtcgcttcaatagtcgcgaagacagactatcactcaggcactggcccgcctcaaagaaacatggctattctcgacccaatgtcaatacaaggtctctgcttgcgacgcttcatttctcgtagagatattcgtagcttgacaggagcttcagctttggcattgtcgcgttcgtgttgacgtgttataaaggatagcttccaagatgaagacattctagcatgcgggatcaatgatgcctatcgcatctggcatagtcttttcttcgaggtactttcacagttcatattatttaaaatgtaagcaaggtgattgataaaatcagtcgtcaaagtgggtaccgacgatacttttcgtcgacgcctggctttgtaagaaggctttttcagacccgaagatatctacgagatagtgttattggtaggctttgttcagagttctacctttccacatgtagtggtcacctgtatcttgtatctgcgtacgcagatgcacggtcatcattgatcgttatgtcccctggcgaaatgtgacaaacactggaggcaaaaagtatacaagactcgaaagatcattgcgaagataaagtgtattatgccaaaagcgttgtcaaccgccc

SEQ ID NO: 33211 - DNA, 2529 bp, Muscodor strobelii
  misc_feature: SGI cDNA ID NO. 571452
  misc_feature: Encodes the peptide sequence at SEQ ID NO 33212
atggtattctggcgtcggaaatcgacggccgcaatctcacgcgaggccgatgttagttctacaggagaaagtcagccaaagaattctgcggagaaaggtcgagggatagatgttgcaacggcggttgctgatctcgacaagatacaacacgctcatcaatgggatccaaatctgccacaagagaagctcgatgctgtgaagaacgcccttgagcatggggatgcggctgagattgctgaggcagatcgcctcttcactgacaactcgccctatgaagaagttcgagctgcggtgaggaactatgatggcggtgaagctgccaataccatccgtgcttgggtaatagggatgatcttcgtcaccgcaggaagtggtgcaaacatgtttctttccttaagatcgccggctattaactttccagccatagtggttctcctgctctcttatccgattggcaatctctgggcgaaagtaatgcccactcgggtgttcaagacctttggcgtggaatggacattaaacaccggaccgttcaccatcaaagaacacaccatcattactataatggcaaatgtgtccatcggctacgcatacgctaccgatgctcttctagctcttcaggggaagccgttctacgacatcaacctcggatggggctttgcgcttctgttcacattaagttctcagttgatcggtatctcgatcgcggggatgtttcgacggttcctcgtgtggcctgcctctatgatatggcctacgctttttagcaacacaagcctgctcaacgcattgcatgacaagagcaagagggatgaacgcgatgcaaatggatggcacgttagccgttataaatacggcaatgagtacctagtcatttggtttcaagaaaacagccccgcagttgaagactggctccagttcttctattgcacggctggcatgtttctttactattggataccgggagtattatggcagggtctctccgtttttgcatttctgacttgggccaaaccaaatgatatcgtcgtaaaccagttgtttggcggatttacaggcttgagcctgatcccgataagtttagactggacatacgtcactggatatctccaagaccccttgcttgcgcccacacacgcacatgtgaatactttacttggactcttctttttggtcatacttccgatcattggaattacgtattctggggccttgtatgcggactatcttccgatggttacgagtcagacctacgacaacacacaatcggcctattcggtgtcaaagatcttgaatgatgatttgactttcgacctggaaaagtacaagaactattcaccgcttttcctttcaccaggcttggcactcaattatgggttgagtttcgcggccctcatcgcgtcccttgttcataatgggctcttccatgggaaagagctatggtaccgactcaagacggcacagaaccaggagccggacgttcatctgacgatgatgcggaaataccgagaggctcccgacctttggtattttggtctactcgtcgcatcgctcgctttaggtttaggcacgacactgggctatgctagccagttaccatggtgggcattctttgtttcaaatggtactaagtccactaacctgtcaactatcagaaaccagtcctttattattgcgctgatcttcgtcgttcctacatgcatgattctcgggatgtctaacattcaactatccttgaacgtgatcagccctttcgtcgcgggtttcatcatcccaggaagaccaattggagtaatgctgtttaaggtcttttctgttattactcttggacaagcacagacctatactagtgatctcaagcttggtcattacatgaaaatccctccccaggtgaccttctggtgccagataatcgccacaatctgggcagcaattgtgcaaattgccgtcatgaactgggcgttagggcatataccggacatttgcgatctagaacaaagcgcccatttcacttgcccgaatggaagagcgttcttctcgaattccatcgtgtggggagtcattggaccccagcggttcttcgggccaagtggactctattacaacttcaattatttctggttgataggcgccgtgctgccagtcgtgatctggttcatggtccgcaaactccacatcagctttgctcgatatctgaacgcacctatcttcctaggagccatgtcatggctccctcctgcgacaccaatatccttctctacctgggctatcgtcgggttgatcttcaataaatacatccgaacgcgatataatgcctggtggaggaagtataactacctgacagcggctggttttgatgcaggactggtcatcagcacgatcataatattctttgcgattactctgcctaatgtcacactgccacaatggtggggtaatgtcgctgtcttcgaaactgctgacgcaagttactctgctgtcttgaaaacagttgcggatggggagatctttggacccgcaacctggtag

SEQ ID NO: 33212 - protein, 842 aa, Muscodor strobelii
  misc_feature: SGI Peptide ID NO. 571452
  misc_feature (107)..(800): Pfam Id: PF03169 Pfam Desc: OPT oligopeptide transporter protein
  misc_feature (7)..(842): NCBI GI: 240107378 Blast Desc: small oligopeptide transporter, OPT family protein [Coccidioides posadasii C735 delta SOWgp]
  misc_feature (7)..(842): NCBI GI: 119190959 Blast Desc: CIMG_05527 [Coccidioides immitis RS]
  misc_feature (5)..(842): NCBI GI: 121716448 Blast Desc: small oligopeptide transporter, OPT family [Aspergillus clavatus NRRL 1] gi|119403968|gb|EAW14385.1| small oligopeptide transporter, OPT family [Aspergillus clavatus NRRL
  misc_feature (42)..(842): NCBI GI: 119481919 Blast Desc: small oligopeptide transporter, OPT family [Neosartorya fischeri NRRL 181] gi|119409142|gb|EAW19091.1| small oligopeptide transporter, OPT family [Neosartorya fischeri NRRL
  misc_feature (42)..(842): NCBI GI: 71002356 Blast Desc: small oligopeptide transporter, OPT family [Aspergillus fumigatus Af293] gi|66853497|gb|EAL93821.1| small oligopeptide transporter, OPT family [Aspergillus fumigatus small
  misc_feature (5)..(842): NCBI GI: 115401822 Blast Desc: conserved [Aspergillus terreus NIH2624] gi|114190440|gb|EAU32140.1| conserved [Aspergillus terreus NIH2624]
  misc_feature (23)..(842): NCBI GI: 238488721 Blast Desc: small oligopeptide transporter, OPT family [Aspergillus flavus NRRL3357] gi|220697986|gb|EED54326.1| small oligopeptide transporter, OPT family [Aspergillus flavus
  misc_feature (37)..(842): NCBI GI: 212544336 Blast Desc: small oligopeptide transporter, OPT family [Penicillium marneffei ATCC 18224] gi|210065291|gb|EEA19385.1| small oligopeptide transporter, OPT family [Penicillium marneffei
  misc_feature (24)..(842): NCBI GI: 242812178 Blast Desc: small oligopeptide transporter, OPT family [Talaromyces stipitatus ATCC 10500] gi|218714244|gb|EED13667.1| small oligopeptide transporter, OPT family [Talaromyces ATCC
  misc_feature (23)..(842): NCBI GI: 169762902 Blast Desc: [Aspergillus oryzae RIB40] gi|83770379|dbj|BAE60512.1| protein product [Aspergillus oryzae]
MVFWRRKSTAAISREADVSSTGESQPKNSAEKGRGIDVATAVADLDKIQHAHQWDPNLPQEKLDAVKNALEHGDAAEIAEADRLFTDNSPYEEVRAAVRNYDGGEAANTIRAWVIGMIFVTAGSGANMFLSLRSPAINFPAIVVLLLSYPIGNLWAKVMPTRVFKTFGVEWTLNTGPFTIKEHTIITIMANVSIGYAYATDALLALQGKPFYDINLGWGFALLFTLSSQLIGISIAGMFRRFLVWPASMIWPTLFSNTSLLNALHDKSKRDERDANGWHVSRYKYGNEYLVIWFQENSPAVEDWLQFFYCTAGMFLYYWIPGVLWQGLSVFAFLTWAKPNDIVVNQLFGGFTGLSLIPISLDWTYVTGYLQDPLLAPTHAHVNTLLGLFFLVILPIIGITYSGALYADYLPMVTSQTYDNTQSAYSVSKILNDDLTFDLEKYKNYSPLFLSPGLALNYGLSFAALIASLVHNGLFHGKELWYRLKTAQNQEPDVHLTMMRKYREAPDLWYFGLLVASLALGLGTTLGYASQLPWWAFFVSNGTKSTNLSTIRNQSFIIALIFVVPTCMILGMSNIQLSLNVISPFVAGFIIPGRPIGVMLFKVFSVITLGQAQTYTSDLKLGHYMKIPPQVTFWCQIIATIWAAIVQIAVMNWALGHIPDICDLEQSAHFTCPNGRAFFSNSIVWGVIGPQRFFGPSGLYYNFNYFWLIGAVLPVVIWFMVRKLHISFARYLNAPIFLGAMSWLPPATPISFSTWAIVGLIFNKYIRTRYNAWWRKYNYLTAAGFDAGLVISTIIIFFAITLPNVTLPQWWGNVAVFETADASYSAVLKTVADGEIFGPATW

SEQ ID NO: 33213 - DNA, 3775 bp, Muscodor strobelii
  misc_feature: SGI EST ID NO. CUFF.78701.0
  misc_feature: Variant of the nucleotide sequence at SEQ ID NO 33211
gggcggttgacaacgcttttggcataatacactttatcttcgcaatgatctttcgagtcttgtatactttttgcctccagtgtttgtcacatttcgccaggggacataacgatcaatgatgaccgtgcatctgcgtacgcagatacaagatacaggtgaccactacatgtggaaaggtagaactctgaacaaagcctaccaataacactatctcgtagatatcttcgggtctgaaaaagccttcttacaaagccaggcgtcgacgaaaagtatcgtcggtacccactttgacgactgattttatcaatcaccttgcttacattttaaataatatgaactgtgaaagtacctcgaagaaaagactatgccagatgcgataggcatcattgatcccgcatgctagaatgtcttcatcttggaagctatcctttataacacgtcaacacgaacgcgacaatgccaaagctgaagctcctgtcaagctacgaatatctctacgagaaatgaagcgtcgcaagcagagaccttgtattgacattgggtcgagaatagccatgtttctttgaggcgggccagtgcctgagtgatagtctgtcttcgcgactattgaagcgacgggccgttgacaaacttctgtactttctcaacagcgaatatctcctcctctaccagtcttccgacttccaccaaccctccgcccctgcgttcataccgggcaagtgtaggtacagctgtgactttccaggtagtgcggtagtgattgtctggagatttgtacctgcaaagcatttagtcagtcacaagagatggttcggtaaattgtggagattaggcagtagcagtagcgagatagcggtttattgaaatgacctacgcaagcttctcgccaacttcgatgaccgccatagttggtgcgtcgccggcaccgaaggtcgactcaagtattggcagtgcctttcgtacatccgggcaccatggctgcaaggtcactgggtctttggaagctatgaaagcaataaaaaacggactgtcggataagtttgttgaggaggcgaaagcctcgggcgagtctggtggactgaagtctttctggatcggcatgacgttgagacgaggtaggacaaggatttgttggacagagacaatcgtgttgttcactttacatgtagtgttgaggtctgatatctgagttgtcctttatgagagccgatgtcaagagactgccatcgcaacgggacacatatagtgcaatgattttgccactaattagcagttggtcatctgcactggactgttctagcgggctctgagagcgatgtcgggtcggcgccattgtttgccaattgcgacatccactccaaatatgagacagtaacagcagcacacctgcctttccaaaaacatattgtcaaaactttgtcttggatgctttcaaaattcgatgcgcttacttgcgggaaccgttgcttcagcagcaagcaagctcggcaagggagtctggctatggagccaagagacctcagtctcgcgcgacaacgcggcgcctacgctttgaatatcgcgtcaaatcaaatgattatcttgccgcatcatagtgatccacgaagctttcagcttatctgccggtgcagaacctagacatcaagccagcgcgtttgacggcaatttcaatctacggtcaccgcgcgcgatagggcgggaattctaaccccgcatatcgctcccatgtcaccttcccacttcaactatctcgtggtggcaatgggccgagcgacaagcggtccaatataaaccccgccctccctgcttcttcctcttccggctggggtacgataagtcattggcctatggcaacagggaatatgatggctgccagagtggtggatgtgggcagatgggccacctcccaggtataccgtacggttgggcgcaaggaggacagtacaggagataagaatgctgcttgtctttctgcgcgattattttgggagataatcttctcatctcatgggctctgggtaaactactcctcaagatggtattctggcgtcggaaatcgacggccgcaatctcacgcgaggccgatgttagttctacaggagaaagtcagccaaagaattctgcggagaaaggtcgagggatagatgttgcaacggcggttgctgatctcgacaagatacaacacgctcatcaatgggatccaaatctgccacaagagaagctcgatgctgtgaagaacgcccttgagcatggggatgcggctgagattgctgaggcagatcgcctcttcactgacaactcgccctatgaagaagttcgagctgcggtgaggaactatgatggcggtgaagctgccaataccatccgtgcttgggtaatagggatgatcttcgtcaccgcaggaagtggtgcaaacatgtttctttccttaagatcgccggctattaactttccagccatagtggttctcctgctctcttatccgattggcaatctctgggcgaaagtaatgcccactcgggtgttcaagacctttggcgtggaatggacattaaacaccggaccgttcaccatcaaagaacacaccatcattactataatggcaaatgtgtccatcggctacgcatacgctaccgatgctcttctagctcttcaggggaagccgttctacgacatcaacctcggatggggctttgcgcttctgttcacattaagttctcagttgatcggtatctcgatcgcggggatgtttcgacggttcctcgtgtggcctgcctctatgatatggcctacgctttttagcaacacaagcctgctcaacgcattgcatgacaagagcaagagggatgaacgcgatgcaaatggatggcacgttagccgttataaatacggcaagtacctctgtcttagatgcgagatctttcagaagtaacactactgacacgagtcatagtgagtacctagtcatttggtttcaagaaaacagccccgcagttgaagactggctccaggttatggccaattgattcaaaaatgagtgtctatgagtctttgaatgtaagactaacaatcgaacaagttcttctattgcacggctggcatgtttctttactattggataccgggagtattatggcagggtctctccgtttttgcatttctgacttgggccaaaccaaatgatatcgtcgtaaaccagttgtttggcggatttacaggcttgagcctgatcccgataagtttagactggacatacgtcactggatatctccaagaccccttgcttgcgcccacacacgcacatgtgaatactttacttggactcttctttttggtcatacttccgatcattggaattacgtattctggggccttgtatgcggactatcttccgatggttacgagtcagacctacgacaacacacaatcggcctattcggtgtcaaagatcttgaatgatgatttgactttcgacctggaaaagtacaagaactattcaccgcttttcctttcaccaggcttggcactcaattatgggttgagtttcgcggccctcatcgcgtcccttgttcataatgggctcttccatgggaaagagctatggtaccgactcaagacggcacagaaccaggagccggacgttcatctgacgatgatgcggaaataccgagaggctcccgacctttggtattttggtctactcgtcgcatcgctcgctttaggtttaggcacgacactgggctatgctagccagttaccatggtgggcattcttt

SEQ ID NO: 33214 - DNA, 1680 bp, Muscodor strobelii
  misc_feature: SGI cDNA ID NO. 571453
  misc_feature: Encodes the peptide sequence at SEQ ID NO 33215
atgaagtctactacaaaaccccagaaggaagtagacagcagtgctggcacgattgactctacgacctcatcgactgagataccttctccgcctgctcctgtttctcagtcttcatctcccgtcatttcctcgactgccaatgctagttcttcgtctggcactcctaatcagacctctattccgccccactctccttcctgcccggtagctgcgtcttcgtcggcggtctctgctcgtcgcgatgatacttttgcgcccggaaatgtctccaagagtaactgctccaagcgcgcggaaacatcccaattaaataattctgccaggccagtgactccgaccaccgctccagctgatctcaaccagccacaagacttagacaacggccgagccaagcgacagaaactctctagcccggattgcgcagcagcccaggacgaagcagccacagacgcagtagccacagacgaagcagccaagagtcaacaaccaagcatccatggatctttgtggtacaagccgggctgggactccgagattgtctatcatctcctatatttcggggaccgcaatgcctggtttcttcacttcaagcgcgaaataacgatcacgcaacccatgaaagtcgaggcgtacggcgaggttaacgatcaagcctacacggaggcattgcacggcggaagattagtggcagtctggtatatcggattggttctggaccgagctccactaatgaatagatgcgccgcattcggatgtgacgcaggcggagttgacaatcgcaaggaggtcgtcgacgtatattctctcaacacagatcatgtgggcttttgccgtgtctttcatgttgcttttcccaccgtgaaagctgccgacgctgccgccaaacgctataacagtttgagacggtttggcgagtacgctacgacagaagcattcgtagcccccgttgacgaagggtttgagatcgacacgattgactgggaaaattccaagtcattcacagtggcagaagtcaagcaataccaaccgggagaacttcttagtccaacgggaagagtcacagattttaagtctgtcaaaaacaaatcttaccactacattttccctgtcacccaaactatcggagagagcaacgcagacactcctctcacagccaacacactggatcatggtagttgccttctcggtaacgaccatgatcccggcctccgatgcgtatatccaaacggtcggccgaacatggaggcatacgaacgagccgcagcggaagacagactcatcgacgtcggtaatctctgcaaacactataagccagagcaattagtgtggcatctcgccaaggatctccacgtggaaaacgccagtttttactggtgcgggtggtcagatgagctcctatcatacttttgccacattgaagttccgaaggatagtgacgtcgcgactgctcgacttgacttgcaaggcatgttctggcatgcaaatcctgctaggaaaaaggtcgaagtccggaaagtcgacaaatacagagaatttgatgaggaacttatgaactgggaactatgtcaatttgtcctcatcttgccctccaaggttccggtcgaatatacgtatagctcagctcgagtttcgtggaaccgtccgagcggcatggccaatctggtcagcccatggatttaa

SEQ ID NO: 33215 - protein, 559 aa, Muscodor strobelii
  misc_feature: SGI Peptide ID NO. 571453
MKSTTKPQKEVDSSAGTIDSTTSSTEIPSPPAPVSQSSSPVISSTANASSSSGTPNQTSIPPHSPSCPVAASSSAVSARRDDTFAPGNVSKSNCSKRAETSQLNNSARPVTPTTAPADLNQPQDLDNGRAKRQKLSSPDCAAAQDEAATDAVATDEAAKSQQPSIHGSLWYKPGWDSEIVYHLLYFGDRNAWFLHFKREITITQPMKVEAYGEVNDQAYTEALHGGRLVAVWYIGLVLDRAPLMNRCAAFGCDAGGVDNRKEVVDVYSLNTDHVGFCRVFHVAFPTVKAADAAAKRYNSLRRFGEYATTEAFVAPVDEGFEIDTIDWENSKSFTVAEVKQYQPGELLSPTGRVTDFKSVKNKSYHYIFPVTQTIGESNADTPLTANTLDHGSCLLGNDHDPGLRCVYPNGRPNMEAYERAAAEDRLIDVGNLCKHYKPEQLVWHLAKDLHVENASFYWCGWSDELLSYFCHIEVPKDSDVATARLDLQGMFWHANPARKKVEVRKVDKYREFDEELMNWELCQFVLILPSKVPVEYTYSSARVSWNRPSGMANLVSPWI

SEQ ID NO: 33216 - DNA, 813 bp, Muscodor strobelii
  misc_feature: SGI cDNA ID NO. 571454
  misc_feature: Encodes the peptide sequence at SEQ ID NO 33217
atggcgggaaccaagcgttctgcggatgagacaatgggtctttcattggccgacatgcatgaggagtcgttggtccttgtttttccgtctgcaccacgagacctgatctgccaggccatcgtcgctttcaaggatgacttgtctcgcatctgggggttccttgagtacgaaggccacgagccgatctctggcaaacgcaagcgcccccgtcaaacttcgccagaaccccgtgatgagtctgtgagagtcgattcaacccccggtctcaccgttatccgcatcatttcacaacagatgcctgtcagtcaagagacaatcactcctctttatcgccacaagttgtacgatgaagaagtgtccgacctgggccctgccaatgagatagactacttgggttcaagattgatggaggtcacgggactcaattttcaatacagcaaagacgagttgatgatggcgttcatcctcagagccgagtgttccatgatattttactggcccaagaactatgggcgaatggtccaaggtgtattccatgactggtgccatatagacatcatggcaagcactgatttcgacaaagcctaccgacgtcttctcagctttacgttcgccgacaaaagttttgtaaccggaattgtgcgccgtgacgctgttggcgttcgcttcagccacaggatgggggagatcgagttttccgagtcccgtgcttttgcctatcgttacccatgtgaagtggtctccccttccagctctgatacgggagaggacgagatgatcgaggacgaagcaatcgccagcaagagagactaa

SEQ ID NO: 33217 - protein, 270 aa, Muscodor strobelii
  misc_feature: SGI Peptide ID NO. 571454
MAGTKRSADETMGLSLADMHEESLVLVFPSAPRDLICQAIVAFKDDLSRIWGFLEYEGHEPISGKRKRPRQTSPEPRDESVRVDSTPGLTVIRIISQQMPVSQETITPLYRHKLYDEEVSDLGPANEIDYLGSRLMEVTGLNFQYSKDELMMAFILRAECSMIFYWPKNYGRMVQGVFHDWCHIDIMASTDFDKAYRRLLSFTFADKSFVTGIVRRDAVGVRFSHRMGEIEFSESRAFAYRYPCEVVSPSSSDTGEDEMIEDEAIASKRD

SEQ ID NO: 33218 - DNA, 846 bp, Muscodor strobelii
  misc_feature: SGI cDNA ID NO. 571455
  misc_feature: Encodes the peptide sequence at SEQ ID NO 33219
atggccgccgaacagcggaggctgcttgagcagctgatgggcaatccgcagagctctcgtgccgcacagctatcccttactgaccccaaagtctgccgctcttttctggtcggcacctgcccccacgatctcttcaccaacaccaaaaaagatgttggcccttgtcccaaagttcacgccgaatctctcaagacagaatacgagtccctgcctgagtcacagaagcagaagtacggcttcgatcacgactaccttcgagacttgcagaaatacatcgacgaatgcaaccgctggatcgacacggcgcagcgacgcctcgagaagacgcctgatgagattcggcagactaacgtcctgctcaagactatatcagagctgaacaacactatcgactgcggcttgacagaagtccagatcctcggggacatgggtgaagtagctaaggcctacgacgagttcttccgtgtgcgacaggctgcccagactaagagcgagagggaacgagagctcaagaacctcagcgatactggtgggcctagtgggcatcagaagctgcaggtctgcgatgtctgtggcgcctacctctctagactggacaacgacaggagattggcggatcacttttatggcaagatgcatttgggatatgcacagatgcgcaagacgtacgagcagctcaacaaagaggtcagaggtcgtggtcgtccgccgccgatgatgcaggatgatggcatgcgcaatgatgggtatgacggcccccgaggaccgagacgaggaggcggcggcggctatggaggtggtggtggtggaggtgggcgaagtggacgtggcaatcgaggctggtag

SEQ ID NO: 33219 - protein, 281 aa, Muscodor strobelii
  misc_feature: SGI Peptide ID NO. 571455
  misc_feature (2)..(256): Pfam Id: PF03194 Pfam Desc: LUC7 N_terminus
  misc_feature (2)..(231): Pfam Id: PF03194 Pfam Desc: LUC7 N_terminus
  misc_feature (1)..(245): NCBI GI: 261361461 Blast Desc: LUC7 [Verticillium albo-atrum VaMs.102]
  misc_feature (1)..(243): NCBI GI: 46110621 Blast Desc: FG02192.1 [Gibberella zeae PH-1]
  misc_feature (1)..(236): NCBI GI: 85096139 Blast Desc: NCU05645 [Neurospora crassa OR74A] gi|28921688|gb|EAA30970.1| NCU05645 [Neurospora crassa OR74A]
  misc_feature (1)..(244): NCBI GI: 256724884 Blast Desc: [Nectria haematococca mpVI 77-13-4]
  misc_feature (1)..(243): NCBI GI: 156042307 Blast Desc: conserved [Sclerotinia sclerotiorum 1980] gi|154696087|gb|EDN95825.1| conserved [Sclerotinia sclerotiorum 1980]
  misc_feature (1)..(236): NCBI GI: 154298441 Blast Desc: BC1G_11405 [Botryotinia fuckeliana B05.10] gi|150858001|gb|EDN33193.1| BC1G_11405 [Botryotinia fuckeliana B05.10]
  misc_feature (1)..(253): NCBI GI: 39943494 Blast Desc: MGG_03758 [Magnaporthe grisea 70-15] gi|145014438|gb|EDJ99006.1| MGG_03758 [Magnaporthe grisea 70-15]
  misc_feature (1)..(251): NCBI GI: 258575139 Blast Desc: conserved [Uncinocarpus reesii 1704] gi|237902017|gb|EEP76418.1| conserved [Uncinocarpus reesii 1704]
  misc_feature (1)..(251): NCBI GI: 119193933 Blast Desc: CIMG_01341 [Coccidioides immitis RS]
  misc_feature (1)..(244): NCBI GI: 242764550 Blast Desc: U1 snRNP splicing complex subunit (Luc7), [Talaromyces stipitatus ATCC 10500] gi|218723993|gb|EED23410.1| U1 snRNP splicing complex subunit (Luc7), [Talaromyces stipitatus ATCC
MAAEQRRLLEQLMGNPQSSRAAQLSLTDPKVCRSFLVGTCPHDLFTNTKKDVGPCPKVHAESLKTEYESLPESQKQKYGFDHDYLRDLQKYIDECNRWIDTAQRRLEKTPDEIRQTNVLLKTISELNNTIDCGLTEVQILGDMGEVAKAYDEFFRVRQAAQTKSERERELKNLSDTGGPSGHQKLQVCDVCGAYLSRLDNDRRLADHFYGKMHLGYAQMRKTYEQLNKEVRGRGRPPPMMQDDGMRNDGYDGPRGPRRGGGGGYGGGGGGGGRSGRGNRGW

SEQ ID NO: 33220 - DNA, 1215 bp, Muscodor strobelii
  misc_feature: SGI EST ID NO. CUFF.78676.0
  misc_feature: Variant of the nucleotide sequence at SEQ ID NO 33218
caaagtcaaaacagacttcatcttttggtatttctaccatgaaattcgttgtcacacccacgcctctcgagtcgcactgagactgacagtcgcatatttccaggaaagaaatacatacactatcgcacatctacaagtcgactatccagcccggaaaagctcaagatggccgccgaacagcggaggctgcttgagcagctgatgggcaatccgcagagctctcgtgccgcacagctatcccttactgaccccaaagtctgccgctcttttctggtcggcacctgcccccacgatctcttcaccaacaccaaaaaagatgttggcccttgtcccaaagttcacgccgaatctctcaagacagaatacgagtccctgcctgagtcacagaagcagaagtacggcttcgatcacgactaccttcgagacttgcagaaatacatcgacgaatgcaaccgctggatcgacacggcgcagcgacgcctcgagaagacgcctgatgagattcggcagactaacgtcctgctcaagactatatcagagctgaacaacactatcgactgcggcttgacagaagtccagatcctcggggacatgggtgaagtagctaaggcctacgacgagttcttccgtgtgcgacaggctgcccagactaagagcgagagggaacgagagctcaagaacctcagcgatactggtgggcctagtgggcatcagaagctgcaggtctgcgatgtctgtggcgcctacctctctagactggacaacgacaggagattggcggatcacttttatggcaagatgcatttgggatatgcacagatgcgcaagacgtacgagcagctcaacaaagaggtcagaggtcgtggtcgtccgccgccgatgatgcaggatgatggcatgcgcaatgatgggtatgacggcccccgaggaccgagacgaggaggcggcggcggctatggaggtggtggtggtggaggtgggcgaagtggacgtggcaatcgaggctggtagtcgcgagaaaagatcccgcttcgaacttcacatgcatttcctggagtttgggcgtttattgtcggttccctagagggtatgtaggttgtaacaacattgctgtatgatcaccaggcctccaatagctttcactctcatatgcctcagtaaggccacattgggaaacatgatacaaattaattcagctgcctaatatctcgagtc

SEQ ID NO: 33221 - DNA, 1800 bp, Muscodor strobelii
  misc_feature: SGI cDNA ID NO. 571456
  misc_feature: Encodes the peptide sequence at SEQ ID NO 33222
atgcggtctttcttttctcatttgataccccttttgtttctccctgcagtgtttgcctctgattatcatgaacaactgagcctccgacccctaccgcagtcctccgtccttgcgagcttcgatttccggtccaacacaagtctgtcacagttcgaggctcagaacttcagatacttccctcgatcgctggcccagatcttgcagcatgtaggcacgagagaactccacttgaggtttagtttgggaagatgggatgccgagagttggggtgcccgcccctgggacggcactaaagaaggcggcacaggcgtcgagctttgggcatggctcgaggccgatacggaagaagaggctgatctcaaatggctaacattgacaaatgccttgtctggactgttctgcgcctctctaaacttcatcgacaaaactcggactacgcgacctgtcatgtctttccggcccgaaggagaccacctagagtcctcacttgagaaaatgcatctgctacatggcgtcctaccccatgaagtcgtttgcacggagaatctgacccccttccttaagctactgccatgcaaaggaaaagccggcatttcgagtctgctggatggccacaagctgttcgatgcttcgtggcagagtatggcaattgacattcgacctctgtgtgaggcagggcgagattgtgtcctgcagattgagcagacaattgacatggtcttggatattgagagatcgaagcgacccagggataacccaattccgcgaccgcctcccggccacgacctgaagtgcaatgcatccaaaccctaccactctggcgacacctgctttcccaccgattttgtagaaagtcaggaatgggcgcttgatcaagttttcggcaaacttatgaagggaacgtgcccgctggcggacccaaaggttgcgccagtatgcgtgcaagtaccggaaaggcgagacatatacgtaacatcaggtgccactgaggtgaaaaacgcaaacggtctctcaagatgctatcaaattgaagccgaggcagactttgccctgatcttacctcgcatgtcccgcgacggcgaaaacgccaagacaattgcggatgaaacagttcagcctgagacaccgctcttgtatgcggaacgcagttttattggccatggtcaggaaaagggcggtgtccaatcaatcctcaccaaccccagccctgatgcagaagtcgagttcatctttatggagagcttgccctggttcatgcgcatctatctacatacacttcagacccgtctcgagggcaccaccgaggtgaaggatgatatagtccaggagatctactatagaccggctcttgaccgagtgcgaggcactcaacttgagctgcgcatgcgcatccctcctgcttccacggttttcctgacatatgattttgaaaaatctatcctacgatacaccgagtacccacccgatgccaatagaggcttcgatgtggccgcttctatcatcaccatcttaccttcgacgtcccccaacgccccacccgcccggcagagaatatcaaacttgagaaccacgagcttgcttctgagtctgcccacccccgatttcagcatgccctacaatgtcatcatattcactagcaccgcgattgcattggcttttggcggactctataacatattggttcgaaggtttgtcgccgccgacgaaggtcctgaggccagtggattgaaggccaaaattgcggcactagtagcgcagctatcagcgcggctaaaggctgcgaagggcaagaccgaataa

SEQ ID NO: 33222 - protein, 599 aa, Muscodor strobelii
  misc_feature: SGI Peptide ID NO. 571456
  misc_feature (1)..(588): Pfam Id: PF04113 Pfam Desc: Gpi16 subunit, GPI transamidase component
  misc_feature (22)..(257): Pfam Id: PF04113 Pfam Desc: Gpi16 subunit, GPI transamidase component
  misc_feature (376)..(588): Pfam Id: PF04113 Pfam Desc: Gpi16 subunit, GPI transamidase component
  misc_feature (20)..(599): NCBI GI: 85096134 Blast Desc: NCU05644 [Neurospora crassa OR74A] gi|28921687|gb|EAA30969.1| NCU05644 [Neurospora crassa OR74A]
  misc_feature (21)..(598): NCBI GI: 171682884 Blast Desc: protein product [Podospora anserina] gi|170941401|emb|CAP67052.1| protein product [Podospora anserina]
  misc_feature (1)..(593): NCBI GI: 116203093 Blast Desc: CHGG_09431 [Chaetomium globosum CBS 148.51] gi|88177949|gb|EAQ85417.1| CHGG_09431 [Chaetomium globosum CBS 148.51]
  misc_feature (9)..(590): NCBI GI: 261361460 Blast Desc: GPI transamidase component GPI16 [Verticillium albo-atrum VaMs.102]
  misc_feature (1)..(595): NCBI GI: 256724992 Blast Desc: [Nectria haematococca mpVI 77-13-4]
  misc_feature (22)..(595): NCBI GI: 39943496 Blast Desc: MGG_03759 [Magnaporthe grisea 70-15] gi|145014439|gb|EDJ99007.1| MGG_03759 [Magnaporthe grisea 70-15]
  misc_feature (1)..(597): NCBI GI: 46110619 Blast Desc: FG02191.1 [Gibberella zeae PH-1]
  misc_feature (4)..(599): NCBI GI: 226290804 Blast Desc: GPI transamidase component GPI16 [Paracoccidioides brasiliensis Pb18]
  misc_feature (4)..(599): NCBI GI: 225682196 Blast Desc: GPI transamidase component GPI16 [Paracoccidioides brasiliensis Pb03]
  misc_feature (10)..(599): NCBI GI: 239611402 Blast Desc: GPI transamidase component Gpi16 [Ajellomyces dermatitidis ER-3]
MRSFFSHLIPLLFLPAVFASDYHEQLSLRPLPQSSVLASFDFRSNTSLSQFEAQNFRYFPRSLAQILQHVGTRELHLRFSLGRWDAESWGARPWDGTKEGGTGVELWAWLEADTEEEADLKWLTLTNALSGLFCASLNFIDKTRTTRPVMSFRPEGDHLESSLEKMHLLHGVLPHEVVCTENLTPFLKLLPCKGKAGISSLLDGHKLFDASWQSMAIDIRPLCEAGRDCVLQIEQTIDMVLDIERSKRPRDNPIPRPPPGHDLKCNASKPYHSGDTCFPTDFVESQEWALDQVFGKLMKGTCPLADPKVAPVCVQVPERRDIYVTSGATEVKNANGLSRCYQIEAEADFALILPRMSRDGENAKTIADETVQPETPLLYAERSFIGHGQEKGGVQSILTNPSPDAEVEFIFMESLPWFMRIYLHTLQTRLEGTTEVKDDIVQEIYYRPALDRVRGTQLELRMRIPPASTVFLTYDFEKSILRYTEYPPDANRGFDVAASIITILPSTSPNAPPARQRISNLRTTSLLLSLPTPDFSMPYNVIIFTSTAIALAFGGLYNILVRRFVAADEGPEASGLKAKIAALVAQLSARLKAAKGKTE

SEQ ID NO: 33223 - DNA, 1958 bp, Muscodor strobelii
  misc_feature: SGI EST ID NO. CUFF.78572.0
  misc_feature: Variant of the nucleotide sequence at SEQ ID NO 33221
ggagttcatcaccagcttcacgtgctctcctcgacttcatcgcgcctgtcgacggcgccgttctcttgccagtcccaatggactgctttctgaaaggatgcggtctttcttttctcatttgataccccttttgtttctccctgcagtgtttgcctctgattatcatgaacaactgagcctccgacccctaccgcagtcctccgtccttgcgagcttcgatttccggtccaacacaagtctgtcacagttcgaggctcagaacttcagatacttccctcgatcgctggcccagatcttgcagcatgtaggcacgagagaactccacttgaggtttagtttgggaagatgggatgccgagagttggggtgcccgcccctgggacggcactaaagaaggcggcacaggcgtcgagctttgggcatggctcgaggccgatacggaagaagaggctgatctcaaatggctaacattgacaaatgccttgtctggactgttctgcgcctctctaaacttcatcgacaaaactcggactacgcgacctgtcatgtctttccggcccgaaggagaccacctagagtcctcacttgagaaaatgcatctgctacatggcgtcctaccccatgaagtcgtttgcacggagaatctgacccccttccttaagctactgccatgcaaaggaaaagccggcatttcgagtctgctggatggccacaagctgttcgatgcttcgtggcagagtatggcaattgacattcgacctctgtgtgaggcagggcgagattgtgtcctgcagattgagcagacaattgacatggtcttggatattgagagatcgaagcgacccagggataacccaattccgcgaccgcctcccggccacgacctgaagtgcaatgcatccaaaccctaccactctggcgacacctgctttcccaccgattttgtagaaagtcaggaatgggcgcttgatcaagttttcggcaaacttatgaagggaacgtgcccgctggcggacccaaaggttgcgccagtatgcgtgcaagtaccggaaaggcgagacatatacgtaacatcaggtgccactgaggtgaaaaacgcaaacggtctctcaagatgctatcaaattgaagccgaggcagactttgccctgatcttacctcgcatgtcccgcgacggcgaaaacgccaagacaattgcggatgaaacagttcagcctgagacaccgctcttgtatgcggaacgcagttttattggccatggtcaggaaaagggcggtgtccaatcaatcctcaccaaccccagccctgatgcagaagtcgagttcatctttatggagagcttgccctggttcatgcgcatctatctacatacacttcagacccgtctcgagggcaccaccgaggtgaaggatgatatagtccaggagatctactatagaccggctcttgaccgagtgcgaggcactcaacttgagctgcgcatgcgcatccctcctgcttccacggttttcctgacatatgattttgaaaaatctatcctacgatacaccgagtacccacccgatgccaatagaggcttcgatgtggccgcttctatcatcaccatcttaccttcgacgtcccccaacgccccacccgcccggcagagaatatcaaacttgagaaccacgagcttgcttctgagtctgcccacccccgatttcagcatgccctacaatgtcatcatattcactagcaccgcgattgcattggcttttggcggactctataacatattggttcgaaggtttgtcgccgccgacgaaggtcctgaggccagtggattgaaggccaaaattgcggcactagtagcgcagctatcagcgcggctaaaggctgcgaagggcaagaccgaataagtggttgcccgttcctagatatatacatatataaaattaatgaaactgtcaatatcctgta

SEQ ID NO: 33224 - DNA, 2055 bp, Muscodor strobelii
  misc_feature: SGI cDNA ID NO. 571457
  misc_feature: Reduced expression when VOC is produced
  misc_feature: Encodes the peptide sequence at SEQ ID NO 33225
cggtccgagacgcagcggctcaacgacgactcgtccgacacctcggccgacgacgaggaccccaccgacgtgcccgaggcgccgccgcccaacccgtgcatggaccagaacctcgaccaccacggcttcatcttcggctactcgtcgtccgacgtcgacctgcgcaagctgcacccgctgcccagccagctgctcttctactggcagatctaccaggagaacatcaaccccatcatccgcatcctgcacgtccccaccatggccgccaccatccgcgacctgcgccgctccaacatggccgccctcacccccggcaccgaggcccctgctctgatcgcccgctaccgcttcgccaccgagcaggccctggccaaggccaactgcctcaacacctcggagctcgtcgtcgtccaggccttcatgctgttcctcgtgctcgtgcgccgctacgacgacacccgcttcgcctggacgctgacgggcctgctgatccgcatcgcccagtcgctcggcctgcagcgcgacggcacccacttcgccgcactcacccccttcgacatcgagatgcgccgccgcctgtggtgggccatctgcgtgctcgacctgcgctccgccgaggaccagggcagcgagctgatcgtcgtcgagcgcacctacgacacccagttccccctcaacgtcaacgacgacgacctcagcccggacatggccgccctgcccgccgagcgcagcggctccaccgacatgagcttctgcctcatccgctacgagctgtgcgccctctcgcgccgcttccactccgccgccaaccccctggccgcctgcgtcgtcgaccgcgaccgcagcgtcgaggagaacgaggagaccatcaacgacatgtaccggcacatcgagcgcaagtacctcaagccctgcccggacaaggacaaggacctgctcggctgggtctcggccaccatcacccgcctcatcatctccaagatgagcctcgtcgtctaccagcccctcgcccagaccgccaccaccgagctcaccaccgacatccgcgaccgcctcttcatgtccaccatcaacgtcatcgagtacagccgcgtcctgagcaccgagcccaagatcgcccactggcgctggctcttccagacctacacccagtggcacgccgtcgcctatctcctgctcgagatctgccgccggccctggtccgcctccgtcgagcgcggctggggcaccatggacgccatattccactccttccagcccatcgagttctccaagcccgccatatggggcccgctgcggaagctcatgctgcatgccaaccgccatcgccagaaggaactgacccggctccgggccgacccccaggcggccaccaagctcgacgcggacgaacagagcagagtcccgcctgcgacgttccagcatctggctagctccgtgcgtggcaccctcgcccgcgatcgatggtataacttggtcggcctgccgccgcccgagaagcccttgcataacccagttttcaccccgaagatgaaggcccaagatcagtcgcagggtcaagagccacagccggtggcgaaccccgcttctcaggacatcgatctactattggagcagcctcacttcaaccctctcgatatatactccatcgcctatccaggcaacaacgtacatgctgcgaatgatttcgctgggatggtgggcgctaacggcaatggcgccgtgcctgcagatttcaagatggatccgcccaatgttccagtcgaacacttcaattcgcggggcagcaccgctttcgctctcgaggggcaaccaaacctcggcccgggcctaggaaacatggccgacggcttgacggcgggcctctcctcggacgacaacccgcccccatggctatggaataatcagccgctaccaaactactccctcttcccaggcgccgctctggaggatgaccaggacgtgaatatggacgtggacgaggtcgtcaactggcagaattggatggaccccggggtgagcctgggacgggttggcttcacgggtggtatataa

SEQ ID NO: 33225 - protein, 684 aa, Muscodor strobelii
  misc_feature: SGI Peptide ID NO. 571457
  misc_feature (133)..(230): Pfam Id: PF04082 Pfam Desc: Fungal specific transcription factor domain
  misc_feature (1)..(683): NCBI GI: 116182784 Blast Desc: CHGG_02020 [Chaetomium globosum CBS 148.51] gi|88186317|gb|EAQ93785.1| CHGG_02020 [Chaetomium globosum CBS 148.51]
  misc_feature (1)..(677): NCBI GI: 85119154 Blast Desc: NCU02896 [Neurospora crassa OR74A] gi|28927389|gb|EAA36342.1| [Neurospora crassa OR74A]
  misc_feature (1)..(523): NCBI GI: 171694798 Blast Desc: protein product [Podospora anserina] gi|170947641|emb|CAP59803.1| protein product [Podospora anserina]
  misc_feature (24)..(683): NCBI GI: 256724950 Blast Desc: NECHADRAFT_91416 [Nectria haematococca mpVI 77-13-4]
  misc_feature (1)..(668): NCBI GI: 256734805 Blast Desc: NECHADRAFT_65901 [Nectria haematococca mpVI 77-13-4]
  misc_feature (26)..(677): NCBI GI: 46121945 Blast Desc: FG05350.1 [Gibberella zeae PH-1]
  misc_feature (28)..(453): NCBI GI: 156054300 Blast Desc: SS1G_05998 [Sclerotinia sclerotiorum 1980] gi|154703778|gb|EDO03517.1| SS1G_05998 [Sclerotinia sclerotiorum 1980]
  misc_feature (1)..(670): NCBI GI: 145613123 Blast Desc: MGG_11119 [Magnaporthe grisea 70-15] gi|145020262|gb|EDK04391.1| MGG_11119 [Magnaporthe grisea 70-15]
  misc_feature (40)..(452): NCBI GI: 169595454 Blast Desc: SNOG_00466 [Phaeosphaeria nodorum SN15] gi|160701099|gb|EAT91961.2| SNOG_00466 [Phaeosphaeria nodorum SN15]
  misc_feature (6)..(681): NCBI GI: 255947838 Blast Desc: Pc22g06580 [Penicillium chrysogenum Wisconsin 54-1255] gi|211591703|emb|CAP97946.1| Pc22g06580 [Penicillium chrysogenum Wisconsin 54-1255]
  misc_feature: Useful for introducing or modulating the production of volatile compounds
RSETQRLNDDSSDTSADDEDPTDVPEAPPPNPCMDQNLDHHGFIFGYSSSDVDLRKLHPLPSQLLFYWQIYQENINPIIRILHVPTMAATIRDLRRSNMAALTPGTEAPALIARYRFATEQALAKANCLNTSELVVVQAFMLFLVLVRRYDDTRFAWTLTGLLIRIAQSLGLQRDGTHFAALTPFDIEMRRRLWWAICVLDLRSAEDQGSELIVVERTYDTQFPLNVNDDDLSPDMAALPAERSGSTDMSFCLIRYELCALSRRFHSAANPLAACVVDRDRSVEENEETINDMYRHIERKYLKPCPDKDKDLLGWVSATITRLIISKMSLVVYQPLAQTATTELTTDIRDRLFMSTINVIEYSRVLSTEPKIAHWRWLFQTYTQWHAVAYLLLEICRRPWSASVERGWGTMDAIFHSFQPIEFSKPAIWGPLRKLMLHANRHRQKELTRLRADPQAATKLDADEQSRVPPATFQHLASSVRGTLARDRWYNLVGLPPPEKPLHNPVFTPKMKAQDQSQGQEPQPVANPASQDIDLLLEQPHFNPLDIYSIAYPGNNVHAANDFAGMVGANGNGAVPADFKMDPPNVPVEHFNSRGSTAFALEGQPNLGPGLGNMADGLTAGLSSDDNPPPWLWNNQPLPNYSLFPGAALEDDQDVNMDVDEVVNWQNWMDPGVSLGRVGFTGGI

SEQ ID NO: 33226 - DNA, 2439 bp, Muscodor strobelii
  misc_feature: SGI EST ID NO. CUFF.78578.0
  misc_feature: Variant of the nucleotide sequence at SEQ ID NO 33224
cggtccgagacgcagcggctcaacgacgactcgtccgacacctcggccgacgacgaggaccccaccgacgtgcccgaggcgccgccgcccaacccgtgcatggaccagaacctcgaccaccacggcttcatcttcggctactcgtcgtccgacgtcgacctgcgcaagctgcacccgctgcccagccagctgctcttctactggcagatctaccaggagaacatcaaccccatcatccgcatcctgcacgtccccaccatggccgccaccatccgcgacctgcgccgctccaacatggccgccctcacccccggcaccgaggcccctgctgttctcccatctactacgccgccatcacgagcatggagcccgacgacgtgctggccaacttcggcaccgacaagagccagctgatcgcccgctaccgcttcgccaccgagcaggccctggccaaggccaactgcctcaacacctcggagctcgtcgtcgtccaggccttcatgctgttcctcgtgctcgtgcgccgctacgacgacacccgcttcgcctggacgctgacgggcctgctgatccgcatcgcccagtcgctcggcctgcagcgcgacggcacccacttcgccgcactcacccccttcgacatcgagatgcgccgccgcctgtggtgggccatctgcgtgctcgacctgcgctccgccgaggaccagggcagcgagctgatcgtcgtcgagcgcacctacgacacccagttccccctcaacgtcaacgacgacgacctcagcccggacatggccgccctgcccgccgagcgcagcggctccaccgacatgagcttctgcctcatccgctacgagctgtgcgccctctcgcgccgcttccactccgccgccaaccccctggccgcctgcgtcgtcgaccgcgaccgcagcgtcgaggagaacgaggagaccatcaacgacatgtaccggcacatcgagcgcaagtacctcaagccctgcccggacaaggacaaggacctgctcggctgggtctcggccaccatcacccgcctcatcatctccaagatgagcctcgtcgtctaccagcccctcgcccagaccgccaccaccgagctcaccaccgacatccgcgaccgcctcttcatgtccaccatcaacgtcatcgagtacagccgcgtcctgagcaccgagcccaagatcgcccactggcgctggctcttccagacctacacccagtggcacgccgtcgcctatctcctgctcgagatctgccgccggccctggtccgcctccgtcgagcgcggctggggcaccatggacgccatattccactccttccagcccatcgagttctccaagcccgccatatggggcccgctgcggaagctcatgctgcatgccaaccgccatcgccagaaggaactgacccggctccgggccgacccccaggcggccaccaagctcgacgcggacgaacagagcagagtcccgcctgcgacgttccagcatctggctagctccgtgcgtggcaccctcgcccgcgatcgatggtataacttggtcggcctgccgccgcccgagaagcccttgcataacccagttttcaccccgaagatgaaggcccaagatcagtcgcagggtcaagagccacagccggtggcgaaccccgcttctcaggacatcgatctactattggagcagcctcacttcaaccctctcgatatatactccatcgcctatccaggcaacaacgtacatgctgcgaatgatttcgctgggatggtgggcgctaacggcaatggcgccgtgcctgcagatttcaagatggatccgcccaatgttccagtcgaacacttcaattcgcggggcagcaccgctttcgctctcgaggggcaaccaaacctcggcccgggcctaggaaacatggccgacggcttgacggcgggcctctcctcggacgacaacccgcccccatggctatggaataatcagccgctaccaaactactccctcttcccaggcgccgctctggaggatgaccaggacgtgaatatggacgtggacgaggtcgtcaactggcagaattggatggaccccggggtgagcctgggacgggttggcttcacgggtggtatataatgattgttatgcgatgtatctatgctaaggggacatactgggacttacaaatggtgggaaagagacatctagcacgggcgttcgaatacctatcgggttttggagttggggcgctgttacgctcgttggacactagatatgtttgccagtcagactttcagcttgcttgcatgacttgcctaaatagatgcatacacggaaggacaagatcacgtgcatgttcgattgttgtgtgtttgctagtctagcttgggtgatattgtcctatagatataggtataaatgctatttcatttgaacccat

SEQ ID NO: 33227 - DNA, 636 bp, Muscodor strobelii
  misc_feature: SGI cDNA ID NO. 571458
  misc_feature: Encodes the peptide sequence at SEQ ID NO 33228
atggccctcatagagattattatgcctaagctaagggaggatgacgccctcgtcaccgaatttgagcaggtggtggcaccaaaccagatgaaagtcttatccggtgcgggcgctcgtaatggcttctatggccaactgattagcgcgaacggcgaggacgtgagagcccagcggcaacagattggggtaattgaatggccatcgcaaactgtcttcgatacgtttctcactacgcctgcctttcatgactttatcaagactttgaaagccaagtatgcggcgggaccggcgcaaccgaagatgtatgtcgtgcgtgaggcgtccgccttcgctgggtcccattacttcattgagtacatggtcgtgaagccgaagaaagataccaatatcagtaacgtgctagttgtcttgaacgaagattctatcaagctgggtagcccatcatttctattcgggaagagcacaaatatagagcctgaggagatcgccatattagagttccacagaaccgaaagtgaaactgatgagtcgaagaagtccgcggctcgaatagagctgttaaataagctgaggccgttggcagatgtacgtagcctggtagctcgggtagagaggaagataccttcaccttcgtag

SEQ ID NO: 33228 - protein, 211 aa, Muscodor strobelii
  misc_feature: SGI Peptide ID NO. 571458
MALIEIIMPKLREDDALVTEFEQVVAPNQMKVLSGAGARNGFYGQLISANGEDVRAQRQQIGVIEWPSQTVFDTFLTTPAFHDFIKTLKAKYAAGPAQPKMYVVREASAFAGSHYFIEYMVVKPKKDTNISNVLVVLNEDSIKLGSPSFLFGKSTNIEPEEIAILEFHRTESETDESKKSAARIELLNKLRPLADVRSLVARVERKIPSPS

SEQ ID NO: 33229 - DNA, 519 bp, Muscodor strobelii
  misc_feature: SGI cDNA ID NO. 571459
  misc_feature: Encodes the peptide sequence at SEQ ID NO 33230
atggggatgaccatgcgctcgtctgacgccatgcgacatgtgcgccagatattcaaggagaatccgaacaacagagaccttgtcgccacagaaatggcacctctatttggtcttggactcgaggatccgattggagagttcgttatcctatatctgcgcggtgagtggtcgcaacctcttcctcagtgggacgttgccttacgcatcacgaaagaacacaaagatgatcctgcgtatctcgcagacaaatgccccgtgacggagggccagagtattgagcactactatgcgcgatttctggttcgagtgttacatatctttaggaatcctggagaaagggagagtcatatgctgccttggcttcgtgatgcatcagatgaacgtgtgtggtgggtatttttccacatgctcatgtacctccagctggaacacatgcagctcaacaagcagagagcaccattcaaagattttgcgaatcattatctcaagaaggtgaaaggaaacacttctcagatgtga

SEQ ID NO: 33230 - protein, 172 aa, Muscodor strobelii
  misc_feature: SGI Peptide ID NO. 571459
MGMTMRSSDAMRHVRQIFKENPNNRDLVATEMAPLFGLGLEDPIGEFVILYLRGEWSQPLPQWDVALRITKEHKDDPAYLADKCPVTEGQSIEHYYARFLVRVLHIFRNPGERESHMLPWLRDASDERVWWVFFHMLMYLQLEHMQLNKQRAPFKDFANHYLKKVKGNTSQM

SEQ ID NO: 33231 - DNA, 4824 bp, Muscodor strobelii
  misc_feature: SGI cDNA ID NO. 571460
  misc_feature: Encodes the peptide sequence at SEQ ID NO 33232
atgttgaaatcatcatcgcaggtacaaacattcatcgacgaaatgcgcacgatgctacatcttagcgacgactacaacattgcacccaccgcaagaacagacgaacttggtctggattccctagtcgccgtccgcataaggtcatggttcttaaagcattatcatgtcaatattcccgcattacgaataatgaaaggggtcgctctacaagaactagtcaagctcgcccttgagaccatgccagtggaactgacacctcaattattacctgttggggatggttccggagagcccgcttcgatacttattccaccgcaaatgccagtctcttcgagctcagcaattgaatatggaactccatcggatacatcaacagcaatttccactgcggagacgtcagatgatgactgtggcaaagacggagacacaaaggagtgtgtttcagcccctgaagagatctcgcttcatagggtagggcacctgtcttatactcaagcatcattcatgttcgctcatcaacttctagatgacaaaacagcactaaataacacgggacttttgcacttacgaggccatatcagagtcgaagacctgactaaggctgtcaacaaggttgttagacgtcatacaattttcaggacatgcttccaagtccaagaagaccgagttgtccaaggcatcatggaaaggtcacgtcttcaattagaacggaagaatatacgcactcaggatgatctctttagagagtacagcgcagtgcggaatcaccagtttgatttagctgcaggtcgaactgcacggcttttgttactctcacattcgcatcgagatcattatttgataatagccacgcatcatatcattttcgacggtgctagcacggacattttcatggcagagttaaatcatagctatcagaatcggccacttgagccccaagagccactacaatatatcgactactccgagcagcaacataacgactatatacagaacatttggaaagaccatattgcattctggtgcgatgagtttgctacaatccccgaaccgttaccactctgtcgaagtattaagattattgagcgacaaccacttgaaagctacaaatcttggattcacgagttcagagtagatgcaaagctcgccggtatgattcgacaggtcacccgcaagtttcgtacaaatcctttccattttcatatcgctgcgttcaaggcattgctctctcgttggctcgggatccaagatgtcagcatgatgattgcagatggatcacgacgtgatgaacaggcctggactgggctagggcccttcattaacatgctacctctacgactgcaagcatctgaaaaaggaccttctcaactatttacagaatgcatgacggatgcgtccgaaaagtgtcatcaactcctagagcatgctattcctttagacgtaatactcaatgaactaactgttgcgcgaccatcttcccacccgccacttgctcaggcggcgatgaactacgcggaagtaagcattgaaagccgtcgggagttcttaggctgttctatggacatgatgagagaggatcacgcagatcagccttacgacattacttttaacgtaatcaacaatgcgcaaggggagaccagaatcatgctcgcagtcaaggagtccttctatactaatgaggatacaatactgcttgcgcacggatacgaggacattttgaaagagttcacgacgacccccgaggcgccgattggagacgagttcaaatttcgcgacgcggctttgcagaatgccttgacaataggccgaggccctcagaacatttctacttggccgcagaccctagttcatcgattggatgatttggtatcacttggcgcagacaggatcgcggtgacagacgacaaccaggggtctttaacatacacgcagttatctcatcaagtcaacgctattgccaccaagttgctagacataggggtgcaaacggggtctaaagtggcactttaccagcacccttcggttttttgggtcgcgtctgtcttcgcgattcttagaattggggcggtatgcgtgccgcttgatatcgcgacccctatttctcgacttgcccttgtggttgcagactgcaagcccatcgttatacttacttataagattccagtcagcgatgcagctgggcttttgcccaattccgacactgccgtgatcgaagtttctccctctcttcaacaaactgaagaattagttccgatcagggcaaaaccaaatgcaccagccatcgtgatgtatacgtctggctctacaggaaaaccaaagggcgtcatattgtcacatggcagctggaaacacaagatagagtattgcacgaacagtttcgggctgaaggctgacgatgtcgtcctccagcagagtgggtggagttttgacatttcctttcttcaactattcctcgctgtgggtgttggagctcggttgcacgtcgtccctctagagctacgagccgattcctccgctatagttgatgtcattcgacgtgagagtgtgagcgtcacagctgcaacgcctacggaatataagagctggttgcgggtcgacaatcgggagtctttgcacagaacgccatcatggaggctggcgttaataggaggagagccgatcgggagtcaactgcttcgatctttccgcgatctcaacaaacctactctgcagatattcaacatgtacggccccacggaaactacttgtttgtcgactatgacagagctctacttgaaagatctcagtctttacggaagcacagtccctgcaggtagaccattagcaaacgaatgttgctacatcatgagcgatgggcagaaattgcaacctattgggcaacttggggaggtggtgattggtggtgtaggagtgtcaatgggctatactgacaaccctcagcagaaccaagcttcttttattccaaacccatacgcaaaagaacacatcgacgcctctgaccgcatgacgatgtatcgcacaggcgacgagggctatcttcgggaggacggtgctctagtcctcaggggtcgccgagctggaaacgataccgagatcaagctcaatggtatcaggatcgatctgaaagatgtcgagcaaagcgtcttagcggccgcgaaaggtcgcctcgtcgatgctgtagcatcgcttcgcatcgattctgcgacaagtcgcaaattcatcatggtcttcgttgtgttcgcgtcttctacaacgtcggtcgaatccaaattccagtttatccatgaccatctttccgaccttccactttctcataccatgcgaccttccgccatcgtaccagtggatgagcttccacgcaccgttggcgggaagctcgacagaaaagctactgcagctctgcatattccgtccaatctcgttacaaagccgcccctactgcaactatctcgcgaagaggaagtcatacgcaggctctggatagcagcaatcccccaggagctggctaagttccacgctatcgaactgaattcagatttcttcagcgttggaggcaattcaatgcaactgatggatctccaacacaaaatagacagtgaacttgagatcaaaattcccctaattgatctgttcaagaatagcactcttgcaggaatggctcgtctcgtcgcgcccggggatgctcaatccgggatgctcaacagagtagaggcgattgattggactattgagaccgcactgagctccgatcatcctcaacttccagacaaaaccacgttcgatcgtcgatgtgcggaatcaccacctcgcactatcgttctgaccggtgcaactggttttcttggccaagctctgttcaaggcgttgttgcgtcaggaacacattcagcacatcatctgcatcgccaatcgtgggttgatagatgccgacgaggcagttaaagtcgccttttcgcggagatacggtgtagaagcaactgataagaaggtagagtggctcgcaggcgacttgcaaaaccctcttctcggattgagctccgaggatgccaaccggatatttcacgagcaagcagatgccgtaatccacaatggcgctgatgtgtcgcatctcaaaacctacagttctctccgcgcggcaaatgttacctcgacaaaagagctagctcgtctatgcgttccgcgacagatctcatttcactatgtatcgacagccggcgtggctatgtacaccgatcccaacacatacgatgaaatcggtccagtttcagtcaagaataccccgccaccacaacatgatatttacggatatgttgcatctaaatgggcaagcgaggtgttcttggagaagctagctacggcaagcatactagatgaagtctacattcatcgtccttccagcatcattcgacctgagggacagatgtctccaggagatgaatccagtgacgtgatacagaatatgttactttactctacgcttctcaaggcagttccggatattctcagtcagtggaaaggatacatcgacctcgtgcatcctgaaagggtcgttagcaacgtgttgaatagtatgatgaagggttgtagggttgaacaacaacttacagggccagtgtttctccatgattccggggacatagaaataaaaatctgcgagatcgggagatacctagagaaagagtcgggctcgattttggaagttgttccttttgaggattggattgaaagggctgtggaaacaggcctgcatcttgccatggccgcagtcttccgtggattaggacaggagtcgcagttgaacttccctagattactcagaggttaa

SEQ ID NO: 33232 - protein, 1607 aa, Muscodor strobelii
  misc_feature: SGI Peptide ID NO. 571460
  misc_feature (641)..(1062): Pfam Id: PF00501 Pfam Desc: AMP-binding enzyme
  misc_feature (155)..(450): Pfam Id: PF00668 Pfam Desc: Condensation domain
  misc_feature (1274)..(1524): Pfam Id: PF07993 Pfam Desc: Male sterility protein
  misc_feature (1159)..(1223): Pfam Id: PF00550 Pfam Desc: Phosphopantetheine attachment site
  misc_feature (641)..(1050): Pfam Id: PF00501 Pfam Desc: AMP-binding enzyme
  misc_feature (168)..(369): Pfam Id: PF00668 Pfam Desc: Condensation domain
  misc_feature (1328)..(1468): Pfam Id: PF07993 Pfam Desc: Male sterility protein
  misc_feature (1274)..(1300): Pfam Id: PF07993 Pfam Desc: Male sterility protein
  misc_feature (32)..(1607): NCBI GI: 238840354 Blast Desc: polyketide synthase/peptide synthetase [Microsporum canis CBS 113480]
  misc_feature (34)..(1606): NCBI GI: 240109583 Blast Desc: polyketide synthase, [Coccidioides posadasii C735 delta SOWgp]
  misc_feature (11)..(1607): NCBI GI: 261352791 Blast Desc: lovastatin nonaketide synthase [Verticillium albo-atrum VaMs.102]
  misc_feature (10)..(1607): NCBI GI: 171679201 Blast Desc: protein product [Podospora anserina] gi|170937672|emb|CAP62330.1| protein product [Podospora anserina]
  misc_feature (34)..(1606): NCBI GI: 258570989 Blast Desc: UREG_03815 [Uncinocarpus reesii 1704] gi|237904568|gb|EEP78969.1| UREG_03815 [Uncinocarpus reesii 1704]
  misc_feature (151)..(1606): NCBI GI: 169595148 Blast Desc: SNOG_00308 [Phaeosphaeria nodorum SN15] gi|160701027|gb|EAT91803.2| SNOG_00308 [Phaeosphaeria nodorum SN15]
  misc_feature (3)..(1606): NCBI GI: 47109414 Blast Desc: polyketide synthase/peptide synthetase [Magnaporthe grisea]
  misc_feature (3)..(1606): NCBI GI: 145612849 Blast Desc: MGG_12447 [Magnaporthe grisea 70-15] gi|145019951|gb|EDK04179.1| MGG_12447 [Magnaporthe grisea 70-15]
  misc_feature (161)..(1606): NCBI GI: 121704559 Blast Desc: hybrid NRPS/PKS enzyme, [Aspergillus clavatus NRRL 1] gi|119398688|gb|EAW09117.1| hybrid NRPS/PKS enzyme, [Aspergillus clavatus NRRL 1]
  misc_feature (12)..(1605): NCBI GI: 116191137 Blast Desc: CHGG_05286 [Chaetomium globosum CBS 148.51] gi|88181199|gb|EAQ88667.1| CHGG_05286 [Chaetomium globosum CBS 148.51]
  misc_feature (161)..(1238): SWISSPROT Homolog: EC 5.1.1.13 Aspartate racemase
  misc_feature (161)..(1238): SWISSPROT Homolog: EC 5.1.1.11 Phenylalanine racemase (ATP-hydrolyzing)
  misc_feature: Useful for fungicidal and/or biocontrol applications
MLKSSSQVQTFIDEMRTMLHLSDDYNIAPTARTDELGLDSLVAVRIRSWFLKHYHVNIPALRIMKGVALQELVKLALETMPVELTPQLLPVGDGSGEPASILIPPQMPVSSSSAIEYGTPSDTSTAISTAETSDDDCGKDGDTKECVSAPEEISLHRVGHLSYTQASFMFAHQLLDDKTALNNTGLLHLRGHIRVEDLTKAVNKVVRRHTIFRTCFQVQEDRVVQGIMERSRLQLERKNIRTQDDLFREYSAVRNHQFDLAAGRTARLLLLSHSHRDHYLIIATHHIIFDGASTDIFMAELNHSYQNRPLEPQEPLQYIDYSEQQHNDYIQNIWKDHIAFWCDEFATIPEPLPLCRSIKIIERQPLESYKSWIHEFRVDAKLAGMIRQVTRKFRTNPFHFHIAAFKALLSRWLGIQDVSMMIADGSRRDEQAWTGLGPFINMLPLRLQASEKGPSQLFTECMTDASEKCHQLLEHAIPLDVILNELTVARPSSHPPLAQAAMNYAEVSIESRREFLGCSMDMMREDHADQPYDITFNVINNAQGETRIMLAVKESFYTNEDTILLAHGYEDILKEFTTTPEAPIGDEFKFRDAALQNALTIGRGPQNISTWPQTLVHRLDDLVSLGADRIAVTDDNQGSLTYTQLSHQVNAIATKLLDIGVQTGSKVALYQHPSVFWVASVFAILRIGAVCVPLDIATPISRLALVVADCKPIVILTYKIPVSDAAGLLPNSDTAVIEVSPSLQQTEELVPIRAKPNAPAIVMYTSGSTGKPKGVILSHGSWKHKIEYCTNSFGLKADDVVLQQSGWSFDISFLQLFLAVGVGARLHVVPLELRADSSAIVDVIRRESVSVTAATPTEYKSWLRVDNRESLHRTPSWRLALIGGEPIGSQLLRSFRDLNKPTLQIFNMYGPTETTCLSTMTELYLKDLSLYGSTVPAGRPLANECCYIMSDGQKLQPIGQLGEVVIGGVGVSMGYTDNPQQNQASFIPNPYAKEHIDASDRMTMYRTGDEGYLREDGALVLRGRRAGNDTEIKLNGIRIDLKDVEQSVLAAAKGRLVDAVASLRIDSATSRKFIMVFVVFASSTTSVESKFQFIHDHLSDLPLSHTMRPSAIVPVDELPRTVGGKLDRKATAALHIPSNLVTKPPLLQLSREEEVIRRLWIAAIPQELAKFHAIELNSDFFSVGGNSMQLMDLQHKIDSELEIKIPLIDLFKNSTLAGMARLVAPGDAQSGMLNRVEAIDWTIETALSSDHPQLPDKTTFDRRCAESPPRTIVLTGATGFLGQALFKALLRQEHIQHIICIANRGLIDADEAVKVAFSRRYGVEATDKKVEWLAGDLQNPLLGLSSEDANRIFHEQADAVIHNGADVSHLKTYSSLRAANVTSTKELARLCVPRQISFHYVSTAGVAMYTDPNTYDEIGPVSVKNTPPPQHDIYGYVASKWASEVFLEKLATASILDEVYIHRPSSIIRPEGQMSPGDESSDVIQNMLLYSTLLKAVPDILSQWKGYIDLVHPERVVSNVLNSMMKGCRVEQQLTGPVFLHDSGDIEIKICEIGRYLEKESGSILEVVPFEDWIERAVETGLHLAMAAVFRGLGQESQLNFPRLLRG

SEQ ID NO: 33233 - DNA, 339 bp, Muscodor strobelii
  misc_feature: SGI EST ID NO. CUFF.78600.0
  misc_feature: Variant of the nucleotide sequence at SEQ ID NO 33231
cgcagatcagccttacgacattacttttaacgtaatcaacaatgcgcaaggggagaccagaatcatgctcgcagtcaaggagtccttctatactaatgaggatacaatactgcttgcgcacggatacgaggacattttgaaagagttcacgacgacccccgaggcgccgattggagacgagttcaaatttcgcgacgcggctttgcagaatgccttgacaataggccgaggccctcagaacatttctacttggccgcagaccctagttcatcgattggatgatttggtatcacttggcgcagacaggatcgcggtgacagacgacaaccaggggtcttt

SEQ ID NO: 33234 - DNA, 7209 bp, Muscodor strobelii
  misc_feature: SGI cDNA ID NO. 571461
  misc_feature: Encodes the peptide sequence at SEQ ID NO 33235
atgggcgctactaagtcaccacaaatgccaagtgagcctatagccatcgtagggagtggctgcagattccccggcggtgcgacttcaccttcaaagctatgggatctactccgtcaacctgtagacgtgtcaagcgaaatctcatccagccgtttcagtgccaacggcttttaccatccgagtaatagctcacccggccattgcaacgtaaaacgctcctatcttctccgcgaaaatgttgcccacttcgatgcacagtttttcaatcttcaagctgaagaggcctctgcgatggatccacagcaacgaattcttctcgagacggtttacgagggtctagagactgccggactgaccttagagggcctgaaaggctcggatacaggagtatatgttggaatgatgtatggcgattatgaatcgctacagtatcgtgatttacagaacatcccgacttatcacgggcttggaaccgctcgtagcataacttccaacagaatatcatacttcttcgactggcatggtccatcgctcacgctagataccgcctgttcctcgagcctggtggccttgcaccaaggcgtacaggccttgaggtccgctgaggttggagtggcagtggttgccggaacaaacctattgctaggcccagaaccgtacatttacgagagtaaactccaaatgctctccccggatggacaatctcgtatgtgggacgaaagtgcgaatgggtacgctcgcggcgatggtgtggcgtgtctcattttgaagacgttaagcaaagcaattgccgatcatgaccacattgaagcaattattcgggagacgggcgtcaaccaggatggtcgcagcagaggcatcactatgcctacagtgaatgcccaagttgctttgatccgcgatacatattctcgagcaggactagatccgacattgccttcacaccgctgtcaatacttcgaggcacatggtacagttagttcacaccctttttcttaccctcagacgcgtgctttaatatatgccatcagggaacgccagctggtgacccagtcgaggcacaagccgttcatacagcattctttggcgatcaacccgataaacacagaactcagctcaatctcacaacctgatagtgcgtcgactgatttggacttcaagagcataaagactatcatcggtcacaccgaatctacttctggcatcgcaggtattatcaaagtagtacaagcgatgaagaataagtctatcccacctaacctactattcaataacttgaacccgagggtagccccctggtatcaccggctccagatacctcagcagctcacaccctggccagagactgtagacggccaacggcgccgtgcgagtgtgaatagttttggcttcgggggaacaaatgcgcatgtaatcctcgaggacttcgagagccttgataccagtcaaaaccatccagtcttattcaccccattcgtcttttctgctcagtctaaacaatcgcttctagcaagtctaatggcttatgccgcccatattgaacataacccagacgtcagtcctgtcgacttggcctggacactgcgaactcgtcggtcgcgccttccattacgggtttcgtttcctgcgtcgcccattgaggaactgcatcgcaatatttctgcattcacgaaagactttaacctgaattcgaaatcggcgtctataactagtcgtaaagcccgcctgttgggcgtgtttactggccagggagcacaatgggcccgaatgggggcagccctcatcgagcgaacgaaactcgcaggcgatatactatcaaagcttgataattctttagctcaattgccagaaggcgaacgcccgcagtggagcttacgggcagagatccttgccgaagcggtgtcaagcaggataaacaaggccgccatctcccagccgttgtgcacggcgatccaaatcgtcctagtcaaacttctcagactggcaggcatcgagttttctgtgactattggccattcttctggtgaaatcgcatgtgcatatgccgccggctgcctctcatcatctgatgcaatcaggattgcgtactatcgcggtcttcactctcgacttgcttgtgggcctgacggactctgtggcgcgatgttggcggttggcaccaccctcgctgacgcggaggagctgtgtaacgatgaggtattcaaaggtcgcgttcaagttgctgcctgtaactccccttcgagcgtaactttgtcaggcgatgaagacgctatagaagagatgatggagatactgcaagacgaacagaaattcgcccgacgattaaaggtagatactgcatatcactcacatcatatggtgccttgtttccaagcgtacctcgattcgatgaaagccgtgtctgtcagcacagctccgacgtctgactcgtcttgcacctggatttcaagcgtgcatggcgatctcacccctgagatgatgcgtaccataggctcacaatactgggtcgataacctgttatcgccggttttgttcaagcaagctgtcgagcgtgccgcatcaactggtgactttgacgccatcatcgaagttggcccacatccagcactcaaaggccccgttcgtgaaacattggaggatgctggagcaattattccaccgtatactagccttctccaacggaatacagacgctgttgggagcatctctgcagctcttgggtacctttgggcagaagttgacaatcttactgtacagtttgataaattcgaagctgcgttagcggggccattatcctatcacttcatctcagacctgcccttgtatcagtggaatcacaaccaagaatactggcacgagtccagtacttcacgaaagctcagagaaagacagggtccatctcatcccttacttggcgacctactcccccaaagctcgacttctcgcaaaatgtggaaaaacatcttgcgaactcaggatctagattggatccatggtcatcagatccaaggtcaaagtgtattccccgcggcaggctatgcgatcacagccattgaatcagctgccttattgctccctggacagtcaattcgactgattgaggttgaagacctgacgattcaccaggcgatggcgcttgacaacgatgacgtaggcattgaagtattcttcacacttgaggggatcaagaaggatatacatgggggcactactgcgttcttcacgtacgaatcacaaagcaataatcaaccgagtcctcttttgatggctagtggtagggtggcggtgattgtgggcgacgagagtcagcatctactaccagcgacgcagggcagcgaacatgacatgattgacataccaactgatgttttctacaatactttacaggaagttggttatggatactcaggccctttccgcgcattgggtgggctaaagagaaaactggggaaagcgactggactcatctcaatgactccaactggtggtgtcctatcagtccatcccggagtattggacgcggccattcactcaatattcttggctcatagctgcccgcgtgatggacagctttcatcgcttcacttgccaactcaaatccgtagaatcagggtgaatccatccctctgcggaaagtcgtggcaagctgtagatcaggtgccatttgtctcaagcataccggacgtgtttgttgatgatcgttctaccggtttcattggagatgtcgagatacaaaacatggcatcgaatgcgtctgcgatacaattggaaggtctcagggtcgtgcctttcactgaagctaccaagtccgaggataaatcagtattctacgcaactcgatggattgaagctcagccaaatgcagatatccccgagccattcgaggcaacatcacaagacatagaactagcaacaatactcgaacgtggccattatttctatttgcgccaactagaagagcaaatcccacctgatcatcccagtcgacgagacgccctcaatgcgaactacttaagatgggcatctcaagttaatcatcttgtgactcgaggcagacatccatatgccaaaaagggatggtgtcaagacactttagacgacatccagtccctgacaaagccattctcatcccggcctgagattagagccatgcatatcgttggagagcaaatgcccctcgctatccgaggtgagacgaccatgcttgagcatctcatgccgaccggcttgctctcggagtactatgaaaaagcgatcggcctcactcaggttacagttgtagccgatgtcgttgaccagatagttcaaaggtaccctcagtctaagattctcgaagtcggtgcggggacaggcggtgcaacacgcgagatcttgaagaaagttgggcatatcttttcttcgtacaccttcaccgacgtctccgccgggttcttcgaggatgcacaagtcgagttctctcctttcagagagcatatgtcatttagagttcttgatctcgagcaagatgtgacgtcgcagggctttgagaaacatgcgtacgatgtagtggtcgcctcgctagtcctccacacaagcaaaagtcttgagcaagcttgtcgccgcgtacggtcgctgttgaaaccaggtggctatttggttctctatgaagtcactaatgtcgacttgatacgcctgacagccctcttcggctgcctaccgggatggtggtcaggggtggatgagggccggactatgactccagcagtcaatgagtcgaagtgggatgacatattacggagtacaggattctcgggagtggacacaatgactcccgtgcagaactctttggtgttctgtaactctgttcttgtctctcaggcagttgatgacaaaatcgagttccttcgcgaaccattgatgtcacagccctctcttaaccaagcagagcctgtcatcaaacagcttttcatcgttggcggctcgagtctcaaggtctctcgcctagctacagatgttcagaaatcgatattcatgttctgtgatcagatcacacgcgccaagtctctgagcgatctggactatgaccaagtgagccgagatgcagtggtactagtacttcaagacctcgaggagccgatttttgaaaacgtaaatgcttccaaactcgaatgcctaaagaagctgttcggctcggagaaatcaattgtttgggttagccagaaccgtctcgtcgattctccctattcgaatatggtcaatgggttcgcacgttcacaaatctgggagactcccgaactacgctaccagtttctagattttcaagacgctgctaggttcaaccccggagatattgctgaaacggtgttgagatttcaagctctagattctgttcatgatgctcgctacaatacgattctgtggtctgtcgagacagagatagtcatcgatggtcaaggaagacaactcatcccgagactccgacctattgaagacgcaaacaatcggtacaattcagccgttcgtgctattactcaagaggtgcatccccatgctaaaccacttgtggtctctaatagcaatgggaactacatacttcatgaggcaccgtcaccaaatttcacaaatttaactgcaggcgtagacctcacggtgccccttactgtcactcattccagcttatcattaatcaatagtgacggggagtgcatctgtgtcctgttcggtaaatgcgacaagacacagcaacagtacattgggacggcgcgacaacccacgtctcggatcgagctgctccggaaagacctagttgaccttccagtacctatcgattctgacttcgtggcgccattcttacgtttagttgtcagtcacctactccttggctctttcatgggcgggctgagagccggcgaaacgctcatatgtcataaccccccgcaatcattagcaactcttattgcctctcgaacgaagcagctagatgtcaatacagtctttactactacctcgaaacaagttactacggcgcaaggctatacttatctggatccatttatgcgtcaatcagaaataatgtctttgctcccgagtaatgcggctcgagtcatcgacttcagcggcaacgacggtacgattgcgacacacgcgaccagttcccattggccaacaactgccaatatcgtgaagctcagcgcgctactcgccgacaatgattgttcgtcgaacctgtgttgccgtatcactcgcgacgctttagagaaggcagtcaaggcggcgatagagcatctcgatcaatctaaaccagtccttccaagtttcgattcattcagtgtcgacagattgcctcacagcgagggtatgaatgacccctttacgatccttaattggaatgttccgtctgtaattctttctgcaaagccggtgagaccaaatttgaaggcagataagacttattggcttgtcgggctctcgagggatatggggctctcgctcgtcaattacttgatcgcaaacggagctagatattttgctattactagcaggagtccttccgtcagttcagagtggcttgagcatgcgaccaggcgaggcgcaactattcgagttctgaaatgtgacgtgactaactacgactctctatgcaccacatatgaggaaatcagcactactcttcctccaatcgccggagtggcacagggtgccatggtgctcagagatgtcttgacacgggatatgaagatagaagagctcactgatgtgcttggtcccaaagtcgagggcagtctcaatctcgatcgtttcttctacgaaaaaccgctcgactttcttgtcttcttctcatcatcagctggacttacgggaaatgcgggccaggctaactacgcagcggccaacttcttcatgatgagcctggcacagcagcgacagcgtcgtggcgtcgcagggtccgttgtcgacttggggcctgtgttaggcattggatatattacgcgtgaatggggcaatgctctctcgcagccgctggctgaacgtggtctcatgggtttgtcagagcgagatgtccactgcgctttcgcagaagccatcaacgcatctcatccaaattccgaagctgagaatatacatattacaacaggattgattccattgccggcatccgcacctgatcgtcctcttgtaggttcattcttggtacaattttcctcatttcgccttccttacagtcaatga
